United States Patent Application Publication US 2009/0018031 A1 - sequence listing, part 14

SEQ ID NO: 7129 - DNA, 6000 bp, Homo sapiens
tgtgcaaagccgggactgcctgtgtggctccttgagtgcgcggaggccaaagctgagatgacttgcctgggatgccacacgtgttgggcagcagaccgagcctcccacccctccctcttgccctccaggtaccacggcccacgtgggcatcatgctgtatggggtggacagccggagcggccaccggcacctggacggcgacagagccttccaccgcaacagtctggacatcttccagatcgccaccccgcacagcctgggtagcgtgtggaagatccgagtgtggcacgacaacaaaggtctgtatggaccctgccaagctctgcccctctgcccctgcattggggcgccctgcgaacctgacctccctcccgcgcctctgcagggctcagccctgcccggttcctgcagcacatcatcgtcagggacctgcagacggcacgcagcaccttcttcctggtcaatgactggctttcggtggagacggaggccaacgggggcctggtggagaaggaggtgctggccgcgagtaaggcctcgttccgtgttcccactccgtgggaggttgggcagggtggtcctgccccgtggcctcctgcagtgcggccctccctgccttctaggtcacgcagccctgttgcgcttccggcgcctgctggtggctgagctgcagcgtggcttctttgacaagcacatctggctctccatatgggaccggccgcctcgtagctatttcactcacatccagagggccacctgctgcgttctcctcatctgtctcttcctgggcgccaacgccgtgtggtacggggctgttggagactctgcctacaggtgggtgccgtaggggtcgggacagcctcttcctgcccagcccttcctgcccctcagcctcacctgtgtggcctcctctcctccacacagcacggggcgtgtgtccaggctgaacccgctgagcgtcgacacagtcgctgttggcctggtgtccagcgtggttgtctatcccgtctacctggccatcctctttctcttccggatgtcccggagcaaggtgggctggggctggggacccgggagtactgggaatggagcctgggcctcggcaccatgcccagggccgccactttccagtgctgcagccagagggaaaggcgtccaccaaaggctgctcgggaagggtcaacacacttgagcagccttagctagactgaccagggagaaagagagaagactcagaagccagaatcgtgaaagaacgagggcacttcgctaagcagacgccacggacaactgcacagcagcacgccagataactcagaagaagcaagcacgcggctgtgcacgcttccgaaatgcactccagaagaaaatctcagtacatctatagcaagtgaagaggccgagttagtcccttagaaacctcccagtggccgggccgggtgtggtggctcacgcctgtaatcccaacacttcaggaggccgaggtgggcggatctgagtccaggagtttgagaccagcctgggcaacatagcaagaccccatctatataaaacattaaaaagggccaggcacggtggctcacgcctgtaatcccaacactttgggaggccgaggcgggcagatcagttgaggtcaggagttcgagaccagcctggccaacacaatgaaaccccatctctactacaaatacaaaaacagctgggcatggtggcgggcgcctgtagtcccagctactcgagaggctgaggcaggagaatggcatgaacccaggaggcggagcttgcagtgagccgagattgcgccactgcactccatcctgggcaacggagcaagactccgtctccaaaaaaaaaaaaaaaaaaaatcccacaaagaaaagcccaggctcagagccttcacgatagaatttttctaagcagttaaggaagaattaacaccaatccttcacagactctttccaagaatacagcaggtgggaactcttcccattcatacggaaacgggaggccgcaccccttaggaatgcacacgtggggtcctcaagaggttacatgcaaactaaccccagcagcacacagagaaggcgcataagccgcgaccaggaggggttgctcccgagtccgtggcaggaaccagaggccacatgtggctgctcgtatttaagttaattaaaatggaacgatggccgggtgtggtggctcacacctgtactcccagcactttgggaggcggaggcgggcagatcacttgaggtcaggagttccaagaccagcctggccaacacagtgaaaccccgtctctactaaaaatacaaaaaattagctgggcatcgtggcaggcacctgtaatcccagctactaaagaggctgagccaggacggacaatcgcctgaacgcgggaggtggaggttgcagtgagctgagattgcgccagtgcactcctgcctgggtgacagagcgagactccatctaaaaaaaaaaaaaatgaaatttaaaactctgttccttagctgcaccagtctgctgtcaagtgttcagtggcacatgtcgcgaggggctgccatcacggacggtgcagatgtcccatatatctagcattctagaacattctgtcagatggcaccgggctctgtcctgtctgctgaggaggtggcttctcatccctgtcctgagcaggtctgagctgctgcccgctgaccactgcccttgtcctgcaggtggctgggagcccgagccccacacctgccgggcagcaggtgctggacgtcgacagctgcctggactcatccgtgctggacagctccttcctcacgttctgaggcctccacgctgaggtgagggctctactgggggtcctgccgccttggcgcagcttggactcaagaccctgtgcacctctcagcaggcctttgctggacagatgaagagtgacttgtttctggatgattctaagaggtgggttccctagagaaacctcgagccctggtgcaggtcactgtgtctggagtgccgggggtgtgcgggctgcgtgtccttgctgggtgtctgtggctccatgtggtcacaccacctgggagcaggtttgctcggaagcccagggtgtccgtgcgtgactggacgggggtgggctgtgtgtgtgacacatcccctggtaccttgctgacccgcgccacctgcagtctggtgtgctggccctccagcgagggaacgcccagttagccggacctgctcagtgacccgtccattgtgggtagcaatctgcggcacgacccccacttactgggtctctccttttacaaccaacacaaccgaaatctagggcttcttctttttttttttttttttttgagacagagtctcattccattctgtcacccaggctggagtgcaatggtacgatctcggctcactgcaacctccgcctcccaggttcaagggattgtcctgcctcagcctcctgagtagctgggattacaggcgtgtgccaccatgcctggctaatttttgtatttttggtagagacggggtttcagcatgttggtgaggctggtctcgaactcctaacctcgtgatccgcctgcctcagcctcccaaagtgctgggattacagacgtgagccaccatgcccagccaaatctagggctggaacatggctgcagcatataaatagaattgaattccatagttttgttaaccctgttttttgtttgtttgtagttgttgctgtttttgagacagagtctcgctctgtcgcctaggctggagtgcagtggtgcaatctcggctcactgcagactctgcctcccgggttcaaactgttctcctgcctcagcctcccaagtaggtgggactacaggcgcccaccaccacacccggctaatttttgtattttattagagacagggtttcaccatattggccaggctggtctggaactcctgaccttgtgatccgcccacctcggcctcccaaagtgctgggattacaggcgtgagccaccacccccagcccctgttttgtttttgttttgcttgtttcttagggttgtttttctatttatggtaaaggcattggctttccatttgtagcatcaatagaatatttcctgtttacaataaccttatgtcatagtaaatggtaaagggatttaaagcagtggttttcagctgccagaggcctgagtttgggcacactctgtgtgatcgggcagaaggcctgtgggaagtttagctgaggacagggccaggaaaggtgatggacagtgggggtctgtcctggtcaccaggcccctgggtcctgcccacctgcttggagctccccacccatcacacatgatgctgccaagccctctgggtattgtgggcaaataccttaggagagaagctgatgagctttgtttcttgaaatgcacagattccttggacatccctgagaggccagtcatgaaagtcagcttggttttctccccctcatttgggttcagaatttaaagtccacacacacgggcagtaagataatatagataaggacatcatcactcggtttcggatgttaaaatgtctaggtgggttaggggtgatttgagatcacgcaaccttgtgccacaaagaggaattcccaggccagagggagacattttattgccatgttatgatctcatcattgagttgaaaggcaatcttgtttcattttggattctttcttatgtttatgtcttataagggcactttgaatttccaagcaaataataattttgaattagcttttaatcattgacttctagcacagttttatgatcagaaacatgctgtgtgatttgattgctctcaaatatattgagatttgctggaacaaaataagtcaggttaatttttgtaaatgtaccatgcatgcttaaaatgaatgtatgtacatttgttcctgagatacaggttgatggacggatggctacatggatgtgatggagatggtttactatcgggaccttccgcatcctgctgatgttttgttgcttaggatatgaatggctgagcggaggctgtaaaacctggcactctgcttgggtatgaggttcttcctgccatcctgccatcatttgttttttatgttttgtcgccaaaagtgaccttgaggaaccctgggagctcaggaaggaaggagcgcccagaagcagggacagggagctggttggggaggaccagaaatcaggtttgtgaaggttccagagaggacctggccttgggaggagcgtgggggactgagatgggggaggggtcattgggatgatgcgggcgctacttggaatgtccattgtgaggcaccaccggggtcatcagggattggtggagagagagtctaaagccccagggttgctaagggagggcccagaccgaagaaggtttggtggaaagcagaacctttgtctccctctaattgctcctaagcctcacgctcccttgccccgcgtgtcctgttgcttccctgatcttctccgtgacctgtagctaaaccttccaccagcgcttgagaacttaatttgaaccggatcctttcccagacccctttcttcttctcctcctcctcctccccaacagcccccttctcctcctttcccttcccttacttccccccttcccctccccttcccctccccctcccctccccctccccaactcagatccggcccggtccccgtccccttccctcccccctgccctaagccacctccacctctgtcctggccacctccgggtgccctgaaaggaccaggacatgcgggtgcggtggctgctcttttggctcctcttttggctcctgctgggatttatcagccatcagtccacctgtgtgagtagatgggtgctgtggctgctcttttggctcctgctgggatttatcagccatcagtccacctgtgtgagtagacgctggacccgcggggtttcttcctttttactgggctgtgtcacgcggcatgaaattacacagctcaggcctgta

SEQ ID NO: 7130 - DNA, 6000 bp, Homo sapiens
actgcaacctctgcctcctaggtccaagcaattctcctgcctcagcctcctgagtagctgggattacaggtgctcaccaccccaactaatttttgtatttttatttatttatttatttttatttttttcaccaggctggagtgcagtggcatgatcttggctcagtgcaacctctgcctcccgggttcaagcgcttctcctgcctcagcctcctgagtggctgggactagacgcacatgccaccacaatccagctaatttttgtatttttagtagagatggggtttcagcatgttggccaggatagtctcaatctcttggccacatgatacgcccatctgagcctcccaaagtgctgggattacaggcgtgagccaccgtgcccagccaaatttttgtatttttagtagagacaggatttcaccatattggccaggctggtctcgaactcctgacctcaagtgatccgcctgcctcagcctcccaaagtgctgggattacaggcatgagccaccgtgcccagctgaaccttactttaaaaaatgttttaatagacatttttttagagcagttttaggagcacagcaaaattgagccaaaggtacagcgatttttcacataccccctgcctgtacacacgcctagcctctccgattaccaacatcccccaccagagtggtacatttcttacaactgatgagcccatttgatgcatcatgatcacccagtctgtagtttacattagggtttactcttggtgttgtacattctgtgggttcaagcaaatttgtaatgccgtgtatctaaaagcctcatctttttaataattaaagttgaccattgtcttcactgaacttacacagaaacaaaaccatgcaatataattctgtattccttgccaagttacaatgtcattgtggaacaaaatgcaatgaacatgaaaataagactttctcagcttctttgtaaatggaactgtttaatattattttgttaatgggtagaataaaatgtaatctgatggtgaaaacattcttcttgacattgtggaaaatacctccctatattgcatgtgatggaaaagcaattcgactgggaaaagtttactgaattaagcttactgaattctggcctattgaccttataataagcatgttagatgagacgttataagggctcaagtaatacctgcatccttcaggattattttgattgcaagtgatgtaaaacctcagtgaaattgagcaaaaaataaaattttctgggtcatgcaacaaaacattccagggttagggttagctttaggcacagcttgatccagaagctgtgtcacaatgtcacttgagtacaggctctctctccatcactacatggctctcttctgtattgtcttcctccccagacaaattcttcccttgtggacaataaacaaacaggccgggcatggtggctcatgcctgtaatcccagcactttgagaggccaaggagggcagatcacttgaagtcaggagttccagaccagcctggccaatatggtgaaaccccgtctctactaaaaatacaaaaattagctgggtgtggtggcatacacctgtaatccaagcaactagggagcctgaggcacaagaatcacttgaacctgagaggcaggggttacaataagccaagattgtgccactgcactccagcctgggcaacagagtgtaactctgtctcaaaataaacaaacaaacaaacaaacaaacaaaaatttgaaaggaatgataatgcctacaaaaacatcttcacagttctaatttattccagtcataaagataagtgtctgagcagaacatcttaagagtgcattttcttgatcctattgggttctaaaccagttcctgaaccagtccctgtggccagggtactgcactactctgctctgattggcgaggcctgagtcacatgccaccaatcaaaacacagggactgagatttggggcaggaacgctccacaggggagtccaagtgttaaaagacgtcccattagagagcaaatgtctggtaatacggtatagtgcgttgaatacacatcccatatactcaatgagttcatctgaagactaagaatattcaaaagcacaattcaaccagacgagagtacaaaggcctgtgtttgtttgatatcatcatgcagccaaaaaaggtagagttatacacttggtatgtatagaagacatgcaaaatctgtgttacaatacagggttccatcaaatacttcctttgaaaaacaggattctgttaaataatgtttgggacccagtaggactaaatgagggaaggtaaggactctccaccaccacccagctcccttttaagtaggaaagagcttgaaaatccccacctctgagaaaggggccttgcgggggctctggggcacatctcagaacaattctcaaggcaaaggctcttgaaagattctgagctcagataaagtgatgtttaaggaagctcttctggcaaggcatgagccaatgcacccagttctcttaaaaacaagaaaacaaaaaacaaaccaaaaaaaccaaataatatattgtttatgcacagatacatttgtgataaaactataaaacattggaatgataaatatgaaatgtcagattgtggttatctctggggataggaaggtatatgggaagaccatctggaaaactgcaaggttttttaagatgaggtgtcactctgttgcacaggctggagagcagtggcacgaccagggctcactgcagccttgaccacctgggctcaggtgatcctcccacctcagcctccccagtagctgggactacagctgcacactaccatgcccagccaatttttttgtattttttgtagagacagggtttcaccatttgcccaggctggtcttgaactctgaggctcaagctaccctcttgcctcagcctcccaaagtgctgagattacaggcgtgaaccactgtgcctggccactttttccatttaacattatgtttccaagattcatccatggtgtatctgtggctgaagcacactcatttttcactgctgtgtaatgctccattgcataatatcccacaatttatttatcctttttttttttttttggttaacagatatttggcttgtttcaagttttttgctaatatgaactgtgctgctatgaagattcttacttataactcctggtgcatatgtgtaagagtttctctagggcatatatctaggagttgaattactgggttttacaatgtagaaatattcagctttaaaaggcaagtgtccggaattttcatttggcaatattgcacaagcatttgtctatgtcattaaaagtgctttttttttttttttttacataaagaaaaagcaaagtaaaagtataaaacattattcagatgcaagatactattatctttgtggatattctctgaccatagcggggtctggttacatatataatagcttcagggcaaaggccacattcatacatattgttaatcagcaccaattatttatagagaactcacaatatgctggtgtgaggtattaaaaataaacaaagctggacactagttgctatagacttcttaatgtttgtgtcctcccccttcaaatttatatgttgaaactctgctctccattgggatggtattaagaggggaggactttggtaggtgattgggtcatgagagtgaagccctcatgaatgggattagagccctaataaaagaaatattggagagctcccctcacccttctgtgtgtggttacagggagaagagtgctatattagtccgttctcatgctgctgtgaagaaatacctgaaaccaggtcatttataaagaaacgaggtttaattgactcacagttccgcatggctggggaggcctcaggaaacttataattatggtggaaggcacatgttcacagggcagcaggacagggaatgagtgcaagcaggggaaatgccagacgcttataaaaccaccagatctcatgagacttactatcgtgagaacagcatgccagaaactgccccccatgatctggttacctccacctggtctcacccttgatatgtggagattatggggattataattcaaggtgagatttgggtggggacacagagccaaaccatatcaagtgctatctatgaattaggaggcaggccctcagcagacactgaatctgcgggtgctttaatctaaggcttcccagcctctagaactgtgagaaaaaaatttctgttgtgtataagccatccagtctatggatgagtctgaccccacttgtccctactcaccatcttccagccgcacaccccttctttctagtctccaaacactaagctggcttcccctggagacttcactcttgttccctctgcctggaattctttgaagccagaactttgcaagccccatcctttctcatccttctttattcagctcaagatgtcgccatctcagaaaggcctcccttcaacatccaagcattctctctcccatcaccctgttttttcttcatagctcttcttgcaaagtgcagttatttattacatttttgtttcccctgccaacctgggaactcaatgagggcagcgatcttgtctgacgtggtcgccacggtgttgccagttcctagactaaggcctggcccttggatggcgctcaagaaggagtaagaaattcctttaacttagggaattctggaatcgctttctcccggcagagccgactctaaccaagtgggaaaggcgaggtccgtggctgcctgtggcccaggggtgacggtttggcccaaggccccacctccgccccgcccccggccccgcccctgttcttgtcctcccccacgggtctccataaagttcatttggcgtcgcaccgcgcgagggcttctgggagcggccagccttggccaatcaggaagcgggggagagcggcgcgagaagcggcggccgcgtcctcaagccggcacctgagcggcggagacggctgtagcacaaggtaagggtgtgtctggtcgcgtccttgcgaccctgggcttgtccttgaacccaggaccccgtgactgggtggagcgccgtccccacgctcggaaccccgccgctcatacttcccgttctcctcatggcagccgggcacgcctgacgccggcgacacaacgccttgtcgagccgcccccgaggcttggagtcgggctgcatccctgggggtgcctttcattcgtccactttctgaatgcagaacctaggcctcccgactcccccttccccactgtggtgccctcgcgccacgcccctgccctcacctccacctcgtgccccgcgagcccaccctgcctaagcctgcgccacaacgccccgcctgcttaccttcctgaccgtgccctgcctgcttgcctacccctcgtggacacaccctgtagggaggcgttgctctgcgagggaaggggtctttggggcgaggggaacttatcccaacccttggcttaccttttgtacatccaggaggatgctggtgattggaacccaggggtggcccacccttctctgtgcttactccatcccgttccctgcagaggcgatgcccaagttcactgggtttcttttgaaaaaattatggggccgaccccatgggtccttggtgaaagtatgaaagacacgttgacagagcctctggtctggatttgcccttctgccagacgtgggaaggaggttttatttatttaatttttattttgaccgagttgtctttcagcaaaagcgagggtcacctttttgtattctttccagggtatgtgggagggtatcctcggtcatcctagcttttcttctttatttttttttctttaaattctcctttgtgcatttgtgtttgcaatatttttattttcattgatggtgatttcatagcattaaatacatacatatcagaggctaacagattccgtatttatatctccatcgca

SEQ ID NO: 7131 - DNA, 6000 bp, Homo sapiens
aaaatgagtcgggcatggtggcagagacctgtaatctcagctactcgggaggctgagggaggagaatggcttgagcccaggagctggaggttgcagtgagccgagattgcaccactgcactccagcctgggcgactgagtggagcggaactctgtctccaaaaaaaaaaaaaaaagagtttttttttagatcatcagctattgttagtgttagtgtatgttatgtgtggctcaagacaactttgtttcttttaatataggcagggaagtgaaaagattggatatccctgctttataccaagaaagacaacaccccacatttgcaatgcctaaaaacactaccagccatctgaaaaacatgagacttctaacttctgttcttttttgtagcagtggaatcccacggtgatatctgagggatgtggttaccttttggaggaggttgacggtttctaaggatgattctttctgagtgaaatattgtcggtgtcattgaccttttcattatttcaactattattattccaggttatcaatagtctggctgtctatcgtcatcgtgagactgactttggtgtaggagttcgagaccaccctggccaacatggcaaaaccccatctccacaaaaattggataatttgataattatcattattgggtttctgagacgttacacatttaacgttctcttctgcacaagttgcctttgtgtgagtatactaactttctgtagaggtatacttgtaatcacaaataagaataaattatataaaacaattcacgtttctggacttcattatgaatatgtggttttacccaaaaaatcagggaaatgatttattagcataagaattatgaaaatgtctgccatttacattatgaaaattaaataggtcggtgtttgtttaatagaatgtcaacagagcttttggtcaaaaataagtttttttagcctttgtgctatttatcacaaatggagtatgaggtttcgtcacttaaataggaaattctttctaaactcttctgctttatagttctatcgtatgggtggaaggaaagcttccaatctcctctctgaagattcactgcagaaatgagctgacaacagacagcttaacaggaaaagaaaaacatagaacaggcataaacatgggaaccagctgaaaaatgagactgctagaagggccggatggttgatgcttaaagagcaccctcttctgaggggagagggagatagatggagatgtaggccatttagaggggcagcaaatgatttttaggggaaatgaaagaggccaaggaacaaacaattggcctgagacaaagttcctctgaggtcatagggacgaggtgacaaactgccggaaggtgaagggcagaactgcactgcgtctcatgatgcagagaaagccccagagaatctcttagaactgccctccaagagaatcaatgaaaagtgtgtctgggcagggtaattttgaatgacatcattcaaagtgcatgttcccacttgcaactggagagagatcagtatgtcaaaagtctgtacttggtaagaatttggctgctaagttgtgccataatttgtcttttgagccttttttcctttgggtaagttgagctctacattttgtcttgccattcatgacagtaaaaatgtggttttctgggggctgaacctcctgaacaatgatccaagataaaagtactaataccacaatgcttttttatattcaagggaagaggaagtatgtttcagttttaccacctagataattacacgtcatttggcactgcctttcaagatatgtagaaaacagaaaatatatgagttatgaagatatctaggcacatttaacattctctatgccacttagtcctgaacagagaattttcggtataaattggaggaagctttttttttttttttttcttttctcacccccgagacgagtctccctctgttgcccaggctggagtataatggtgtgatctcggctcactgcaacctccacctcctggcttcaagcgattcccctgcctcagcctctcaagtagctgggattacaggtgcccaccaccatgcccagcaaatttttgtatttttagtagagtcggggttttaccatgttggccaggctagtctcaaaacccgacctcaaatgatccacccgcctcagcctcccaaagtgctgggattacaagcgtgagccaccacgtgagccaggggaagtttttaaatttaccactttttaacagttccatttaggaaagttcagttgagctgctggacttggacaacttcgcacctctcatctttgtccttgtcatctagtcatctataccattacctcctaagcagggacatcatgggtgccatgaagcattcatgcgtgatggcatttctttgcttgtcatttcttcatgtgtttgacatttctcctagctccaaactgggccagctacctttcctatgaaatctagtagtagctgtgggattgacgtggttgctcttttcatctttttagattacccattgcttctctcgaaatcctagtacatgattttttttttttatcctatgtgcagaaatcaggaaaaaacaaattctacaaagaatttgaaagatattatttcaggccaggtgtggtggctcatgcctgtaatcccagcactttgggaggctgaggcaggtggatgacttgaggtcaggagttcaagaccagatgggccaacatggtgaaaccccatctctactaaaaagacaaaaattagccaggcatggtagcaggcacctgtaatcccagctacttgggaggccgaggcacaagaatcgcttgaatctgggaggtggaggttgccgtgagccaaggtagtgccactgcacttcagcatggttgagagtgacactccatctcaagaaaaaagtcatttcaatgactacctcaggacattcataggtatctgacccacatctgagatgggatttgcattgcattttcgctatgatgagaacaaatatttaatatcttagaagattaaaagcatactgtgataatatggaaatcttggagggaattcagtcattagtgagaatgttttgcgttaagttcaaaccagcctcaatgaagctgatgtgagggaagggaaagtgaactctgagtagagcagggacagaaggaagatgctccagtgcagatcaggaaggagcagggggtgaaatgttacaaattctagaactcagagagctgaaggtaattacttccttttcaagttgtgaaacatgttaacctgtggtaaaatacttataagatgataattaccatctaaccgtgttgaagtgtacagttcagttgtgtgaagtatattcatgtcattttttttttttttttttttgagacggagtctcactctgtcaccaggctggagtgcagtggtgggatcttggctcactgcaacctctgcctcctgggttcaagcagttctcctgcctcagcctcccgagtagctgggactacaggcgtgcatcaccatgctcagctaatttttgtatttttagtagagacggggtttcaccatgttgcccaggatggtctccatctcttgaccttgtgattcacccgcctcagcctcccaaagtgctgggattacaggcgtgagctaccgcacctgggctatttttttttttttttttttttttttgagacagagtttcaattttgttgcccaggtttggagtgcaatggcacaatctcagctcaccacaaccttttcttgctgggttcaagtgattctcctgcctcagcctcccgactagctgggactacaggcatgcaccaccatgcctggctaattttgtatttttagcagagacagcgtttctccatgttggtgaggctggtctcaaactcccgacctcaggtgatccgcctgcctcggcctcccaaagtgctgggattacaggagtgagccaccgtgccagcctcatgtcattcttgtgtgtgtgtgtgtgtgtgtgtgtgtgtgtgtgtgtgtgtgtgagacagagtctcattctgtcgctcaggctggagtacagtggtgtgatctcggctcactgcaacctccgcctcccagcttcaaacggttctctgcctcagcctcccgagtagcttggattacaggcgcccgctgccatgcctggctaatttttgtatttttagtagagacagggtttcaccatcttggccaggctggtcttgaactcctgaccccgtgatccacctgcctcggcctcccaaagtactgggattatttatacgcatgagccaccgtgcccagccgtcattcttatattattatttcctaggtgtctttcctgaagactatcttctggtctcgaaatggacatgatggatccatggatgtacagcagagagcctggaggtccaaccgcagtagacagaaaggtatggctctgttggagtccccatagtgtggaaatgagtttgccctggaaagggaaagaacagcttcttgacctcaggtttctcaccttctcctctcctcactctcaccaagggctgaggtccatttgtatgcacacaaagaaaagagtttcttcctttcgaggaaataaaattggcctgaaagacgtcattactctacggaggcatgtggaaacaaaagttagagctaaaatccgtaagaggaaggtgacaacgaaaatcaaccgtcatgacaaaatcaatggaaagaggaagaccgccagaaaacagtaagatgtgccttgacacaaatactgttgtatgaaccatgtgccaatcaaagtagacaactgtaaagtccttgagaatattttctacaatatttgtggcaaattcagtgggctcaaaattgagtttgtcctttctgcttcattagtttaagctgtataattcctttcccttcctacattcttgtttgtaattttttcgggggaagaggagttgctagtactggcattggttttcctttctctctttttttttttttttcctgagatggagctttgctgttgttgcccaggctgtagtgcaatggcacaatctcagctcactgccttttgacttcaagcaattctcctgcctcagcctcccaagtagctgggattacaggtgcccaccaccacgcccagctaatttttgtatttttactagagatggggtttcaccatgttgtccaggctggtctcgaacttctgacctcaggtaatccacctgcctcagcctcccaaagtgctgggattagaggcgtgagccaccacacccagccttttttttttttttaaattttgagatagaatctcgctctgtcgcccaggctggagtgctatggtgcaatcttggctcactgcaacctctgcctcccagtttgaagcaattctgcctcagcttcctgagtagcttggattacaggtgtgtgccaccacattcggccaatttttttttttttttttttttttgagacagagtctcactctgtcacccaggctagagtgcagtggcatgatcttggctcactgcaacctccgcctcccaggttcaagcgattcttatccctcagcctcttgagtagctgggactacaggcatatgccaccatgcccggataatttttgtattcttagtagaggcggggtttcaccatattggccaagctggtctagaactctggacatcatgatccacacacctcggcctcccaatgtgctgggattacaggcgtgagccaccgtgcctggcccaatttttgtatttttagtagagacaggggttcaccatgttggccaggctagtcttgaactcctgacctcaggtgatctgcctacctcagcctcccagtgtgagccaccgcacccagcctggattgttgaattcaatgcttgggtcacctccagattcattttcacagtctttcatgttttggtcatattacattgtattttgctgccatatgactgatctctttttgttaaatgtga

SEQ ID NO: 7132 - DNA, 6000 bp, Homo sapiens
aatgtaagttgtggttctttgggtggggtcctggctggaccccaggcccccagtatcccttctgccctcccagttggtccgtgtccccttccaggcttgagaccagatcctgggggcagttcactacctgcttggagccccccagtgccggcttggttggggcaggggaggcggtgctgtcagggtggctccagggcctggttgccagtggggggctggcatagacccttcccaccagacctggtccccaacacctgcccctgccccgcagaaacctgagtgggaacccgtttgagtgtgactgtggcctggcgtggctgccgcgatgggcggaggagcagcaggtgcgggtggtgcagcccgaggcagccacgtgtgctgggcctggctccctggctggccagcctctgcttggcatccccttgctggacagtggctgtggtgagtgccggtgggtggggcagctctgtccttcccagccaggtgggacctgggccctgcagacactgggcagggctcaggaaggcctctctggggggggcctccgggccaagggaacagcatgggagcctgtgagtgcggcgggcggatgggggggtgtggggtggagccaggaggagcagaacccggggtccagtggctgcctcttctaggtgaggagtatgtcgcctgcctccctgacaacagctcaggcaccgtggcagcagtgtccttttcagctgcccacgaaggcctgcttcagccagaggcctgcagcgccttctgcttctccaccggccagggcctcgcagccctctcggagcagggctggtgcctgtgtggggcggcccagccctccagtgcctccttcgcctgcctgtccctctgctccggccccctgccgcctcctgcccccacctgtaggagccccaccctcctccagcacgtcttccctgcctccccaggggccgccctggtggggccccacggacccctggcctccggccagctagcagccttccacatcgctgccccgctccctgtcactgccacatgctgggactttggagacggctcccccgaggtggatgccgctgggccggctgcctcgcatcgctatgtgctgcctgggcgctatcacgtgacggccgtgctggccctggggaccggctcagccctgctggggacagacgtgcaggtggaagcggcacctgccgccctgaagctcgtgtgcccgtcctcggtgcagagtgacgagagcctcgacctcagcatccagaaccgcggtggttcaggcctggaggccgcctacagcatcgtggccctgggcgaggagccggcccgaggtgagtgtctgctgcccactccccttcctccccagggccatccagatggggcagagcctggtacccccgtcttgggcccacactgaccgttgacaccctcgttcccaccggtctccagcggtgcacccgctctgcccctcggacacggagatcttctctggcaatgggcactgctaccgcctggtggtggagaaggcggcctggctgcaggcgcaggagcagtgtcgggcctgggccggggccaccctggcaatggtggacagtcccgccgtgcagcgcttcctggtctcccgggtcaccaggtgcctgccccaccccccgaggggccataggttgggagatctctgaagcagtggggcagagcctgcggctggggagtctcaggaggagggaggtgggagctgggccggccctggtgagcaggtggcgccggccggtggggccgttcctgtcagctctgcagatgcagaggtggacgcgagctgggggcagcctccggacactcctgggcacgccatacgggaggtggcctgcacggggatccctgccggtgcccacaggccccgtgggtgggtgctgctgtgagcctgggctggtgggccctgctctccgggctctgagcctcagtttccccatctggaaagggggacagtgacggggctcccagcgggctgctgtgagggtgggaggatggaggagtgccctgagccccctgccatcccacacccgcccccaggagcctagacatgtggatcggcttctcgactgtgcagggggtggaggtgggcccagcgccgcagggcgaggccttcagcctggagagctgccagaactggctgcccggggagccacacccagccacagctgagcactgcgtccggctcgggcccaccgggtggtgtaacaccgacctgtgctcagcgccgcacagctacgtctgcgagctgcggcctggaggtgtgcggggggccaggcaggggcctgagacgctggctgtggttaggggcctgccgagcgcccgcggtggagcctgggctgaggaggaggggctggtgggggggttctcgggcggctcggtccccagtctgttcgtcctggtgtcctgggccctggcccggcgcctcactgtgcacttgccaccccaggcccagtgcaggatgccgagaacctcctcgtgggagcgcccagtggggacctgtagggacccctgatgcctctggcacggcagtacggcctctcagccccgcacgagcccctggaggtagtcggccccccacgttctataacctgccctcctgcctgcccctggaggcctcgcctgccctgcccactgtgggtctcgccaaaaaacttgggggccttaatgttgcttgtgcccagtgaagatggttgggaaaatccagagggcagagaggaaagcgtttactcacattacccccaggccttttctctgagtgtgggtgagttattcctgaaaggcaggtcaggggtcctgccccccatggacagtttccatcggagtcttcctctcgagcgacaggagccaggcctgtgggggtccgatggctcgctctccttccctcccctcttcctgggaagttcgggtggggggagtctgggcttcaggctgggatggggtctgtggagctgaggcggccccctgcccaccaggtcatggtattcccgggcctgcgtctgagccgtgaagccttcctcaccacggccgaatttgggacccaggagctccggcggcccgcccagctgcggctgcaggtgtaccggctcctcagcacagcaggtgggactctggggtggtgggcgccgcaggactcggggtggcctctctgagctctcacgtctgctggtcctgtggccatcagagtggttcccagtcttaggtggacagagcaggggttccagagacaccagctcattccaggtgtcctgggggtggatcgggtggggcctgcctggggaccggcctgggtcagtcagctggccggagacagggacgcagcactgggctgggagtgctgcccgggcggggagacctgtcctcacagcaaggccaggctcgctggtgcaggcagttgggcatctctgacggtggcccatgggcgaatcagggccccaacaccctcccctcctcgcagggaccccggagaacggcagcgagcctgagagcaggtccccggacaacaggacccagctggtccccgcgtgcatgccagggggacgctggtgccctggagccaacatctgcttgccgctggacgcctcctgccacccccaggcctgcgccaatggctgcacgtcagggccagggctactcgggtccccctatgcgctatggagagagttcctcttctccgttcccgcggggccccccgcgcagtactcggtgtgtggccctgacctgggtctgttccctgcatctcctcaggccaccttcctgtctgctgcccagggtctgggtctgcgcagcagacacacccagcctgcaggcccctcccacgtccttgccacctctgacctccgacctccgacctccaacctccgacctctgcagtgcccttgcccctctcccagtgggagaagctctcgcctgggcccttggcacgagctgtgcctcctcttcctctctcccagcacagccgctccttcctgtctgtcaggtcttggcctgtgtcctctccccgtgtgtccccctgtctgcaactgtcctgcctgtccttgtcacgagcactgtggggaggctccctgaggtgtggctgacgaagcggggagccctgcgtgtccaccctcatccgtcgtgcaggggtccacgggccatgaccgtgaggacgtgatgcagccctgcctccctctccacaggtcaccctccacggccaggatgtcctcatgctccctggtgacctcgttggcttgcagcacgacgctggccctggcgccctcccgcactgctcgccggctcccggccaccctggtccccaggccccgtacctctccgccaacgcctcgtcatggctgccccacttgccagcccagctggagggcacttgggcctgccctgcctgtgccctgcggctgcttgcagccacggaacagctcaccgtgctgctgggcctgaggcccaaccctgggctgcggctgcctgggcgctatgaggtccgggcagaggtgggcaatggcgtgtccaggcacaacctgtcctgcagctttgacgtggtctccccagtggctgggctgcgggtcatctaccctgccccccgcgacggccgcctctacgtgcccaccaacggctcagcctcggtgctccaggtggactctggtgccagcgccacggccacggcttgctggcctgggggcagtgtcagcgcccgctttgagaatgcctgccctgccctggtggccaccttcgtgcccggctgcccctgggagaccaatgataccctgttctcagtggtagcactgccgtggctcggtgagggggagcacgtgatggacgttgtggtggaaaacagcgccagccgggccaacctcagcctgcgggtgacggcggaggagcccatctgtggcctccgcgccacgcccagccccgaggcccgtgtactgcagggagtcccagtggtgagtatggccgaggctccaccaccagcccccaggcaggtgcctgcagacagggtgctcacacagggcgtgaggcctggcttcccagtgagggcagcagcccagttactggggacgtcggccccgggcaggtcctgctggctggctcctcaggctacctggtgggctttaaattcctggaaagtcacggctctgacagcggctccgctaactcattccaccgtctcatttcacgaaatgaatttaaaactccgctccctgacctcacacgagtccccgtgagtctctcacgccctctgctgtgttctcgcctggctaaagcaagtggcttttgaggtggagtccgaacccctgatgggaaactgcgggctgcccgcggtgccaccatgctgggtacatgggggacagggctgttccatcttgcgggtacctgccccttcaccaggggccttgggaggggccatgagaaatggcgtgacctgtgcagcctgtcctgggttctgtaagccagtgtaggtgctgtccctgtgaggcccgtgtgcctcccctcactgctccgagctctctggctgaggagctggggcaggagccccgggagggtctgagaagactcagagagaggtggactctttgtagctggtactaggtttgctttacagatggggaaactgaggcacagagaggttgaggcattagtagtactacatggctggctggagagccggacagtcagtgtcccagcccgggcttggctctcatggcatgcagagccccgggcacctcctctcctctgtgccccacgtgggactctccagcccgacgggaggtgtgtccaggaggcgacaggctaagggcagagtcctccacagagcccaggctgacaccagtccccccgcagaggtacagccccgtggtggaggccggctcggacatggtcttctggtggaccatcaacgacaagcagtccctgaccttccagaacgtggtcttcaatgtcatttatcagagcgcggcggtcttcaagctctcagtaggtgggcgggag

SEQ ID NO: 7133 - DNA, 6000 bp, Homo sapiens
gtgtgcacgcacgtgtgtgtgtgtgacagaaacagagacagactgataggaaaagagcctttcccattttgatttttagaaatctgggaggctgcttaaaactgtagtgaattgccctggagaaatattgaggactatacttcctcttcccattttagcctcttcccattagtaattgcttttattggggaactacttcttgaaaacacatttaaaatggaaatcttacttctgaaatttctttcaccgaggtgcatttcgtatctggcccacttataaaccctgctctcactcttttggtttatagtcatatcaaagtcagaaccaccactctggggcagcaggaacttattagctgggaaagcttacttttccctgttgtttcttaactcctgggcagtctagtttgggtatcagcaagagagaatgaactgtaatttgttttagtgctaaataaggctgtgcagaaatcttctcttttttttattgactgcctaaatctggtgttcctcacttaaaataatattcaggatgaaatgtctgcaataaattagcagaattgcttcttcattctcagctaattagtaaggacagatgagctgtgaatgccataccactgactttgggtcaggccgtctcattttccccgaacttccgtggctgtagttgcatataatgaggaagccaactttgggaattgaatactgttggtaatgatgcttagtcacaaagaagagcttagtgcctcggtacattggccaagaaccgccttagtatgttaccacctaaggctggaattatctcagggagctgaaaagatttgaaagaacaagcaaaagtaatatttagctcccctttaagtataactgcctgcatctacctgggcagggcctagtagacactaataaaagttaagaagtggttttgttcagtgcccgttaaggacagcactatggagataattcgaataaatacaaattctggatgctgccctctggaagtttgtcttctacctatagagccaacaccgacattcctgcaagatcaaactgtccaagctgtgaaaagtgacggacagactgaatgagagcgacacaggattctaaatgccatgggaattcagaggcgtggaagcggttaataacgaatgaattctggggtagttgggaaagactccctggagcagatgggccttgaaaaatgaaatgggtttagcttgccggaagtgaaagaagagtaataacctgaccaaagtcagggaggtaagaaatggaagttatgtgctaagaagtaaaatctgtcagggaagggcagtcagacatggaaggagtgactgccaggcagtggagtgtaggcggcaggtgttgaaagtttcgaagcaggtaaatattgagcagaaaggagggagggcatggcagtacttatggaagttggtttggccagtggaaggatagctgctagatgacattcagaggcaattgtagtaatacagctttgaggtgacaatagccaggaccaatgtggtagctgagaaaacagaggaaaaagatgtgtgagggacatttgggataaaacatctgccacatgtggtgcctgatgggcttaagaaggatgttcagaaattacgtgaggtttggggcaaggagaaggatgggtgctttttgttgaggctaaggaattggaagattaactagattgagagttgagatttcatttccgtttctgatgttctggtaagctatcactgtggaaatgctcctgaagcatttggagatggggtaagaaaatttctcagaaaacagctccatacagaattttcaagagccacaggcctagagagaagaattgtggcagtagaaatgaatgtgtaataggagaaatgtttagcaggaggcaaagggccaaggtctcagtgaggagaagaagccaggaggaggttggtagtggtggggtggaaagggagcagggacccagctctcccagctgtatctcagaaagctgggagtttgctcatagagggagtcatcactcagcctcacctggcttccttctttactcttaaaagcacttacccaccagtactattgatcttcccagcagcctggagaacctggcagaagacagagcagagcccaccaagtatctgtaaaagtttttctgggtaaagttctatatatggtcactgtactgtagagccctacagttgttcacttgaatattattttacctggcaattattatagttctacttgaaccacaaaagttcaatagctcccttttctagactgtaatctctacatttgtttaagtgagcccactttaatcccttatattaatgaatgctggacccgttagtttttaacccttttctttttgctttagtttttggtgtctagggttatgtaaagccaaaatacaaaattaaacaatggactaccaaatttaggaatagatcactttatgttcagttagtgacgagtaagtagagaagcacctcctttgtaaggtggcttctttgtagcatttttgttgtgacctccttacctattcaggcatctggggtctgaaggcaggatagttaacacttctgctcagaggtcctttccagccagcatatcttgcaactccaagccagccactcatctagtttccttgggatactcgtagatggaggaagaaggggctgagctgatttagaatttattctagcataaagaaataccctcttaatttatttgttggcaatactaaagaggaaaaacgtcttaacagtgacttggtgaagtttttttcagtaaataaagagggttttcttactcccctgtagtgaacctcagatgtatcccttgggaacaggttttacatccgtgaaatagtttgactttaaccacacttgggtctttgggttcttttcatccccaggcagagattcctattgctatatatccaccatgctccagtacagtatttatttgatcagaaacaaaagagtttgcttcttgtactggttcagagaggtcccccaggattgtcttttgttcagtaattggagcataagctgagcctggttaatttcaaagctaccctcaacacacacgtttctccctccctccttgtgcagttttctcagctgttagtggtaccttgtattgggtctggaacaaaaaaagcttgattgttgaatgttagctacaactactgtgacatctgctatggcaccacatagcactgttggtgcagttaattttaagttagggtaagaaaactagaaagctcttcagctttacagtgctcgttaacacatgcacctccaaattatgcatttggtgttatcacaatgaataaaacaaaggaaatcatgagttgatttttatgctagtaacataagttctttcattgttattcactgttcagacaccagtgtgttcctatgttcattctttttagtttacttggggttttttgtttgtttttgtaaggcagaaatgtctgaaacatctcaactctgggtatttatttaattggcaaaagttctgatgtaagaaataagttaattatatttattcttttaaaggaacaatgtaagttggttttgcttcttaaaatacaaaaatgatgatggtagctgagtaagaaccgtcagtagtcaaattctgtatgctaaatagccaagttaatatttatataaaaatacatcatgaaattggcaaatattatgtgtctttcagattctgcagtatagatgttggttttgcaaccaacagattgcaatcttagggtttgtggtttttgtttttgaggagagaatggttctattttccttttgcagtctgcaccatgatgatggcccatcacctgaccagcctgactttaatcatctggtgccttggtcttagcgtggctctgtctttgctttttcacaagctttcctataattgtacagttgtttgccgcactgaatttccttttttgacagtgaaaaacatgataatattttaatgtagtcttcaattttcaggttatatgttaaaacgtggaggaaaaaaatcccttcctgaggagcacttttaaaaatcattgcagtagaatgggaatattcattacttacacatcatatattttcccctaaatgttgtgcaaagaagtgacagttgagctgagcatatgttaataaaaggtctgcattttcctgtgtcagtgacagtttcattggctgtatattcctgaaatgcaaataacctctgttcttttcaaagctataattaatctgaatagttattaaacagtatcaaaatcttttaactactaagaggccaaacatttaagatggcgaatttactgttctgcttgaaggacagtacaattgacaagggcacaatgatccgagatgcttctgtatgttgtatctacacatactgtagactaaaatggcagaatctgtctgctgctgtataaaatcttttaactaccatttattttagcatcatggcatgtgcaaattcctgctgctcagttaagggaccagcttcacaactggtgttacaatctgtggccacagcactgcatcacaatgcagcaaatgcattttccacattaaccaaacatgacagctgaagcgattattaaccatgcaagatgtcggaagtcatcaaagattcacatcagagtaattgcagtggtttgggttggggaaaaaaagtatcatagcattccttgcctacatgttgtctctccccctcttaaatcttaacttggtacagtccgttaacaataaaatacccttctgtaacctataaactgttactcccatcagtttgtgctttcaaactgatggctgacttctctgaatttgtgtagcgcacaacgaatggtgatgctgtgctccgggggctgcagtgcaccctttttaaagggaccctgcaatctcattgtttaatttgactctttagtgcttcagtcacatcagcacttgcagaggggttgttcttttcctttttcttctttctctctttttctcttctctctgtccttctccccacccccatccctcaattcaggcagtttggggtgggaaaaacttgagcactggttccgacagagctcatctcatataagaaggtttggaagagctgcagtgatcgacagcatcgaccgttctgtaactccttaaatttaagagctgcaggtaggattggccgtgttttgtaaagaaattaagacaaatgcaccctggtaaatagagtggcagcatgttgttgcagtgcctctgaaagacaaggtcttggtttgtttgaaaatttgagataaatttggaagcagttaactcatttgatagaagaagtacttgattcttctgagaattgttcagatttgtatcttgccattctaatattttttcttttaaaaatgtattgggtggggcagaatttgcttaaatatttaaatagttggttattgggatttttgtgaacttcttctttaagtagcaagtagtgtggtctttaggatttttaaaggagatacatgtgaagtgcaaaattcttgtatgaggtggaatatgaaaatagaatttattttatttactaaaaccagatccttctttgggattgcaggtgagagtgagtgagtgcgtgtgtgtgtttgtttgtgtctgtggtgtgtctgtgtgtaggattctttaggaattcagtcctttatatttggtgattagggaaaaagtactattagagatttttttgaactatctcacaggaaatgttttagcataaggcttgaaatgagaagaactaaacagtaacaccaaagaggaggattcctaagtatttactaaatattggcaatttaaattgagatggttcttttttatttcttaaattcagtctcaaaagagatcataggagtcctttaagtatatttcaaatttttggctagagaatataatttgtgtaagtgaaatgaaaacttcctaagtcatgtaagcattatctggagggtgataga

SEQ ID NO: 7134 - DNA, 6000 bp, Homo sapiens
caatatttgtggcaaattcagtgggttcaaaattgagtttgtcctttctgcttcattagtttaagctgtataattcctttcccttcctacattcttgtttgtcattttttcaggggaagaggagttgctagtactggcattggttttcctttctctctcttttttttttttttttttttcctgagatggggctttgctcttgttgcccaggctgtagtgcaatggcacaatctcagctcactgccttttgggttcaagcaattctcctgcctcagcctcccaagtagctgggattacaggtgcccaccaccacgcccagctaatttttgtatttttactagagatggggtttcaccatgttgtccaggctggtctcgaacttctgacctcaggtaatccacccgcctcagcctcccaaagtgctgggattagaggcgtgagccaccacacccagccttttttttttttttttaaattttgagatagagtctcgctctgtcgcccaggctggagtgctgtggtgcaatcttggctcactgcaacctctgcctcccagtttgaagcaattctgcctcagcttcccgagtagcttggattacaggagtgtgccaccacatttggccaatttttttttttttttttttttttttttgagacagagtctcactctgtcacccaggctagagtgcagtggcaagatcttggctcactgcaacttccgcctcccaggttcaaacgattcttatccctcagcctcttgagtagctgggactacaggcatatgccaccatgcccggataatttttgtgtttttagtagaggcggggtttcaccatattggccaagctggtctagaactcctgacatcatgatccgcacacctcggcctcccaatgtgctgggattacaggcgtgagccaccgtgcccagcccaatttttgtatttttagtagagacgggttcaccatgttggccaggctagtcttgaactcctgacctcaggtgatctgcctacctcagcctcccggtgtgagccaccgcacccagcctggattgttgaattcaatgctcgggtcacctccagattcattttcacagtctttcatgttttggtcatattacattgtattttgctgccatatgactgatctttttttgttaaatgtgagatacttgttaaaaaatatttagcaatgaattgaggcctagtagcatgttatcttgctgcagaagagatgggagtctacttctgggggatggtcaggggtcctccatacaggctgcaattgaggtcgtcagtgcaggctcagtccctacaaaggccagggtatttcctgtccacctctattctgatgcatgactcttctgggtctcaaccagagccagtggacttcagtatgggtcgctttcattggcagaccctcaatccacttgttttccatctaaccccacacatgtgtgcaaaagctgctgtgcttctttgcatctcagtagttccttctggaattcagcaatgaaactcagggaaatgggttccaaatgcgaggctgactttcgtcctgggtttccttcttctccatcttcacctcatgtctgtttactgccatgtgagcaatttgatgtattcagtcatgggttttatattctgtttggtgtcccccattgttctcatcggagatcagaagcttcagatgcacttatgtcaactcaagagtagaatgcttccttagcttccctccagagtcaggttttgtgtttctagttcccaagtgcacagcaggagtagtgctgtcctcactggcttctcatttgcattaaactgtgagcttctttagcgtggggacaggaccctgctcccattgcattgtcagcacctcaccacacacaccttgtttgaggccactccagacagcatgtgctgaaggatgccctgtggtcagaaacaagttcattaactttctctttgaagtgttttcgtctctgtttcctagcattctgggaattttacacatccttcctataaaaccaagtatcaggtgagatccttaggatcaggaccatgaatcaagtggtgtgagggcaacacagcaaacttacccttttgaggccgtttcctttttctgccctcaatctctgtgaactgaaccttgttaaagtcagtcaacaccagggtggatggtttgcagttgtcacctattttcaggacataacaccctgacttaggagccattccgatcatttctaattcaatagatgcgcccagcattcagattgccttttcaggatctttaaagtcgatgacaagagttccagtcctgaatcatggcaaagtgcagtagtgaactgcggggttaatgacaccatattctggaaggatctctctatggctgatggtctcagttccggcatcagcctctgactgagaatcaggtctcacacaggaggagtcagatgaggagcaatcctctgcctccgatggagttagttgtgatgaattggtgaggtctggtttttcacactgaactaaaatgagctttcgctgtgtcaagcacaagactgaccccagagacacacatagtgcacctcatagaagcttttaatagtctttatatttactaaagaataggactaactatggaactatgaagatgagctggaaatgacaggtgacttgccagcaggccagagtgtgattttttttttgtccctcaatgggaggtgtccattctccctttgcttgtgagaatcagttggttcatttgtgggaaggttgcaggggggatctttgaatcagccttcagatgccagaagggcagagggaatcccacacgggctggtggatcatgtgtgtgcatttctctcccttctagtctgaggaaactaagcatgaaagaacgtgagcacggagaaaaggagaggcaggtgtcagaggcagaggaaaacgggaaattggatatgaaagaaatacacacctacatgtgagttcagaaactgaaccccaccctcttgggaaacgcccattggagtgttgtttttaacctttgtacaatgtttagacccagtaaatgcagaaatagaaacaaatggtcagaagacatatcgtgagagagagagagagttcacaaaacagaaaacaaagtaccttaatatttaccagtgaccaaaagatgtgaagtagcaaaacggctcctgaccccattgccagctagactgtgtggaaactcggttcataccagccattctaggggtggggtgagttgttgtcatccttaggaaagtgtgttgttgtaggatcaaccacatccttcaaaaggactatgcctgtttataagcccagctgtttctgccctgtgaaacacggtaaagatattaatacaaagagaatacagctttatgataaaagatgctcaatgaaggatgaattagggatatactgagaatggggaaggaagctatcatctcagaagtcagcaggcagtaagcaagaggaggaatcaatacagcaacagtttggatcagactgtacagttttttttgtttttgtttttgtttttgtttttctgagatggagtctcgctgtgtcacccaggctggagtgcaatgacgtgatcttggctcattgcaacctctgcctcccaggttcaagtgattcccctgcctcagcctcctgagtagctgggattacaggtgcctgccaccacccccgcctaattttttgtatttttagtagagatggggtttcaccgtattagccaggatggtctcaatctcctgacctcgtgatccatccgcctcgccctcccagagtgctgggattacaggcgtcagccaccgtgaccggctcagactgtactcttacagccatctgaaatacgttttctaggtagagatagattgtgtaagggtacagttgtgaggataacagaaacatggcagattatttaaaatcatcctgaaagtggtgctttatctgatgaaagtgattgtaatccatagggaaatgtttcaacgtgcgcaagcgttgcggcggcgggcagaggactactacagatgcaaagtaaggagcttcctccccgcagttgcaggatagttcagtgctgatgcagatgatgccacggcccttagactctctcaacattcaatttctcatgtgttggctttttcagatcaccccttctgcaagaaagcctctttgcaaccgggtaagtttgcttgttttccttgcttttggacatagtctgccaggtcaggacatggatacatttttctccctacggctctgtgctcaagccctgcagagggagatggcagagaggaaggctgcctacaagcatcacagtcccatccctgttggtaaccgtgttgcgcaaaaacaccttcatccccacccagtggggcccccatctaatattctaagtgtcagaggttccgtatttgtaatagcaaatgggccctgactgtaaattagtgaagagtgaatgtaacttattacccacagggacaattccaaatgaaggccttaaatgatgctcagctaagctggttcttgtgtggcctctgtaccttcaaaagctgccgagtcctatgattacacgcgatgggacttgtacacttgaagtgaaacacagttttaaaacttgctttgtttagaattcccacctcatttttccatggacaaaagtattctttaggtcctagtgcacttacaatttggtattacctgggagtgaaaagaaatattacagccatgcctaactgacttcttgaggtaagattgttctgtcagaaaaccctctcccagttcccctgcagctcttcaggaatccacatctctccagagctctttgttctcatgggtggcacctccagagtgaagaagatcctttgtcaagaagggaaacagaggggaaatgagagggtcctgcaggcagagctggaatcaacttccactctgcctcttgcaagctgtgtgaccctgggcacaatttctccttcctctggaaacctctgttttcttagatttggagcagggtggtcacactgaccttgcagagttctgagaatcagagacagaacataaaaggcctggaaaacattctccaaaaagaagctgcaacatgtgtggacaatgggcttttcatgcctctcttactgtctcttactgtctattgacctggtgcaagaaacatgctctggtgatggctgtgagggaggaatgaggatagacatagacactcctgtgtctcaaacatgcttctttattactctgttatgactctgtcttccctggggcaggaccccagcctgcctacatttgcagacagacacagtggcatgtggagacaacagtgtgtcccaatgacttttctttaccccccagctgtcggcagtactcagtggaagggtgatattatgacactgacactgctattttgaaacctggagaatggaaaggtgcaaaaatctatcaccagcaacagaaggtgcagactgtgttggtggcggtaattttgtccatcaaatgaatatgtgtgaaaacattccctcctttggccctacaggtcagaatggcggcagcggagcatcgtcattcttcaggattgccctactggccctacctcacagctgaaactttaaaaaacaggatgggccaccagccacctcctccaactcaacaacattctataattgataactccctgagcctcaagacacctcccgagtgtctgctcactccccttccaccctcagctctaccctcagcggatgataatctcaagacacctgcggagtgtctgctctatccccttccaccctcagcggatgataatctcaagacacctcccgagtgtctgctcactccccttccaccctcagctccaccctcagtggatgataatctcaagacacctcccaagtgtgtctgctcactccccttccaccctcagcggatgataatctcaagaaactaaggaagaataaataaataatataaaaata

SEQ ID NO: 7135 - DNA, 6000 bp, Homo sapiens
caatatttgtggcaaattcagtgggttcaaaattgagtttgtcctttctgcttcattagtttaagctgtataattcctttcccttcctacattcttgtttgtcattttttcaggggaagaggagttgctagtactggcattggttttcctttctctctcttttttttttttttttttttcctgagatggggctttgctcttgttgcccaggctgtagtgcaatggcacaatctcagctcactgccttttgggttcaagcaattctcctgcctcagcctcccaagtagctgggattacaggtgcccaccaccacgcccagctaatttttgtatttttactagagatggggtttcaccatgttgtccaggctggtctcgaacttctgacctcaggtaatccacccgcctcagcctcccaaagtgctgggattagaggcgtgagccaccacacccagccttttttttttttttttaaattttgagatagagtctcgctctgtcgcccaggctggagtgctgtggtgcaatcttggctcactgcaacctctgcctcccagtttgaagcaattctgcctcagcttcccgagtagcttggattacaggagtgtgccaccacatttggccaatttttttttttttttttttttttttttgagacagagtctcactctgtcacccaggctagagtgcagtggcaagatcttggctcactgcaacttccgcctcccaggttcaaacgattcttatccctcagcctcttgagtagctgggactacaggcatatgccaccatgcccggataatttttgtgtttttagtagaggcggggtttcaccatattggccaagctggtctagaactcctgacatcatgatccgcacacctcggcctcccaatgtgctgggattacaggcgtgagccaccgtgcccagcccaatttttgtatttttagtagagacgggttcaccatgttggccaggctagtcttgaactcctgacctcaggtgatctgcctacctcagcctcccggtgtgagccaccgcacccagcctggattgttgaattcaatgctcgggtcacctccagattcattttcacagtctttcatgttttggtcatattacattgtattttgctgccatatgactgatctttttttgttaaatgtgagatacttgttaaaaaatatttagcaatgaattgaggcctagtagcatgttatcttgctgcagaagagatgggagtctacttctgggggatggtcaggggtcctccatacaggctgcaattgaggtcgtcagtgcaggctcagtccctacaaaggccagggtatttcctgtccacctctattctgatgcatgactcttctgggtctcaaccagagccagtggacttcagtatgggtcgctttcattggcagaccctcaatccacttgttttccatctaaccccacacatgtgtgcaaaagctgctgtgcttctttgcatctcagtagttccttctggaattcagcaatgaaactcagggaaatgggttccaaatgcgaggctgactttcgtcctgggtttccttcttctccatcttcacctcatgtctgtttactgccatgtgagcaatttgatgtattcagtcatgggttttatattctgtttggtgtcccccattgttctcatcggagatcagaagcttcagatgcacttatgtcaactcaagagtagaatgcttccttagcttccctccagagtcaggttttgtgtttctagttcccaagtgcacagcaggagtagtgctgtcctcactggcttctcatttgcattaaactgtgagcttctttagcgtggggacaggaccctgctcccattgcattgtcagcacctcaccacacacaccttgtttgaggccactccagacagcatgtgctgaaggatgccctgtggtcagaaacaagttcattaactttctctttgaagtgttttcatccctgtttcctagcattctgggaattttacacatccttcctataaaaccaagtatcaggtgagatccttaggatcaggaccatgaatcaagtggtgtgagggcaacacagcaaacttacccttttgaggccgtttcctttttctgccctcaatctctgtgaactgaaccttgttaaagtcagtcaacaccagggtggatggtttgcagttgtcacctattttcaggacataacaccctgacttaggagccattccgatcatttctaattcaatagatgcgcccagcattcagattgccttttcaggatctttaaagtcgatgacaagagttccagtcctgaatcatggcaaagtgcagtagtgaactgcggggttaatgacaccatattctggaaggatctctctatggctgatggtctcagttccggcatcagcctctgactgagaatcaggtctcacacaggaggagtcagatgaggagcaatcctctgcctccgatggagttagttgtgatgaattggtgaggtctggtttttcacactgaactaaaatgagctttcgctgtgtcaagcacaagactgaccccagagacacacatagtgcacctcatagaagcttttaatagtctttatatttactaaagaataggactaactatggaactatgaagatgagctggaaatgacaggtgacttgccagcaggccagagtgtgattttttttttgtccctcaatgggaggtgtccattctccctttgcttgtgagaatcagttggttcatttgtgggaaggttgcaggggggatctttgaatcagccttcagatgccagaagggcagagggaatcccacacgggctggtggatcatgtgtgtgcatttctctcccttctagtctgaggaaactaagcatgaaagaacgtgagcacggagaaaaggagaggcaggtgtcagaggcagaggaaaacgggaaattggatatgaaagaaatacacacctacatgtgagttcagaaactgaaccccaccctcttgggaaacgcccattggagtgttgtttttaacctttgtacaatgtttagacccagtaaatgcagaaatagaaacaaatggtcagaagacatatcgtgagagagagagagagttcacaaaacagaaaacaaagtaccttaatatttaccagtgaccaaaagatgtgaagtagcaaaacggctcctgaccccattgccagctagactgtgtggaaactcggttcataccagccattctaggggtggggtgagttgttgtcatccttaggaaagtgtgttgttgtaggatcaaccacatccttcaaaaggactatgcctgtttataagcccagctgtttctgccctgtgaaacacggtaaagatattaatacaaagagaatacagctttatgataaaagatgctcaatgaaggatgaattagggatatactgagaatggggaaggaagctatcatctcagaagtcagcaggcagtaagcaagaggaggaatcaatacagcaacagtttggatcagactgtacagttttttttgtttttgtttttgtttttgtttttctgagatggagtctcgctgtgtcacccaggctggagtgcaatgacgtgatcttggctcattgcaacctctgcctcccaggttcaagtgattcccctgcctcagcctcctgagtagctgggattacaggtgcctgccaccacccccgcctaattttttgtatttttagtagagacggggtttcaccgtattagccaggatggtctcaatctcctgacctcgtgatccatccgcctcgccctcccagagtgctgggattacaggcgtcagccaccgtgaccggctcagactgtactcttacagccatctgaaatacgttttctaggtagagatagattgtgtaagggtacagttgtgaggataacagaaacatggcagattatttaaaatcatcctgaaagtggtgctttatctgatgaaagtgattgtaatccatagggaaatgtttcaacgtgcgcaagcgttgcggcggcgggcagaggactactacagatgcaaagtaaggagcttcctccccgcagttgcaggatagttcagtgctgatgcagatgatgccacggcccttagactctctcaacattcaatttctcatgtgttggctttttcagatcaccccttctgcaagaaagcctctttgcaaccgggtaagtttgcttgttttccttgcttttggacatagtctgccaggtcaggacatggatacatttttctccctacggctctgtgctcaagccctgcagagggagatggcagagaggaaggctgcctacaagcatcacagtcccatccctgttggtaaccgtgttgcgcaaaaacaccttcatccccacccagtggggcccccatctaatattctaagtgtcagaggttccgtatttgtaatagcaaatgggccctgactgtaaattagtgaagagtgaatgtaacttattacccacagggacaattccaaatgaaggccttaaatgatgctcagctaagctggttcttgtgtggcctctgtaccttcaaaagctgccgagtcctatgattacacgcgatgggacttgtacacttgaagtgaaacacagttttaaaacttgctttgtttagaattcccacctcatttttccatggacaaaagtattctttaggtcctagtgcacttacaatttggtattacctgggagtgaaaagaaatattacagccatgcctaactgacttcttgaggtaagattgttctgtcagaaaaccctctcccagttcccctgcagctcttcaggaatccacatctctccagagctctttgttctcatgggtggcacctccagagtgaagaagatcctttgtcaagaagggaaacagaggggaaatgagagggtcctgcaggcagagctggaatcaacttccactctgcctcttgcaagctgtgtgaccctgggcacaatttctccttcctctggaaacctctgttttcttagatttggagcagggtggtcacactgaccttgcagagttctgagaatcagagacagaacataaaaggcctggaaaacattctccaaaaagaagctgcaacatgtgtggacaatgggcttttcatgcctctcttactgtctcttactgtctattgacctggtgcaagaaacatgctctggtgatggctgtgagggaggaatgaggatagacatagacactcctgtgtctcaaacatgcttctttattactctgttatgactctgtcttccctggggcaggaccccagcctgcctacatttgcagacagacacagtggcatgtggagacaacagtgtgtcccaatgacttttctttaccccccagctgtcggcagtactcagtggaagggtgatattatgacactgacactgctattttgaaacctggaggatggaaaggtgcaaaaatctatcaccagcaacagaaggtgcagactgtgttggtggcggtaattttgtccatcaaatgaatatgtgtgaaaacattccctcctttggccctacaggtcagaatggcggcagcggagcatcgtcattcttcaggattgccctactggccctacctcacagctgaaactttaaaaaacaggatgggccaccagccacctcctccaactcaacaacattctataattgataactccctgagcctcaagacacctcccgagtgtctgctcactccccttccaccctcagctctaccctcagcggatgataatctcaagacacctgcggagtgtctgctctatccccttccaccctcagcggatgataatctcaagacacctcccgagtgtctgctcactccccttccaccctcagctccaccctcagcggatgataatctcaagacacctcccaagtgtgtctgctcactccccttccaccctcagcggatgataatctcaagaaactaaggaagaataaataaataatataaaaata

SEQ ID NO: 7136 - DNA, 6000 bp, Homo sapiens
agcttggggatgctggcaatgtgtgggatgggcccagggatggcctctggcctactaagggctctggccctgacccacggccactcactcctcagagacgtctcccacaacctgctccgggcgctggacgttgggctcctggcgaacctctcggcgctggcagagctgtgagtgtcccccagtcgtgccagcatgcggggctcactccgggtgggctggcggcaccgcctcttgctgctcagctgtgggggcttccgtcagctttgccgaatcccccctctcttccagggatataagcaacaacaagatttctacgttagaagaaggaatatttgctaatttatttaatttaagtgaaatgtaagttgtggttctttgggtggggtcctggctggaccccaggcccccagtatcccttctgccctcccagttggtccgtgtccccttccaggcttgagaccagatcctgggggcagttcactacctgcttggagccccccagtgccggcttggttggggcaggggaggcggtgctgtcagggtggctccagggcctggttgccagtggggggctggcatagacccttcccaccagacctggtccccaacacctgcccctgccccgcagaaacctgagtgggaacccgtttgagtgtgactgtggcctggcgtggctgccgcgatgggcggaggagcagcaggtgcgggtggtgcagcccgaggcagccacgtgtgctgggcctggctccctggctggccagcctctgcttggcatccccttgctggacagtggctgtggtgagtgccggtgggtggggcagctctgtccttcccagccaggtgggacctgggccctgcagacactgggcagggctcaggaaggcctctctggggggggcctccgggccaagggaacagcatgggagcctgtgagtgcggcgggcggatgggggggtgtggggtggagccaggaggagcagaacccggggtccagtggctgcctcttctaggtgaggagtatgtcgcctgcctccctgacaacagctcaggcaccgtggcagcagtgtccttttcagctgcccacgaaggcctgcttcagccagaggcctgcagcgccttctgcttctccaccggccagggcctcgcagccctctcggagcagggctggtgcctgtgtggggcggcccagccctccagtgcctccttcgcctgcctgtccctctgctccggccccctgccgcctcctgcccccacctgtaggagccccaccctcctccagcacgtcttccctgcctccccaggggccgccctggtggggccccacggacccctggcctccggccagctagcagccttccacatcgctgccccgctccctgtcactgccacatgctgggactttggagacggctcccccgaggtggatgccgctgggccggctgcctcgcatcgctatgtgctgcctgggcgctatcacgtgacggccgtgctggccctggggaccggctcagccctgctggggacagacgtgcaggtggaagcggcacctgccgccctgaagctcgtgtgcccgtcctcggtgcagagtgacgagagcctcgacctcagcatccagaaccgcggtggttcaggcctggaggccgcctacagcatcgtggccctgggcgaggagccggcccgaggtgagtgtctgctgcccactccccttcctccccagggccatccagatggggcagagcctggtacccccgtcttgggcccacactgaccgttgacaccctcgttcccaccggtctccagcggtgcacccgctctgcccctcggacacggagatcttctctggcaatgggcactgctaccgcctggtggtggagaaggcggcctggctgcaggcgcaggagcagtgtcgggcctgggccggggccaccctggcaatggtggacagtcccgccgtgcagcgcttcctggtctcccgggtcaccaggtgcctgccccaccccccgaggggccataggttgggagatctctgaagcagtggggcagagcctgcggctggggagtctcaggaggagggaggtgggagctgggccggccctggtgagcaggtggcgccggccggtggggccgttcctgtcagctctgcagatgcagaggtggacgcgagctgggggcagcctccggacactcctgggcacgccatacgggaggtggcctgcacggggatccctgccggtgcccacaggccccgtgggtgggtgctgctgtgagcctgggctggtgggccctgctctccgggctctgagcctcagtttccccatctggaaagggggacagtgacggggctcccagcgggctgctgtgagggtgggaggatggaggagtgccctgagccccctgccatcccacacccgcccccaggagcctagacatgtggatcggcttctcgactgtgcagggggtggaggtgggcccagcgccgcagggcgaggccttcagcctggagagctgccagaactggctgcccggggagccacacccagccacagctgagcactgcgtccggctcgggcccaccgggtggtgtaacaccgacctgtgctcagcgccgcacagctacgtctgcgagctgcggcctggaggtgtgcggggggccaggcaggggcctgagacgctggctgtggttaggggcctgccgagcgcccgcggtggagcctgggctgaggaggaggggctggtgggggggttctcgggcggctcggtccccagtctgttcgtcctggtgtcctgggccctggcccggcgcctcactgtgcacttgccaccccaggcccagtgcaggatgccgagaacctcctcgtgggagcgcccagtggggacctgtagggacccctgatgcctctggcacggcagtacggcctctcagccccgcacgagcccctggaggtagtcggccccccacgttctataacctgccctcctgcctgcccctggaggcctcgcctgccctgcccactgtgggtctcgccaaaaaacttgggggccttaatgttgcttgtgcccagtgaagatggttgggaaaatccagagggcagagaggaaagcgtttactcacattacccccaggccttttctctgagtgtgggtgagttattcctgaaaggcaggtcaggggtcctgccccccatggacagtttccatcggagtcttcctctcgagcgacaggagccaggcctgtgggggtccgatggctcgctctccttccctcccctcttcctgggaagttcgggtggggggagtctgggcttcaggctgggatggggtctgtggagctgaggcggccccctgcccaccaggtcatggtattcccgggcctgcgtctgagccgtgaagccttcctcaccacggccgaatttgggacccaggagctccggcggcccgcccagctgcggctgcaggtgtaccggctcctcagcacagcaggtgggactctggggtggtgggcgccgcaggactcggggtggcctctctgagctctcacgtctgctggtcctgtggccatcagagtggttcccagtcttaggtggacagagcaggggttccagagacaccagctcattccaggtgtcctgggggtggatcgggtggggcctgcctggggaccggcctgggtcagtcagctggccggagacagggacgcagcactgggctgggagtgctgcccgggcggggagacctgtcctcacagcaaggccaggctcgctggtgcaggcagttgggcatctctgacggtggcccatgggcgaatcagggccccaacaccctcccctcctcgcagggaccccggagaacggcagcgagcctgagagcaggtccccggacaacaggacccagctggtccccgcgtgcatgccagggggacgctggtgccctggagccaacatctgcttgccgctggacgcctcctgccacccccaggcctgcgccaatggctgcacgtcagggccagggctactcgggtccccctatgcgctatggagagagttcctcttctccgttcccgcggggccccccgcgcagtactcggtgtgtggccctgacctgggtctgttccctgcatctcctcaggccaccttcctgtctgctgcccagggtctgggtctgcgcagcagacacacccagcctgcaggcccctcccacgtccttgccacctctgacctccgacctccgacctccaacctccgacctctgcagtgcccttgcccctctcccagtgggagaagctctcgcctgggcccttggcacgagctgtgcctcctcttcctctctcccagcacagccgctccttcctgtctgtcaggtcttggcctgtgtcctctccccgtgtgtccccctgtctgcaactgtcctgcctgtccttgtcacgagcactgtggggaggctccctgaggtgtggctgacgaagcggggagccctgcgtgtccaccctcatccgtcgtgcaggggtccacgggccatgaccgtgaggacgtgatgcagccctgcctccctctccacaggtcaccctccacggccaggatgtcctcatgctccctggtgacctcgttggcttgcagcacgacgctggccctggcgccctcccgcactgctcgccggctcccggccaccctggtccccaggccccgtacctctccgccaacgcctcgtcatggctgccccacttgccagcccagctggagggcacttgggcctgccctgcctgtgccctgcggctgcttgcagccacggaacagctcaccgtgctgctgggcctgaggcccaaccctgggctgcggctgcctgggcgctatgaggtccgggcagaggtgggcaatggcgtgtccaggcacaacctgtcctgcagctttgacgtggtctccccagtggctgggctgcgggtcatctaccctgccccccgcgacggccgcctctacgtgcccaccaacggctcagcctcggtgctccaggtggactctggtgccagcgccacggccacggcttgctggcctgggggcagtgtcagcgcccgctttgagaatgcctgccctgccctggtggccaccttcgtgcccggctgcccctgggagaccaatgataccctgttctcagtggtagcactgccgtggctcggtgagggggagcacgtgatggacgttgtggtggaaaacagcgccagccgggccaacctcagcctgcgggtgacggcggaggagcccatctgtggcctccgcgccacgcccagccccgaggcccgtgtactgcagggagtcccagtggtgagtatggccgaggctccaccaccagcccccaggcaggtgcctgcagacagggtgctcacacagggcgtgaggcctggcttcccagtgagggcagcagcccagttactggggacgtcggccccgggcaggtcctgctggctggctcctcaggctacctggtgggctttaaattcctggaaagtcacggctctgacagcggctccgctaactcattccaccgtctcatttcacgaaatgaatttaaaactccgctccctgacctcacacgagtccccgtgagtctctcacgccctctgctgtgttctcgcctggctaaagcaagtggcttttgaggtggagtccgaacccctgatgggaaactgcgggctgcccgcggtgccaccatgctgggtacatgggggacagggctgttccatcttgcgggtacctgccccttcaccaggggccttgggaggggccatgagaaatggcgtgacctgtgcagcctgtcctgggttctgtaagccagtgtaggtgctgtccctgtgaggcccgtgtgcctcccctcactgctccgagctctctggctgaggagctggggcaggagccccgggagggtctgagaagactcagagagaggtggactctttgtagctggtactaggtttgctttacagatggggaaactgaggcacagagaggttga

SEQ ID NO: 7137 - DNA, 6000 bp, Homo sapiens
cattacagcgtccctttctgcagtgtctggcccctgcccacagagcccccgctgactccccgaggccccaaatcagaacacggagccaggaccctccaggcgtctgtacccacacatgggagcacccacattctccgtggtggatgccccactggtgcacccacagcctgcgcctcactcccaccagcctctccctgcctttgggggcgtctaatgccacctgctccagaggcaccagaaccccctcagctctgcccctatgacctgccacactggggcctcaggtccctgcatgccatggccagggtctcagcagaccccactccctctgaccgggagttggggacagctgtgtggcagcacggacccaactggagacacaccgccagcctgagccctgtgcctggtcgtgggtgtcatgtgcaggtccccaggaacaggcctggctgctgaagaggaacatttccacaggagaggccggcacggacgctaacccccttcaccaggacggcggacgcgccgcccggccgttaccgtttttcttggggcctctccacaccacggcctcgtccggcttctccagcaggaagcccacagacatgagcgagatgctctgctcccggtccaggaagacgggtgcccagccgcggtcgcactggtgcacagccctgccctgcgccccgagcatgcgggggatactggggccacacaggtccacatccaggattcccacctgcaaggagcggcacagcctaggccgggggcaccgccaggcctccaccgggatgcgggcagctgcccggggctccgcccagtgaggggtagggcgctcaccttcttgcctgcatggcgcagtgccagggccagctccgtggagatggtgcttttcccaacgcccccctttcctgagaggaccaggatgatgtgcctgacgccggccaggtttccaggctctgggcggaaacacgacagagaaggtcagggctcctggtgcccactgtgcccacacacgcggggtcacccactgcctcttgcacccacgttctgagcggggcagtggtgaatcgccagacccagaggcagcccgtgccccacttcgccccgatgtaaagacctccaggcaggtcccctgcagccccagacccggggggaccctctaagaccacggcactccctgcacctgcctgaggcggcgctgctgagagtggaaactgcccaactcctctcgctgtgtggaagggtgcatgcgttccttcgtgcgcgtgtgcaaacacacacgtgggtcacatgatcatgaaactgccagccccctgctatttctaacgggaaccagactccactctttccccagccagtgcacctgggctcggcagaggcagcagagggcccagggtgggtggcaacaaccacgcgttgtcacacaccagcgtccccggctctcggtccctgcaatgtgcggtaagtgaggggagccggctgcttccagcacagctccagctcctcttccttccagggtcccatcctgtccctgccacacggcaggggctgctgtgtgcagataccttggcaaaacccctgcattctcaccccggcgccaccgctgaggccatgccccttgtctccagcaagctgctccatccccgacaggtccttggagggtgcatgtgaggggctcaacacatgatgcgtaaaacctgcccccttctgatccgcctctcaagggcacgttcaaaggctcccaagtccaaagcctcccggagaacctggcatgcaggcgggtcctcagacctacagaggctgcctgaggtctcctccaggggacgcggaaaaggcagccccagccccacactcctgcaaacacaaagccccgagaccacggcctcccggtcacccctggggcaataaaaggggttctgacttaaattacttcaacaccaagaggtaccagaagtggcccgtgcagagagggagcatgcacttctgtagctgccggggactctgtcaggcctgggtcctgactgccatgctgccatcagtgctggcaccagcggcagtgttaacccccaggggctctcctcgttggcagaggtgggggaatggtgcctgtctggtgtgttgggctgagcaccatggtaaatgcaggccttagtgtcaggaaccgggacaacaaccctgagggttcccccaagaacatttcacttctcagcaaactgaggcagctcctaagcagattgtcagcaaagcacagtcagcatgagcctgccgggtggggcagtggggctggaagtgcaggaaggaggcgaagcaccatctccccgaggaaggcgagtgcgctctccatggacaatgagtcccggtcagctttatgggttagcaaatccagatcattccacgtggtggacaaatatatttttacagtaaatgtatatttttattttgagagggggtctcattctgtcgcccaggctggagtacagtggcgcaatctcggctcactgcaacctccgcctcctgggtccaagcaattctcgtgcctcagcctcccacgcctcagcttccagagtacctgggaccacaggcgtgcgccaccatgcccagctaattttttatttttttcgtagagactgtttctctatgttggccatgctggtctcaaatctgacctcaagtgatctgcccgcctcggcctcccaaagtgctgggattacaggcatgagccaacttgcccagcctaggccttttgaatttttatgtgcatattttccccgtttaaagaaagcttggggccgggcgcggtgtctcacgcctgtaatcccagcactttgggaggccgaggtgggtggatcacctgaggtcaggagttcgagaccagcctggccaacatggcgaaaccctgtctctactaaaaatacaaaaaaaattagccaggcgtggtggcgtgtgcctgttatcccagctatttgggaggctgaggcaggagaactgcttgaacttgggaggtggagattgcagtgagccgtcatcgagattgtgccactgcactccagcctgggcaacggagcgagtctccgtctccccccaacaaaaaaacgaaagcttggactaggtgcagtgactcacgccagtaatcccagcactctgagaggccaaagtggaaggatcatttcggtccaggaggagttccgcaccactctcaataacgtattcagaccccatgtctacacattaaaaatgtagccaagcggggtggtgcatcctgtggtcccaggtgctcaggaggctgaggtgggagggtcgcttgagcccaggaggtcaaggctgcagtgagttatgatcgtgccactgcacttcagccttggcgacagttaagaccctgtctcaaaaaaaaaaaaaagcttctatcaatctcagtaatatccttactttgtagtaaatccgtcctgataataaggacaggcttttccaggcttctcctctggaataagactccagcactgggccaggcgccgtggctcacgcctgtaatcccagcactttgggaggctgagacgggcggatcacgaggtcaggagatcgagaccatcctggctaacacggtgaaaccccgtctctactaaaaatacaaaaaattagccgggcgtggtggcgggcgcctgtagtcacagctactcgggaggctgcggcaggagaatggcgtgaacccgggaggcggagctggcagtgagccgagaccgcgccactgcactccagcctgggcgacagaacgagactccgtctcaaaaacaaaagactccagcactcggtttctaatctgtcagagttgtgctgcaagaccttgctgtccgaggaatgttttccttttggtatcggactcgaggtctcttagaagataaatgcggctcccactactcaggagggcccacggcgctgatctggcgaacggatcgtccccactggtgtgaattctgtcccgcgcaacttacacttttctgaacactgagagcgccacttccacaaagaacttaaaagcatgtgagattctggcgtccgtcttactttcatgactgcgcgcgtgtgatttatttagagacagggtctcgctcttgcccgggctgcggtgcagttgcaaccgcgacctccaggatagcggggcccacaggcgccaccgcgcccgcctacaacgcggtgctcaacaaagttaactttaaaagctcccccaactccacgactcaggccctccgagatcacggagcttccacatcgaagcaggagcacgcgggaaacgaccctgtttagaaaatgcccgcgccgcggcctctggcccggcccagccacgccggccggtgatggtcgcaccggaggcgcgcgacgcagcgaggccgccccgggaagggacgcggcggggccccaagcgaggccctggagcggctccgcaccctggcccgccactcaccggccgccgcctccatcccgccgcctccaggagctcgcggctgcagtccgcttacgcccgcgggccgtcagcctcccagctagagcgaagggccttccaaccaatgggcagtgcgtgcccgcccgtggctcttcttgacaggcctaatcctgctgtcccagccaatcagcttgccggaggagctctcgatccggtcccgcaggttccggcgcagacgatgacacggacctactttccggtcaacgcggcctgcggtaccacctcccacccgggtccaatgtgcgcgcgagctttgtctccaaccgcttgggaactgaccaataggaacgttggattaggactgacagttcctgaaacctctcggcaatagctttgtcacccgactcccgccccctctcccgaagctccgagacaggtgtgcccgcccctcgccgccggagccaatgggcgcagggggcggggattgtttacgtctcgctccggggcggaaagtgggtcagggccgggccggcggagcgcgcagcgggggctgcaggtgagtggcggggcacgggccgacgtctcgggctctgggcgggcgcgctgaccttgcgggcgcggcggtagcagcgcggccagggcgccgcctttgttcctctccggagggccgcgcccgagagaggcttccccggtgccgccgactccggaacccgcgcgcccgcgggagggaacagccaggccgggctgccgccggggagggcggctcccgctgcacacgcgctcgcctggggctgggcagggttcggcggtccgggcgccgcgatccgccccggcctccctggaaccccacccggggcccagcgggcgttgccagccgcgagcccggcgcaggggtcggccctggaaggctaggcgggaaccccggagctggcgagggaggtgccaggcaggtggcctgggaagcgcagacctggccctcgcagccttttgcattttataccataacagcggccagcgctgagcaggttttaagatttgtgtttcacgaggagccctggcggtagcgagcggaggggaaggcgagctgcgcggcccaggagacggtggcgggaggaggatgcaggcgggtgcggcggtcgggccgggcgtgaggggaaggtgtcggggagcggtcacggtgcttctggcatgaggaactgggaggccggagatgccatttgtcaaaccggacgacagaggaggagcgagtggaggttttagatgcctgcgggacaggcgggcggggcagccaggttcgtgaggtggaaccggagagaggggctgggattcgcattccggagtcatgggtgtctgggtggcgtttcacaggatctacctgggttttattgagctgctcagatcctggagtgaggtacgggctcctgaagcgttctggagccctggctgggcaccggtgcggcccctgcagtccccactttgagtgggtccgtggcccagcctggaagctcagggctgggagtgctgtgagtcttcctttgcccagagcctgtgttttcttctagattctt

SEQ ID NO: 7138 - DNA, 6000 bp, Homo sapiens
agcctcgaactcctgggctcaaacaatccatctgtttcagcctcctgagtagctaaggcttgcaccaacatgcccagctaattttttaaattttattgtagagttggggtctctcagtgttgcccaggctgatttcaaactcctggcctcaagagatccttccacctcggcctcccaaagtgctgggattacaggcgtgaaccaccatacccagctctcctatttaaaaatcttgtgtcctaaaatttgtccattgctaaaaattcctcataatcatgctttttagtaacgcctaatagtttcactgtagggaatgtatcacaatttatttagctggtcccccagcttgtgatatttacatcactttacattttcatgattaaagataatgattatcatgcggaacgtctgtgggcctttgcatgacatactgaatcagaaaggggttaaggaaagtgacgtggtggtcagaaagatcagagttcaaatccaggctctgcctcagttggtcattgtcattggagtcttggtttcctcctccgcacaaaggggacccttacaagagctccaaccttatagatttctaaaaacagctatgttgagataaaattcacataacataaatccacccatttaaagtctaaattcaatggtttttagccatgtacggttttggcgggattcaatgatgtagaatcattatgtgtgtgatgaacacacaaattgccatcatgatcaataattctttgttcataattttcattattttgttaggctaggttcttgagaagtatcgatgcaggataaaagcctataaacttctcaaatgttttgaaagtaggcttgtgaagataggtggccttcagtgggattttaaaatgtgcttttgttttttggatttttggtgtttggatagaatttgggggcattggaggtggtatgaaagtgttgggttatttgattcaaaataccctctttcattcccttgtgttgcaccactgaattatactcaccctcaaactgcacacacagagtaatgaggggaagtcacttctaattcacggaccctccctgcctggcacctcccccgcagagtcaccaccctatccctcttcatatccaagtgagactccttcggtgagggttgcatgagtaccatttccaattgcccaccttaactcaagccacgccagtttcatggcgggtgggcagaaatgagaggcaggggtctctgccaattccatggggtgcccacccaacctcccaacaaaccacagaaatattccatttggctgtgggtggactgactgcaggttttagggctgagttagtatggtgtcagccaaatccaggagtgtgttgcaccagagtggtgtgtgggtgaatcctcaggcatcccgcaggtgtgggatcaggttacgtgagatgggtgtgggctatgtggtgagggatgagaggaaggtgcacggagggtgggtggggtcagaggtgggcgagggtggaggtgaggaatgaggccccagctgaggttggacatagtagttaaaccagtggtttggaatcatttttgggtcatggcctcctttgagaatctgatgtatgctaaggaaagaatggacacacacacacacgcacatgcacacacacacacacacacacaaacccacaaattctgcatattgtgtcaggggttcccagaactggggaaattcatccaaggactggcattaagaatctctggtctggtctagttcacagggacttgtcagaaacaaatcctaaagctgcattaagagcttgaggatatttatgtcttctagagtgaaagagatttagaaaggtttgcaggttcaggaattaaattccaaagtccactttttccattaatttttttttctagtttttattttgaaaattttcaaattctaccaaaaaattgcaagctcatgtactgttcaactacattcactaattatcaaaattttcccccaattcctccccactctatgcatgcttatgctctcagaaacccacattttcctggagaacaatttgagactaagttgcaaatattgattcttcatctctacacacttggcatgtaactcctaaaattatgggattctcctgcataactaaatacaatgatcatactcacaaactttaacattgatacaatataacgttgtgtaatatacattaacattgtgtaatatacatcctatattcaaatttcccctgcagtaaccttctattaggttggtgcaaaagtaactgcggttttcgccattactttcaattgaatttcaataacttttgcaccagcccaatatgagctgtattctttctctttccctcctttcctttctactttaaaaaaaaatccagactctaattcagaatcatacacttcatctaattatgtctctaagtcttcagtaacaagaatacgaatctagggtttcgtttggttttctttctcctagtgacattgactttttgaagaactcaggctagctgtttggcagaatgtcgcccagcttggatttgtctgatggtgtccttatcattagattcaggttaaatgttttggcaggaggaccacatgggggaggtgtcccttctcagtgcatcacatcagaggatcagttggttccctactgatgagaagtttggaccatgggtaaggtggtgacctcgtttccccttggtaattcctaagtcatctgtggggtagcactgtatttactgaaggtctctgactgtggcaaatgctgggagagtcagtggtgagcgcccacactctgtccttgctcttgtgctgtttttacaaaggaggggacagacaataacccaggaaacaaataatgacaagatatgcagtttgatgaaggacgtggatagggtgctgagatagagaagtatcaactctagagaaagtgatctttaagctgagacttgagctggaggcatgcctgtagtcccaactcctcaggaggctggggtgggaagatcgtttgagcccaggagttctgggctgtagtgtgcaatgccaatcaggtgtccacactaagtttggcatcaactatgatgacctcctggggctggaggaccaccaggttgccaggtggcaaacagcaggtcaaaactcctgttcggatcagtagtgggatcatgcctgtgaatagccactgcactccagcctgggcaatatagagacaccctatttctaaaaaaatactactaataaagaaaaaggtgaaatttgaataggaaaaaggagacacccttgggaaggtggggtggaggggttgggggtggctcctagttaagcttggaggatagaaggaaccaaaagacggatgcacggtggtctcagggagggaggaatgagcagagaaaggccctaggcctggaaataatcatattgaacacatgctatcctaatagtgaacaccatcctaagtgtttcacatggtttaccttgtttaattctccttgcagccctgtgaagtgagcgttattactggttttatgctgtagaatctgtgacacagagaggttgagtaattgccctaaggtcacacagcttctaagtagcagtgctggatagatctgactccacagactgtgctcttagctgtgtcaagcaggaaggcccagggtttcatccagaaaacagaatgtgaaaagggactggaatgaaagcaacctgtactgggtgcagaggtgctgtcgataaaggatgagggatgggaaaggaagacagaagaaaggcctagaagatcaaaggagaagggtgttcaaggctgcaggcagcactggaagccaggccagctcagttgaccacctactctgggcacatccccaacccagcctgtcccttcaggtcggatttgcaattctcctgctctccctcctcctaaacacaaacaggagatttacactctcaaagtctctccccacaaatgacttattaatcacaaagggaaaaattgtaactttgcagtggcacaacctggtcaatgccagcttaaccaagtgaccaaagtggatattcagggaaggctctggaagggcatttgggggaagtgtagaaaggttttgtgaggagcactctgaatgacgggggtaggaagccttggggactgaggagtctaccctaacagggcagggtccagagggggaaggaggggtatgtctcgggggaagggagaagtattgaggtgggggaggttctgaggtttgagtgaggccctggggagggacttgacagtttgggtgacaggagggtcagaatagggtcagtatgggatgtgttgggtgggtaaaagctgggtgagtgcagggctggggatagggtctccaaggacagtgaaagggtcgggagtcgcgggcgagggctctagggcaacggccagtggaagggggggctcctgtggcgtgaagtcaagccagcccgagggtgaggcgatttggacagtccgacctgtggcggcgggagggcgagggtggcggagggcgcgaggtaggcggcggggcgtgccggggcggggccggggcggggccggcaccgcccggcgggtccccccgcgctccagggggcgctgtgagcctgggcggccccaggccgggcggcggccgctcccagtgagcgcggccccttttccgggtttcctccgcctcctcctcctctcctccttcttctccgctgccgccgccgctgcccctttcccggccggtggctgccgctgccggtgccgccgccgccgcctcctgggggccgcgagccgagcggagaccgccgcggagcgcgagcgccgcccgccccgccgccccgccggccgctccagggccgggccggctcggccggcgccccccgcgcccccagcccgcccgcccccgcgggcccggcctggcgcggccgcccgccgccgcgctcctcctcctcctcctccagcgcccggcggcccgctgcctcctccgcccgacgccccgcgtcccccgccgcgccgccgccgccaccctctgcgccccgcgccgccccccggtcccgcccgccatgcccggcccggccgcgggcagcagggcccgggtctacgccgaggtgaacagtctgaggagccgcgagtactgggactacgaggctcacgtcccgagctgggggtaaagccgtcgccgccccccgccgggcccgctgatccctgcccccgcccggccaccccctgcgaaccgcactcgggcccggtggtgtctcccgccgacccctccgcgggcccgcagggaggcagaggtcccgctctcgcacatgtcctcgtcttcctcttccctcccctttacccccgtttcgtccctttctccccgctttgcgcacccctttcccccaaggaatgcttttttactcggggagaagtgtggggtccagggatcgacgccgggtggaagtgagggagctgcccttcctcacacttctgggtttccactggggtgggaagtcaacagctgtcctttggagctattaaaatgccctgccttttaggttttctgagatgaggtggtgggaggaaatttcttaaagacgtccagatttttaaaacaggcattgtctaccttgaagatgtgaaacgagaagcaggtgctggggagccgcggggcacagggggcaccctctaggccttcaggacgggtgctttgctcgcccctctggattggctcagagcgttgccttcctgccccatcttcccaagttaggagagaccaattaggttaggagctctgcagagtgaagggagccaagattatgtcgtggctttcatttagggaatgagttgtgacgtgatgtatagacacttccaagtgtttgcctggtggaagcggctgaatgacgtgtacagtgggcataggcttggttaacccccagtcctggcatttatgtgtgtgtcttccttttacagtaatcaagatgattaccaactggttcgaaaacttggtcggggaaaa

SEQ ID NO: 7139 - DNA, 6000 bp, Homo sapiens
catgtgctttggggccattattaaactaaataaggtttccttgaacacaagcattgcgatcccatgacagttgacctgctaaccccaagtcatctactcagtgactatcaagtaggttgtgtctacagcatgcatacgctagacgaggggatgattcacatcctgagcaggatggagtgggatggcatgagatttcctcaagttattcagaacagcatgccatttaaaaagtatgaattttttatttctggaatttttcattaaatattttcattccacagttgaccacaggtaactgaagccatagatgaggaggactgccatactcaatagacaatttatttctataacctctaaagacactactgataggtctaaagacaaccagatgacagattttcacaatggttaagtgagcaaagatcgctctgaccaataatctgagaggatgctaagatcaatgagcaagagtgatgacttgcaaatatacagcatctgtataaagtcagtgcttctgaaatattagtatacatcagcatcccctggagggcttactgaaacagattgctgagccccaccctcaggaagtccgatctaggagatttgggtggggcttgagaatctgcatttctaaccagttcttggtgatgctcgttggtgagaccaatcagactgtgagaaccacgactctaaagcctcgagcctcctggttattcggagtggcctatggacctgcagcatcagcatcacctgggaatttgttagaaaggcaggccctcaggccccaccctagacttgttgaatcagaatctgcattttcatggacctccaggcgatttgcatgcacattgcagctgagagtgctactttaaggtacctggcaaaacttgacatttgccaaacccacagccataactctttcattacagtcctgagaagtcttaccaaatctgcataggacctagttgatgaaattaaccctccccaaaatgtgcctccttccacctattcaccagaggtataggttaggagaagggaagcaattggtccctcaccctactcttcaaaagggtgtactttttcaataatggtcaatgtggtacaccaagtgatccctaagactaaagaaaaggtggaagaagctgtctgaaatcttgtctaacatgccaccagccccagcatggcttatagccagccttggggtggctaggggcaactcccccaacttcagacctgttccagtgcttccccaagccactgaagctgtccatatacattttataaaagtgatcagggagaagggagggggagaaacaaaaacgaacccaggttgcagcacactcagcattaatcactagatcagcctgcgctcagacctgcttcctcatagctgtttggtgcctgctgtttcagaatcacgtagaccctgctaaagatcatagttcccctcaatgctctggagataacaacttgaacattaggaaacgttaagttttccgtttgagatatttattcttggtcctgtgtaccagtgaaacaactgacatcagctgatctgaaggacctcacgagaagctgattcaccaaagaatgcggtttccacatcctgatgatttcatccgtcttacccaaccaatcagtcacctggtttttcagcccttcaccctccaggatccccttaaaaaccccagtccagaactcttccgggagatggatttgagggtctcctcccatctcatcactcagtgacctttgatcatcactttctctgctgcatccccactgtctctgtgcattggtctgttactgcacagtgggcacacaaacgtgttggtcctataacaccactgagtctagggtccaaatcctcctagcccctgagagaggaggaagttccttctccctgggaccaagagccaagctcagatcctgccccagtgtgaaccctcttccaggctggtttgagattgggtgcatttcttccctttaggtttttctcgtgcttccttagcctcaaacaataacaaaatagtcttatattagcaaatttggaatggcaaagtagcttaacagcaggcttgatgaaaataacccttccaacacatgcttgtggaagttacattggagaatccattctcagcaaagcagaccaggagacttctaactgggggatgttcagaaaatgtcagggtagctgtgtggcagaactccaaggagcactgtgcacagaataccatgggaatggggctccctggcctcgttccacactgggcccccagtgagtgtggcatgctaagtctaaccacttctttaggagcctcaagtcagaggtgacaatactgtaacattggtgagggcctgctacatttcaagacctctacctaataccttaaaccctgttgccctgaaactccagctacaattacattgctgttggagaaactgctttgcacagttcaagattttggtacaatttcttacaatgtcatcagcagcctcttgctacaagttatgtcataacttttacatacttgtaatagctattatgaatagttgttacagaactattacaagttctagcataacaaccaagcatcacacagatgcagatgaattgtaactgtgaaataatgactagtatgcagtcaggcacatcagttatcccctagtctagaagagtttcaacaggaatggtcacaggtcagagaagaggaacaagggtggaaggcaagggtagcctttgggctttatttttaccaccactgctagctcaattatgcataaataatcttacctagttggcatttttcaagatattagagaaaagaaccacttctttctaggaacttctgacctaaaggtaggcattggtctgggccttgaataaaaaactggttacttagcaacctgagccagaatataatttcaggagaaaagaatacttctggtaaaaaaaaaattccttattgtttgaattattaaaaactgtatcattacccttgggaaattcagttcacctctaagaaaaagccaaaccaaaaagcaaaagaaacatgaaatatattagatatgcgtcccgtggaaatgcacacacattggagaaatagaaccaaatcattcccattgatttacattttttcagtgtttttcatcaaccatcatcaaaatcctaaaaccaaactttgcaagacatttggagatgtccttggcagcactactactacttgttagcgcacctaccttcattcataggattgtgtcagcaaaggttttaacaactatgaaaaccccacctgtataggagaatacattttttatggatttttctagacatgatatatccatgacttgccgagttttggattagcctttgtattcattttctatggctgcataacaaattaccacaaaactaggagagcaaaacaacacaaatttattatctcacagtttccatgggttgagagcccagtgtgaactggattctcagctcagggttccacaaggctgaaatcaaggtgctggccagctgcatcctcatcaggaggctcaactagggaaagatctgcttccaaggaccctcaatgtgttggcaaaattcattcctttgtggccatatgactaaactccttacaggagagtctctcttccagttcaaatttcttctaatctcttttaagtactcacttgattcggtcaggccgactcaagttaatctctctttttattaattcaatgtctgctgattagggaccttaattacatctgcaaaatctcttctgcgatattacataatataatcatgtgagtgatgcatagcccatcatatttacaagtcttgttcacgctgaaagagggcataatacagggcatgaacacgaaggggtgggaatattggaggtcatcctagaattctgcctacttttgccctttactcattgcgtccctgtttctgttgaggaaaatactccattttcaagactgttataaggcctatatatgcacttttcattcattaaagaaaagtatcaccatgcattctgaaactgttattctttgagctccactgtaatctagcccttgtcctaagtccctgttcactctgaaagcttatgataggaaaggctgatgcacctccctgttaactgcatgtttaccacactccggccataaattgcttttaaatattttgccacatagttgggatttctgtctcaccatgtaatgtgattcccgaagcagctgaaggggctgctttccaggggacctatctagagacccgcactcagcagatctggggcctttctctctgtctgtaaccagccctcctaggcatcagagcatgttaaacacacccccaaatggtggagtgacagacactggtggtacctgagatcttaggtggtagacaggtagtgccatttttaattgagaatttattttgatgtgtcttagaaaaaatatacctattcaaactcatggttttagggcataagcaaagctaaaagagatttaaggtattttttaaagtgagttgatttgaggaaaacattaaatagataatacaagtggctagaatatggtgaaagtgatgacagtgttactgcagttagggaaacgtctgcatctaggaaattggtaagtgaccaactactgaatgaactagtgaattcggtgactattgaataaattatgttaagtgaatcagactccaagaacccattcggtcttacgaacgtctacagaagcccaccacgtgccatcagttgggcgtgagctacacacccattaaagcacgtctcaaaccacactccagctacctggcgcgcagcgcgatagtgtgtgcagtgtgggtggagccttccgagggcgtggccaatccacctgcggcctgcggtgggggcgtggctggagaggggcgggccctcgcgacggaaggcggaagtgctgtagagtcatgtgactcgagtaacatggccgctgtctcgtgagtcccgctagtgccgggcgggagttgttaagcggccagggtcaggtgtgctggagcggggtccgggcccgggttccagggcgaggcggcggagcgtggcaggcaagcctagagcggcgtggtccatgcgccggcgccgggggcagagcggagccgcagactcccctggccccggcgcggccccggcagccgcgggctaaggagtcgcgaggttcccccagctgccaccatgaaccccgagaaggatttcgcgccgctcacgcctaacatcgtgcgcgccctcaatgacaagctgtacgaaaagcggaaggtggcagcgctggagatcgagaagtaagagccgccaggacccctccctggctatgcagcccctgactgctctgctccccagggggacttctcacgccttcccagccagggttactttcccaggttttaggcccttaccttagcgcagtgtttaagagcagattgggagccatatctgggagtccctgctttactcctgactggctgtgtgatttggtcccagctttttaacctcccggtgccacaaagggctgcagtgagaatgaagtgacatcatgtatgggtagtgctttgcacagtgcatggcacatggtgagtcttcggtgcggtgccacccaaaccagcaaatcagagagttgtctctgtggtgagagagaagtcagaagccggagaatttgcaggtgatgctgaccagcctggtttcttacccagcttctgagaagtgaaggagattgttagtgaccaagtagagaaatcaggtcggaaaactcgtgatctcaaggctcagagagttttttgttttatctgtgttataacacccttccctgcaagtggaagtagaaataatttgacctttcttgcttctgcagtcttgttacatgtatgtgtaacaatgatctgatattttactttatttcccaatgtacaaaacagcgaaagtttaactggggatgttttatttatttttttttctgcagtat

SEQ ID NO: 7140 - DNA, 6000 bp, Homo sapiens
cctaacccccacagctgccccctcaaagtgggcgctgagccaacccctttacttgaagttctgtggcccacctccctgccaaaagcttgctgggctctcttgctcggtatgtggaccagggactggatcactgtcccagccaggtgctgacacctggcctttgcagggtggcgggtatgatctcaacctcttcgccagccctcctgacagcaacttcgtgtgctccgtctgccatggggttctcaagaggccagcaaggttgccatgcagccacatcttctgcaaaaagtgcatcctccggtggctagccaggtgccagcgggtacccaaggggctgggagggcaggagtgagactgggggccattgctgtggcccagaacagaggggaaagtcagccaaaagactcagccaccaaatctccctaaactaaaatgtgtgtaccctcactcagtagtgtctgcagaccccggccccaccctcagagctgagagcgccctgtaatatgccctaatgcctcatccagctaatgaagggaccacctgggtcaccgagtgagggcttgaccagggctcccttcccactcccaacactcacccctactcatgcctccttccagacaaaagacctgtccgtgctgtaggaaagaggtgaaaaggaaaaaggttgtccacatgaataaactccggaaaaccattggccgcctggaagtcaaggtagctcaaagtacccactcccctgaccctcaacccttctcacccttgtaggggtggggcagggctaggagagaaggcaggagaatcccatcttcagagagaaacaagtgcagccttgggacgaccagacatagctgagtttggatcgtggctctactgcttagttgctgtgtgactttaggcaagtcacctaacttttccaagcccctgggttagaaaatggagattttagaggacttttaaaatggagattacagaggatttttagaggatcaagtgcccagtgtgcctgccactactctctagtcccctagttttacagatgggtaaaccgaggttaaaaaggaaagcctggcatccataccactcaccagaccaacccaactgtgtaccttccagttccccaagactcaggcctcaccctctcccctggaacttctagcttcttcccacgtctaggcatttgccccagtgttctctccaccaactcaccagagtcagaaaagcgtgggaggctcccggttccctggttcctggcgaatggaaagccaggggtgggggattccgtgggtgtcctgcccggtttcttcacacgttctccttcaccctcagtgcaagaacgccgacgctggctgcatagtgacatgccccctggcccatcgcaaggggcaccaggactcatgcccctttgagctaacggcctgccccaacgagggctgcacctcgcaggtgccgcgtgggaccctggcagagcaccggcagcattgccagcaagggtcccagcagcgctgccccctgggctgcggggccaccctggacccggccgagcgtgctcgccacaactgctaccgggagctgcacaacgcctggagcgtgcgccaggagcgccgtcggcccctgctgctgtccctcctgcggcgtgtgcgctggctggaccaagccaccagtgtcgttcgtagagagctggcggagctcagcaacttcctggaggaagacaccgctctgctggagggtgccccacaggaggaggccgaggctgccccagaaggcaacgttggggctgaggtggtgggggagcccagggccaacataccttgtaaataggtaaataaaagcagacccccggcctgcctgcctctgtgcctgcggccctcacaactgtcaccggtgcatccctgctgccctctccaggcatttgcctgctctctttcatcttttctttttcaaaggaaggaggccgggcgtgggtggctcacgcctgtaatcccagcactttgggaggctgaggtgggtggatcacctgaggtcaggagttcgagaccaacctgaccaacatggcgacaccccgtctctactaaaaatacaaaaattagctgggcgtggtggcaggcgcctgtagtcccagctactcgggaggctgaggcaggagaatggtgtgaacccgggaggtggaggttgcagtgagccaagatcacaccacttcactccagcctgggcgacaagagtgagactccgtctcataaaaataaatcaataaataggccaggcgcggtggctcacgcctataatcccagcactttgggaggccgaggcaggcggatcacaaggtcaggagatcaagaccatcctggctaacacagtgaaatcccgtctttactaaaaaatacaaaaaattagtcaggcatggtggcgggcgcctgtagccccagctactcgcgaggctgaggtaggagaatggcctgaacccgggaggcggagcttccagtgagcggaaaccgtgccactgcactccagcctgggcgacagagcaagattccgtctcaaaaaacgaggccgggcgcgggggctcacgcctgtaatcccagcactttgggaggccgaggtgggccgatcacgaggtcaggagattgagaccatcctggataacacagtgaaaccccgtctctactaaaaaatacaaaaaattagccagacgtggtggcaggcgcctgtagtcccagctactcgggaggctgaggcaggagaatggtgtgaacccgggaggcggagcttgcagtgagccgagatcacgccactgcattccagcctgggcaacagacccagactgtctcaaaaaataaataaataaaaataaataaataaggggaatacaagaatggctactccatagacagaatacctttttcttcttttttgagactgggtcttgctctggcacccaggctggagtgcagtcacgtgattacggctcactgcagcctcaacctccctgggctcaagcaatcctcccacctcagcctcctgagtagctgggactacaggcacgcaccacgactgccggctaatttttgtgtttattttagagatggggtttcactgtgttatccagactggtctcaaacttctgggctcaagtgatcctcctgcctccaaagtgttgggatcacaggtgtgagccaccatgatggcctactttctttccctcaaatatctctcctctcagagattttccctgatcatacttctcagttctccttctcagttactttcgttttttcatttttttcttttctattttttgagatagggtctctgttgcccaggctggagtgcagaggcccaatcacagctcactagaaactcagcttcccaggctcaagcagccctctcacctcagcctccagagtagctgggactacaggcacaccaccacccctactaaattttctgtgtgtgtgtgtgtgtatgtggagacagggtctcgccatgatgcccagactggcccagttacttttttttttttctctgagacagtcttgctctatcgcccaggctggagtgcagtgacgttgcgatcttggctcactgcaacctccgcctccgggttcaagcgattctcctacctcagcctcccgagtagctgggattacaggcacccgccaccacaccaggctaatttttgtatttttagcagagactgggtttcaccatgctggccaggctggtctcgaactcctgacctcgtgatccaccggcctcggccacccaaagtgctaggattacaggcgtgagccatcgcgcccggcctggctgttactttctaccagcttcagagccagtagcacaaatggctcaaaaccttgaactcagagtaaaagctaactcctcgccacggcgcacaggcaactgcatgccctctgccctctgcacccactccctgcagccacccggcttgttgctactcaatgcttggcacccccagtcctaggcctgtgccctggctgttctcaacaccattcgttccacagggctccctgcttcgcgaacttgtgtctgctcaggcgtcaccttctcaatacagcctcctccttcctcccttccgctccctcccttctgtttttttttctttctttctttctttttttctgagacggagtctcacgctgtcacccaggctggagtccagtggcgcaatctcagctcactgcagcctccgcctccggggttcaagcgattctcctgcctcagcctcccaagtagctgggattacaggcatgtgccaccacgcccagctaattttttttttctgtttttagtagagacggggtttctccacgttggtcaggctggtctcgaacttccgacctcaggtgatccacccgcctcggcctcccaaagtgctgggactactggcgtgagccaacgcgcccggccctcctcctttttccatcgcgctcagcaactatcactcgtcgcccgttctgtttcttctctggtgtccgccaagtgccgattacagtgctttgcacacagaaggtgctcaatacatgaatgcctttgagattacccggtttattcatttacctacgttatttatcaagagccacactgcgagcccaggggcagggtcaggttgacggctctacgcacggaccgcacccgacagctggtacccccacatcccagaacgccgaaaagcaggagtaaacgctggctacaaatgcctttttatactggtatcaaagagccaggccaccagcgatgccacatccgccggtctacccccaccgacccgcgaagcaccctcacagctcacggccctccctccaggccggaaacgtctccgcccgcttccgcttcccgatgcagccgccactgcccgaagcaaagatggcgccaagtgcgcggcgccggcggggacgtcacagtggtcgcgcgcggtgacgccatcgcagcgcgccgggagtgtggcgttctgtgaagagttcggtgctaacctccctcacgcggcggtggctgccgggaccctagcaggtttcagctggagcggcggcggcggcaacatggcagagaccgcggccggagtgggccgcttcaagaccaagtgagcccggagctctggggccgtgcggggagggagctgggtttgcagccggcatagcggaggcgcgcgtggggtgggcacgcattggggtccgtggaggcgagaggctgtgtgtgcgccggcccgcggggtcgcggaggctgcggtgatactaggcgggagagccggccccggctgctctcggggaggacggcgatcggagcccggccgccgggagcagcagcgtgggctcatcgagaagccggctatggggtggagtggggaccagaagtcccgatgaggggaggagagggctgagcctaggtcggggctggtcccgggaggcggcgggggcgaagaaccacctctgagcagtcggcctggggacctttcatccgcgatccgtcttctccagggagcagggagaatgcaggagaggggcgggtccgcagaagcccaggaggccctgagtgctgtgccccgtcactccccaagcctttgccgaacagcagtgctggtgcccccgccctggcagcgcagcctcatgggattatcgtttccactggcggctgtggggctttggttgtgccaagcactggtaaaggaaagtcccaggctggcagcaccgtcgtgggagggtcaactgggtgcgggggctgaggggccgctttcgttttggcagtcaggcttccagaagcgcagtgagccaggccttgacatctgggaagagaagcccaggccgcgtacagggaatagggggaagataggaaacccgtcccagaggctgggacaggagcagtggggtgcactgtgggccatgagaaggaaagaaagcagaggcaagggtggcagaggctcttctgggcaaggtctgggaggtgtgtgggcagaagggaggggctaacgcagggcagtgacatctt

SEQ ID NO: 7141 - DNA, 6000 bp, Homo sapiens
gggcagtaaaaaaaacaaaacaaaacaaaacccacaaaaccattaaaccgggggctccaccaagctggccacaatttaaatagcagaggggtctgccctcccctacctccagaagcagtgaggcctaaccccattgaaagcccattctgggtggtacttcctctcacagaggcctgccagccagcagctgggactcggctcgtcgccacggatgtgtgcttctctgaacaatgttgggaaaggaaactagactcaagggctccagggggttttctggtcattttggctgtgggggtagaggggtagggttggcgaggttccctggggcagggcggtggacctcagcctggtcactgcctttggaggtggtggtggaggaggggaaaggaggtctgggtttgaaataaccctctaagggtgtttttttttttttggtcagggtcttactctgttgcccaggctggaatgcagtggcacatgatctcggctcactgcctgcaacctctgcctcctgggcttaagtgatcctcttgcctcagcttcccgagtagctgtgactcaggctcactccaccaggcctggctaatttttaaagttttttgtagagatggaggtctcatcatgttgtccaggctagtcttgaactcctgggctcaagtggtccaccctccttagcctcccaaatagctgagattacaggtatgagccaatgtgcccagtccacagatatttttcaaaacagctttcttgagatataattcacatcccatgcaactcatgcatgtaaagtgtacagtacagaggcttcagcacattcacagagctgagcagccatcgtcacaatccattttagaacattcttatcatcccaaagagcagccctgtaccccttatcttttaccttccgataggcccgctctctgctttcctggtccttggcaaccactgatctacgttctgtctctgtagatttgctaattctgcatatgctataggtgggtcttatgatggggaaattaagtccaaagagggtggctgagcagcccacagccataaaactaaggaaggggcagacttggaactggagcccagattccttgtttccaagttcatgctttcacaggaggtcttcttcttcccagtaacaattcctaaaatagtcagccttggttttgccccatggggatgagggctttacctccctcatctcacagtccccctcagatgtaggtacatttctgatacccataggtataataatgaggaaactgatacccagagaggctaatggtccaatgcaccatggctgccagcaaagagaagagggtaatagggaaaagcatttgtatgcccaaggactggtgagcaacacagaatacaaagagtcaagatgattcagcttaaaatgtaattttctttcaggttattctttcttacctatccacttccctttttctttcttttgtaggaaaaggaaaagaaagatccctctaccctttgaggtcacttcctgacccatttgtgcatctatgtagagtggttacaaactcacatctccctgcctgaatgcctcttattaatctggggatgggtggcaggtcagcatgcccatgggctctgacaccagacaggctgaggttcaaatccagcccccaccacccactgacttaacccactctagccctctgacagctaacctgtgacagggcctttctacctcatatgtctgaacccacagagtggtttctttctctctctctctctctttctttctttttttccttctttcttttttgttttttttgacggagtctcactctgttgcccaggctagagtgcagtggtacaatctcggctcactgcaagctccacctcctgggttcaggccattctcctgcctcagcctcctgagtaggtgggattataggcacccaccaccaggccaggctaatgtttttgtattttcagtagagacgggttttcaccatgttaagcaggatggtcttgatcttccaacctcgtgatccgcccgcctcagcctcccagggtgctgggattacaggcgtgagccaccgcgcccggctcagagtggtttctttccctacctattttattccatggaaaagaaagaatacacagaatggttccttccccacctattatccttgggaaaagaagtgtcattttacattagagtcctcccagaacagcgcctgccgccttgatgatgacgacgattgttaattctgagatggagtcttgatctatcacctatgctggagtgcagtggcaccatcttggctcactgcaacctctgccttctgggttcaaacgattctgctacctcagactcgtgagtagctgacactacaggtgtgtgccaccatgcctgggtaatttttgtatttttagtagagagggtgttttaccatgttggccaggatagtcgtgaactcctgatctcaggtaagccgcctgccttggcctcccaaagtgctgggattacaggtatgagccactgcacctggcagattatttttattttgaacaaccaagttagagtttgagaaagagatgaagggcctccagtactctctttcaatccactgattccttcagtcgttcacctggggggtggggttgggctaggggttggttagcaaaaaatgagccaaagaagaaaatgaattaaaaacatgaaagaaaaaaaagcaaactgccatttacgatgaccattatctcacacacagtggacattttaactcaaaaatactataggctcacaggcatagattaaacagagaaacctgttcttcatgttcttatttttttgcttgcttcccacagatgagagaaaaatccagccagaattggcatctgtcaagataggcttttaggagccacggctccctagagtggtctccacacattctgattatatgcaatctcattttgccatcaagagacttaacccactcccctatccatgtagactttgtaataataaattatacatatatatgactgaactaatatattatgtactttatataacacatactaaaacaaaagtgtgaaaaagattggttgaaataaatacaagctgaagttctaaaaaaaaaaaaaaaaaaaaagtgaggcaaaggaattgcccctagatgtagtcatttttcctggggaattggcccaatgacttcaagtggttgatgtcataatgagtccttccaagatctctttaaaaaattgatgtgttaagtgatctgtggtgatgagcacagctatacacgccagttgggagtgctgaaagaaatgaatccacagatcttgtgaagtcacaaacgagtcctatggcttgggatacaacattgacagtgagagtgatattcctcaattaaaaaacgctataacaggccgggtgcagtggctcatgcctgtaatcccagcactttgggaggccaaggtgggtggatcacttgaggtcaggagtttgagaccaatctggccaacatagtgaaaccgcgtctctagtaaaaatacaaaaaattagccaagcatgatggcatacacctataatcccagctactcaggaggctgaggcaggagaatcgcttaaacctgggaggtggaggttgcagtgagccgagatcgtgccactgcactccagcctgggcaagagagcaagactttgtctcaaaaaaaaaaaaaaacaaaaaaaaaacaaaaaaaaaaacaaaaaaaaccaaaaacacacacacacaaaaaaaacgctataacagaccagtggcacatgcctgtgatcccagtgctttgggaggtagaggcaggaggattgcttgaggtcaggagttcaagaacagcctgggacacatagtgagacctcatgtcgaaaaaagagaaaattagccaagtgtggtgtgcctctatagtcccagctcttcaggaggcagaagcaggaggatcgcttgagtcccggagttcgaggatgtggtgagctatgatggcaccactgcactccagcctgggtgacagagtgagaccctgcctcttagaaaacagaagctataactcaagcaacttggaagtgaaattcaagtgcctgacagctgtctaggtgcccctgaaactgcctctagtcacaacaaagatacctccatcaaagagcataggaagggtttgaatcagatagcttcatgcaacacacgaacggaaaaataaatttcttaaagaacatattagcttcttcccatgagatcaggaaaacgggacatcaattgtctggggttctttgctcctgactccctttggggctggcactatgttgatcacgttttacagatggggaaactgaggctgtcggtttttaagtggtctgcctaaggtagcagtaagggttggtctgactccagcgcagcctcaacgagggcttcaaattagggccatgaattggcaattcctggcgggtaattgtgaagagtatatttatttttaatttttatttatttatttttgagacggagtgtctctcggccacacccatcctagctcattgctgtctcgaactctcgagctcagacgatcctcccgtctaggcttcccaaagagctgggatgacaggcgtgagcccgggcgcccggccgggagtgtgttaagtatacggcaaacacctggactgcggccggctctccaggaatgccatgatattggggaattccctttgcacctggccaagtggcctcgggcaggtagcctcccctcgggttgcctcagtttcttctttggcacgcagaggcggggctccaggcctgggccgctccatggcggggagggcgcggggacgctgcactcggggtgcgctccgagaggcggacccggctgggcgcgcctggggcggggcgaggcggggcgaggctgggcggtgcggggggcggcccccgaggatcacgtggcgcggcgccgcggccgaagcagaagtagcgagcgccggcggcggagggcgtgagcggcgctgagtgacccgagtcgggacgcgggctgcgcgcgcgggaccccggagcccaaacccggggcaggcgggcagctgtgcccgggcggcacggccaggtgagctgcccggccgggagcgaggcaggcagggcgcccagggacctgcgccccgcggggaccggctcccagggcgctgcgtccgagggggtctgcgtcctggctcagccggagcgggcagggacggggcgcaccctcggggaccccggcccgccgtgcccggggtccgtttggtgacggcagggatcctggcccagccgctggccacttcctcaccccgggccggcgccacctctccggtccgtgcggtggggcggccccagctttgaatggggaccgggaggaaggtcaggggtcgtgtgggggctggcgttcaaaactcctcttttcgagcggctctgcgtggggtggcgccgtctctcttgacggcccttgtgcccagagctcgcggacgctcggagccacacttccctgtctcacttcggtggttgcgggtggcgggtgggagcgataccgcgggaggcgcagtccttcccggagacttttggagagcttgcaggacactcgcgatgcccgctccgcagctgtctgcgtaattatgcgtgtgtctgtgcgtgttgtgttttgttgtgttttggaatcccaaagagggcattacccgcacagcgcaagagttcaggttaaagacgtgccccgtttggacggggagctcctggattccagcaggacggtggggcggggctctcttggtaccctaatcttgaactagggtgagaaactatggggggcggggtggtaaaggggtgacatggcgcgagggaaacaggtggccttgcccgtcggaacttaatttgaatttcagttccatcagtgggaccctgggcaagttgaagaacctttttgagtctgtttccccctctggatactggagccacccaattttccagggctgtgtcgaga

SEQ ID NO: 7142 - DNA, 6000 bp, Homo sapiens
attatctatggccataccaccctgaacacgcccaatctcgtctaaaaaagaaatttatatcagaaaaatggatttctaatacccttggctaatgcgttgtccttattgcctcagatgtatgattatagcttggacatgtggagtttgggctgtatgttagcaagcatgatctttcgaagggaaccattcttccatggacaggacaactatgaccaggtgagcaaatgctttctggttcttatttatttgggggtgaatgccaaaaaaatagcatccttagataagaatactatccttgagccactaagtatcactcagtgtctgcatatgagcttttcttcaagataaagatcgcacagaattttgtgtttaccaggtccgcagaagtagaggcagataatgccatctatgccaaacttccaaagtgaatctgtgaagaagtcaggcacctccttgtctaataaaactagattttagtcattagattgtgatgccctgtactggtccacctctagaagattattatcgtaagttgtattattttaaaggccgtttggaaatttgcattcatgtgaacttcttgtccttgggtctgtctgcctgccctggacctgggtttgtatctcgttcctagaggtttagtggtgtggaagtcttctgattccttggtgcagtgtcctcacgggctcatggtgtgttctgtgctcagtgatttggtcagtttgttttgtgtttcagcttgttcgcattgccaaggttctgggtacagaagaactgtatgggtatctgaagaagtatcacatagacctagatccacacttcaacgatatcctgggacagtaagtaagagagagagagagagtgctttaccttaccccgtttcagaagtggaaaggttagccaaaatcactttcttttcccattctgattatagtaaaatggaagtagccctcttttttcctatgcatattttcttttaacttattgagatatttggactttatgtcttttaatcattttacttctctgagagataacctattaatagaaaaggtaaaacaaaaatcataatgttatagaaaaaagttttctggtacagcaaaagcttatttttaatggccaaacttggagagcaatgattctttgaataagagacttagtttgttttttattatattttattttatttacttcatatctcttcaaggtggacttacaatttcttcttgttctctgtaatggattttctatacaatagcaaattttaaagcacattgagttttcaggtacattgcaataatgttgagaagtaaacattttgttaacagttttcaaacagtattttatggaacctccctgtttctgaggctagccctgggaaatatatctgctgaccaataaaaattgcccactcttctgcatgccacccagaattgactaaaagtctacagcataaaaaataatctagaaaggttccacatattctaaatgagatatagaagttttacctagttgtatttttctaatcacagagcaccattgtgtttcaggatgctatgctgtaactatggggccgtagggcaggcaccagttagagatttaacaagcttgtaatcagtacattattctgagattttgttggctttagccctagtagataaggattcttgttgaatttagtctctggttactaatgcttcatttttcttctcagacattcacggaaacgctgggaaaactttatccatagtgagaacagacaccttgtcagccctgaggccctagatcttctggacaaacttctgcgatacgaccatcaacagagactgactgccaaagaggccatggagcacccatacttctgtgagtctccagggactgtgttcagggagtaattcagtcaagagaacaaatcttccactctttgtctttgagaccagtcaggagaattctagggtatttggattggattattcctagaatttggcctcatttatcgtagatgattgagacaactttgcagatccgtttcttgatcaccaaaggtgtttgcttattcactgaatgtatctccccggagttcaagctgtttgactactccctgttaccctgagttaatagatcgcaagtttctaaaatttctttttaaacatacatatatttgtgtggaaacctaattgaagattatttctcccctcagaaaactagtaattagttaaaagtagtaagataactattgtatgttttgaaagaaggagatgaacagatggatggacgaaaggaatttgaggaaagggaagtaagtgtggagaggcctcactgaaatcttgactgaactgctcacttagaagtgtgtgtggattcactttgcgtgtttgcttattcttctgcatgtgtatggttctttcctctgataacgtgtgtttcaaataaacttcctcctattatcagtctccttcctggggagcagggaggttgagagacttacctcagtcgctttctgaatcaagagggaaacgttcaccccttaaagtcgttgtctctggcttaacaaacatgctgtctttccctctcctttgatttcctctggagatgaactaaattcttgcctgaagaatgtgtcgctgtagtcttgagcctgtggcccatatgcataagggagaccgcaaatggaaaagccttcagccttctagacctcagccccaggaaactcagatgtccccgccccagtgtctggcacagaaagctgtttttacccgagttagatcaaattaggaatactgatgtttatgacatgtcattaatgatctttctgcttttctgaatatatgtcatacttcaatttaaaaaatttcaaactacggttgcttaaaatggataggtcttctgatggctctttttactcacctttcctttgaagtgcttgttattctacatgctttgaagaaattaggggttagagatgatattaatattgaaagaaaataaatgtagaaatttgaacagtgggaaattagagtttctatgcctcttagcattgagtctgtactccgaggaagggtaagagttgactgcaataacaatttccctgatcatttttcagtgtttggtttttatatggctggaattccgtgatttccgtctctcctgttgcccccctgaccctggcttgcccatcagtctgtctctctttccgttgaaagggtgggtttgccatgggcttctctcagcactcaccaccctgattgcctgactttcctcctgctttcttgcagaccctgtggtgaaggagcagtcccagccttgtgcagacaatgctgtgctttccagtggtctcacggcagcacgatgaagactggaaagcgacgggtaatgcggcattgatgcttgccaataaaaccaaccaaccaaacacaaaccttgaaggaaaactacagtgtgataaaaagaaattcttatcattccttctaaatgcacagaagagtaaagacctaaaagtctgtcaaaaagcaagaaagaaactccccagtgctagtctccagggagctgtcactgtggcagcatggggatgcacctagttcaggatctgaaggagctctgcctttggaatgcatgggagatagagactcggagttgttgtacatttacctttgtttaacagggcaccactgttgaattaacccattcagtcaacaagctctgaatgtctgacttcctatctattccattgtggtctgggtttcctttggtgaaattcaggctcaagtcttagcgaaatgtcagcagtctatactgacacaccagcctcatttacaaaaaggagatattaaaacagtgacagtattttttttttaagctctttacaaatccacgttttatgtattttttaatgacatgagctctccaggaaatgtacctcatccccgcagttttcctccaagtggattcatttgggagcaaactgcagtcactttcacaagagtcctctttgatgtcaggagggatcacgaaaccttgcaatgccatgaactggtccatggttatcatcaaaagttccatgctaagtgcataacttggagctcactataacctttgttgatttccctaaccataaaatcttgttgctatttttttgttgctttttcttttttttttttttttttttttttggcagccttgtaaggagaacttcaccatttcccagcacatccctatgtgtgcgcctattttaatgcacctctctgaaacagagacctttttgttcacaaccataactaaagctggaaagtcagtcttcaggcaaggcgagggaggaaaacatcccattagaattttttcaggaaagacttatggaaaaaaatatctctctcccacctccttttatccccatgagacacagtttcccactgtaatcagggtaatatgcatttgtaagttctgatatgtgatacatttatgtgatggcaaagataagtctgtcttgcatgcaggtactagagttgtgtgggcagggtcatctgaaactcaagcaactcagaggaatatacaaggggcttggggaagaaaatggtgctcccggagcaagtgttggatccattttgcaaaccttcatgttagcagagaaagctagagtttgtttaaacaaaaatagggctgatttcattttggggactcaggagcaacatggtttgtaggcagtcccctcaccccagctgcagggccatgccacagctgtggggacttcacacacctaggctagaactagaggtgtctaccacatcaccctttaagatttctttattaactatttaataatgccatacatttttataaggttagatgtttgtttgaaacatttgtttacattccatattccaataaaatcttattggtattggtagcagatcctactctaaatgtagattctatttttgtcgtttggtctgtgggaacttaaaatacaaatgaaactcttctcttattatagagttgagtttatagagtaaaaaataaataagatcccaaagccaaggaatgcattcagttaaggttctcataccaatgctgcctgcttgcattgcacattctgtatactaatgtaaacatttgttctacctgaaaatcaaaagcaagatgtgagctctttggctaaacctgtattgatatgtcaggcagcaaaactcagtgtttgagattatcaaaagccttctaatatgcccttataggcaatcctgaagcattggttatcatcagggagatgtgccactgcgtgtctttcctgctccccctccaatctcctttatcaccccaccccactcctcagccctccctttttttttttaagttgcctgtctggaccaggcaagaggtgcctactggagggtcttggtgaagcggtaactccattcctttcccttgggtcccccaaaggtaataaaagtacctggaggagaatagtcaggtgattgacctctgcctgtctctctgacggtgatgtaggtgcagacaccgcctgcctgccttgtcctggggttttgtaactgcagctttgacacaggcattcttcctttgaagcacacagcttgcttttccagcacctagacttttacctctcttcatgccttagacttagaccataactgggcttgaaatgctcaccccttcctgggtctggtcttggcacctaggctattcctttccaaactgaagtgagtccagtttcagaccatctcttttcctgtctccaaaaaccatttttgtttccaaacctagctcccccgaaattttaagactatttacctagattcggagatggtcttggagagttccaaaaggggtgtgtgtgtgtctgtgtgtgtgtctgtgtgtgtgtctgtgtgtgtgtctgtgtgtgtgtctgtgtgtctaatatttagactaaaccatggtaaatgtacgcacccagtatccttttcagttagcatattctttcttaaactcatctcagtacttttcatttgt

SEQ ID NO: 7143 - DNA, 6000 bp, Homo sapiens
gtcctaacagtcactgggcaggtgggggcggggggccagtagcatgcccctgcttggtgaccagagccagaggagggtccccaaagggagccggcacaagtatcccgagcaaacagcagagggacctgggaaggatcagccaacagtgaggatggggaagtgtttctggccttggtcacttcgctggtcctgttttcagagggtgcagggacatgagatcatgggaagtttcatgtcttgcctgaagccacatggcagagtccagcttccctagggcggagcacggcagggagccagaatgtcagctccccacaaggagacccaagctccgtcctttgccctcctgggcctcacctgcagcacggggctctgctcctacagacacctggcgaaggagccattccccagctcctcccgagcgggctccggctgtccctagcctctaacgtgccaggctctgccctccccaggctcccacgatgagtctgtcctaaaaggaactgctccctctctcccactgtgagctggccctcctcatgccctgctccaggcctgcaggaactaaccaggtggggagaggccactggccacagccagctgcaccctcagacagcagtgtttgcacagcccctcttctgctgctctgcacacagccccaggcaggaggggtgttggggggtaaagcccccaggaagtcttgtcctccaaaccaaggcctggctttgcccaaatcagtgacctgtcttatccctggaggagatgcagtgtgtggcccctgcccccaacccaggaaaggacaaagaagacagtgccaggctccaggctcccatccatgcctttctcccaccgccccttctgttaccatgaggcagggctcctgccagcctggaccacatgaccttagggcgtgactggccagtctagagccacccagacactgcggcacctacaaagccagttgacaccttactcctcctgcccaccctggcccaggtttcacctgaagcaggggctgtgtgtggatgccaggtgggggtttgggagagcatctcccacagaggcctgcggctgtccatggctggcacctgatgtgtgctgatgcttgccagtgttagtgatgggagggacagtgacacgaaggctcacaccagcccctggcaggtgtggtgcagtcacctccaggcagatgctgctccagagcagtggagaaggctgcagggggatgcagagccacgtctctcctaccctggtctcagcatgagccttagccttggccttggaggctgccccaaagggaatgttcatgggcaaggctgtgtagtctcagttcttaaggctaagtgaccgccccctctgctgggctccgggaagttcagagcaggccgagggcaggttgctcttttgagagcgcctgggtatgtggcagagaaaccaaagagaagctggtcccgcccccagcacaaaaccagacctggaagggggagcagctgtccaggcggcagccagcagcccaagacggggaggcagagctgcgtccacagggcctctgggctgtgtgtgaaggacacaaccagtgacacagcccctgctgggccaaaagctccattgccactgagggaggagccttccctaaatggcgtgtgtctttgccttctggccacatcccccctgcctgtgcctgagtcatcgggatataccagaggcccccttactgacttgacacactcccctgtggacccctgccctcctccagccccatggtgggtctccagggtggtacaagaggtcccctatgccctcccagaccctgttcaggttccctcccaccccagctctctgccttgtttccaagcacattccaggccattgtctcatgacgaatagcgttttcatgcgggtgttggaaaatatgggcacatgtttaatgcttgcaagctgtgctccactgttgacactgcgcttgggagccaggcaggcaactcaagctgggctggggctcagcaaagaagtgatgatgcagcagccctgcaaggcagccatctgccaggcctccgccgggcagggacagcccctggtgcccactcacagcaggcactggggaagcagagtggtgaggaagaactcaggttctggaagtcgattcttctaggtctgaatactctgttcctcctcctccggtcagctgtgggtcctctctgaacctcagattcctcttctctgcagtgggggtgataaccctgcccaggttatgtgaggactcagcatgacactgcgagtggagctaacccagagcccagtgccaggtgcgtgggaactccaaggccacctgtctgtacagatcccggtgtggactagggactgtagtggaaaatgggccctctttcctccctccccagcttcctgactcaagggcccacttctcacaccctctgccctgagccttgcctgtagtaagggccccgtgagctggccaacacttccgctattattactgtcttcttgaggctttgcaacgcagtgatctgggttttccttctccccaaacctagggtgacctggggtcaggcaggatgcggcccccacctccttcccagcagtaggatgggagtcatcctcagtggaggcccctccgctgccagccccagagcagcctctccaggctcttcctcctggagcaagggtggttgagcgagcggctggagcatgacatggcctcagcactgctctctgtggtgcctgctcccggcctctcctctccctttccctcttgtggtgctttaattagcgatgctcagagggagacacctcactcagagggagacacctcgtgaggaggcttgtgctccagagtctcctgggatgagctggcttcccaggcctcttcggccagcaagagagtgcaagatctgggcagggcttggcctgatgggtgacaagggcaaaaatgtaacatcagactgccgttttccacacactggtgtttgcacagcacaaaaaggcctgcctgggcatgaacagagagaatgcgctggcctggcggagggggtggagggtcagtgcacctaccgttctgttcgggagacccttgcttcttggggatgagtgccctgaaagaactagaactttctcttagaaggggctggtaggaggggcctgcatttcagactgaggcttcatcaggacctgaggttggagcccaggcctcgatgtctgggaggagcctgccacgtgccattcctggccaagccatctggccagggcagagcaggcagagcctctagggccacgtgggcttggcgaggtcaggaaccaaaaaacccaagaggctagaatgccgtgagtggaggagggacagcaagagggaggctggagaggaaccagcgagaggtgtgagaccctataggccgaggtgaggggctgggtttgtttcagatccaggcggaagccgctagcaaatcccagcagggaggggcatgttctgatgggcctgttttaggattgtccagttggtgtgtggagggtggactgtgggggcaggagaagcagcaggaggcagatcctgagacatggggagatggaccaggcaggagatgctgacagccccctaggcatgggggcgggtgtgtggggcagggtggccgtgtaggttgtgctcccagggtaaggcccccatacgtgccagtggacccagcagagggactgggggtcaggatgactcgtggtttgggcctgagcagctgggtggacagtgccaccgtttactgagatgaggagggggttggcaagtctatggggacaccaagggctggttgtggcccagcaaggtttgaaatgcctgctaggtggccaggcagggccttccaccaggcaagcagctgttccatctagagcccagcaggggctcagggccggagggcatgtgtgggagtcactgattgggaccacagactaccaagaggcacagactagagagagaagagcggaagggctaccccagccctgggggagaggtgggaggaaaaccaggagagggtggtatcactggtggcaagagaagagtttccagaaaactccactattcctgaccttctgtaacacagtcagcattccccagcttctctgggacaccaggaggtctgggtgcccgcttctcctcaccaccagcccctcttccgtccctccctccgcaccctcctcagcctgccctcacatgggcaccaccctgccctctgctgccacaggtcccgcctgccggcctggatccctggagagcgctgcctggcagcggctcagctgttggcctctgtcatggagacggcaccagctgccggcgacgggcacttgtgaccatttgtcagaacgccccccttcctcctgtgcctgcccttctggaacatttctgtcccacagccatggagacagggctcatggaggggttgggggaccgggaggggccaggaagcactgtctgggctctgcagcagggccaccacctcctggcctttggcttgaggctgcctggctgggctttccctctgcagccagcagctccccagaggactagccttacatggctagttccacacactagccttacatggcttgttcctcgtcctcaggctgccctctgagaacttccccctatttcacagataggtattgcccctaattaaggtggaaaaattgtgcggagacattgagatcacaccgctggtagttggggacaccaggcggaggccttcacctcccacctaaccccaggggagcccccggcatggcagggtcctggtggcatgcgcggggagatgaagcggccctcactcgtgcggccgccaccccctccctgtgccgcttgtttctgtttctcgtggtttcttgcccaggcctgcaggctccagccggggcaggctggaacggcctgcctactgtttgcgctttgtggtctggcctctttgttaccaaatgctctggggttgctttggggctgggggtggggaggaatcttctccagcctggccccagagccatggctggcgttcaggggcatttgggaagctgggcccaggtcatgcggagcggaggctgagtccagcgacctaggaggagatggaggtgtttcaggcctcccaccaagaaatgtggctcacgtcactgagcacccaagacctcggggcctccgacgccgtgttggaactgtggtgatgcttccctggagacgggatgcggcgtcaggcactggagcttagccccagacggaaggtggtgtgggcaggggtgccacgctgccgccagcccagcactcaggaagcgcagtgctgcacaccaccctctcaccagccaccccgctcatgccccatcctgcctgcatcatgctgttttggggaagctcccgaatccctgggactccagctgggaagcattgcccaggtgcccttcccctgcaggccaggcctccaagggcacgtggaaaagcagcgcggattcctccaagcctgtcctcaccacccacttctcactgctcgtgtcatccggcccagggaccctgaggaatctgcttttcttcatcctctgggttccctttttgccttttgtataacagggaggctcctcttcacaaagtccgatccttagccctgaacgactcttaactagacaagagatgggaaaggggtcatggcccagggaccagcgagccctaagtgactctggccgtaagtgactctgcgaccttagtcaagtcacttcaccagagtttcaccatccgtacagtgaagaaaaaactcagggtcataacgctgatcccacacggatctgtgctccaggccgcagggtacagcccgaacagtgcaaatccctgacctcgggggcttccaggaggaggagtggggcagtaaacaggtgaccgatgtgtggagaattggctggatgaagatgagttctagcaagagaagaaagcccagcaggggacaggcgtgtcttggcctggggtgggggccattg

SEQ ID NO: 7144 - DNA, 6000 bp, Homo sapiens
gcactcacttgccagaaacaaatatggccacctgcctactcccttttttttttttttttttttgaggcaggactgtttctggttgcgaacaaagacgaccagcttcaggtcattcttatccccatctgttgaccttacaaattgttttagagacctaagtaaacataacactcatctaaagggatttcgtgaatgatctattggcagtatccaagatgttaagagatccctatttccaaattatcctagaaccaaaaaatatcacagcacttcaacccctggtgttacagatgagaaaaccaaggtacaaatatatatatatatatatataacaaaattagccgggcatggtggcgcattcctgtagtcacaggtaccttggaagctgaggtgggaggatcacttgtgcccaggaggttgaagctacagtgagctatgatcacgccactgcactccagcctgggtgacagagtgagatcctgtctcaaaaaaagaaaaagtaaaaaataaaataaaaaaaatatatgtatatgaaaaaaattggaaagttgctgacaatcattcatacaatgttagacctaaaggtgaccttagagacctgtatggtgataagaaatagagcaccagaggcagggagccattgggttggctccaggctgctgcaggattcctgcctccatcaaaggtggtgcttagaccagattttttttttttttttgacagggttttgctctgttgcccaggctggagtgcagtggcaggatcttggtttgctgcaaccttgacctcccaggctcaggtgatcctcccacctcagcctcccgagtagctgggacagcaggtgcgcaccactgtgcccagctaatttttgtgttttttgtagagactggattttgccacgttgcccagggtggcctcaaactcctgagctcaagcaatccacctgccttggcttcccaaagtgctaggactacaggcgtgagccactgcacctggccagactaaatgattttaaggcctaagattctgatgctgtgatttcatagaattgccctaattggaataggaaagtggggctggggaggggagaaggagggtatggggaagagaagtagagcaaggtcactttatgtagttccaaataaggaatcatacccttaccttcttctaggtggaaagcggcatcctgcattctcttcttgtccttggcctcatctctgctatgggctgtgccacctctatatgctctttctcaccaccaggccttcagaatgcagttggaaatgtgccctctcgtctgggtgtggtggctcatgcctgtcatcccagcactttgggaggccaaggtgggcagatcacctgaggtcaggagttcgaaaccagcctggctaacatggtgaaaccctgtctctactaaagatacaaaaattaaccaggtgtggtggcacgcacctgtaatcccagctactcgggaggctgaggcaggagaatcacttgaacccaggaggcagaggttgcagtgagctgagactgcgccactacactccagcctgggtgacagagtgagactgtctcaaaaaaaaaaagaaaagaaaagaaaagaaatgtgccctctctagtgtgcctcccaggtcactcagctgatggaaaatggaatcctactaacgtgcagggctctagaaattcagcagcgtttcatacatggcatctgccatcaaggaagtcacaggaaggtgggaggcagacacagatatccacaatataaagtttagccaagttcttttttgcaagcctaatcataggtgaggggatgcaccccagagccaccaatccggccccttccgcccctgggggaagcattaatgacgccgaaatgtgtcagagctcccaccagccccctcttcactgctactctttcttcccaggcaaaacaggaaccacaaaccccagcttcctcttgcagagtggctgtggcttgtaggggaggcagaaatggctgaggtgcggatacgagacctgagtcacttgagctgctgttgccacatgtcccctccctctccccctccccagttctaaggtctcctgctcccactttgtcctttctggcctcttgcttgtcctttatttccaaatgtgcacctgagtcccctgtgtgatgtacacccatttcccgggctgcagtgggggctactgtgggcatcaggggccgtgggcagggcctggggtggggacgcatcagggagacaggggaagaggaagtgcctttggtcctggggaaggttggcttgtcttggtgggtggggacggtcattatcagctttctggacacacagacagagacagacaggatggacttcctccggctatacctccctgggctgcaccaggccttgaggggggcactggtgagaagggcagacagctgccagatacttgcaccccattccctggggcctcacttccgggcacctcccctggggcctcacctttcccctcctccttctgatctcctcaaactggagattgctttctcaggttcaggcagactcctggcctaatattttctgaatttcagtccccacctccaaccatgcgtcctcgtacccctaatcgatgccccttctggctccttctgcaaatcctcttcttctcctttcagatcccagtaccctcttccttaacctgggctcctccagccagggcccccagggaaagggctgggactctcctcaatgactctcccctctctctctcttttttcctaggattccctcggcacctttgtctcctacctcctgggagatgcagtccccactgtagagcgggaggcgcaggcggctgaggaactgggggtggtggcggtgggaaagacagggaagattgtagaggaggaagcccaggaggacctggagggccttagaggcagccaaaacgagggggctggaaggctgagagggcctggagatgacagaagacatgaagtggggagctcagctgtagaacagacctggggctggggagatggcagctcccatgggtcccaagcagagaggcaggacagtggggctggggagacagccaaggctgccaggtgccaggagccaagcgcccacttggaggccagaaagaaatccaaggcagggtctggggcttgccaagacaggagcggccaagcccaggagaggcaggagtcccatgagcaggaagtgaacagagaagagaggctgagaagctgggaacaggaggaggaggaggaagaggtcagggcaagagagccagggatggccagaggggcggagtcagagtggacctggcatggggagacggaggggaaggctggtgctgttgggccaaaggcggcaggggacaaccgggagatggagcagggggtcagggaggcagatgcaggggaaactgaggagcctggggccgaaggggctgggaaaggagaagaggtggtagtggtggagaaggcctgtgaaagcactagggcatgggggacgtggggcccaggggcagagcctgaggactggggaatcttaggcagagaggaggccaggacaaccccaggtagggaagaggccagggcaattttagatggggaggaagccaggacaatctcaggcggggaggaggctgagacagcctcaggcggggaggaggctgaaacagcctcaggcggggaggaggccgggacagcctcgggaggggaggaggccgggatagcctcaggcggggaggctgggacagcctcaggaggggaggaggccgggacagcctcaggaggggaggaggccgggacagcctcaggaggggacgaggcctggacaacctcaggcaaagaggaggctgacctgctgggagtcagacagacagaatatggagcagtcccaggagaaaggctcctagaggctactggaaaagtctgggtcctagaggaggagggggatgaggagagagaggctgaggtgagccctttccccaaacagccccaggtcctgggcactgaaagaacagaagaggctgctgagagccagaccgcagggagggaagctgtgggaggccaggaggcaggggagagctttgagggccaggtagacctgcgtggtaaggaggctgagatgaggcaggacttggggatcagggccgaccgggccaggatggaagagctggtacaggcagaggaggcccaggaggagagagggagcagcagggatccagtggctgagctgccctcagatggagaggctgaaggcactgccgacttggaggcaactccagaggccaggcctgaggaggagctcacaggggaggagagtgaggcggcccagactagctgtggcctactgggcgtggaatggggtggcctcacacacagcgtcaccaaaggccaaggacctgagctgatggggggcgcccagaccccaactaagcaacccgaggaaagggaggcaggggaggtggagctcatgggagttctggccctgagcaaagaggagcaggagaggagcctggaggcaggtcccaggcacgcggggtctgtaaagcctgaggcctccgaggccttcccaggagcctgggaaaaccgcacgagaaaggacatggagagaggaaatactcaggaggatgcggccgatggcgagcagcgggaggaggaggagactgcgggaggccagaccctggcggctgaggctgaaggagaccgagagtctgaactatcagaagtcccagaggcaggcggggaggggctgacaacccaggacgcgggatgtggaactgaggagggagaggcatctgtctcagagaaccaggagctggacggaagcacaggggcagacgcagggccttgcccgtcactgggagaggcctatgccagagaaactgaggatgaggaggcggaggctgacagaacatccagaagaggctggaggctgcaagcggtggctgtgggcctcccggaccgtgaggatgcacagactggctctgtggctgctgggattatggggggtgatgtggtcccacacatcagcgctgctggcgctggtgaagctttggaaggggtgcttgggcaaggctgggactcgaaagaaaaggaagaggcagcagcaggagagcatgcaggtgggcaagaatttggtctggagggctcagcagaggaagaggtgactggcagaggcagccaagtagaggcttttgagtccagggagggaggaccttggggagggcgggtagaggccgaggaatctgcaggcgcagaggacagctgtgggctggatcccgcgggctcccagacagcgagggcagaggggatgggagccatggtggaggctggggggcttctagaaaagtggacgctgttggaagaagaggctgttggatggcaggagagagaacagagggaagacagtgaggggcggtgtggggactaccaccctgagggagaggcaccaaggctccttgatgcagagggtctcatggtgaccgggggccggagggcagaggccaaggagactgagccagaaagcctggaacatgtcaggggccaggaggagcagccaacacaccaggcccctgcagaagctgcgccggagtcagtcggggaagccgagacggctgaggccatgggcagtgccagaggaggtgctgccaacagctggagcgaggtgagggctcttggtggggtctcggggggaacgagtggaatcccgaagccggccccatggtcctctgtgccccctttcctgcaggccccgctccccgggtccctcctagacgtctctgtcccaaggagtcgcgtgcacctctcgagaagctcctcacagcgtcgctcccggccctcttttcgtcggactccggcctgggagcagcaggaggagcccccagcccccaaccctcctgaggaggagctgtcagctcctgagcagagacccctccagctggaggaacccctggagccaagccctctgaggcatgatgggaccccggtgccagccaggagaa

SEQ ID NO: 7145 - DNA, 6000 bp, Homo sapiens
tacaggcaaccacagccacatccagctaattttttgtatttttagtagagatggggtttcaccgtgttagtcaggatggtctcgatctcctgaccccgtgatccgcctacctcagcatcccagagtgctgggattacaggcgtgaaccactgcacttggcctaaaataagttttaaaaagtattgttcttggctgggcgcggtggttcacacctgtaatcccagcattctgggaggctgatgcaggtggatcacgaggtcaggagttcaagaccaagcctggccaacatggtgaaaccccatctctactaaaaatacaaaaattaggtgggcgtagtggcgcgtgcccatcatcccagctactcgggaggctgaggcaggtggatcacgaggtcaggagttcgagaccaagcctggccaacatggtgaaaccccatctctactaaaaatacaaaaattaggtgggcgtggtggcacgtgcccgtcatcccagctactcgggaggctgaggcaggtggatcacgaggtcaggagttcgagaccaagcctggcccacatggtgaaaccccatctctactaaaaatacaaaaattaggtgggcgtggtggcatgtgcctgtcatcccagctactcgggaggctgaggtagcggtgagccaagatggcaccaccgcactccagcctgggctacaaaacgagactctgtctcaaaaataaataaacacatagatagatagataagtaggtaaataaatagataaataggtagataagtagatacatagatatacagataggtaggtagatagagagagacaaagaagtaggaagatagataggtaggtaggtagatagatacacagatagatagaattgttctcaacacactgcatacaagtttacagagccaagcagctctaagatgtgacactcacaatcccgttcctacctgaggcccccgagccgcactgtctcatctgtgcacccgtatctagctaaactatctgggtagctgtgtttctgtttgggacagagtcttgctctgtcacccaggctggagtacggttgtgcgatgtcggctcactgcaacttccgcctcccaggctgaagtgattctcgtgcctcagcctccagagtagctgggattacagatgcccaccaccatacctggctagtttttgtatttttattagcgatggggtttcgctatgttggccaggttggtcttgatctcgtgacctcaagtgatccacccacctcagcctcccaaagtgctgggattacaggtagctacgcttttcggaagctcccctcaagactcaaagtgggaactgagtgctcaggtggggacaggtgcacagagcacacacaggacaagaggccggagggaaactggccctggccctcctaaaacaacatccaggagcagctgcaccagcccacagtgctatgggttctggggcccaaacaagggccttgtgtttcccctcagcctgtcagcagagaaagctgcgccacactggcccacaccagggtgtcaccaggcggctggctgagtgccaggaaatgacctgcagctggcccagggcagcagccgcagaggcaacggccattcttttctcccacatccacagacaaggccctattcttccctcttcctcagtcccctcagccccaagcacaggcttagaaaaagactcgacggctgatgagcgtgtctccacagaaactgctggaacagagccctgctcacagaggagcaagaggcggagacaggctggccgcccctccctgctctctggatgtggtgagcagccgcaggcagaagccccaagctctgctccttctcacaccacaccccagccaccacctagagcagtggagacattcactttctgctgaaaaccctgccccactgaggagcacacatcctggtctagcaccagcaagaggtgcctcctacctggggccctgcaaaggggcaggcttggctgaggtgggaagcccgacctgggccccaccgcgtcgctgtccgaaggaggctgggccacatccgtgctgggcagggtcttggtctcagccccaactggggtccctgtccctctaccctgggaggtctgaggggcatccccagggttccaccctcggtgctggggcagccgtggcgccgtctctttgtcccatggccacttgactgccagcgcactgtccagcaagaaggccttgcagctggagctggtatccatggtgtagtcgtggccctggtcgcagccccacacgacctggatgacgccgcagtactcggaggacagtgtcctctgaaggtggggcagggccccgcagctggccgcatgtccatgcacccaccccaccaagccgtgcaggcactgggggctggatgtgatcagatccactgcagagagtcaacagagatgtcagatccacggctggtcggcacccagcccaccctccaccgggggaggactcacccagacacgctccctcctctgcccctgttgggggctgggcaccgaccctgcaaaggatcagtgtggccatgagcaggacaagcaggcggaggttcacagcgctcgtcgtacgggaccctctcgagatctcaaacctcagcggtccccataggcaactttctcttccctcaccccagctcctcccagttcatctctccacaacagtcccagggctgttggcactgaacccgggcatggcccattccccccacccagaggctcccgcggaggcacgccctgtccctctctcaacacccgtcacactgcagtactgacagcctgaacgtgctctgaacagactagggcgtactttgcacaaggcttccggcgaccagccggggaggcgttgaccctctgcaggaaggacttgagaaggctgtggcactggtagaactgggcgtggcagctcttgcagacaaacggagacaaggtggggtcctggcggacagccacaccaagcaggcgctggaagtcccgtacgagcacgcgctcctctgcggatggcctctccatgctcgctccaggcgccctctcggagatgctgcgcaggcttctcgaggaaaacttcccgtggcagaggcgacagtgacccatggcgagagcccggcctgctcctgcacagagcggcaggaagtgttagcagctggcaaaggaggctcctgagcacagggcgtcccggactccaggtccgagggcagcgcctgcagcgcccttcgcgcggctcccggacacagcaagcggctcgggcgcgcggctctcggcgggacaagccgccctgtgggggatgtggccgctggtccaagaaatctttcaaatttcaaaggcctctaaggcctctccagcgaagcaacttcaagagtgaaacctggaactgcaccctcctcccagcgaccgcgagacccggggcaggcgctgcgccctccaggaaacgccgcggtttcctgtctgccaattgcaggtgccgcctcctttccggctccgcgagggcacgaagcaggggagggcgattcccacgcgcgggcaccccagggcgacctgcccgcggtgacagcgctcctcacgccgggtcccttctggccgagcccgcggccggggaggccgggccggcgacgccggcgtcacggagcgcgaggaaaaccgagccggccgcccagcgcctatcccgacgcagccccgagtccgctacgcccttggccgggtggaggagaggccgcgccggcttccgggcgtcagtgcggctcctcccacgagcaacccctgccgcgaccccaacccgccacgcccgggccgcggacccacctgcctcgtccgcgccgtcctcgcccgcgtccccgcaggaccccaccgggccccaggcgcgccgcgccgtcgccccgtccaccctcggcccaccgctaagggaagggcggccccgagtccggctgacgccgccgccgccgtccgaggccccgcactgtcgggacgacccaggagacaggaagcggcccagccggtcccgcttcatggcagcggaggacgccagcagaatcccgcgggtgctgcccggcccgaggttcctagaggacccggcgttaggctccgctcggcgcgctggaagcgaggcggggcgggggaggggcggagcgagaagcaaagcgaggcgggcggggcgggccaggggccaggggcgggaccccgccggccgaggttccacccgcggtgccagcgcccccgctcgtaccgctcccctctcgggcccgagggcggccgtgcccgcctctgtcgccaatggagcgctggcctggggcggggcggtgggcggaggggctcgccgacacctcacgacgagtcctccagggagaggcgacgcggccctcaccgcctcttaccgtgggagacggaggcgcggggcgggcaggcgccggcggaggccacgcggcgcgcaggtggcgggcgggctgcagaaaggggaggggggccggggtctcacgtagagaggggcctggctgccgcggttagacgcccatggcaactccgtgaggggcccttctcgccagccccgtctcaagacggcgaagaggcccggctccgtcgcgacaacccacccggactctgccgcccccgccactaacacccgtggggcccgcagtacgcgcggagggggcccgtcgccggaagtgcggccgcgtcccttcctgcggtccgctgctcgggcggctccagcaccagcgccggctgcgttccgggcctccggtcgcccgtccagcccctcggctaccgccgccgcctcccccgctcggcgccatggccgctgcggccggggacggcacggtgaagccgctgcagagcgccatgaagcttgccaacggggccatcgagctggacaccggcaaccggccccgggtgaggcggggcgggggcggggcttggccgctgagggtggcccctggagggacccccgcccggggagggcgaggacggggccggctcgggctggagacttgggagcgggcgccagccgggatcccgggccgcggttcccgggcgaggacgggggcggggcgcagccgggcgtgcagtgaccttggacagctcagatcctgcggaccttggctttccactccgctcgctgagccggtgcatcacagcctgggctccacctgtagaggagatgtagcaggagggtccgccaggccaccttccaaaatccgagtgacgggcaggtccgtgcgttcgtgcatttttctgggcagagatggtagatttaatccggttgccacaggggacggcatgcagagaaggccacatacctgctcatttgtgatgctgtttgcagtcgtcttaggaaggaaaagcaggccggaggggtgtggcccgttcctgagatggggccgaatctaaggttggcgaccaggtagagaagctggcccagccacacccggctgcccaaggagggaaggagcctgcctgtgcctaggagaagcctcgttcctgaatctgctgctttccccaagttggtttttagggcagcaggtgcccccgcaagtcagaaatcctgcctggattatatttcgtctttctctctgaggcatagacttaaagataggaaacttaacagctagggataaaacaaaaaaacatagcatattgctgggcgctgtggttcacgcctgtaatcctgacactttgggaggcccaggcggtggatcacctgaggtgaggagtttgagaccagcctggccaacgtggtgaaaccccgtctctactaaaaatacaaaaattagctgggtgtggcggtgcacacctgtaatcctagctccttgggaggctgagggatgagaatcacttgaacccaggaggcggaggttgcagtgactcgagatcctgccactgcactccagcctgggcgacagagtgagactctgtctcaacaaaacaaaacaaaccaccattctgtggttccaatgacctgtgccttgtcagaggggtcacaca

SEQ ID NO: 7146 - DNA, 6000 bp, Homo sapiens
gcactgtctcatctgtgcacccgtatctagctaaactatctgggtagctgtgtttctgtttgggacagagtcttgctctgtcacccaggctggagtacggttgtgcgatgtcggctcactgcaacttccgcctcccaggctgaagtgattctcgtgcctcagcctccagagtagctgggattacagatgcccaccaccatacctggctagtttttgtatttttattagcgatggggtttcgctatgttggccaggttggtcttgatctcgtgacctcaagtgatccacccacctcagcctcccaaagtgctgggattacaggtagctacgcttttcggaagctcccctcaagactcaaagtgggaactgagtgctcaggtggggacaggtgcacagagcacacacaggacaagaggccggagggaaactggccctggccctcctaaaacaacatccaggagcagctgcaccagcccacagtgctatgggttctggggcccaaacaagggccttgtgtttcccctcagcctgtcagcagagaaagctgcgccacactggcccacaccagggtgtcaccaggcggctggctgagtgccaggaaatgacctgcagctggcccagggcagcagccgcagaggcaacggccattcttttctcccacatccacagacaaggccctattcttccctcttcctcagtcccctcagccccaagcacaggcttagaaaaagactcgacggctgatgagcgtgtctccacagaaactgctggaacagagccctgctcacagaggagcaagaggcggagacaggctggccgcccctccctgctctctggatgtggtgagcagccgcaggcagaagccccaagctctgctccttctcacaccacaccccagccaccacctagagcagtggagacattcactttctgctgaaaaccctgccccactgaggagcacacatcctggtctagcaccagcaagaggtgcctcctacctggggccctgcaaaggggcaggcttggctgaggtgggaagcccgacctgggccccaccgcgtcgctgtccgaaggaggctgggccacatccgtgctgggcagggtcttggtctcagccccaactggggtccctgtccctctaccctgggaggtctgaggggcatccccagggttccaccctcggtgctggggcagccgtggcgccgtctctttgtcccatggccacttgactgccagcgcactgtccagcaagaaggccttgcagctggagctggtatccatggtgtagtcgtggccctggtcgcagccccacacgacctggatgacgccgcagtactcggaggacagtgtcctctgaaggtggggcagggccccgcagctggccgcatgtccatgcacccaccccaccaagccgtgcaggcactgggggctggatgtgatcagatccactgcagagagtcaacagagatgtcagatccacggctggtcggcacccagcccaccctccaccgggggaggactcacccagacacgctccctcctctgcccctgttgggggctgggcaccgaccctgcaaaggatcagtgtggccatgagcaggacaagcaggcggaggttcacagcgctcgtcgtacgggaccctctcgagatctcaaacctcagcggtccccataggcaactttctcttccctcaccccagctcctcccagttcatctctccacaacagtcccagggctgttggcactgaacccgggcatggcccattccccccacccagaggctcccgcggaggcacgccctgtccctctctcaacacccgtcacactgcagtactgacagcctgaacgtgctctgaacagactagggcgtactttgcacaaggcttccggcgaccagccggggaggcgttgaccctctgcaggaaggacttgagaaggctgtggcactggtagaactgggcgtggcagctcttgcagacaaacggagacaaggtggggtcctggcggacagccacaccaagcaggcgctggaagtcccgtacgagcacgcgctcctctgcggatggcctctccatgctcgctccaggcgccctctcggagatgctgcgcaggcttctcgaggaaaacttcccgtggcagaggcgacagtgacccatggcgagagcccggcctgctcctgcacagagcggcaggaagtgttagcagctggcaaaggaggctcctgagcacagggcgtcccggactccaggtccgagggcagcgcctgcagcgcccttcgcgcggctcccggacacagcaagcggctcgggcgcgcggctctcggcgggacaagccgccctgtgggggatgtggccgctggtccaagaaatctttcaaatttcaaaggcctctaaggcctctccagcgaagcaacttcaagagtgaaacctggaactgcaccctcctcccagcgaccgcgagacccggggcaggcgctgcgccctccaggaaacgccgcggtttcctgtctgccaattgcaggtgccgcctcctttccggctccgcgagggcacgaagcaggggagggcgattcccacgcgcgggcaccccagggcgacctgcccgcggtgacagcgctcctcacgccgggtcccttctggccgagcccgcggccggggaggccgggccggcgacgccggcgtcacggagcgcgaggaaaaccgagccggccgcccagcgcctatcccgacgcagccccgagtccgctacgcccttggccgggtggaggagaggccgcgccggcttccgggcgtcagtgcggctcctcccacgagcaacccctgccgcgaccccaacccgccacgcccgggccgcggacccacctgcctcgtccgcgccgtcctcgcccgcgtccccgcaggaccccaccgggccccaggcgcgccgcgccgtcgccccgtccaccctcggcccaccgctaagggaagggcggccccgagtccggctgacgccgccgccgccgtccgaggccccgcactgtcgggacgacccaggagacaggaagcggcccagccggtcccgcttcatggcagcggaggacgccagcagaatcccgcgggtgctgcccggcccgaggttcctagaggacccggcgttaggctccgctcggcgcgctggaagcgaggcggggcgggggaggggcggagcgagaagcaaagcgaggcgggcggggcgggccaggggccaggggcgggaccccgccggccgaggttccacccgcggtgccagcgcccccgctcgtaccgctcccctctcgggcccgagggcggccgtgcccgcctctgtcgccaatggagcgctggcctggggcggggcggtgggcggaggggctcgccgacacctcacgacgagtcctccagggagaggcgacgcggccctcaccgcctcttaccgtgggagacggaggcgcggggcgggcaggcgccggcggaggccacgcggcgcgcaggtggcgggcgggctgcagaaaggggaggggggccggggtctcacgtagagaggggcctggctgccgcggttagacgcccatggcaactccgtgaggggcccttctcgccagccccgtctcaagacggcgaagaggcccggctccgtcgcgacaacccacccggactctgccgcccccgccactaacacccgtggggcccgcagtacgcgcggagggggcccgtcgccggaagtgcggccgcgtcccttcctgcggtccgctgctcgggcggctccagcaccagcgccggctgcgttccgggcctccggtcgcccgtccagcccctcggctaccgccgccgcctcccccgctcggcgccatggccgctgcggccggggacggcacggtgaagccgctgcagagcgccatgaagcttgccaacggggccatcgagctggacaccggcaaccggccccgggtgaggcggggcgggggcggggcttggccgctgagggtggcccctggagggacccccgcccggggagggcgaggacggggccggctcgggctggagacttgggagcgggcgccagccgggatcccgggccgcggttcccgggcgaggacgggggcggggcgcagccgggcgtgcagtgaccttggacagctcagatcctgcggaccttggctttccactccgctcgctgagccggtgcatcacagcctgggctccacctgtagaggagatgtagcaggagggtccgccaggccaccttccaaaatccgagtgacgggcaggtccgtgcgttcgtgcatttttctgggcagagatggtagatttaatccggttgccacaggggacggcatgcagagaaggccacatacctgctcatttgtgatgctgtttgcagtcgtcttaggaaggaaaagcaggccggaggggtgtggcccgttcctgagatggggccgaatctaaggttggcgaccaggtagagaagctggcccagccacacccggctgcccaaggagggaaggagcctgcctgtgcctaggagaagcctcgttcctgaatctgctgctttccccaagttggtttttagggcagcaggtgcccccgcaagtcagaaatcctgcctggattatatttcgtctttctctctgaggcatagacttaaagataggaaacttaacagctagggataaaacaaaaaaacatagcatattgctgggcgctgtggttcacgcctgtaatcctgacactttgggaggcccaggcggtggatcacctgaggtgaggagtttgagaccagcctggccaacgtggtgaaaccccgtctctactaaaaatacaaaaattagctgggtgtggcggtgcacacctgtaatcctagctccttgggaggctgagggatgagaatcacttgaacccaggaggcggaggttgcagtgactcgagatcctgccactgcactccagcctgggcgacagagtgagactctgtctcaacaaaacaaaacaaaccaccattctgtggttccaatgacctgtgccttgtcagaggggtcacacagccttgaaaggtaacagttctaggctcctgtgtgcactggaaatacgtaactcgcaggttctgggaaagggatttctcggaacttaaaccgggaagtgatttgaaaacttccagtatcactccctttatcctctcagaaaagtatttttttaagccactgaatgaatcacccttgagttgcacaagaaggaaacattgcatagaatgaaaaatgacagcaaactgctgaggtcacttccccaggcccactgaatgagaatatcagttcctgtgctggagagaaaggcagtcagaggagaaaatgaggtccagctcgtccctggctctctctctctctcaggtcctgatgtcttttccaagtctggagagcagcgatgctgcctgtgccctgcgcagaaaaccgtgttccggctgcagctaaccaccgcaggctcaatgtctctgggtgtatctcagagataagcaggtggtggtgttccttgcttatcccacaagggcacctggccggaataatggagtcacttccctccactggcctgaccccactctttctctttcctggacacaggaggcatacacggaatacctgaggagcatccactatatctcccaggtgttactagaagaagtggaaaccactaaaggtacggctcagccagccgggcgcggtggctcacgcctgtaatcccagcactgtgggaggcagaggcgggctatcacctgaggtcaggagatcgaaaccatcctggctaacatggtgaaaccccgtctctactaaaaatctaaaaaatcagctgggcctggtggcgggtgtctgtagtcccagctactcgggaggctgaggcaggagaattgcttgaacccgggagcagaggttgcagtgagccgagatcaccccattgtactccagcctggaacaagagcgaaactccgtctcaaaaaaaaaaaaaagaaaagaaaaag

SEQ ID NO: 7147 - DNA, 6000 bp, Homo sapiens
tagctgggcatggtggcatgtgcctgtgatcccagctacttgggaggctgaggcaggaggatcacttaagcctgggaggtcgaggctgcaatgagctatgatcgtaccactgcactccagcctgggcaatagagcaagaccctgtctcaaaacaaataaacaaaagccagacagacacaaatgagagcattctgtatcgtttcatttctatgaaggtgaaaagcaggcaaaaacaaccaaagtgcttgcagatgcatatctgagtagttaaaaacttactgaaaagcaggcctggctcacgcctttaatcccagcactttgggaagcgggcggatcacgaggtcaggagatcgagaccatcctggctaacacggtgaaaccccgtctctactaaaaatataaaaaattagccaggtatggtggctagtgcctgtggtcccagctactcgagaggctgaggcaggagaatggcatgaatccgggaggtggagcttgcagtgagctaagatcgtgcaactgcactccagcctgggcagcagagcgagactccctctcaaaaaaaaaaaaacttactgaaaagcaagaagtcaggtggaggttacctttggggaggattggggtgctgtccgctttctaataattcgttaaactatagtctacatcttgtgctatatttcacaatggaaaaacagaaaagagctcctgcccataacgctgctttgcaggtttggaaatttcagattcaattcctctccttgcgggggccaaggatgggaagagcaggtggttccagtagggaaagaggaggccctggggcctcaaaatggctaaggaccattcctcagcgtgggtggcacctaccctggaaacaggactctacttcctcctctgttagggggcagagcagccctgcagtgccttctgggcacaggtcctcactctgcagctggaggaattctcccaggcactgagagcccttcacggcccaaatgccccgtgcgctcggcctctggacttgccttccctgctctgtatatctccctccgcctgaccctcagcctcctccatcactcactgtcttctctgccagtctattcatctgtctctgtccctctctctgccaccttctctcctattgagaagccgaaacctcaggcacagacccacatcccctcctcatgggcccatgtgcccaaggtgcccctaggtgccaggctgagatgaaccaggagtgtccttctgaacccagcaacagcgaagggtgaccagggagggccagttcatctcggtctgaaagaagccccagatgagcaaaggatacactggcctcctgcggtcagcagcacttcccaggacagtgagcaagacaggggtaaggccagagtgggtgggcacacccatgggagagaggagccgctgtgaaatgtgcacgaggaacagaccagcaaggaggatccacgcagtgctagaagggagttcctggaagcctggtggagagcccctcccatctgctaagcccggagggcatcaaaggctgctgctgccctcaacccctgacaatctcatcatctcatatctcaggcatggaagaatgagggccattacacgagtaaaacatcaagtacactccagcctggatgacagggccaggctccatctcaaaaaaaaatgcctgtggtcaaagctctcctgacaggggaaaacaaaacaaaacaaacttctccttaaagaaaacatttgcctttgactgcatcataattccagcaggattttgtgcagataactctttggctaactctaaaattaatacagaaaggtaaagaaattagaatagccaaagaaattttgaaaaggaagaataaagcgagaggaatcacattcctcaatttttaacagctctattgagataaaattcacataccatacggttcacccatttaaagtgtataattcaggccgggcgcggtggctcacgcctgtaatcccagcactttgggaggctgaagcgggcagatcacctgaggtcgggaattcgagaccagtctgaccaacatggagaaaccccgtctctactaaaaatacaaaattagccaggcgtggtggctcatgcctgtactcccagctactcggaagactgaggcaagagaattgcttgaacccgggagacggaggttgccatgagccgagatcgcgccaccacacccagctgccattttttaattgattacttgtctatttattactgagttgtaagatattttgggccaagcacggtggctaacgcctgtaatcccagcactttaggaggctatggtgggcaaatcacttgaggtcaggagttcgagaccaggctggccaacatggcaaaacaccatctctactaaaaatacaaaaaaattagccaggtgtggccaggcgtggtgactcacgcctgtaatcccagcactttgggaggccaaggcgggtggatcacctgaggtcgggggctcaagaccagcctgaccaacatggagaaaccccgactccgctaaaaatacaaaattagccgggtgtggtggtgcatgcctgtaatcccagctactcacgaagctgaggcaggagaatggcttgagcccaggaggcagaggttgtggtgagctgagatcatgccattgtactccagcctgggcgacaagagcgaaattctgtcacaaaaaaaaaaaaaccattagccagccatggtgatgcacacccgtggtcccagctactcaggaggctgaggtatgagaattgcttgaacccaggaggcagaggttgcagcgagccaggattacgccgctgcactccagtctgggtgacagagcaagactctgtctaaaaaaaaaacaaaaacaaaaaagatattttgtatgtgtttggataacttccctatcagatatatgatttgcaaatatgtttctctcattctgtgagacatcattcaattttaagacatcacagagctatgttaatcaaggcactgtggctgtggtaaaggatagacacacagaacagaacagagagcccagaaatggacccgcaaacctatgccccattcattttttacaaataagtgcgagaagccaactgaatagaaagcgtatagctttttcaaaaaacagtgctggaacaattggacatctgtaggcaaaaaaacaaacaagcaaacagaagaatctggacctgcccttcacacctcagacaaaagtcatctcaaaatggattgtagatctcaatataaacataaactatacaactttagaagaaaatataggtgaaactctttgtgttctgtggttaggcagacagttcctaggcatggcactaagtaagattcatttaaaattttttgacaaattggactttattaaaacttttgctctacaaaagacaatattaagagaatgaactaacaagctacaaactaagagaaaacatttgcaaattgcatatctgacaagggattgcttccagacgatacacagaattctaaaaattcatccttaagagaataaaccacccaatttttaaatgggcaaaacaggccaggcgtggtggtgcacgcctgtaatcctagcactttgggaggccgaggcaggcggatcacaaggtcaggagattgagaccatcctagctaacacggtgaaaccctgtctctactaaaaatacaaaaaattagccaggcatggtggcaggtgcctgtagtcccagctactcgggaggctgaggcaggagaatggcgtgaacctgggaggcggagcttgcagtgagtggagatcgcaccactgcgctccagcctgggcaacagagcgagactccgtctcaaaaaaaagacaaaatacttgaaaagatattggctaggcgcgctggctcatgcctgtaatcccagcactttgggaggccaaggcgggtggatcacaaggtcaggagttcaagcagcctggccaagatggtgaaaccccgtctctactaaaaaaaaaaaaaaaaaaaaaaaaaaaattggccgggcacagtggctcatgcctgtaatcccagcactttgggaggctgaggcaggtggatcaggagtcaggagatcgagaccatcctggccaacatggtgaaaccccatctctatgaaaatacaaaaattagccagagatgatgccgggtgcctgtaatcccagctactcatgaggctgaggcagaagaatcacttgaaccagggagtcagaggttgcagtgagctgagatcgcaccactgcactccaccctgggcgacaaatcgagattccatctcaaaaaaagaaaaaaaaattaaaaggaatatttgcctcattatgttacaataactaatatggaaagcaatattgcaatgcctattagcacatgacattaggtgaattctcctttgtccccggacctgctgcctcctcctgcttgtcaggggacagatccagtacatctcccctcagcgctgggtggacctaacccttgctttcttggaggaaacccaggaatccagagacaaagtggaagggtactggcatgtggttgggcagggctgcctgaggtcggtgtcagccgaccgtggggcttggtcccaggaggctgcttactgggccctgctcctctggtttcccccaagtcgtgattctgaaatgaataaggacggtgcagaactggactacaaatgcaggagtgacttcctgggagggtggggcccctatctctcctagactctgtggtcagactctggccaacaccccctgtaaggccacaggagaggaacaggagtgatagcccccaaaccccagtcccaccaggccctgagggcccctttgtcactggatctgataagaaacaccacccctgcagccccctcccctcacctgaccaatggccacagcctggctgggcccagctccctgtatataaggggaccctgggggctgagcactaccaaggccagtcctgagcaggcccaactccagtgcagctgcccaccctgccgccatgtctctgaccaagactgagaggaccatcattgtgtccatgtgggccaagatctccacgcaggccgacaccatcggcaccgagactctggagaggtgagtgtcagacgggactgccagagggactgggtgggaggccaggtatgtgagtggggacagtggggagggggcggtggggaggggacagtggggaggggaccatggagaggagacagtggggagggcactgtggggagaggacagtgaggaggggaccttggggaggggacagtgaggagggaaccgtggagaggggacagtgaggaagggacagtgaggacagatagcgttccctctcagtgaggagagcagggtaaggagggaacgattaggagttgcacaaccatctgggctcgctgagacctgggcaggcacaggcccaggttctgacaagcagagggtgaaaggtttcgttctaggcctgaagggccttacagggcagccagggcactacagcctctaaagtcccagcatctgggatcagggcactgtcccagcttcaaattcccagcatctgatcccctgggaggggccagggagcttttccttccctggaacgctgctgggaggtcatgagcctgcagaaggggtggcgggcaacccagtctggggctgggagggaggtcctgtggccagaggagacggtggaggggctgggggcaccaggcgtgctggaggcggagggcgggagatttggggaccaggctgcacagaacccgtcggaagcagggcgatcagccgggagctgcagaggcctggggggcctctagcccagggcagcctgggaggggcagctgcctgggcacccgggccccgcgaggaggggctggggcctgctgcggggtcgcagatgtgtcccggtgctcggagagggccgcagggcgcgtgggccgtggcgggaggccgcgctgctgggagctcacggcccccgccccccgtcccaggctct

SEQ ID NO: 7148 - DNA, 6000 bp, Homo sapiens
catgccccagcctctgaggaccaaaggcgcccctgcttgggaagagggggctcaggggagtcgcctgacccggttccaagccaggctgatttaccgttgctaacatcctatcgcacgcatccctctgcctcatgcacccaaccccaaggcctggtacactgcaggccccaaggtcctgtgcgtcctttcaataccctcctcacctgcctcacctgccccccctaccctgactctggctggagaccccctccagggagttttcaaaacaaagggtgtcagtctcctgtgggattccctcacctctgcagcctgcggtctgaaagctgccccatggtgtgtagtgctaaacttccaacttactccaggccagcggtgacagcccgagggcaggaagggcacccacactgagcctcaaacagctaattttgcaactgtaagtccatataattgtcttgaaaagtaatttgtttcaaaaagctaaaaaacgaatactcttgagtctccttctagtaattccccttctagaggtctatcaccaggaaaagatccaaagcactgatattcttcatggagttgtttataatagaaaaaaactagagcttgttcacaaaggggagctctgcaggctgaagatgttgcacctgtcagcggggatgggggcacgcttgctgacgcagcaacggaaaagcatcagtgtgtgaagatgcattttctctctttctattattattatttttatttttattttttctgaggcagaacctcgctctgtcacccaggctggagtgcagtgatgcgacctcatcacaaccacgagccaccatgtgcggccccatgagcaagccaccacgcccagcctttttttcccttgttttaaaaaatcctctatttaaaaaagatgtgcatgggccgggcacggtggttcacgctcataatcccagctctttcagaggccgaggcaggcagatcacctgaggtcaagagttcgacaccagcctggccaacatggtgaaattccatctgtactaaaaatacaaaaattagccaggccgtggtggtgtgtgcctgtaatcccagctactcaggagactgaagcaggagaatcacttgaacccaggaggcagaggttgcagtgggtcaaaatcatgccaccacactccagtctgggagacagagcaagactccatctcagaaacaaactaacaaacaaaatttttatatctacctataattcgtataaatttaaaatacatgcataaaatcataccctttgcaagcacacgtactaactaaaaggaatatattcagcacatagaaatggttgtctaacggaggaggggggagttaataaacagagaggataaaaagaaataaatcagtagagctggaggagggtctcctccaggctgcgatgagaacatagtgagcagaattgcaggcctgcatgacctcaccttctgtgaggagtccggcctcccaagacgctttcctgcctaggtgcccggctcagagtgtcccctacaaggctactggaggagaaccccagaccgagcctcattcaggtgagggggctgcacaccggaggtgggagaggtctgtcccttcccaccctgtgacactgggtcccactttctctctagggggtctcggtttcctcatttgcaaactggagctcataaggtgggccagagaagtttcagtgaagtgaggaatggatcgtccctctgccagggcccatgtgctctaggtcaccctgtcatcacagggacagggaggtcaaggacagtcactcctgaggccagtccgggctgggctgaccacgtggactctcatgcccagattggggccccaatctccctgaagctggggctccagctgtgactcaggggtgggcagaaggggagacagaagcgataggttcctcagcccccagtcccacctgagggcccctttgtcactggatctgataagaaacaccacccctgcagccccctcccctcacctgaccaatggccacagcctggctgggcccagctccctgtatataaggggaccctgggggctgagcactaccaaggccagtcctgagcaggcccaactccagtgcagccgcccaccctgccgccatgtctctgaccaagacttaggggaccatcattgtgtccatgtgggccaagatctccacgcaggccgacaccatcggcaccgagactctggagaggtgagtgtcagatgggactgccagagggactgggtgggaggccaggtatgtgagtggggacagtggggagcgggcagtggggaggggaccgtggggaggggacagtgagtaggagacagtggggagaggacagtggagaggggacagtgaggaggggaccatgggaaggggaccgtggagtggggacagtgaggaggggaccatagggaggggacagtggggaggggacagtgaggaggggaccgtggggaggggacagtgaggaggggaccgtggggaggagacagtgaggaggggaccgtagggaggggacagtgaggaggggaccgtggggaggggacagtgaggaggggaccgtggggaggggacagtgaggaggggaccgtgggaaggagacagtgaggaggggaccttggggaggggacagtgaggaggggaccatggggaggggacagtgaggaggggacaatggagaggggacagtgaggaggggactgtggggagaggacagtgaggaggggaccatggggagggcacagtggggaggggagagtgaggaagggacagtgaggaggggactgtggggaggggacagtggagacagatagccttccctctcagtgaggagggcagggtaaggagggaacgattaggagttgcacaaccatctgggctcgctgagacctgggcaggcacaggcccaggttctgacaagcagagggtgaaaggtttcgttctaggcctgaagggccttacagggcagccagggcactacagcctctaaagtcccagcatctgggatcagggcactgtcccagcttcaaattcccagcatctgatcccctgggaggggccagggagcttttccttccctggaacgctgctgggaggtcatgagcctgcagaaggggtggcgggcaacccagtctggggctgggagggaggtcctgtggccagaggagacggtggaggggctgggggcaccaggcgtgctggaggcggagggcgggagatttggggaccaggctgcacagaacccgtcggaagcagggcgatcagccgggagctgcagaggcctggggggcctctagcccagggcagcctgggaggggcagctgcctgggcacccgggccccgcgaggaggggctggggcctgctgcggggtcgcagatgtgtcccggtgctcggagagggccgcagggcgcgtgggccgtggcgggaggccgcgctgctgggagctcacggcccccgccccccgtcccaggctcttcctcagccacccgcagaccaagacctacttcccgcacttcgacctgcacccggggtccgcgcagttgcgcgcgcacggctccaaggtggtggccgccgtgggcgacgcggtgaagagcatcgacgacatcggcggcgccctgtccaagctgagcgagctgcacgcctacatcctgcgcgtggacccggtcaacttcaaggtgcgcggggcgcggtgcgggcggggcggggcggggccgcggggcgggcggggccgcggggcggggtcgcggggcggggcggggtggggtcgcggggcggggcggggtcgcggggcggggcggggcggggcggggcgggcggggcggccggggcccggcggggcggggcggggcggggaggggctgggcggggcggggcgcggggcggggcgggccgggccggggcggggtcgcggggcggggtcgcggggcggggcgcggggcggggcggggcggggtggggtcgcggggcggggcccgggctaggccccgcccccgcactgagccgcccccgcccccagctcctgtcccactgcctgctggtcaccctggccgcgcgcttccccgccgacttcacggccgaggcccacgccgcctgggccaagttcctatcggtcgtatcctctgtcctgaccgagaagtaccgctgagcgccgcctccgggacccccaggacaggctgcggcccctcccctgcccttcaccctcccacagttcctgccctgactccaataaatggatgaggacggagcgatctgggctctgtgttctcagtattggagggaaggaggggagaagctgagtgatgggtccgggggcttcgcaggaactcggtcgtccccactgtcgtcgcggcctggggttcacttggggggcgccttggggaggttctagcccctgagcaccggagctgcggcccgggtggagcggagcagtcccgggccggcccgcggcgtctcctggggtccttgagtcggacgggcgtttgtgcgtctcccggcttcccatatcgcacaaagattgtcacttcactaagcgtattggaagcgtgtcggggctcagggaacttttccacaaagcctgacgtccgaatcccgggactctggcagctacgggggtccctgaggccggtccctccccgactcctaagagagtagggggtttcctgcccggtgttctctctccggttcctcccatgtgctccctcctggcagagcagtaactttacccgaggggagtaaacagatgcccctaaagtctgcagtaaaggtgcccacgcgcaacggcgtgggtcaatgccagaaaccctgggatcccggaggtcgaggcctccacacagacgggaacccgggctggttacgttccccggcgcaggccgagggtccccgcgttcccgccgcgctcgggccgataaggacgggcggggtgcccggaggctctataaggaggccagggcggcgggcgcggcccccagagcacgtcaggcggcgccatgctcagcgcccaggagcgcgcccaaatcgcgcaggtctgggacctgattgcgggccacgaggcgcaattcggggcggagctgctgctcaggtcggtagaggcggggtctccgggagctcagggaggtggagatgagggttttgggcgcgtgggccgccaacgccatccaaggtccttcgggtgcggatccccgggctctgggcggtgtgggcgctagtgaagccccacgcagccgccctcctccccggtcactgacctggtcctgcaggctcttcacggtgtaccccagcaccaaggtctacttcccgcacctgagcgcctgccaggacgcgacgcagctgctgagccacgggcagcgcatgctggcggctgtgggcgcggcggtgcagcacgtggacaacctgcgcgccgcgctgagcccgctggcggacctgcacgcgctcgtgctgcgcgtggacccagccaactttccggtgaggcctttccggccggggcaatggtgcagcgcgcagccggggtgggggggctctgggggtccctagcggggcagaccccgtctcaccggccccttctcctgcagctgctaatccagtgtttccacgtcgtgctggcctcccacctgcaggacgagttcaccgtgcaaatgcaagcggcgtgggacaagttcctgactggtgtggccgtggtgctgaccgaaaaataccgctgagccctgtgctgcgcaggccttggtctgtgcctgtcaataaacagaggcccgaaccatctgcccctgcctgtgtggtctttggggagctagcaaagcgaggtcactattgttggccagtgaagctcagggacctaaaaggagcctcctagaactctcaaatgcgccccacccccggaggtttgtcctcccatggcgaggagtgcgatggggcagagggagcactgtgatgtggcgggggtagggagggtggccttcgacttcaacccttgaatcgggcttccaaccat

SEQ ID NO: 7149 - DNA, 6000 bp, Homo sapiens
ttggccccacgttatctacatcccccaactgtttttttgtttttgggggttttttttttttttgctttgtttttgtttttgagataggcccttgctctgacaccccggctggagtgcagtggcacagttttggctcactgcagcctcaacctcctgggttcaagcgattctcctgcctctgtctcccgtgtagctgggattacaggcatgggccgccattcctggctaatttttgtatttttaatagagacacagtttcaccatgttgatcaggctggtctcaaactcctgacctcaagtgatctgccctcctcggtctcccaaagtgctgggatgacaggcgtgagccaccacacccagcccccgcaactgtttacatggataattaacagctttttgtcccaggcagagtttggtgtgaaagcagcttatgtttcactttggaaaaactgtgctcttctccccatccaggaagctgcctgggtctgggccatatgtggataccttatgggtataagctgctcaggaccctgtgtggaagctcaggacaatgccagcgggaaggctaccatgtggagagctggtctctgtttgggcaggactaagagacgcagggcagccttgggcaacctgtctactctcactcactcctcctcccctttcctgtgccaggcacctcctggcaacttgccagccaatgaccctgcatcccaggcataagagctcctactctcccccacctttcacttttgagcttacacagactcagaaataagctgccgtggtgctgtctcctgaggacaaggctaacaccaaggcggtctgggagaaagttggcaaccacactgctggctatgccacggaggccctggagaggcaagaaccctcctctccctgctcacaccttgggtccaacgcccactccagggctccactggccacccctaactattcttaccctggacccagcccccagcccctcactctttgcttccccctgaagcatgttcctgaccttcctctcacttggccctgagttatggctcagcccagatcaagaaacaatgcaagtaggtggccgacacgctgaccaatgccgtggtccacttagatgacatgcccaatgatgtgtctgagctgaggaagctgcatgtccacgagctgtgggtggacccaggcaacatcagggagagctttgggctgggaggaatctagggtgtgggggcagctggccttcctcataggacagaccctcccacgcgttcagggaggtggagcacaggtggcagtagtatctgcatcccctgactctctctccacagttcctgggtaaatgcctgctggtgacctaggcctgccacacccttcccagtttacccatgtggtgcctccatggacaaattatttgcttttgtgagtgctgtgttgacctaaaaacaccattaagctagagcattggtggtcatgccccctgcctgctgggcctcccaccaggccctcctcccctccctgccccagcacttcctgatctttgaatgaagtccgagtaggcagcagcctgtgtgtgcctgggttctctctgtcccggaatgtgccaacagtggaggtgtttacctgtctcagaccaaggacctctctgcagctgcatggggctggggagggagaactgcagggagtatgggaggggaagctgaggtgggcctgctcaagagaaggtgctgaaccatcccctgtcctgagaggtgccaggcctgcaggcagtggctcagaagctggggaggagagaggcatccagggttctactcagggagtcccagcatcgccaccctcctttgaaatctccctggttgaacccagttaacatacgctctccatcaaaacaaaacgaaacaaaacaaactagcaaaataggctgtccccaatgcaagtgcaggtgccagaacatttctctcattctcaccccttcctgccagagggtaggtggctggagtgagggtgctggccctactcacacttcctgtgtcatggtgaccctctgagagcagcccagtcagtggggaaggaggaaggggctgggatgctcacagccggcagcccacacctggggagactcttcagcagagcaccttgcggccttactcctgcacgtctcctgcagtttgtaaggtgcattcagaactcactgtgtgcccagccctgagctcccagctaattgccccacccagggcctctgggacctcctggtgcttctgcttcctgtgctgccagcaacttctggaaacgtccctgtccccggtgctgaagtcctggaatccatgctgggaagttgcacagcccatctggctctcagccagcctaggaacacgagcagcacttccagcccagcccctgccccacagcaagcctccccctccacactcacagtactgaattgagctttgggtagggtggagaggaccctgtcaccgcttttcttctggacatggacctctctgaattgttggggagttccctccccctctccaccacccactcttcctgtgcctcacagcccagagcattgttatttcaacagaaacactttaaaaaataaactaaaatccgacaggcacggtggctcacacctgtaatcccagtactttgggaggctgaggcgagaggatcacctgaggtcgggagtttgagaccagcctgaccaatatggagaaaccccagttatactaaaaatacaaaattagctgggtgtggtggcgcatgcctgtaatcctagctactaggaaggctgaggcaggagaatcgcttgaacccgggaggtggaggttgaggtgagctgagatcacgccattgcactccagcctgggcaacaagagcaaaactccgtctcaaaaaataaataaataaataaataaataaactaaaatctatccatgctttcacacacacacacacacacacacacacacacccttttttgtgttacttaaagtaggagagtgtctctctttcctgtctcctcacacccacccccagaagagaccaaaatgaagggtttggaactcagcccatgggccccatcccatgctgagggaacacagctacatctacaactactgccacaggctctctttttggacaaaaataccatcatactgtagatacctgtgtacaacttcctattctcagtgaagtgtctcccctgcatccctttcagccagttcattcagctctgcgccattccacagtctcactgattattactatgtttccatcatgatccccccaaaaaatcatgactttatttttttatttttattattattatttttttttttttttttgtgacggagtctcgctctgtcacccaggctggagtgcagtggcacaatctcggctcactgcaagctccacctcgcaggttcacgccattctcctccctcagcctcccgagtagctgagtagctgggactacaggcgccccccactacgcctggctaattttttctatttttaatagagacagagtttcactgcattagcgaggatggtctcgatctcctgacctcgcatctgcccgcctcagcctcccaatgtgctgggattacaggcgtgagccaccgcgcccggccttatgtatttatttttttgagacagagtctcgctgtgtcgtcaggctagagtgctgtggcacgatctcggctcactgcaacctccaactccctggttcaaaggattctccagcctccacctcccgagtagctgggattacaggcgtgcaccaccacacccagctaatttttgtatttttagtagagacggggtttctccatgttggtcagcctggtctcgaactcccgacctcagctgatccacccgccttggcctcccaaagtgctgggattacaggcgtgagccaccgagcctggccaaaccatcacttttcatgagcagggatgcacccactggcactcctgcacctcccaccctccccctcgccaagtccaccccttccttcctcaccccacatcccctcacctacattctgcaaccacaggggccttctctcccctgtcctttccctacccagagccaagtttgtttatctgtttacaaccagtatttacctagcaagtcttccatcagatagcatttggagagctgggggtgtcacagtgaaccacgacctctaggccagtgggagagtcagtcacacaaactgtgagtccatgacttggggcttagccagcacccaccaccccacgcgccaccccacaaccccgggtagaggagtctgaatctggagccgcccccagcccagccccgtgctttttgcgtcctggtgtttgttccttcccggtgcctgtcactcaagcacactagtgactatcgccagagggaaagggagctgcaggaagcgaggctggagagcaggaggggctctgcgcagaaattcttttgagttcctatgggccagggcgtccgggtgcgcgcattcctctccgccccaggattgggcgaagccctccggctcgcactcgctcgcccgtgtgttccccgatcccgctggagtcgatgcgcgtccagcgcgtgccaggccggggcgggggtgcgggctgactttctccctcgctagggacgctccggcgcccgaaaggaaagggtggcgctgcgctccggggtgcacgagccgacagcgcccgaccccaacgggccggccccgccagcgccgctaccgccctgcccccgggcgagcgggatgggcgggagtggagtggcgggtggagggtggagacgtcctggcccccgccccgcgtgcacccccaggggaggccgagcccgccgcccggccccgcgcaggccccgcccgggactcccctgcggtccaggccgcgccccgggctccgcgccagccaatgagcgccgcccggccgggcgtgcccccgcgccccaagcataaaccctggcgcgctcgcgggccggcactcttctggtccccacagactcagagagaacccaccatggtgctgtctcctgccgacaagaccaacgtcaaggccgcctggggtaaggtcggcgcgcacgctggcgagtatggtgcggaggccctggagaggtgaggctccctcccctgctccgacccgggctcctcgcccgcccggacccacaggccaccctcaaccgtcctggccccggacccaaaccccacccctcactctgcttctccccgcaggatgttcctgtccttccccaccaccaagacctacttcccgcacttcgacctgagccacggctctgcccaggttaagggccacggcaagaaggtggccgacgcgctgaccaacgccgtggcgcacgtggacgacatgcccaacgcgctgtccgccctgagcgacctgcacgcgcacaagcttcgggtggacccggtcaacttcaaggtgagcggcgggccgggagcgatctgggtcgaggggcgagatggcgccttcctctcagggcagaggatcacgcgggttgcgggaggtgtagcgcaggcggcggctgcgggcctgggccgcactgaccctcttctctgcacagctcctaagccactgcctgctggtgaccctggccgcccacctccccgccgagttcacccctgcggtgcacgcctccctggacaagttcctggcttctgtgagcaccgtgctgacctccaaataccgttaagctggagcctcggtagccgttcctcctgcccgctgggcctcccaacgggccctcctcccctccttgcaccggcccttcctggtctttgaataaagtctgagtgggcagcagcctgtgtgtgcctgggttctctctatcccggaatgtgccaacaatggaggtgtttacctgtctcagaccaaggacctctctgcagctgcatggggctggggagggagaactgcagggagtatgggaggggaagctgaggtgggcctgctcaagagaaggtgctgaaccatcccctgtcctgagagg

SEQ ID NO: 7150 - DNA, 6000 bp, Homo sapiens
ccctgcaggagctggccagcctcatcaccccaacatctccccacctccattctccaaccacagggcccttgtctcctctgtcctttcccctccccgagccaagcctcctccctcctccacctcctccacctaatacatatccttaagtctcacctcctccaggaagccctcagactaaccctggtcaccttgaatgcctcgtccacacctccagacttcctcagggcctgtgatgaggtctgcacctctgtgtgtacttgtgtgatggttagaggactgcctacctcccagaggaggttgaatgctccagccggttccagctattgctttgtttacctgtttaaccagtatttacctagcaagtcttccatcagatagcatttggagagctgggggtgtcacagtgaaccacgacctctaggccagtgggagagtcagtcacacaaactgtgagtccatgacttggggcttagccagcacccaccaccccacgcgccaccccacaaccccgggtagaggagtctgaatctggagccgcccccagcccagccccgtgctttttgcgtcctggtgtttattccttcccggtgcctgtcactcaagcacactagtgactatcgccagagggaaagggagctgcaggaagcgaggctggagagcaggaggggctctgcgcagaaattcttttgagttcctatgggccagggcgtccgggtgcgcgcattcctctccgccccaggattgggcgaagcctcccggctcgcactcgctcgcccgtgtgttccccgatcccgctggagtcgatgcgcgtccagcgcgtgccaggccggggcgggggtgcgggctgactttctccctcgctagggacgctccggcgcccgaaaggaaagggtggcgctgcgctccggggtgcacgagccgacagcgcccgaccccaacgggccggccccgccagcgccgctaccgccctgcccccgggcgagcgggatgggcgggagtggagtggcgggtggagggtggagacgtcctggcccccgccccgcgtgcacccccaggggaggccgagcccgccgcccggccccgcgcaggccccgcccgggactcccctgcggtccaggccgcgccccgggctccgcgccagccaatgagcgccgcccggccgggcgtgcccccgcgccccaagcataaaccctggcgcgctcgcggcccggcactcttctggtccccacagactcagagagaacccaccatggtgctgtctcctgccgacaagaccaacgtcaaggccgcctggggtaaggtcggcgcgcacgctggcgagtatggtgcggaggccctggagaggtgaggctccctcccctgctccgacccgggctcctcgcccgcccggacccacaggccaccctcaaccgtcctggccccggacccaaaccccacccctcactctgcttctccccgcaggatgttcctgtccttccccaccaccaagacctacttcccgcacttcgacctgagccacggctctgcccaggttaagggccacggcaagaaggtggccgacgcgctgaccaacgccgtggcgcacgtggacgacatgcccaacgcgctgtccgccctgagcgacctgcacgcgcacaagcttcgggtggacccggtcaacttcaaggtgagcggcgggccgggagcgatctgggtcgaggggcgagatggcgccttcctcgcagggcagaggatcacgcgggttgcgggaggtgtagcgcaggcggcggctgcgggcctgggccctcggccccactgaccctcttctctgcacagctcctaagccactgcctgctggtgaccctggccgcccacctccccgccgagttcacccctgcggtgcacgcctccctggacaagttcctggcttctgtgagcaccgtgctgacctccaaataccgttaagctggagcctcggtggccatgcttcttgccccttgggcctccccccagcccctcctccccttcctgcacccgtacccccgtggtctttgaataaagtctgagtgggcggcagcctgtgtgtgcctgagttttttccctcagcaaacgtgccaggcatgggcgtggacagcagctgggacacacatggctagaacctctctgcagctggatagggtaggaaaaggcaggggcgggaggaggggatggaggagggaaagtggagccaccgcgaagtccagctggaaaaacgctggaccctagagtgctttgaggatgcatttgctctttcccgagttttattcccagacttttcagattcaatgcaggtttgctgaaataatgaatttatccatctttacgtttctgggcactcttgtgccaagaactggctggctttctgcctgggacgtcactggtttcccagaggtcctcccacatatgggtggtgggtaggtcagagaagtcccactccagcatggctgcattgatcccccatcgttcccactagtctccgtaaaacctcccagatacaggcacagtctagatgaaatcaggggtgcggggtgcaactgcaggccccaggcaattcaataggggctctactttcacccccaggtcaccccagaatgctcacacaccagacactgacgccctggggctgtcaagatcaggcgtttgtctctgggcccagctcagggcccagctcagcacccactcagctcccctgaggctggggagcctgtcccattgcgactggagaggagagcggggccacagaggcctggctagaaggtcccttctccctggtgtgtgttttctctctgctgagcaggcttgcagtgcctggggtatcagagggagggttcccggagctggtagccataaagccctggccctcaactgataggaatatcttttattccctgagcccatgaatcacccttggtaaacacctatggcaggccctctgcctgcgtttgtgatgtccttcccgcagcctgtgggtacagtatcaactgtcaggaagacggtgtcttcgttatttcatcaggaagaatggaggtctgacctaaaggtagaaatatgtcaaatgtacagcagagggctggttggagtgcagcgctttttacaattaattgatcagaaccagttataaatttatcatttccttctccactcctgctgcttcagttgactaagcctaagaaaaaattataaaaattggccgggcgcggtggctcacacctgtaattgcagcactttgccaggcttaggcaggtggatcacctgaagtcaggggttcgagaccagcctagccaacatagtgaaaccctgtctctactaaaaagacaaaaattgtccaggtgtgatgactcatgcctgtaaacctggcactttgggaggcggaggttgtagtgagtcaagatcgcgccatcgcactccagcttgggcaacaagagcgaaactctgtctcaaaaaaaaatttaatctaatttaatttaatttaaaaattagcacggtggttgggcacagtggctcacgcctgtaatcccagcactttgggaagccaaggtgggcagatcacaaggtcaggaattcgagaccagcctggccaatatggggaaaccccatctctactaaaaatacaaaaaattagccgggtgtggtggcgcacgcctgtaatcccagctactcgggaggttgaggtaggagaatcacttgaacccaggaggcagaggttgcagtgacccgagatcacaccattgcactctagcctgggcaacaagagcaaaactccatctcaaaaaaaattataaaaattatacatcagtagatgaatgggtaaacaaaatgtggtggtctatacacacaatggaatattatttggccacaaaaagaaatgaagcactgataggatgtagctgcaccctgaaaatatttgacaagtaaaagaagccggacaccaaaggtcacaaactgcatgaccccatctatatgcaatatccgctacagccaaatccatagggaccaaaagcggattagtggctgccggggccagagttactgttaatgagtaccgaggtggcgtttgggatgatgaaaaagttctgacctagatagtggtgatggctgcataacactaagtgttcttaatatcaccaaattttatacctgaaaaatggctacaatggtaatttatgtctattttatcaccttttttaaaacaaaaaagatataaggggtacagcagagtgagtgctgcatatgcatttactattattcttgggttacatcccaggtactcaataaatgttcactgccctgaagaaacacctgctacgagtcaggcacctcacagttgttatccgtttaattctcacaatctgagaagaaactgtcaccctcattttatataataaatgagaaaacagactcgggcaagtgtcacaatagaatcaagaggcagaataaactgacttccaatgccaaatccatgccgaaattcagtgctataataatgtacatggccgggcgcggtggttcacgcctgtaatcccagaactttgggaggctgaggcgggaggatcacctgaggtcgggagtttgagatcagcctaacacggtgaaaccctgtctctactaaaaatacaaaattggcatggtggcatgcacctgtgatcccagttactcgggaggctgaggcaggagaatcgtttgaacccgggaggcggaggttgcagtgagccggaatggcgccactgcactcaccgcacccggccaatttttgtgtttttagtagagactaaataccatatagtgaacacctaagacggggggccttggatccagggcgattcagagggccccggtcggagctgtcggagattgagcgcgcgcggtcccgggatctccgacgaggccctggacccccgggcggcgaagctgcggcgcggcgccccctggaggccgcgggacccctggccggtccgcgcaggcgcagcggggtcgcagggcgcggcgggttccagcgcggggatggcgctgtccgcggaggaccgggcgctggtgcgcgccctgtggaagaagctgggcagcaacgtcggcgtctacacgacagaggccctggaaaggtgcggcaggctgggcgcccccgcccccaggggccctccctccccaagccccccggacgcgcctcacccacgttcctctcgcaggaccttcctggctttccccgccacgaagacctacttctcccacctggacctgagccccggctcctcacaagtcagagcccacggccagaaggtggcggacgcgctgagcctcgccgtggagcgcctggacgacctaccccacgcgctgtccgcgctgagccacctgcacgcgtgccagctgcgagtggacccggccagcttccaggtgagcggctgccgtgctgggcccctgtccccgggagggccccggcggggtgggtgcggggggcgtgcggggcgggtgcaggcgagtgagccttgagcgctcgccgcagctcctgggccactgcctgctggtaaccctcgcccggcactaccccggagacttcagccccgcgctgcaggcgtcgctggacaagttcctgagccacgttatctcggcgctggtttccgagtaccgctgaactgtgggtgggtggccgcgggatccccaggcgaccttccccgtgtttgagtaaagcctctcccaggagcagccttcttgccgtgctctctcgaggtcaggacgcgagaggaaggcgccgcccctccccaaggaaaggcgagggcctggggcacacccccagtgcccagatccaggcgcgcctctttccacctccagcaggtttggggcctcggccatgggggcaccgaactgcgtgcagcctgaccctcccgaatggggtggtaggtgagggccgcgggacgccccgggcggcgggctgcgaggacggccgactctgcccatcccgagggcggctggcttcgccctccccactctgcg

SEQ ID NO: 7151 - DNA, 6000 bp, Homo sapiens
gcggggcacgggaagaggtgagcggggcacgggagcaggtgagcggggacgggaggaggtgagcaggcacgggaggaggtgagcggggcacgggaggaggtgagcggggacgggaggaggtgagcggggacgggaggaggtgagcggggacgggaggaggtgagcggggcacgggaggaggtgagcggggcacgggaggaggtgagcggggacgggaggaggtgagcggggcacgggaggaggtgagcggggcacgggaggaggtgagcggggacgggaggaggtgagcggggacgggaggaggtgagcgggcacgggaggaggtgaggggcacgggaggaggtgagcggggcacgggaggaggtgagcggggcacgggagcaggtgagcgggcacgggaggaggtgagcggggcacgggaggaggtgagcggggcacgggaggaggtgagcggggacgggaggaggtgagcggggacgggaggaggtgagtgggtacaggcggtccgggggccggggaggtggtccaggggcccagggccactgctggtcagcaggcttggcagtcagaaagaagagaggacccaggagtggggacagtgggaccaggagcccaagtcctggggactctgggatggctggtgcctgagtctgagcacagaggggtcctggctcaggagggccaaagggggtgaggaagagccagtcccggacggtgtccccagcgtgcagtcctgggcagggaccctgacccctgggtctcactgcacaggggctgtgaagtctgggcccctccacagtaagtgctcctgagggtctgctgggaacattctgggcaagggcagcaaagccatcaagccacgccgggggctggacgggcgaaggaaggcgtgagggctgggttctgagcggggttccagttccaccccagggcctggacgggccgaggaaggtgtgagcgctggcttctgagctgggttctgggttccagctccacccctgctgtgtggtctcagccaccacaacgccctctctgagccatgtctcccgccagcagtggtgtctcctgctgggcagagatgctgggggctgggatggtctgctcctggctgcatgcagacaaggggcaggagggatggcggcccggggctgcacgcgagaacgcgcctggaggagaagggagtctcgaagaagggggtctcatccacacccagaagacggtgttgggggaaggaagtggaggaaggggaccccctggttggaacatatgttgccctggggtggcctgtgtctgcgcttgtgtgtcttgggtgcctggcgtgtctgcgtgtgggctgtctctccatgagtacgtgcacgtgtctgcggtatttggcacacgtgtgtggcgtgtgctcgtgcgtgcctgcatgtgctgagtgtggtggaggagaaagtccccctaatcagtccccaggtctctgaggctgtaacaaggtcagcgaggaactgagactggccaggtgtgttgtctcagccaacagccggcgtggccgcctctgggcatggttgatttctcaaataagatcagcatcagatcctgcaggaagacaatctgatccagacaggttgcagatgttctaagataaaataacctttctttaggaggaaagaaaagaagagggtaggtttgcaaccagattaaaaaaagcagcacccatccggacacgtggagagctgtttcctgttaaacaatcctgttagtaacccccaccctctgcaatttcttgttttgaggcaacttctgggacaatctctccacatgaagggcaggttcgaggaccctgcattcaggggtggggaccgagccccggaccggtccactggagcacaccagctgtgtgctcaggacggccagggaggaggccatggactctggacctggctcagggacaaagggctgtcagagtgtgggggagagcactggctccaggggatgtgcctcaaggcagtagcagtgggcctggggtctgccgggaacctctggaggccctggacaggtttccctgctcccggttggcctcgtggccagtgttactgaaatgggagatggggactctgtgactgatggagatgacaccctcgaggcagatccaggaccagagagcagccaccagagctgcgtttcattcgctgatccgcacttcattcatccgcctggagtttgttgtcttagactctgtgttgggacctgtactggtgttaactcaggcctcggtggactcctggtccagggtggatgaggtcatgggcagcacagccctggacagtggaactgatgttgtggacgtgtgggccgggagcccagggagggatgttgggtggcggttcagactgggctgggctttgcagggtaggtaggggtcgggtggtgggagaggctgaggcagaggcacttgggcctgaaaagtatctgagtcctggatgccaggaagccacacagggcacttgggcacagatatgtcattgctgctcctaaaattgatcatgtgtaagcctctggatagccgtgggggtcggcactaatcagagggtctcataggtaacccagtgatgaggggatccaggctaaccattgaatgcaatattgtcaataagaaagaaaaaagcaggttacagaacagaaaccatctgcaccaacacctatggtgctccaaccgtgccaggcagggtcccgggcctgggccgcgtgatgagcctggcgtggggtcccgggcctggcccgcgtgatgagcctggcgtgcagatactgaagagtcctctcaagtgtgggaagggctctgagagttaggcaccttttttttttttttgacaattaaaagaaatttgcacataaaaaaaaaaacctggagggttagatgtggggaggtgatgggctgctttggggtctggaaatttgtttttactccctatctgcattgtctaatatttcaacaaggaacacggttattattcctgcgtgtatgtgtgtggatctcatttcctgtgtctggccctgcagggaaagctgggagggggagccttggaaagatggctccacatggcctgcggggtccttccattgtacctgggcctactgcgggctgatccctgagcaggggcaggcagcgtccagacaccagtgccacaggggaatcggcttttccttctgtggtttctctccattagagcaggctgcagtcagggctgtcagtcaggagacagcaagccggccgagggctgtggctggagatcccaaatcgccctgggcttcagagactcaaattcccaaactctgtgatctttcttggctccctgcgtcctttgcttggaagccatctgttattttgccagggtgccgctatgtgacagccaagggctgaactggggtgttccaggtttaagccgggtacccctcagacagcctggtggacctcaggcctcacgccacactgcagacgagcaaacctcagggcggtggtgaggagctttcgggtgaggtcaaggcaggaagcggagcttggtctggggaaaactgtcccagggctgctggaaccgagcgggaggcacggcctgcaggagctgcctgggcgcccgcaccctttgcctgaatttcgcatccttttcccatggaagtggttggggaccgaggatgtggcctcccggcagcctggaaggctgggctgaggaggacacagggccgggaaggcccagactggtccctagagagcgggactggcctctgcccactgcgggcttcagggaggaggcgcagaggccggggagacagcagatggggccctgcaggcctcgctgcgccctgacctgttcctcgcctctttagccaacctcccgggaaggcaggagccggtctccatggcctctcccggccctgccagccccgtggggcctccccgccctgcagccgcgcccggcgccatcccgccgtccgaccgcgaggggacgccgctggccgcgttcctcctcccaggccgaggctgcctgtgctgcctcccgccggcggggccctgagcctcctcgccctgtcggcggcggtcccctctgaccgcagggtcttcttctagagtcctgatcgccgaggctgagcggaggcgcccggtcttcccgcctcttcagtcttaatgtctccctcaccctcgccccccacccccgtggcttttggcgaggtccgtgccctatttttaggcagaaatcggcaaaaagagtggactgcgaggtggtttctgtccccgccgacgcctcctcttccgctgctccctcccccgggaccggtgatggggaaggtgggggagtgagttcagggcggagcgggcccaccccccacggaacccaggcctgccccgccccgccccggcctcgggggactggtgtggaccgtgccccgcggacccctcggaatcagaccgcgattcagccctcggccccccgggacggtccttccagccccagacgagcgcggcgcctgcacacaacaggcgcccactaaatgcttgttgatggaggtggcgagtacccgaaaccagcggagcctggaaatgggatcctagagatccgggaagggcgcggggatctggtgccaagctggggtcccccttttgcctcccctagtgtctgcctgggtccgaacccgggctcaggccccgcgcagctcggagcctccagcccggagccggtccctgggccggggatgcgcacagccggggagggcgcgcccgacctgaccccaaagctatcagttggggggggggtccccggggaattagaagctgtctcctcccgggcatctccgaggggcacccctgcctctgccccctgccctcatttcccgccgcgcccctccccggccccgccccccggccgcgccccaccccctgcagtccccgcgcggcggccgcccgagccacgtgcgcccgcgcccggcaggcgttcagggaagcgcggccacgcctgggccggccaccatttcccgggcgccgcggcggcgccgactcgcgggcagcggcccctcagtgcgcccagccgggcccccgaacgccgggagcatgagcgcgggctcggagcgcggggcggcggcaacccccgggggtttgcccgcgccctgcgcctcgaaggtggagctgcggctcagctgccggcacctgctggaccgcgacccgctcaccaagtccgaccccagcgtggcgttgctgcagcaggcgcagggccagtgggtgcaggtagggccggggcgtgggaggccgagaggccaccgggccggggctggcgccgagctggggatgcggagaccagagcgggcgcgctgaggccagtggggcgcaaggcggggccccccggagctggggctcagctcggggtcagggttgggggttaccaggtctgggggtggggtgtccagagctgtggggagaggctgggctggaggaggtggcggcgagcggggttcggaggagagaggggggtgccccgcagtgaggggtgcggcccagggttcggggagggggccccgggccagagtgaagcgcccaggcatgaggcgcgggcagggggctcgaccaagaggcgcaaggagattgaggggtgaggggcgccggccgacggggggcgggaggctgggcgggagcaggccggcgagggagcgcgcgctggggtgcggacctccaggcgtccggggctcccgctccaacgtgggtctcaagcgaacccgctgtgatcgcggttggggtccgaaggggcacggggccggcgccagacgggcgcttcctcggtcaccatctcgcgtgaaacgcgtggcttcacctcgaaagggcgagaaacgcatggcgcgaagccgcagcgggcggaggagccggaactcgaaccccagtccgcgcggggcgccagcgcttttccccggcgcaggggtctctccaggctccagcgcgggcccgggcggctgctcgggcggtggaagggacgcggtcac

SEQ ID NO: 7152 - DNA, 6000 bp, Homo sapiens
aagctcccctcaagactcaaagtgggaactgagtgctcaggtggggacaggtgcacagagcacacacaggacaagaggccggagggaaactggccctggccctcctaaaacaacatccaggagcagctgcaccagcccacagtgctatgggttctggggcccaaacaagggccttgtgtttcccctcagcctgtcagcagagaaagctgcgccacactggcccacaccagggtgtcaccaggcggctggctgagtgccaggaaatgacctgcagctggcccagggcagcagccgcagaggcaacggccattcttttctcccacatccacagacaaggccctattcttccctcttcctcagtcccctcagccccaagcacaggcttagaaaaagactcgacggctgatgagcgtgtctccacagaaactgctggaacagagccctgctcacagaggagcaagaggcggagacaggctggccgcccctccctgctctctggatgtggtgagcagccgcaggcagaagccccaagctctgctccttctcacaccacaccccagccaccacctagagcagtggagacattcactttctgctgaaaaccctgccccactgaggagcacacatcctggtctagcaccagcaagaggtgcctcctacctggggccctgcaaaggggcaggcttggctgaggtgggaagcccgacctgggccccaccgcgtcgctgtccgaaggaggctgggccacatccgtgctgggcagggtcttggtctcagccccaactggggtccctgtccctctaccctgggaggtctgaggggcatccccagggttccaccctcggtgctggggcagccgtggcgccgtctctttgtcccatggccacttgactgccagcgcactgtccagcaagaaggccttgcagctggagctggtatccatggtgtagtcgtggccctggtcgcagccccacacgacctggatgacgccgcagtactcggaggacagtgtcctctgaaggtggggcagggccccgcagctggccgcatgtccatgcacccaccccaccaagccgtgcaggcactgggggctggatgtgatcagatccactgcagagagtcaacagagatgtcagatccacggctggtcggcacccagcccaccctccaccgggggaggactcacccagacacgctccctcctctgcccctgttgggggctgggcaccgaccctgcaaaggatcagtgtggccatgagcaggacaagcaggcggaggttcacagcgctcgtcgtacgggaccctctcgagatctcaaacctcagcggtccccataggcaactttctcttccctcaccccagctcctcccagttcatctctccacaacagtcccagggctgttggcactgaacccgggcatggcccattccccccacccagaggctcccgcggaggcacgccctgtccctctctcaacacccgtcacactgcagtactgacagcctgaacgtgctctgaacagactagggcgtactttgcacaaggcttccggcgaccagccggggaggcgttgaccctctgcaggaaggacttgagaaggctgtggcactggtagaactgggcgtggcagctcttgcagacaaacggagacaaggtggggtcctggcggacagccacaccaagcaggcgctggaagtcccgtacgagcacgcgctcctctgcggatggcctctccatgctcgctccaggcgccctctcggagatgctgcgcaggcttctcgaggaaaacttcccgtggcagaggcgacagtgacccatggcgagagcccggcctgctcctgcacagagcggcaggaagtgttagcagctggcaaaggaggctcctgagcacagggcgtcccggactccaggtccgagggcagcgcctgcagcgcccttcgcgcggctcccggacacagcaagcggctcgggcgcgcggctctcggcgggacaagccgccctgtgggggatgtggccgctggtccaagaaatctttcaaatttcaaaggcctctaaggcctctccagcgaagcaacttcaagagtgaaacctggaactgcaccctcctcccagcgaccgcgagacccggggcaggcgctgcgccctccaggaaacgccgcggtttcctgtctgccaattgcaggtgccgcctcctttccggctccgcgagggcacgaagcaggggagggcgattcccacgcgcgggcaccccagggcgacctgcccgcggtgacagcgctcctcacgccgggtcccttctggccgagcccgcggccggggaggccgggccggcgacgccggcgtcacggagcgcgaggaaaaccgagccggccgcccagcgcctatcccgacgcagccccgagtccgctacgcccttggccgggtggaggagaggccgcgccggcttccgggcgtcagtgcggctcctcccacgagcaacccctgccgcgaccccaacccgccacgcccgggccgcggacccacctgcctcgtccgcgccgtcctcgcccgcgtccccgcaggaccccaccgggccccaggcgcgccgcgccgtcgccccgtccaccctcggcccaccgctaagggaagggcggccccgagtccggctgacgccgccgccgccgtccgaggccccgcactgtcgggacgacccaggagacaggaagcggcccagccggtcccgcttcatggcagcggaggacgccagcagaatcccgcgggtgctgcccggcccgaggttcctagaggacccggcgttaggctccgctcggcgcgctggaagcgaggcggggcgggggaggggcggagcgagaagcaaagcgaggcgggcggggcgggccaggggccaggggcgggaccccgccggccgaggttccacccgcggtgccagcgcccccgctcgtaccgctcccctctcgggcccgagggcggccgtgcccgcctctgtcgccaatggagcgctggcctggggcggggcggtgggcggaggggctcgccgacacctcacgacgagtcctccagggagaggcgacgcggccctcaccgcctcttaccgtgggagacggaggcgcggggcgggcaggcgccggcggaggccacgcggcgcgcaggtggcgggcgggctgcagaaaggggaggggggccggggtctcacgtagagaggggcctggctgccgcggttagacgcccatggcaactccgtgaggggcccttctcgccagccccgtctcaagacggcgaagaggcccggctccgtcgcgacaacccacccggactctgccgcccccgccactaacacccgtggggcccgcagtacgcgcggagggggcccgtcgccggaagtgcggccgcgtcccttcctgcggtccgctgctcgggcggctccagcaccagcgccggctgcgttccgggcctccggtcgcccgtccagcccctcggctaccgccgccgcctcccccgctcggcgccatggccgctgcggccggggacggcacggtgaagccgctgcagagcgccatgaagcttgccaacggggccatcgagctggacaccggcaaccggccccgggtgaggcggggcgggggcggggcttggccgctgagggtggcccctggagggacccccgcccggggagggcgaggacggggccggctcgggctggagacttgggagcgggcgccagccgggatcccgggccgcggttcccgggcgaggacgggggcggggcgcagccgggcgtgcagtgaccttggacagctcagatcctgcggaccttggctttccactccgctcgctgagccggtgcatcacagcctgggctccacctgtagaggagatgtagcaggagggtccgccaggccaccttccaaaatccgagtgacgggcaggtccgtgcgttcgtgcatttttctgggcagagatggtagatttaatccggttgccacaggggacggcatgcagagaaggccacatacctgctcatttgtgatgctgtttgcagtcgtcttaggaaggaaaagcaggccggaggggtgtggcccgttcctgagatggggccgaatctaaggttggcgaccaggtagagaagctggcccagccacacccggctgcccaaggagggaaggagcctgcctgtgcctaggagaagcctcgttcctgaatctgctgctttccccaagttggtttttagggcagcaggtgcccccgcaagtcagaaatcctgcctggattatatttcgtctttctctctgaggcatagacttaaagataggaaacttaacagctagggataaaacaaaaaaacatagcatattgctgggcgctgtggttcacgcctgtaatcctgacactttgggaggcccaggcggtggatcacctgaggtgaggagtttgagaccagcctggccaacgtggtgaaaccccgtctctactaaaaatacaaaaattagctgggtgtggcggtgcacacctgtaatcctagctccttgggaggctgagggatgagaatcacttgaacccaggaggcggaggttgcagtgactcgagatcctgccactgcactccagcctgggcgacagagtgagactctgtctcaacaaaacaaaacaaaccaccattctgtggttccaatgacctgtgccttgtcagaggggtcacacagccttgaaaggtaacagttctaggctcctgtgtgcactggaaatacgtaactcgcaggttctgggaaagggatttctcggaacttaaaccgggaagtgatttgaaaacttccagtatcactccctttatcctctcagaaaagtatttttttaagccactgaatgaatcacccttgagttgcacaagaaggaaacattgcatagaatgaaaaatgacagcaaactgctgaggtcacttccccaggcccactgaatgagaatatcagttcctgtgctggagagaaaggcagtcagaggagaaaatgaggtccagctcgtccctggctctctctctctctcaggtcctgatgtcttttccaagtctggagagcagcgatgctgcctgtgccctgcgcagaaaaccgtgttccggctgcagctaaccaccgcaggctcaatgtctctgggtgtatctcagagataagcaggtggtggtgttccttgcttatcccacaagggcacctggccggaataatggagtcacttccctccactggcctgaccccactctttctctttcctggacacaggaggcatacacggaatacctgaggagcatccactatatctcccaggtgttactagaagaagtggaaaccactaaaggtacggctcagccagccgggcgcggtggctcacgcctgtaatcccagcactgtgggaggcagaggcgggctatcacctgaggtcaggagatcgaaaccatcctggctaacatggtgaaaccccgtctctactaaaaatctaaaaaatcagctgggcctggtggcgggtgtctgtagtcccagctactcgggaggctgaggcaggagaattgcttgaacccgggagcagaggttgcagtgagccgagatcaccccattgtactccagcctggaacaagagcgaaactccgtctcaaaaaaaaaaaaaagaaaagaaaaagaaaaaggcatggctgagccctgctgcttcctccatgctggacaaattgtgggcatcctagcccttgatgggtgccaggcttcggcgggggtctcttgtatccttctagcctgaccatttgtagtaggtggaccagcccacactcagtgtgatatagtggcaggaagggaccagcgttgtggataagaagatggagactggggtgtggcaagacactggctccagtgagcggcacagacgtggggcagcattccagctgtggggtgtgcaaaggccctgaaataggagtgggcggggtggggctgtgtgcatgccttgggtggaactggggccgttctg

SEQ ID NO: 7153 - DNA, 6000 bp, Homo sapiens
atttttagtagagacggggtttctccatgttggtcagcctggtctcgaactcccgacctcagctgatccacccgccttggcctcccaaagtgctgggattacaggcgtgagccaccgagcctggccaaaccatcacttttcatgagcagggatgcacccactggcactcctgcacctcccaccctccccctcgccaagtccaccccttccttcctcaccccacatcccctcacctacattctgcaaccacaggggccttctctcccctgtcctttccctacccagagccaagtttgtttatctgtttacaaccagtatttacctagcaagtcttccatcagatagcatttggagagctgggggtgtcacagtgaaccacgacctctaggccagtgggagagtcagtcacacaaactgtgagtccatgacttggggcttagccagcacccaccaccccacgcgccaccccacaaccccgggtagaggagtctgaatctggagccgcccccagcccagccccgtgctttttgcgtcctggtgtttgttccttcccggtgcctgtcactcaagcacactagtgactatcgccagagggaaagggagctgcaggaagcgaggctggagagcaggaggggctctgcgcagaaattcttttgagttcctatgggccagggcgtccgggtgcgcgcattcctctccgccccaggattgggcgaagccctccggctcgcactcgctcgcccgtgtgttccccgatcccgctggagtcgatgcgcgtccagcgcgtgccaggccggggcgggggtgcgggctgactttctccctcgctagggacgctccggcgcccgaaaggaaagggtggcgctgcgctccggggtgcacgagccgacagcgcccgaccccaacgggccggccccgccagcgccgctaccgccctgcccccgggcgagcgggatgggcgggagtggagtggcgggtggagggtggagacgtcctggcccccgccccgcgtgcacccccaggggaggccgagcccgccgcccggccccgcgcaggccccgcccgggactcccctgcggtccaggccgcgccccgggctccgcgccagccaatgagcgccgcccggccgggcgtgcccccgcgccccaagcataaaccctggcgcgctcgcgggccggcactcttctggtccccacagactcagagagaacccaccatggtgctgtctcctgccgacaagaccaacgtcaaggccgcctggggtaaggtcggcgcgcacgctggcgagtatggtgcggaggccctggagaggtgaggctccctcccctgctccgacccgggctcctcgcccgcccggacccacaggccaccctcaaccgtcctggccccggacccaaaccccacccctcactctgcttctccccgcaggatgttcctgtccttccccaccaccaagacctacttcccgcacttcgacctgagccacggctctgcccaggttaagggccacggcaagaaggtggccgacgcgctgaccaacgccgtggcgcacgtggacgacatgcccaacgcgctgtccgccctgagcgacctgcacgcgcacaagcttcgggtggacccggtcaacttcaaggtgagcggcgggccgggagcgatctgggtcgaggggcgagatggcgccttcctctcagggcagaggatcacgcgggttgcgggaggtgtagcgcaggcggcggctgcgggcctgggccgcactgaccctcttctctgcacagctcctaagccactgcctgctggtgaccctggccgcccacctccccgccgagttcacccctgcggtgcacgcctccctggacaagttcctggcttctgtgagcaccgtgctgacctccaaataccgttaagctggagcctcggtagccgttcctcctgcccgctgggcctcccaacgggccctcctcccctccttgcaccggcccttcctggtctttgaataaagtctgagtgggcagcagcctgtgtgtgcctgggttctctctatcccggaatgtgccaacaatggaggtgtttacctgtctcagaccaaggacctctctgcagctgcatggggctggggagggagaactgcagggagtatgggaggggaagctgaggtgggcctgctcaagagaaggtgctgaaccatcccctgtcctgagaggtgccaggcctgcaggcagtggctcagaagctggggaggagagaggcatccagggttctactcagggagtcccagcatcgccaccctcctttgaaatctccctggttgaacccagttaacatacgctctccatcaaaacaaaacgaaacaaaacaaactagcaaaataggctgtccccagtgcaagtgcaggtgccagaacatttctctcattcccaccccttcctgccagagggtaggtggctggagtgagggtgctggccctactcacacttcctgtgtcacggtgaccctctgagagcagcccagtcagtggggaaggaggaaggggctgggatgctcacagccggcagcccacacctggggagactcttcagcagagcaccttgcggccttactcctgcacgtctcctgcagtttgtaaggtgcattcagaactcactgtgtgcccagccctgagctcccagctaattgccccacccagggcctctgggacctcctggtcttctgcttcctgtgctgccagcaacttctggaaacgtccctgtccccggtgctgaagtcctggaatccatgctgggaagttgcacagcccatctggctctcagccagcctaggaacatgagcagcacttccaacccagtccctgccccacagcaagcctccccctccacactcacagtactggattgagctttggggagggtggagaggaccctgtcactgctttccttctggacatggacctctctgaattgttggggagttccctcccctctccaccacccgctcttcctgcgcctcacagcccagagcattgttatttcagcagaaacactttaaaaaataaactaaaatccgacaggcacggtggctcacgcctgtaatcccagcactttgggaggccgaggtgggaggatcacctgaggtcgggagtttgagaccaccctgatcaacatgtagaaaccccatctatactaaaaatacaaaatcagccgggcatggtggcccatgcctgtaaacccacctactccggaggctgaggcaggagaatcattttaaccaaggaggcagaggttgcagtgagctaagatcacaccattgcactccagcctggaaaacaacagcgaaactccgcctcaaaaaaaaaaaagcccccacatcttatcttttttttttccttcaggctgtgggcagagtcagaagagggtggcagacagggaggggaaatgagaagatccaacgggggaagcattgctaagctggtcggagctacttccttctctgcccaaggcagcttaccctggcttgctcctggacacccagggcagggcctgagtaagggcctggggagacagggcagggagcaggctgaagggtgctgacctgatgcactcctcaaagcaagatcttctgccagacccccaggaaatgacttatcagtgatttctcaggctgttttctcctcagtaccatccccccaaaaaacatcacttttcatgcacagggatgcacccactggcactcctgcacctcccacccttccccagaagtccaccccttccttcctcaccctgcaggagctggccagcctcatcaccccaacatctccccacctccattctccaaccacagggcccttgtctcctctgtcctttcccctccccgagccaagcctcctccctcctccacctcctccacctaatacatatccttaagtctcacctcctccaggaagccctcagactaaccctggtcaccttgaatgcctcgtccacacctccagacttcctcagggcctgtgatgaggtctgcacctctgtgtgtacttgtgtgatggttagaggactgcctacctcccagaggaggttgaatgctccagccggttccagctattgctttgtttacctgtttaaccagtatttacctagcaagtcttccatcagatagcatttggagagctgggggtgtcacagtgaaccacgacctctaggccagtgggagagtcagtcacacaaactgtgagtccatgacttggggcttagccagcacccaccaccccacgcgccaccccacaaccccgggtagaggagtctgaatctggagccgcccccagcccagccccgtgctttttgcgtcctggtgtttattccttcccggtgcctgtcactcaagcacactagtgactatcgccagagggaaagggagctgcaggaagcgaggctggagagcaggaggggctctgcgcagaaattcttttgagttcctatgggccagggcgtccgggtgcgcgcattcctctccgccccaggattgggcgaagcctcccggctcgcactcgctcgcccgtgtgttccccgatcccgctggagtcgatgcgcgtccagcgcgtgccaggccggggcgggggtgcgggctgactttctccctcgctagggacgctccggcgcccgaaaggaaagggtggcgctgcgctccggggtgcacgagccgacagcgcccgaccccaacgggccggccccgccagcgccgctaccgccctgcccccgggcgagcgggatgggcgggagtggagtggcgggtggagggtggagacgtcctggcccccgccccgcgtgcacccccaggggaggccgagcccgccgcccggccccgcgcaggccccgcccgggactcccctgcggtccaggccgcgccccgggctccgcgccagccaatgagcgccgcccggccgggcgtgcccccgcgccccaagcataaaccctggcgcgctcgcggcccggcactcttctggtccccacagactcagagagaacccaccatggtgctgtctcctgccgacaagaccaacgtcaaggccgcctggggtaaggtcggcgcgcacgctggcgagtatggtgcggaggccctggagaggtgaggctccctcccctgctccgacccgggctcctcgcccgcccggacccacaggccaccctcaaccgtcctggccccggacccaaaccccacccctcactctgcttctccccgcaggatgttcctgtccttccccaccaccaagacctacttcccgcacttcgacctgagccacggctctgcccaggttaagggccacggcaagaaggtggccgacgcgctgaccaacgccgtggcgcacgtggacgacatgcccaacgcgctgtccgccctgagcgacctgcacgcgcacaagcttcgggtggacccggtcaacttcaaggtgagcggcgggccgggagcgatctgggtcgaggggcgagatggcgccttcctcgcagggcagaggatcacgcgggttgcgggaggtgtagcgcaggcggcggctgcgggcctgggccctcggccccactgaccctcttctctgcacagctcctaagccactgcctgctggtgaccctggccgcccacctccccgccgagttcacccctgcggtgcacgcctccctggacaagttcctggcttctgtgagcaccgtgctgacctccaaataccgttaagctggagcctcggtggccatgcttcttgccccttgggcctccccccagcccctcctccccttcctgcacccgtacccccgtggtctttgaataaagtctgagtgggcggcagcctgtgtgtgcctgagttttttccctcagcaaacgtgccaggcatgggcgtggacagcagctgggacacacatggctagaacctctctgcagctggatagggtaggaaaaggcaggggcgggaggaggggatggaggagggaaagtggagccaccgcgaagtccagctggaaa

SEQ ID NO: 7154 - DNA, 6000 bp, Homo sapiens
actgaccctgctcctaggcctgggtagtactggcatcctgggggagggactgcagcaatttctgctctcttgaacccccggggcctggcacatagcaggcactcaatattggctgaatgagacaggctggggcagacctggacttcagccctcacgaaggcggctctcacgtgcttaccagtgatctgacgggtaactggccaaggtcccgttgagcacaaaggtggcagagccacccccatccaggttgatggcgttgaccacgtcctgtttcagcaggaactccgccatttcccacaggttgatgctgcggcacaaagcggcgctgctcaggctcagcgcccaccatcatttctcatttaactccttttccttccacagtgcagagcatcacgcccacagtgcaggcacatttctaagtggcccccgcccccaagcatgtctcatcctagcccccggaagctgtgaacacgtgagatcacacccatgcctgtgctgttacatggcataggaatccttaagggaggggaaacggcccggaggatctgggtgcagccactggaatcacaggagtgttcaacacagagagccttctctggctggtgacagaataggaagtgagatttgaaatacgagggggatgagagggtggccggacaactgggggagaggacacacatgggaaggaacctgggcagcttgaaggagctgaggccccagatggcggccagcagggaaaccaagacctcagtcacaactgaggaggcgacggggattcttccaacaacctaaacaagaggattctttccagataagagaagagccctgcctaaccagcatcttggttttgtccatgggacaccctgaacatagaacattccaagttgaccagcctggccaacatgatgaaaccctgtgtctactaaaaatacaaaaattagccaggtgcggtgactcacgcctgttaattccagcactttggaaggccgaggtagatggatcacctgaggtcaggagttcgagaccagcctggccaacatgatgaaaccccatctctactaaaaatacaaaaattagctgggtgtggtggcgggtgcccgtaatcccagttacctgggaggctaaggtgggaggatcacctgaacctgagaggtagaggttgcagtgagctgagattgcaccactgcactctggcctgggcgacggagtaagaccctgtctcaaagaaacaaacaaacaaaagaacattccctgctgagtgttgctaaatttgtgctggttatgcaaccagagcaaaccaaaacactctctttacaggggctagaaatgaggctcagggaggccgagggacttgtctacggcataggtgggtagacaagtcatcgatggctaagctgggattggaaccaagatcttctccctgctcactttgtgaccatttccttgtatcctatctagggttcaggaaaggtgaggcctaaagctgaagatgatgagttcttggaatcggcaaagatctcagaaccctcatcctgtgggaaggtgagggggccctgggaggggggacagataggtgtcaacatcccagaaagcaggtagagtcagagggtggctgtcattgggtcaacgttcctcctagcaggactgagccccggccggggggcctcagctcccaggactcacccacgctgctccgtttggccgtctgcatgaaagagcaccagctgccctttccggtcgtggccaatggccgtcctggctgatatcacattcacaaatttgctaaaggaacctgaaggaaaagcagcctggctgatcaccgccccttgggaggcctcctgcttcttgcctaactccacttcccactggtctgagctacctggtacctccctgggaagcacagcagcctccttgctcgtctccctgcctcccctctgcacatcccagtctccccagggcagccggggggtctcttcttacaggtaaaccaagctatgccagcctccaggtgaagaccctctaatggtttcccctgttcttagaacaaaatccaaagagccagcatgccctccccagcctcttcctcctcctgcctcagctcctgggtgtcccctcaccaccctgcagccactttgcacttcctgttccctctggctgggaactgtgcttttctctagcttgctcctttgtcagatcacctccttagtgaggccttccttgaccgcccactctttttttttttttgagacaaagagtctcgctgtgttgcccgggctggagtgcagtggcatgatctcagctcactgcaacctccacctcccaggttcaagcaattctcatgcttcagcctcccaagtagctgggactacaggcacacaccaccatgcctggctaatttttgtattttttttttttgtagagataggtctcactatgttgcccaggcaggtcttgaactcctgggctcaaccgatcctcccgcctcggcctcccaaagtgctgggattataggtgttagccaccacacctagcttactgcccactctaaaatggtcatggtatcctgtccccatcccagtattctgcatcccagtggttctcaaccttgagtgtcggtcagagtcaccatggaggcccgttaaaacatagactcttgggccttgcctctgattctgcaggtctgagggtgtggggctttgaaacaagctcctgggccacgccgatgttgcaggtccatgaagatttttttctcttcacttttctcttcctgtacccacagctccggtccccatctctcccctttcccctaactttatttttgtttctgagcacttatcaattcttttcagcatattctataactattttttgtcctatatattcaatataagcctatcttcctccccatgaatccccagtacccagaatagtgctgggcacaaagtagctgctcaatacttgttgaaagacttaagaacagctccgcccagcccactggtcctggttctcgagagggttgttgccaacagcctccccatccaacctgtctcctgtgtctcgtcacactctgtggcttggctctcgttgatgtagatgcttccattacgaatcagccacacgaccccactcagcagctgcacaaatgggttctcagtgtccagcacctcctcctcagacaggtacctggatccggggaaggtgggaagctcactcaccagcaggggcaactgcagatagtcaggctctttctccctagccatcccaacctggctgctagattccccctcatgccccaggaacctcctggggcctgagtgtagctgggacaacttaacagccctaggaatctccctgttgtcagagctgaagctggacagggttctgacaatacaatccccacaagcctttgcaaacagtctgtttcatttaacagaaatgaccatcccccaacagagctcaaatccatctatggccctcaatccccaggccatacccagcccaactaccacttgatccctgttacggcccttcattggcttccttgtttctccactgctctctcccacctggtcccactcaggatcagaacaagctttatcatcaacaaatactttttttttgagactcaaataatttttaagataattttaaataattcaaatcatcaatcttgccagggcgtggtggctcacacctgtcatcccagcactttgggaggctgaggtgggtggatcacttgaggtcaggagttcgagaccggccaggccaatatggtgaacccactcccccgttccccaccccatcccgtctctactaaaaatacaaaaatcagccgggcgtggtggcacacgtccgtagtcccagctactccagaggctgaggcaggagaatcgcttgaacccgggaggcagaggttgcagtgagccggtatcatgccactgccctccatcctgggcaacagagcaagactctgtctcaaaaaaaaaaaaatcatcagtcttgatgagttgatgtttctgacaccccactcctttttcagtccctcatacacacaagcccccctgagcctctgagcctttgtgcgtggggttcctttggactgaaacgctcttcctccagttctgaccttggctcacttagtgattcatcttcaagttcccactcaaaggtcacctcggagaggcgtgttccagatcaccctccctaaaatcaacactatttacaacgggttcaccccgttggttgctttgctgcacacacagcaatcagaatgtatgttagctatttacccggcttttgttgatttttctagtaatgggggagggctgttaaggcaaagactgtgttgttcacggctatctcaccggggcgcggcacattgcctgatacaagcaagtgctcaatgatactggatgatgaataaactctgcaaggaagcgattcctatccccattctgcagaggaggaaacaggggctcagcttggttaagtgacttgaacacggaggcacggctacaacccaaatctcaggccctctgccctcgacagcacggggctccctgcctcctcacccggtgaccagggtcccgtcgcggcggatcccgaactgcgcgttctgcagccccccggagctgctcacccgccgctcgtcgctcaccacgttccccaggcactcgcccgagttcatgcggaagaagccgccgttctgggcgacacggcagtcggccgcccgcgccgtctcctccacggtggcgcgtcgtctcgccgcgcagccgccgggtccaccgggctccagcaccgagaaggtgcgcaggggctcaacggcccgcgtcaggtggccggccaccgcgcggtccctgaagtgcgacacgaaggtgcgcacggccagaccgccggcgccgggagtcgcgggaggcggaggccaactctcgtgctcgcggttgccggcgcgcacccgtgtgcagtcccgggggaggcgcgcgcgcgcgcgtggatagggcagtagcaagtcgtcgtcgcgggaggccctgcggggacgggcggccgtgagctcagggggctgtcctcgtgagctcggaggacaggggggaccccccgaaccaggctggcccagggagctgcactcaccccgagtcgaggccgccggacgcttcccagaggaagccgaatagtgcaagccggaggagaagccagcgacccgtggaggtcgccatattggaccggggcctcgggtcatgtgggctcgcctcacgtgactcaagtcccagggtggccgctttcagctcggactgaattacctgcgctcttttcggctggcgggctggcgggcggtgctggtgatgttaactttttatctccaggtaatctcaaacctacaggaagttgcaaggagagcataaagaactctcgtagaactgttattcatgtttagcagtggtttaggcttgcctgatttactcaatcatttgtactttgttttttttttttcctgaaccaatggcaaccaaattgcagatgtcatgatcctttaccccatacctcgccatgaatctcctaagaacaagggcattttcttaaccacagggcaaatatcattaggacaactcccattgacatttctgtgatgtcatccacagctaaccttcaattgtccctctaatgtctttttttttcttttcctttttgtccgcccctgaccctgtaacccaggagttgcttttagttgtcatgtctctttgatctcttcatctggaaggctcctcagccttttgtcttttactaccttgacatttttgaagacagcccagctacatgatttgtgtgactcaatgcaaaatgaaaacgtggggacacttactaaaaaacccagaaaactattaagaatttcaagatggtcagagcaaatggttgcagcaagccagggaccttctgagtgagcccatgaagctggccctgagtatagaagccagtttattttgtagcatgtacttcaagcttcct

SEQ ID NO: 7155 - DNA, 6000 bp, Homo sapiens
tctctactaaaatacaaaaattagccgggcgtagtggcacacacctgtagtcccagctacttggcagactgaggcaggagaatggcatgaacctgggaggcggagcttgcagtgagctgagatggcgccactgcactccaacctgggcggcagagcgagactccgtctcaaaaaaaaaaaaagattccccaaggttgtcccttgttctgtgaagcctcctcccctcctcacacctacttgcccatctcattccctacactgctctgtggcagctcactctggcttcgtttgtgtgcttgtcaactctattttcagattgtgaatgactttagggcacagacgatgtcttgctcctcttcaggtgcctggctcctactatacagcctggaacatagaaatgtttaaaaaatatttgctgaattaaatagaaaaaatgaagaaaaagaaaaaagaggcacctggagatgttttgtccaggtcttagctggtggaagggaccttgggctgtgagcgtgcttgagtctggtctgcccagctggcagcccccacaccaccctgcaagtccacatgggatgaggggcacccctaatgtacccaactggacgtgggggccacctaccagacacgcagcctatgacagaatctcctgcccctcagaacctcaacgccagtttctgggatgctgttaatgccctcccagccctttacacaacagatactatacacagcacggacagaagaaattgatcctttgacgtttccatttcctaagagttttacaaaaatgactttcgggccgggcacagtggctcacgcctataatcctaacactttgggaggccaacgggggtggatcacttgaggtcaggagttcaagaccagcctggccaatatggtgaaaccctgtgtctattaaaaatacaaaaattagccgggcgtgttggcacaccccggtaatcccagctactcaggaggctgaggcaggagaatcgcttgaacctgggaggctgaggttgcagtgagccaagatcaggccatttcaatctacactcgagcttaggcaacagagtgagactccatctaaaaataaataaataaactagcctggtgtggtagtacacacctgtagtcccagctactcaggaggctgaggtgggaggactgcttgagcccaagaagtcgaggctgcagtgagcgatgattgcaccactgtactccagtctgggcaacagaatgggatcctgtctctaaataataatagaattacataacaaaacttttttgggtgataaaaaaaatcctaaaactggataatggtgatgctggaatatcgctgtgcatttactacaaatcattgcattgtacacttaggagaattttacagtatgtaaattttatcttaataaagtttaaaaaaaaaccttccaatggcttactatttcactttggctgaaatccatactcatttccctggatccctgcatgtacgatctggccttgccttggccctcccacttcaaccctgctcaccacctccaacccctcccccacggccctcctctcccaccaggtggctcttcctgctgcacctcccaagctgtttcccacttcaggctctggcccagatctgcacacagccgcatcttttctttccttcaatcacagtctaaaggggcttggagaggcttccctgccacacctgcaacatccttctctcgcagtcctgccctttgcttcttgcattcatcacataactgtttcatgtctgtttccccttgaaaagctaagctccatgaaggcagggatcagctgcaacggagcacatacgaggtgctcagcctgttgaacacacaaatgatggtagaactcaaatgaggatgctaagaggggacaaaagtattccaggctgaagagcaaaaaagaaaacccttggcttcttagcagctttggctagaactgtggatatgggctgctctgttcaaatgcagaatttctgtggcacccgttatgtgcttagaaaaacttggcaaaggagtagcaaacctcaaagtagggagaaaaccaaagtcagaacttgccaaagactgcctgttcctgcaactcctaactgaggcagaaaaaaagagcgcttccggaggcagggagtaggcgtcaggcctgggctcctctgctggttatttttagcagcccaatgcaaagctcagaaagatatactcccttcacatcaatatattggtcatttaagcctctaggaggagcagtcattttgtacatggttaaagtgaactaggagcgtcagagctgttcccgggacccctttgaggtccctgaattgtattagtttccaaaagcaaggcatcagcatggccatgttctctgtcaaagctcaagagtctctcccacgcctctctcctagctcttggtggctgctagccttctttgcattctttgacttatgactgcatcagtccaatctctgcctgtgttcatatgagcttctttcctctgtgtgtatttgtgtcttttacaagaacaccagtcagattggattcagggcccaccctactccagaatgacctcatcttaactaattacatctgcaaagacccaatttccaaacaagttcacattctgaggttctggtaaggacatgagtttggggggacactctctaactgagttcactaaccctcaccgtggactggctcaaaggagcagtggctcaaagaggggcctgagatcaagcaccagaagtgctgactgtggatgaaaaggggctggcctggcccctatctgtgtccccccatacctgtggtagtgagggagaaggaaaagaaaaatccgttggggaaaattctgacctcagaagtggcctgcctgaaaagtcatagaaactggcaaaaataaagcaacctgggaaaaaactcaggctggacctgcacggagataagcagacagggtccagcgcagaagccctttgttctttgcataattagcaggctcccgggaaaaagtttcctctccttttcaggcatatacacagtgggctccatggaaaccggcacagggaggagggggccttatctaaaacaaacccacagttacacaaacaagagaagcagcgatttgcacttgcctagagacatacccacagctgcataacataaggggagctgcacaggcagttttactggtaagaagttactcagttaccaggaggagagcagtgtcctataaaagttttttgcggccaggcacagtggctcacgcctgtaatcccagcactttgggaggcggaaggaggcggatcacctgaggtcaggagtttgaaaccagcctggccaacatggtaaaatttcgtctctacccaaaatacaaaaattagcagggcgcagtgacgtgtgcctgtaatcccagctactcgggaggctgaggcaggagaatcatttgaacccaggaggcagaggttgttgaggttgcagtgagccaagatcgcaccattgcactccagcctgggtgacaagagcaaaactctgtcttaaaaaaaaaaaaaaaaaaagctttttgcattcagctgtaacccgacaatccactcggactcccgtctccactttggagagctttcttctttcccttattaaacgttcgctccaaccccacccttgtgtccacgctccttagttttcttggaggtaggacaaagaaccccgggactagttcagacaaggagaaactgctatattaaggtgcactggcaagaccgcaacagtatcaagccaattagacttgccgtggctcctggaatggcccacgcactgcactggcaccaagacaccacccaaccctggacactgcactgggacaggaggcctgaagagaagaatcctctcaaaggaagcttgaagtacatgctacaaaataaactggcttctatactcagggccagcttcatgggctcactcagaaggtccctggcttgctgcaaccatttgctctgaccatcttgaaattcttaatagttttctgggttttttagtaagtgtccccacgttttcattttgcattgagtcacacaaatcatgtagctgggctgtcttcaaaaatgtcaaggtagtaaaagacaaaaggctgaggagccttccagatgaagagatcaaagagacatgacaactaaaagcaactcctgggttacagggtcaggggcggacaaaaaggaaaagaaaaaaaaagacattagagggacaattgaaggttagctgtggatgacatcacagaaatgtcaatgggagttgtcctaatgatatttgccctgtggttaagaaaatgcccttgttcttaggagattcatggcgaggtatggggtaaaggatcatgacatctgcaatttggttgccattggttcaggaaaaaaaaaaaacaaagtacaaatgattgagtaaatcaggcaagcctaaaccactgctaaacatgaataacagttctacgagagttctttatgctctccttgcaacttcctgtaggtttgagattacctggagataaaaagttaacatcaccagcaccgcccgccagcccgccagccgaaaagagcgcaggtaattcagtccgagctgaaagcggccaccctgggacttgagtcacgtgaggcgagcccacatgacccgaggccccggtccaatatggcgacctccacgggtcgctggcttctcctccggcttgcactattcggcttcctctgggaagcgtccggcggcctcgactcggggtgagtgcagctccctgggccagcctggttcggggggtcccccctgtcctccgagctcacgaggacagccccctgagctcacggccgcccgtccccgcagggcctcccgcgacgacgacttgctactgccctatccacgcgcgcgcgcgcgcctcccccgggactgcacacgggtgcgcgccggcaaccgcgagcacgagagttggcctccgcctcccgcgactcccggcgccggcggtctggccgtgcgcaccttcgtgtcgcacttcagggaccgcgcggtggccggccacctgacgcgggccgttgagcccctgcgcaccttctcggtgctggagcccggtggacccggcggctgcgcggcgagacgacgcgccaccgtggaggagacggcgcgggcggccgactgccgtgtcgcccagaacggcggcttcttccgcatgaactcgggcgagtgcctggggaacgtggtgagcgacgagcggcgggtgagcagctccggggggctgcagaacgcgcagttcgggatccgccgcgacgggaccctggtcaccgggtgaggaggcagggagccccgtgctgtcgagggcagagggcctgagatttgggttgtagccgtgcctccgtgttcaagtcacttaaccaagctgagcccctgtttcctcctctgcagaatggggataggaatcgcttccttgcagagtttattcatcatccagtatcattgagcacttgcttgtatcaggcaatgtgccgcgccccggtgagatagccgtgaacaacacagtctttgccttaacagccctcccccattactagaaaaatcaacaaaagccgggtaaatagctaacatacattctgattgctgtgtgtgcagcaaagcaaccaacggggtgaacccgttgtaaatagtgttgattttagggagggtgatctggaacacgcctctccgaggtgacctttgagtgggaacttgaagatgaatcactaagtgagccaaggtcagaactggaggaagagcgtttcagtccaaaggaaccccacgcacaaaggctcagaggctcaggggggcttgtgtgtatgagggactgaaaaaggagtggggtgtcagaaacatcaactcatcaagactgatgatttttttttttttgagacagagtcttgctctgttgcccaggatggagggcagtggcatgataccggctcactgcaacctctgcctcccgggttcaagc

SEQ ID NO: 7156 - DNA, 6000 bp, Homo sapiens
tgatctgccagccttggcctcccaaagtgctgggattacaggtgtgaaccaccatgcccagcctaaaccgtttcatttttctaagagcttatatcagaccagttctaagattttatgactttgtgaccaaaacttcttgtctctaggtttgtaaatcaccatttttagtcattggtagaatgaactacctgcccactctcattgtgttgattggtttcaataatggagagaactgatgatgactaaatgttgcagataataaaattagaaccccaagtacttaacaaatttgttcaaaatgatgcaactcattaatgatagagccagggtcagaattcttttcccctacccaatttctggttttatcactgcacttcagcatagtatctcttattaagtttggtcataagtgaaataattgtataaagttaaaaaaaaaaaagaaatagttagacaatacaaaatttctcctttatttatttcattatatgtagaaagcactgaatgtggatgctaacacataattgtaatacattttaaccataattaagatcagtaagattaactttctgaatattaatttcctgaaagcgatccatagttatgtttctgatttaaaaattgtatcttccacatgaacacgatttatctgtttgaaattactgatgtgttggattttaaaaagaaaatcaaacactgagataagatgcagtagtcttctttagcacacttgaatgctgacatcactaaaagcatttccttacatattctaggtaaggacaatatggctttattaaatgtaaaactggtactgatcttaggagtacagggagcatcagtagcaccttcaccaaatggtgaagccaataatgagacagactgatgttaattgccattcctgatttgacacaatgggaaatacaccttgtgctaacatcttaccaagttatctaacatgagtctacatatgaacaaagctgaattgtggctgtttataagacaacttgcctggactctttaaaaatgtcagtattacagatgactaggaaataagtatgaggatggctagactaaaagagactaaagaaatacaacagccaaatgcaatacatgatccttaattgggtcatgcatttaaaaatactgtaaagtatgaaagtatgtttttgggacacttcagtatttgagccaagactatgtattagatcatatagtatcagtattaaatttcttaggtataataatggtattatggttatgtaggcaaatctccttgttttctagagatacttctgaagtgtgtaggagtgaagggtcatgatgttcgtagcttactttcaaacaatgaagaaaatattatagagaatgcaagctaatgttaaaatggtgaatctaagtgacgaccaaaagacttattcattatagcatccttttaacttttttgtagatttgaaatttttctaaataaaatgtttacaggaaaattgctttaacaaatacaagaggataggcagcatatggacaaaagtcagatattaaccttttcccagaatgcttctaacatcagatagagactttaaagtcctcattttgcaggcacactatctatgtagaatatgcctctattaaaacacttgtgtctgacctcaaggggaaaagtactgtatagagcaaattcatgctaatttttgtgcaatgccagcatgaaaaagaaggtatgatgtgctaatgatgaataacttactttttactgacattcaccatactatgtcaaaataataatcattcttcccaatagtgaatggtatatgcaatctatgatttaactgggaggtaattataatatactttttaaggagagaagtgatactttttaatcatgtgagaatgattgccagatatttttagttaagattaagtgaaacaatgaataaatcacttttattttttagtagtgggtgattctcatccacctttggaaagttactgatttataataaaaagcaacttgtggacagaaggaacatcttaaccaaactaggtttggttaaggtatttaggttaatctaactattaaactaaatagttagattttaggtgttctttatttttaaaagcaagagatgtaaaatatgctcaattgattttaaattaaaaccaaagaatataaagctctatgccaaaatacatcatgtatcatcctggatgtgtgtttagttgaaggcatccttgactatgactaaatgcctgctctgatggtattgaacacactgcagagcaaagaaaggcagcacctaccttaacttgtggctgctacttaaatccaagcggccattgcataacctacagggatagctaataaaaatcagctttagttcataacagtgaatttaaaacaatctgttggtggatttttttccaatagaaatattctttaaagtttcagccaaatcgctgtagaaatattgtatactatttttaaaagaagttggcttgcttccttgaaagaaggaaaaatctgcctaagtttcatcataggatttttttttcattgcagcatttctacttttgctgggaaaatggagtttcactgtgacagaattggtagacatcaccagaacacaggattagccagatagttaaatacttaattatcaaaagctctgcttccttttcaaatgcatttccaattagtttcatgagttatctctctcacccaggcgaattgatgatgacaagggaaggacccatgagctggagcactcagctataaaatgcatgagaggaattctctactgctatatgcgtcaggccgataaggtaaaacattgtggtgtggacgggaattctcccatcattctgaaggattaatttaactagtatcgcaatggtttcttctgaagaagaatgtacttttcaaagggaaagccacatcctagggcggcctagataggttaacagcctttgccattctagcccagggtttgaaatcctgagattgaaggaacaccttaagcaagaggtgattgagaattgttatttagacttggatttgtttgtgttttgcatctggtgttgcttgataaagacccagtttctcaggaacctcacaatatcgataattctaaccaatattttattaaagaatatccttgtcagaattacttttggacatgtgaattgctctggcttaagtgaactttagtttaaaaatgtaacacttcattcatttacatacaaaaaggctaggaattataggcttagaaaacagctttacaggccaggcgcagtggctcacgcctgtaatcccagcactttgggaggccgaagtgggtggatcacgaggtcaagagatcgagaccatcctggccaacatggtgaaaccctgtctctactaaaaatacaaaaattagccgggcatggtggtgtgcacctgtagtctcagctactcgggaggctgaggcaggagaatcgcttgaacctgggaggcggaggttgcagtgagccaagatcatgccaatgcactccagcctggcgacagagcaagtctctgtctcaaaaaacaaaaagaaaaaaaagaaaacagctttacagcgttatgtggaaattaaagaaaataatgtacataacaacatttaaaaaactataaagctctatacaaatataatggctattcccttacttacctacatctctgtgatcccaggtcctaatatagtaagtgcccatacgtgtacatcaatgcatatgggtccctaagaccatccacaggtttgatgcttcattaggaggactcacatgactcatcagatagtcatagttgtggctatggtttattacatgagaggagacaaagcataatcagcaaagggtcaaggtgcatggaacacagtctggaggaagccagatgctagcacctaggagtcctccccagtggggtcacacagatgcacttcattcccccagcaactgattgtgactaattgtaacatatgtaaaatgtctgtcagggaagttcaatagaagcttgagatttttattgctcagggtttttgttagtggttggtcatgtgggtatcctctgtctagcactcaccaaagttccagacatccagaaggaaaccaggtgtgtagtatcaaccatattgttaatgtaaacactttaggtttacatttaggtttagcccctcttgtgagagaatagtggaaaccctttcatgatctgagtgtccacatatcagccaaggggcaaccttacaaacaattctttctgtggttagcagtctcaggcctactatattaactcttttcaggacaatctgcataaatgaatgtactggtttccagtctgcttccaactgtgtgatgttggacaaattatttaatttccatgtgccccgtttttttcctctgttaaatatggataccagtaatactgcccttattaggttttgtaaggattaagaaataactcatgtgagtgagtcagtgttttgcaagaaagccgccttggcgcagtgaaggtgaaggccagcgcactccctggctgaggtgggatcccgaggcctctccagtcccctgagggtgcaccactggcccatctcacccagggcggtgccccagaggtggagcaccagggcacgtgttaggacctgaaagatgatgaactgtgcctggtcagggcaaagctggaggaaactagtggaagtccctagcagtcctgatgtgtaaatcgattggtcatccaacctgggtataggggtgaaagactgatggaaccatctagtgtctggttccctccaaggtttctctcaggatggctggcactcttccaaaacccaccccacatggtttcatctgtaaagtgaatgattggaggttttacgacccaaaggatctccacctactctcacactttagttgggtaagaagcccggcttgctggcgtgtggagccgggtatggaatgtgagtgcctagtgggccgcttctggtaagcagacctggctctgcgggatgaaccgaatgccggattaaggtgcccaatgcccacacactcatcagaccccagaaaaggtgttggttgatacaggaggagggcggccacggaagtcagagtgggtgggggtggggaagggcagagaatgtatagagaacatggtgtctgcccccataccaccctgaacgccctatctcgtctgatcccagaagctaagtagggtcaggcctggtcagtacttggatgagagagagcacatagcacaagggctggtaccgggtgaacatacagtaaatatttgtgtcgttatcattagtagtattccctttcccttctagaccccgtgtttcagatgcgtttccaacttctgtattttagcagagatgcacacaagtaactttgcaggcagttttgatcacttaatattttgtttattttttatcatacaaacatattgttttaatttgcacttgaaaataataggccaggcatggtggctcacgcctaaaatcacagcactttgagaggcagagacgggtggatcgcttgaggccaggagttcgagagcagcctggccaacatggtgaaactccgtctctaccaaaaatacaaaaattagccagatttggtggtgcgcacccatagtcccacctgctcaggaagctgaggcacaaaatcacttgaacctgggagggagaggttgcagtgagctgagatctcattgcttcccagcatgggcaacagaggggaaactgtctcaaaaaaaaaaaaaaaaaagaaaaaagaaaaaagagaaaataataagctgggcatgatggctcacgcctgtaatcccagcactttgggaggctgaggcaggcaggtaatgaggtcaggagttcgagaccagcctgggcaacagagtgagactccgcctcaaaaaaaaaagaaaagaaagaaaaaaaataataaaaagagtgataacaagtcttcttcttcaggcctgtaattcaagtcaaaata

SEQ ID NO: 7157 - DNA, 6000 bp, Homo sapiens
taaaacaaaactaaatgataaaaataagaaacagataagataaaggaataaaggatgaacccaggcagactaatcaactgatagaaactcctaaaagagacaaaaaaatttttcaaagaaatatttaataatgtaagagtatttcaaaaagctcccaaggatagaggcctctagcttgaaagggcccacataatgcctagcataataagtaaagaataatcattcctgtaattgcagcactttgggaggcgaaggtgggaggacagcttgagcccaggattaggtgcctacagtgagctatgactgtgtgactgcactcctttttcacctgggtgatagagaaagaccctgtctttatcaaaaaagaaaaacaaatctataccaaggcacatcatcatgaaatcagaacaaaatagaaaaagaagagactccaatagcttccaaaattaaaacaatttacatttaaaagattaggagaaagaagagggttgaattttaaaactgcaacccatgaagctagaacacaataagctaaccaaacttttaagagtgggtagatgccgggcgcggtggctcatgcctacaatcctagcactttgggaggccaaggcaggtggattgcctgagctcaggagttttgacaccagcccgggcaacacggtgaaaccctgtctctactaaaatactacaaaattcgctgggcgtggcgttgtgcacctgtagtcccagctactcaggaggctgaggcaggagaattgctagaaccagggaggtggaggttccagtgagctgagcttgtgccactgcactccagcctgggaaacagagtgagactctgtctctaaaaaaaaaaaaaaaaaaaagtgggtagaaaaactttttggatgtgacaggacttatcaggcatcctttctcaggaatttctggaaagacacacccccgtgaagtaaatgaggaaatttctttttttacatggggaaattccccacatagtaagtctacaaaaggcctggagaatgaatccagactggataggaatgtagaggatccaatgggaaaaacaaaaatgcaggataggtatatggcagatatgatggaatatctgcaaagaaattaagggtatgtacatagaaaactatgcaatctattttttaaaaagcaatcatttattccagtagggcaagctgcacaaaaaatgaaatactgtcccagcactttgggaggccgaggcaggtggatcacctgaggtcgggagctcgagaccagcctggccaacatggtgaaatcccatctctactaaaaatacaaaaaattagctaggcatggtggcaggcacctgtaatcccagctacttgggagactgaggtgggagaatagcttgaacccgggaggcaaaggttgcagtgagctgagatgatgccaaggcactccagcctgggcaacagagtgagactctgtctcaagaaaaaaaaaaaaagaaaaagaaaagaaatactgtacattacttggttctgaagtacatagacaccacatggttaaaaggtaaacaatgattactaatttaacaaaaaattatgatttaattacactgggacaatgtagataaattatgttagttaaaaaacaagaattgaatatttaaaaatgataattcaagaaaattagtgtaaaattttattttaaaatatggtaataaacactagaagaatcagctacaggttttaaaagtggttgcatctgagagagaaacaggggtgtgggggagaataagggtgaagaatagttatttttactttgaaaaatattttaaattataacacaaacaagagtttctaaattttgaaagtgcattgcattaataaaaaaattaattgggatatttgttttaacttatcagaacacatgccatttacatcttttaaatttccttaatttctaataaaaaaaaaatcacctctatgcagttagttcacttctcatatacactcaacttcagtttcttccccactccaagcatgctgacattcactacccaaaaacacttctcaagggaaataagttcctgtttatccatttataactttcccctcaaagttctagttcaaggccatttttctttttaacatgagtttgagtttactcaaaatactgtagagtctgagaactaatcagcccacacagggactttttaaatacagcttcctaagtagtctttaatcttctacaaaccaattcattctgcatatagtttacaagtaaatcaatttaaaatactgttttcatcatctctcctttgcacaaggacctgatgattcccctcttctaatgggacagcattcaaactcttttttgtatctgaaggctcccagtctgcccttcttatctcatgttcttagtccttaactccccgaagtgtaccttccacttttgtcaggcagatctttctacctcctcttcataacatgctgttcttacttttatctcttataaatgctctgtccccaaaattgaacttccaagttgaacgtcttcacctaactttttatttatactaaggtcaagctcaagttccatgactctggaagctgcccctttggcctgcactgacccatctcttcttgcttgaattcagacagccacgaatgcttgcttcaaatgaatgtagtttcaaaactgtgttgggtcactatcatggaggtagaggtgtgggagtggtcattgtttcatgcaatgccaaccacagaaaagaaaaataactattacttgaacattttaaaaattcagataattaaacttgaattccttccaagtcaaccttaaaaactcaccatcagtcaattaaacaaaaaaattagaacactgactttttccccactgcaaaataggcccctcttccacaaaacacaacacatggctaatacaatgagactactgtgagtgactgctgcctcaagatgaggcacagaacgagacacattcaagaagggatacgagggatacgagattgcaaggaaataaagggtgtttatatagaaacaaacctggatccactcaaatttatttctttaaagtcatttttaaactttggtattttcactatttttccaaaaaatcacttgctactcatacctcacaaacagtggttttgcatcccaacactaaggctgactttaaagacaaccaatcagctactgcatatccattattatattaatgactaaagttttatcaaaataatcatatttgtacttacttgaaagatacctttactttgggtttaaaatagggtgcattctggtctgccaaaaagacgattaagtcatttcctaaagaaaacaaatatatgatattagaaaaatgtttgttgataagatatctaatcagtggttacaagaaggtttctgggcactgttctcaacaagaaaacttttattctactccagttcatctgccctctcaagcatagtcccactagtccaatggagatgcctaacattatatcacaagttcaatgttcaaagtagcagagaaatagaaaggatgaacatgggaaaaagcagctgatcaagagaaactgaagccagtggattctgcgaggagtcagattggttgacttaaaagaaccatataaagatgccttataactatactacatgtcaagacttgtcttccccgaatctagcaatgctgtcccttgtaaggctgtttggttcattacacagatgcatcacaccaaggatgcagggactcccattgtagatatctgacaaagacataattaagcatgtgagcacaaaatgctgaatcctccaagaccctcctcctatggggccatcctccagagggtgacacattcttggagctcaattagcactcattgagacagacttttggaattgtttaatcaaacacaggccatctttaaagtcaaggctactctctgtatccagtttggacacagcagcaacaggtttggcagtacactgcaaaatgaggagtcaaaaagattgggaaaatattcagggtttgtaagaggttcctgcatccccgcaagggctccaagaagtctggttcaggatcctgtcaggcaagctctgagtagctcttccttccttccttcacagcattgatctttaagcagcacctgcttctgtaggtactcaagaaccctaagaccccctaatgcccactgtcagcatcaagatttacaaaaaagttagtttaacgattgtcaaagcaaagaatttccaagaacaagttagcaaagaaagtagacatttggaacactaaggtgatgaccaagatgaggaaggagtacacgaaagaacaggcagctcaagagagaaatttctgtagtttgagactgctttcccaaggaggcattgggtttatcagtggtccctgcaaaatgcttgtgtgagctgtttagtgtttaggcccttggaagggtacattcgcttcatagaaagttgtggccttgacaaagaaaggggtgggcgaattaggtaggtggggaggcaagaagaagccccctatgagaagagattgtcaggttgcaccttttcatgttcatcaacggggaaggaagactgaagcaaaatagaaaggaatgagtgggccttgggagcgaacgttgaggcaagctacaaagattcctaggaatcaggaagcactttggaaaacaggtgattccatggggaggagggggtaaggtgactgggtgagggccgcagacttcttaggaacaaaactgaggtgctgtcagggcttttgagggtaggtcaaactgtagggtagctgggtcagaacctggggttggaaagggtggtgcaaaaggacaagctgttaagaatgctaaagggaaggccacagggctgggagagaaggaccaggaaatgcagaaggaccggccattgggcaatgggtttggggaacaccgggagaggcacacggacagcgaacagagggagggcccggcaagcactgactttcccgcagcacgaagagatccgtctgcttgtcggagttgaggtccccgaaagccgcaagggtgccccaggcctcggccccaaagagctcggccgtgacgttgtgcagcgcccgcgctgggaccggcccgactcccagtagtgcaagccctgcgaggagcggcgagaagagggcccaggagctcgggagccggcccgccgccgccatggcagcccctcagcccccgcccgccggcccaacgccgcgcttgacgacagccgcaaagcaccgcgttaccggccgagagagtggcgcgcagccccgggacgcgtaagagccgctgccggctcctttttctctctcccactagggctgcccttccgacgctaaaaaagcagtggagctagggtgaaagccgccctcacgctcacttccggcaggcgcgcctcccgacagtgtcgtgcggggggcgtggcccggcattgctgacaggcggccccgggggcggtggccaaggcggcgaccggagcgcgatggcgggggcggcgggactcacggcagaagtgagctggaaggtcttggagcgaagagctcggaccaagcgctcaggtttggctggctggggcgccgccccccacccgagtaccttgggtggtgcttcgcctcaagcgccttggcgggaggcaggtgggggccctgggaatgaacctgtgccccgagttcctccttagaaagcaggtggcggccctggccttgtttctaatatcttcctccacctctaaaaattaggtggcagagccagctccactctgcgtgtgcccccgactctattccgcttgtgagccccactcggaaagtaggcagcggtccggacttcccttagagtcttctaacttaaaaatcgggcggcggcacattcctgggaaagggaatgtgtcttccctgtgaatgtgtctttcctgtgaatgttctctgcaaaagtcagatagcttaatcagaccaagtcagatgtaactacgatctggctgcaga

SEQ ID NO: 7158 - DNA, 6000 bp, Homo sapiens
agaccatcctggctaacacagtgaaaccccgtctctaccaaaaatacaaaaaattagccaggtgtggtggcagatgcctgtagtcccagctactcgggaggctgaggcaggagaatggcgtgaacccaggaggcggagcttgcagtgagctgagatcgtgccactgcactctagcctaggcaacagagcgagactgtgtcacaaaaaaaaaaaaaaaaaaaaaaaaatctaggtaataccattcaggatataggcaccggcaagatttcatgatgaaaacaacaaaagcaattgcaacaaaaacaaaaattgacaaatgggatctaattaagctaaagagcttctgcacagcaaaagaaactaccagcagagtgaacagacaacctacagaatggaagaaaaattttgcaatctgacaaaggtctaatatccagagtctagaaggaacttaaacaaatttacaaacaaatttaaaaacaaacaaccccattaaacagtgggcaaaggacatgaacagacacttctcaaaagaagatattcatgtggccaacaaacatgaaaaaaagctcaacatcactgatcattagagaaatgcaaatcaaaaccacagtgagatgccatcttacaccagtcagaatggcaattattaaaaagtcaagaaacaatagatgctggcgaggttgcagagaaaaaggaatacttttacactgttggtgagagtgtaaattagtttgaccattgcggaagacagtctggcaattcctcaaagatctagaggcagaaataccatttgacccagcaatcccattactgggtacatacccaaaggaatataaatcactttattttaaaggtacatgcacacgtatgttcactgcagcactagtcacaataacaaagacatggaatcaacctaaatgcccatcaacaatagactggataaagaaaatatggtacatgcacaccatggaatactatgcagccatgaaaaggaatgagattacgtccattgcagggacatggatggagctggaagctgttaccctcagcaaactaacacaggatcagaaacccaaacactgcatgttctcacttataagtggaagctgaaggatgagaacacatggtcacatggcgggggaacaacacaatgtggcctgatgggggcaggggtagggggagacagagcatcaggaagaaaagctaatggatgctgggcttaatacctagattatgggttgatctgtgcagcaaaccaccacggcacatgtttacctatgtaacaaacctgcacatctgcacatgtaccccagaacttaaaatattaggttggtgcaaaagtaattgcggtttcttgccattacttttgcaccaacctaataaaagttgaaggaaaaataaataaataaataaatatgaaattatctccttacataatacttactaattacaaagagaaaaatagtaacttacagtgaaaaaatctggcagataccaccttcaccaagtagtcaagattcaaatcgtcattaataagacatttcaccatcatatatcacatggccacagcatcacttttttttttattttttgagacagagtttctctcttgttgcccaagccagagtgcaatggcctgatctcagctcactgcaacctctgcctcctgggtttaagcaattatcctgcctcagcctcccaagtagctgggattacaggcacgcaccaccacacctggctaattttctgtatttttaatagaaacgggatttcaccatgttagccagtctggtctcgaactcctgacctcagatgatccacccatctcggcctcccaaagtgccgggattgcaggtgtgagccactgcgtccagcccacaacatctctttcatggtatttggccccaaaatgcatatcattgatctaatcgtgagaaacagtagataaactccaattgaatgaacttctacaaaataactgactgatatccttcaaaagtatcaaggttttcccactgctcaacgaaataaaagaggacacaaacaaatggaagaacattccatgctcatggataggaagaatcaatatcgtgaaaatggctgtactgcccaaggtaatttatagattcaatgccatccccatcaagctaccaatgactttcttcacagaattggaaaaaactactttaaagctcatatagaaccaaaaaagagccggcattgccaagacaatcgtaagccaaaagaacaaagctggaggcaacatgctacctgacttcaaactatactacaaggctatggtaaccaaaacagcatggtactggtaccaaaacagagatatagaccaatggaacagaacagagccctcagaaataataccacacatctacaaccatctgatctctgacaaacctgacaaaaacaagaaatggggaaaggattccctatttaataaatggtgctgggaaaactggctagccatatgtagaaagctgaaactggatcccttccttataccttatacaaaaattaattcaagatggattaaagacttaaatgttagacctaaaaccataaaattcctagaagaaaacctaggcaatatcattcaggacataagcatgggcaaggacttcatgactaaaacaccaaaagcaatggcaacaaaagccaaaattgacaaatgggatctaattaaactaaagagcttctgcacagcaaaataaaccaccatcagagtgaacaggcaacctacagaatggaagaaaatttttacaatctacccatctgacaaagggctaatatccagaatctacaaagaacttaaacaagtttacaagaaaaaatcaaacaaccccatctaaaagtgggcaaaggatatgaacagacacttctcaaaagaagacatttatgcagccaacagacacatgaaaaaatgctcatcatcagtggccatcagagaaatgcaaatcaaaaccacaatgagataccatctcacaccagttagaatggcaatcattaaaaagtcaggaaacaacaggtgctggagaggatgtggagaaataggaacacttttacactgttggtgggactgtaaactagttcaaccattgtggaagacagtgtggcaattcctcaaggatctggaactagaaataccatttgacccagccatcccattgctgggtatatacccaaaggattataaatcatgctgctataaagacacacacacacgtatgcttactgcggcactattcgcaatagcaaagacttggaaccaacccaaatgtccatcaatgatagactggattaagaaaatgtggcacatatacaccatggaatactatgcagccataaaaaaggatgagttcatgtcctttgtagggacatggatgatgctggaaaccatcattctgagcaaactatcgcaaagaccgaaaacaaaacactgcaagttctcactcataggtggcaactgaacaatgagaacacttggacacagggtggggaacatcacactcaggggcctgtcgttgggtggtggggagtgggggggaagggataccattaggagatatacctaatgtaaatgacgagttagtgagtgcagcaaaccaacatggcacatgtatacatatgtaacaaacctgtacgttgtgcacatgtaccctagaacttaaactataataaaaaataaaattaaattaaaaacagaaaaaaaataaaagtatcaaggttgtaaaaaaaaaaaaaattggacgggcgcagtggctcaggcctgtaatcccagcacttttgggaggccaaggcgggcagatcacgaggtcaggagattgagaccatcctggctaacatggcgaaaccccgtctctactaaaaatacaaaaaattagccgggcgtggttgcgggtgcctgtagtccccagctactcgggaggctgaagcaggagaatggcatgaacccgggaggcggagcttgcagtgagccgagatctcgccactacactccagcctgggtgacagagcgagactccgtctcaaaaaaaaaaaaaaaaaaaaaaaattgaggacttgccacagattagagaacacctaggagatttcataacaaaacacctaggagatttcacaacaggatcctggatattggatcctggaccagatccaatgaaggacattagtgggaaaactggcaaaatttgggtaaggcctataggttaaacgataataatgttaatttcctggttttgatcattgaactatgattatgtaagatgataacagacgaaactgggtgaaaggtatataggaactctgctgtagttttgtacatctaaaatcaattcgggccgggcacgttggctcacgcctgtaatcccagcactttgggaggccgaggtggacggatcgcttgaggtcaggagttaaagaccagcctggccaacatggtgaaatcccctccctactaaaaatacaacaattagctgggtgtggtggcgggcatctgtaatcccagctactcgggaggctgaggcaggagaatcgcttgaacccgggaggcagaggctgcaagccgtgggtatcgcgccattgcactccagcctccgcgacagagcgagaatctgtctcagaataaataaataaataaataaataaataattagttcgaatcaaaagttaaaaacacttcaagtatatgtaaaaaatcgaagaaaacgttaaaaacacttcaagtatatacaattcaaataagatcatccttccaaatatactctgtaagtgaggcgaaggtcgctgcacgcttgagtgcacgtctttccgcataggtaggacgctcaagtcttaccgggaggctctcctagagagcagcgcgaagccatggcttttgggcccggggacggaccgtagcgcgtagccggaagcggaggcgtggaggcgggtctgaggtttggtgactgcggggcaggccgggggcagctgtctgtctggctctttttgacagcccccagtgcgaaaggctgccagcatgtcatcagtgagccccatccagatccccagtcgcctcccgctgctgctcacccacgagggcgtcctgctgcccggctccaccatgcgcaccagcgtggactcggcccgcaacctgcagctggtgcggagccgccttctgaagggcacgtcgctgcaaagcaccatcctgggcgtcatccccaacacgcctgaccccgccagcgacgcgcaggacctgccgccgctgcacaggtaggcctggctgcccccgcggcggcggcgggcggcgcggcctcctccggggacctgggcccaggccacggcctgccttgagcgcgaggctcagttcggggcggccttcgcggctcggttccgcctctctggtgctatcacttgcaaaatggggatgtcagatacctgccccatgaccatgaatgagatcgttcatgaagtagtgcctgacacctggtgaaactacgcagttccctaccgttctggataatttaatttgaatcctcttccccctctccgcaattcctcgccctcggtcttcagcctcctaggccagtgcttttaactttccaggccctttctttctccccggtgatctctgccttcacttgccttcgcttttcacctttctccccactgccctttactcctatccgcctccccttttctgtcacccatcatttttgtccgctgaggcattctctgctccgtgagttttaacttttcctgtttcattcctaaactgcactatttgtgggtgcctttcttctatactccctgccacccttctccttctccccctaatccttctgtttccctttgtaaagggcctttactgctcacattttcgctggtccccctttctggaactttcctagcttctcacctctgctccttcactcataacatttcttaggccccaggcttactactatattgcccagtaccctcgccctattggtgtgactttgggtgaga

SEQ ID NO: 7159 - DNA, 6000 bp, Homo sapiens
gggttcccagggagctggtggaaaccgaggcgggaggggtcccaggcagcagcctccccgctgggactggagcaggggctggggggttctcaccactgaactcctttcccagaaagtccatgaagtgggcccgccccacggggtcctccaggagctcccggaagctgaagccccatctctccacacggagcttcgtgggggcagccaccctggggagagggcagggctgttggggagggtggggactgaccctcctgcgtccccccaggctgggagcacacccgcagtcccgctgccccgcctgggctcacgtgggggcattcatgacccagtaggcgtcattgtctgagatccagggattgctgggcaggcaccccgacacgaggggatcgtggggtccacgctggccgcagaaactcaggtacctggaagggggtatgggggctggtgcaggaggggcctcagcactcagcaggggtctccagctgccacccctcaccccactcacgcctcaaggcagacggaggacttcactcgggtcctgcccagcgctttcctgaagtactcgatctaggatgtggggcctgtgagtcaggtcccgggctggggaaggcacctggcaccctccactcccagctccagaacttacctcccgcttatggaaatctgcactcttggtctagaaggggataggtgggctgcagttagatgcaggtcccctgctggggtccaaaatccccagcaggagggcacctccccaggctgagcccctgccccatagatctggcagagatggtggcccaggcccccagtcccgccccttggagccccttcttccaatcagggatctttcgaggagacctctgggggcctaaggtctggcgatctgtggaatattccacggaacctcaggttctcaaagttgcaactgtaatatgtcatttttttttctttattatttttttgagacagtttcactcttgtttcccaggctggagtgcagtggtgcgatctcggctcaccgcaacctccgcctcctggattcaagctattctcctgcctcagcctctccagtagctgggactacaggcatgcgccaccaagcccagctaattttgtatttttaatagagacggggtttctccatgttgatctagctggtctcgaactcctgaactcaggtgatctgcccgcctcagcctcccaaagtgctgggattagagacgtgagccaccgcgcccggcctaatatgtcacattttcaaatgtacttaaattatgtttttaaacaacacatacttgagaaatactactaatggggatcactggggaaccaggtgtgaccttcattggtcggcacctcgctggggccagagcggaggaggcggacgcgctgcgagtcctggcctgtgtccccgctctctctgaccagctttgtatggggaaatgttagggtcgtgaacttaagaagttttatcagtgaggttctaggtgcatctttccagatgttgggtctggatgggactggtttgaacaaagggttttgctgctgcggggctcagatgctccctctggtctggtccctctggttctggaggcctccacctggagggaggttgctggatctgctgaggtctgtcagaggccgtaaccctgcttgtcacccctccaattcccagcaaaccctgatactgttctggagaagagcccccttcctccccgccagccccctcgtccccaccactccacttacctgcacccagggcagcaggtgggaggggagagaaagcgagagttagcaggggcctggggaacagggagtgaccgggagtgagcaggggcttggggaggctgcaccaagtgccctctgggtggaccaaatgacggacagatgggcagtcccatggtgcgtccagcagggtgcagccggtgtgcagggtgagagggcggccagcacgcacgcaggggctcaccatgagcacacggctggcagcgcaggatccccgccctggaccctgctccagcacatcgggggccccgggctgcggaggggagacgagatgaggtggggatgcagttccggtggctgaccccctttaaggctaagttccccctcccagacccccatgtggaaactgacactcaaaggaactcgggaagagtcccgacctagccgtcagctgtctcttctctgctcaccacctccaaatggcctgtccaccgggcctccccacagccccagctgctcccggcctgtgaactcggtccccccactgcagccaaggccgccccccactctgcctgctcccgaggcagagtctgcagtccccgcaatctggcatccctgtgactctcccttgggcccagagagaagctggcttgtcctgtggtctagggatggagacctgggttctgattggcagaaacgcaactaagtcacgaagtgaaaacgtcctgcccccaccaggagctccaaggcaggtccttccacaggctcaaaatggtggtcctgagagcgcctgtcagggaagcacgctgacccctgcgctggccagcgacccccaccctcaccgcaggtgggctcaccgggggcctgttcaccagccagtaggtctgctcctggcacgcaatgaccagcctgtcccccttgctgcgctgcttggctgccctgggaggaggaggccgagttgagggcacgccctgcacacagcagcccctccgcccccaccctcaggcctggacctgggcaggcagccacacccaggggtgccctccacggtcccagggccaccggagcctggcctgggctgggcttcccgggtagcctgggttgggcgcctgcaggcggggcggggcagggcggggcctcacctcagctgctccctcgcctgcatcagcaccaggtcccatgcgtggttgatcttcttgtgtagccggtcatagcagtcctgggggcagcgaggtttccagtgggtcaccccggcccctgcccccagtgagactgtgtgggcagttggggggttggggactgtcttgggttttggggcctgggctgtatgttctggggtaaaccgtgaagccccggggggccgtgagtgaggcttgggttcctccagctgtacccagccggggcgggaagggtggggggtcccaccttctcataatccaccagggtcccccgttttcggatgttcttcttggccaggtagatggctggaagaacagggacagcctgcagaggggccagctctgccctgcctcacggcatcaccctgaggcccccagtcctgggaacttgtctggggccagccgtccccttgctcaccatagtccagctctgcagccggcctcagggtacttgtccagaagtacggggtctggcgtggtgcagggagaaggtgtccaggacgcctgcgtctgtgcctccccagtgtcaccccaccctcagacctccctgggaagaagcctgggctgggcaggaggtgtctgaggatctccctgcctgcccaccaccgagagactccactgaccactggccagtctctccaactagaactgaggtcaactcgctccttagggccctgttcagacactgcctccctcactggtcaccctaagcccccattcaaggcggggtggggctgggggcctgcacaagtcttggatgtagtcacagtctgtgcctggggaggggtacaaccgacggcaggtcggcccgggaccctgatgtggttagggagggcaggaatgctgtcctcaggccttcacagcccctccctcaggacctgggcctagggacccccaggaagatggcagaatcctctgcacatacgaccccttgtggggccctgctgtggtccccaggaaaactgaggctccatccctcagccgggtccttctcaccacatccgtacttgcggtccaggacttttggggagggggcgatggaccaccagcccacggcgacatggcggagtcccactccaatcccagcaagctcggcgcccctcctgtctccccgagttggtaagctgggtgggtgggggtgggggtcccaccggctcccacctgcacccccgagcctgacctggaacctgtagggcgtctcgtctggccggagcatgaggctacgggggtcgcgcagcgggtagatgtagccatgctgcaccaggacggcgcccaggtgcagggcctctggggaggggtgggacggtgagcgcggggccgcggaagcgggcgagggcgggacgagccgggcctcctctcccctatgtgctccccacccttgcacagcgcgctcagcagggctctgagaactgccagactccaggaaaacccaggcctaggccaccagcccagtgaccccagggcccagtgggaggcagggcgctcaccctcctccgagacgcagaacttctgggccaaccactgcacgacgtcgctgcctgcacgggagagacagaggtggagggaggccgaggcgcgcacgcacccccgccccggcgcgcctcacctgtcaccgcgtggggaatgacggtgaccagcaggcgctggctccgcatcttcacgccctggtcggggtcctgcatgctcacgaccacccgctccatctgggcggagggagtcgtcagggggtgtctggccgccccgcaaccctgattccctggcaccggccgggatgccccggatccgggagcgcggagattaacgcgcggcggcggcggattccaggccgcagctggcggcggggacgcggggcgggccggggagggccggggagggccggggagaccccggagacccccaagggccccaggcctcgccgcccctcccggcctcgcagacctccgccccaggcccgccccgccccgcgcgcccccgtgtccccatgctctccggcccctcccggcctcgggcgccgggaaatcgggggacggcgggacacccacccgcctcgcaccttcctcagatgcggcatctgcgcccgggggcggccggggggcggcgcggggccggcggccatggctgcggggcgaggccggcggggatgaccgacgtcccgcccggccccgccccgcgccgcgccgcgcccgggttaaccctcgggccgcgaggccagagtcgcccaggccccggttcgggttttaagagacacggccacggcccagaggcaaacgagccggccccccacgagcgacccgagtcacccccccgacccaggtcccgggacgctgaggccctcgtgggtgaaggcgaagtgggacgggggagggtgtgggccgggggccgaggggggatgtgaggggatggagctcagctggagcagggggtggtctctgggagaggcagaggggctcatcagcgagggggggttactatggggagggtctcagggagggcagcggaggggatgggggttcagagagggagaggggttccgtgagtagaggagacccgtagggagagtgaactggggtgggaaacgtggtttagggcccactgtaaccccggtcctatgtgtggggccctgaggacatacagggactagaggcctggctgtggggccggggccagggccagcggtatgactgcccgaggccttgtgtcctgcgatgcttgtggccaagactgcatacattgctgtgacggtggctggttaggggcagggtgcatgagagattgggtcagctttctacatgggccggatgccggctgtcagtggagcacgtggctgctgcagagtgtgacccagctgtccccatctcctgctgtgggtcccttatccggggtccttccgggaaagtggctgatggctcatggctcacttccctcagctccacgcaggcctgggtggcccgctggggaatgagcagaaaccctgcccagggcaccctgacactgttggagaggagctttactgcagggaggccctcaacacacacccacttagtgtcaccggcggccgccaggcttcaggccccactccactcccagctctctc

SEQ ID NO: 7160 - DNA, 6000 bp, Homo sapiens
accatgtaaccctacaggtgtttttgaccctgtaaaatgttggccaccaacaggtgcttatttatgaccttgcaaagacatgggattaaactactaggaacctattccaagacatggtcaatctggatatttcttagactcctgcctacaccagcaccactcccctgcgccccctaccatttggtggtttcctccctttaaggacaattcacgtattgttacctctctgcaggctcccagaaacaaacacataatacaaacatgcacacactccccttcatcacatagatgataactgtgttccttctttaacaagactagggaaatagacgagagtccgcacgcaaagcatacctaggaggtgatcaaatagcagtccccttctccctcacctggaagacattccttttatttttaatttatctaggctcacatccaattattcacaagtttagtcttttttccttcagctgccccaacatttctggagctaacatttttccctcatataccttgaaatagtcaactcataaagactaaaacctaggaagtcactttcagctcttaattttgttttgttttttttttttgagaccagagtctcactctggcccaaactgcagtgcagtggcacaatcatagctcactgtaaccttgagcttctgggttcaagcaatcctcctgcctcagcctcccaagcagctaggactacagcacaggccactacacttaatttgcataattaagtcagaaccttgacagtagtttcatatttctatttctccatttacatgtcttgctcttagaattttagaagcaggtattttatatctttaaagggttgtaaaacaaattaaataaggaagttgcagagcctaaaatattcaccatctgagagcactttagagaaaaattggctgactcttattttaaaaagcctattttcacataattataatggtgactaattttttttttttttttggtagagcagggggtctcactatgttgcccagactcctgggcagctcctggcctcaagcaatcctccacctcctgcctcagcctccgcctctcaaactgctgagactgccggtgtgaaccactgaacccagcccttaagttttataataatacgaaaatcggctctttaaaataggattcagccaatttttctctaaagtgctctcagatagtgaatattttaggctctgcaacttccttaatttatttaatttgttttacaaccctttaaaaatataaaaaccattcttagctgttaagacaaaaacaggcctagtcaaataggtcacgagtttgccaatccctgttctaaatggtcaattcacttttatccacttttgtttgtggtcatttttccccttgagagttctatttaaatgatattatttgcataattaagtcagaaccttgacattagtttcatatttctatttctccattcacgtatcttgctcttagaattttagaagcagatatttaagaaagcagaaaagggaactaataaaagtaatgagtaagaattaaaaaatgaaaaagccaaaacacctgaacaatccaaaaccatgctagaatggaccaagaggtagctgaatggaagcattatctgagcaatgtaaaatagcccagaaatgagtaacaaaataaaaactcatctgaaatgaaactttaggatggaagttttagaaagacaaggagaaacaaattctcaggtcaaacccacatatttgttagtgtaaaaaccctgaagtctcctcccaaatcctttctcaatgtcatgcctgagggccacctggagaggcccccttgggaggaggaagttttaggtcactagatctcccgtcctcttcccactctacataaatctatcttccacactgctcccaatcttctaaaagaaatcatgccagcacccccactcctccatgccccacccccacttaagccccatcaatggcttctctcactccacaaaatactgtccacacttggtagagcaagcaaggtcaaggttacatgacatcacactctagcctcttcctaggtcagtttttcaaccactagtgttcctcaaatcacctagggcattcattaaaatgaagattccaaggctccacccttctctctgaaatggatccccagggaaactacattttacaagtaccccagatgaccacataccaggatgccagaggtccacattttgagaaagaaaccttcaagggggttgctcacctcctcctctcacagcagagccacctgccccacctccttcacctcctccccacctccttcacccccggtctcctcttcaccttctcaacctccctcttaaatcagaagattcaacagacttttaatttaacagcccagcttccggaccaccctgcctgtgcctagcactgtcctccccacgccagaccgagctccacatgctggtttctctatctggaatacccattgctactggttgagacccttcccaccttccaagctggttcaaacaccaccttccatgaacccttccctgggcacaattcctttctttttcctccaaactctgcttcattttatttatctattatcccctataaaattttgccatattactgagggtaggggaaagtgttgttcacagatatgccctccaaagtgcccaaaataacaccttcgaaaggttttaaattgtgtttgttcatgaaaaacctcctgtgatgctatcagaccgatattattctaaactgtgctctaaaaagataagttttgggaattacaatatgttaatatctagcaggacttgcactggcagaaggatcagtctttgttttgtcttgcttggccttggcaggcagtgttcgtgaaaaagttgaatctgaattcaatagaactaggggagggcgcaaggaggatccagttgacaaaggcaccaccacatagggtattcactcaacaatcttaatctgtcccaccactggggaaggcttttgagattgtcacttctactcagctgctaaagcagaaactacatatacactgagtgatgagacaaacagtgagcacatggagggtctgagaaaccaaagcaggccaaagtaaacacgtggagaccccagaggaaagatggaagaaaaacagcactaggatcaactgagaaatgaaaatatcatcagcggagagtaagaagtgataaacctgccagaggtaagacctctactgaaaatgctggaagaaaaggaaatttcctaaaaagtaatcatcatcacagaaaaatcaacagcttttatgtaatgttttctgaagagatattaactttagaatctgaacatggcttttatcaaaataaagtcctgcggggggaaatccattaaacaataccagtgttgttatataaataaaataagggttccttctcaaaggcttatttatatcttagacttaaaaaatatcaaagactacattataatcttaacatggcaaaaacactctccatatcactttgtttacctgctaactcaaatgcaaaaacagatttgaaattaagcaagagatgtgagttgagttctttcgcttctcccttctttaggactgtaaagttcagctttacacagcagtagataaacaggaacttcacccttcactgccttctactaaactctccatcagaaggaccaggagacttaatctacagcccacagagtccataaatcccaccgcttcctgatgaagcacagtgggactaattataacaaatgagttgcatatcatactatcaacttggaatattaatctctcagtcatttacagcccactttcaaccccaaatgggaacatgcaaggagacaagatccaagaagccatattaaatccaagtgaggctttaaatcctggagaaacttttctgatcactgcgggatttacataagtattcaaggccaagatgaaagcaaaattctctagccaaaataccgttgatctgatcagtctgaaattatctgttctaatgaacgaaaccagcatgtgtgccttatcaatgctgcttatctcgcaggggcagacaacctggaaactgtgttagaatagatcctcaaataagaaacattcagttaaaatgatgggctgcctcttgacactgtgaatgttttgctgcgttcagacatcaaaggaaaactgtcatgaacatcaggtaaaggcagcagaaaaggaagcacagtttggtgtttgtttcattacacagctcccaaaggggacaatcgaatactaagcggcaaaaaagttgtgggagacggcctctctccaaccggaatgtccaaagacacctgagtgccgaaaattcccccatactcaacgtctgaattctcccctctgccctctcctcttcgtcggaagaaaatccgctaacaatcccatgcctgaccaagtgggaaaagctttcaacttcactctacttcgtccaaccctcgggataacgcactcccagatcccgacctccccttgaacctgccctctgagatcttctagtttctcccgagggtccctcagaaaacccagcccgttcctccccactgccccttaaccccttcccctgccccaggccccgtccgcgccccagcgcagaccatcacccgccgcctccccgacccccttcccggagccctcaacgctggcctgcccctcggggcctcctcctcgcaaccccacgcgatgttcctcccgcccgcggccccctccccctccccgcgcctcaccactctccctcagcagcgctcccgcgagcaaggccgcgccccccaggcgctcgccctcgggggtccctggcggaggggcccctaggcccaccacgcccccgcggataaagggtgacgcagcggaccccgcccctgccccgcgggcccggccgcctcgctcacccacacgaagaggctgtctgagagcaggtactgggccacatcgcgggcccggggtcccccggcgctcggccgggcgggcgccggcggctcaggctgcagcgaggccgttagctggtccggctcgccggggccggcctcgggctggctgagcgcgcggtaggcgctgatgatggtgcccagcagggccaggccgctgaggcccgtgtaggtgcggaggctgggccaggggaagcgctcgaggaagagcagcggcatggcggcagcggcgacctctggcccccaggcttccctgcgctgcggccgggcctctgcggcggcctcgcgaacggcgcccacgggctctggcgtcgctgccgctgccgctgccgccgccgccgccgcgccgggccgggccgggccgctcctggctgctggcgccgctccgccccgcgctgctcccgctgctgcccctgccggcgcggaagagcctgggcgggctcgggacaggccgccgcccccagcgggacgctggcgggacgggcgcaggggcgcggccttcgtcccccgcccccagcggtcgcgccgccgcctagcgggcgtagccccgggcctcaggccggggggcgggcacccagcatcatccgccgtccgcaccacggcttggctgggcccgcagacacagagggcacctgctccggccgcggcgcaggggtcactcgggctcgcaggcgctggcaggcgggcagggcctcagggcgcggggcaccctggccaccaggccgtcggccacttgccccccccccaccccattaaccctctgaagaggttacccccagcactcctaggggccgcgcagcttccctggtgcccgaaaccccagaagaaagaatattaacagtctttcaagtttctgctgtttgctagtagcctccagcagaaactaaaaaatgaacctgatttagcgggaaataaaaatgtgttccctcataccccagaagtgagaatgtcaaatggtgcagctgtcttggaaaataacctgtcctttccttaaagtcaaacaagagtgaccatttgacccagtaattccactcct

SEQ ID NO: 7161 - DNA, 6000 bp, Homo sapiens
agaatcacttgaacctgggaggcggaggttgcagtgagttgagattacaccactgcactccagcctggcaacagagtgagactccatctcaaaaataaataaataaataaataaaaataaaaataaaatccctgcataacgtggcccctgtggacctctccaatccaacactgggtcttgttcaacagtgtatttttagaacctagaaaagagtttgtgcccaataaatatttgttgactgactaaatggagaaattggtcctccaatttggggtcctcaacatgtgcttgaacggctacaatcacccttcctcatcgcagacttgggcccttgtctcatcttgcataaaaataaatgaagctttaaacctatgaaggctacctactgcctaagggataaaagccaaactcccaaggctggccagaaaggtctttcgcaggctgatcccgatctatttatctgcctcatcttcagttacatttcccctacaaaagtgtgattctctaataataacactactaattatcttgtctcactctgtcccccacattggagtgctgtggtgcaatcctagctcactgctgcctcgaacttctaggctcaagcaatccttccgagtagctggactacaagcatgaaccaccatgctggctagttttttaattttttgtagagatagggtcttgctatgttgtctaggctggtctggaactgctggtctggaactcctggcctcgagcaatcctcccacttcagcttcccaaagcactgagatcacacccagactgtttattgatattattcatgcagctctgtttgaacttctcacctttccctggactacgccttcttatagccacactcctgtgcatatgttactctctctctctctttaataccaaggaagtagtgaaatataatggttaagggcctgggctctggagccaactgtctgggttcagtccaggctctccattcattaggaacatgatgccgagcaagttacttaacttctctcaacctcagtttctacaagtctacagtggacataataactgtgcctacctctaaggataactgtcaggtttaaattagataaccatgcccaaaagcaggtactattcacatttaggccaggacaattcttcactgtgcaggactgtaccaagcactgcaggacattaagcatcactgggtcctcccactgaatgtcttatgtctgaatgccactgaatgtcacccctttaatgcaacaactaaaaaagctcccacagccaggcgcagtggctcacgcctataatcccagcactttgggaggccgaggcgagtggatcacaaggtcaggagatcgagaccattctggctaacaaggtgaaaccccgtctctactaaaaatacaaaaaattagccaggcgtggtggcgggcgcctgtagtcccagctactcgggaggctgaggcaggagaatggtgtaaaccctggaggcagagcttgcagtgcgtcgagatcacgccactgccctccagcctgggcgacagagcgagactccatctcaaaaaaataaaattaaattaaaataaaataaaataaaataaaataaaataaaataaaataaaataaaaaataaataaaataaataaaaaagctcccacagtccaggcgcaatagctcatgcctgtaatcccagcactttgggaggccgaggcaggcagatcacctgaggttgggagctcgagaccagcctgaccatcatgtagaacccatctctactaaaaatacaaaattagccaggcatggtggcgcatgcctatacacccagctactcgggaggctgaggcaggagaattgcttgaacccgagaggcggaggttgcagtgagccgcgatcacgccattgcactccatcgcactccatcctgggcaacaagattgaaactccatctcaaaaaaaaaaaaaaaacctcccaccaatttccaaatagtccctgttcctgagggcaggaacaaggataaggggaggcaaggaaagcattgcaacccatgtttcagaatcacttagttaatacatatagagcaccaaaaagagtgtctgacatgtaccaaacctcatatatgtgctattatatcattattattattatttttgagacagagtctcactctgtcacccaggctggagtgtagtggtgggatctctgctcactgcaacttctgcctcctgggttcaagcgattctcctgcctcagcctcctgagtagctgggactacagcgcatgtcaccacacccacctctaattttgtatttttagtagagatggggtttcaccatgttgaccaggctggtctggaactcctgacctcaggtgattctctcgcctcagccttccaaaagtgctgagattacaggcatgagccactgcgcccagccaatttgctattatattattattaatgtcctttcctctttgccctacaaagttttccttcaaggtctaacacagggcaagtgctttatgattctcctaaacaagaagtaactgcaccctcctgacagttctcacaactccagattctattctgagtaaagccatccgtcattgtaatttactgtttctatcttccccaaaggcagcaagctcgagcaagataaacttttcctccccactgcccatttctggacacatgcatagtagatgctcaataattagtaaaagatgcaaggtacaataaagaataagggctgggcgcggtggctcacgcctgtaatcccagcactttaggaggcaaaggctggaggatcgcctgagctcaggagtttgagaccagcctggacaacatagtgagaccccatctctacaaaaaatcaaaaaattgtgccatctggcatggtggcacaagcctgtggtcccagttattcaggaggctggggcaggagaattcctcgagcccgagaggtgaagctgcagtgagcactgaccacaccactgcactgtagcctgggtgacaaagtgagaccctgtctcaaaaaaaaaaagaaagaaagaaaacaatctgcagtgaaatagagccccctccctaccttttcttaaacaatgggcacatctggccgggcacagtggctcatgcctgtaatcccagcactttgggaggccgaggtgggtggatcacctgaggtcaggagttcaagatcagcctggccaacatcatgaaaccccatctctactaaaaatacaaaaattagccaggggtggggcacgcacctgtaatcccagctactcaggaggtagaggcaggagaataacttgaactcagaagggggaggttgcagtgagctgagatggcgccactgcactccagccagggggaaagagcgagacttcgtctcaaaaaaaacaaaaaaacaaacaaaaatgggaacatctcttggactatccactcccagtggaagcagtctgtttggtctttccatctgagcctaggagagagacttgtgtgcagtacgtactgaatcaacacacagtgaatcaacacacggtgaataaaagtcaagttgaggagttacatgaaatggttgccagtgcatgttattttttataatttaacttatcctcaacaaatggtttaggccaggcgtggtggctcacaccagtaatcctagggctttgggaagccaagatgggaggatcacttgaggtcagaaatttgagatcaacctgggcaacatagtgcgaccttgtctctaaaaaaaaatttttttttttaattagccaggcatggtggcacatgcctatagttccagttacttgggaggctgaggcgagcggactgcttgaacccagagtttgaggctgcagtgaactatgatggtatcactgcattccagcttgggcagcagaatgaggaatgagaccctgtctcaaaaaaaaaaaaaaaaaaaaggtttaagtctccactgagaccagcctatcttcctcagctgaaataaaatccactaaaacaatgttttctagatctgtgtcattctcttatacctatactataatacgttttttccagatatatggatctgttggctattctttcatactctcaaaattcactttttttttctttttacagtttattgtttggtacaaaacaggctctttaactctttgaataaacacctcacagactcgtgctcctagattacaaaaagtcaaagccaattttctttgacactgggctcttgactctgagattcaagtcactataacagaaactggagttgttttatcttatattctggaaggtgcctcaacaaagacatgttaagaactggttaaaacttctagcatttaaaaagatccatcttgtcttccagtgcctatggataataataaaaagggaatcccagagatctgctattgaattatttagagaagagctactgcaataagatccactcttttaagttccaaaaggaaacttcaggccagatgtggtggctcacaggtataatcacagtactttgggaggccaagactggaaaacccattatgcccaggaatttgaatttgagaccagcctggcaacacagtgagatcccatctctacaattttttttttaaacagaatttgtggggcgcggtggctcgcgcctgtagtcctagcgactcgagaggcgagaggatcgcttgagtgcaggagttcgaggctgcagtgagctatgatcgagccactgtagagagaccctgtttcaaaagaaaaaacaaagagaaagaaagaaaagaaaaaggaaacttatagcccagccagaggaggaaaaacaacacccaaaattagcaagtgttcaagacagcccggcacccagctgagactcccgctgacgtgatcaggagttcggggcttgctcttttgccgagggtatttgctgtccatgcgtgccccgcccacctgagtgcctcacgcaagttcggtgacctctgcccagccgagagcaggggagggtcccgcggccagggccccgagcggctcaccctccacggcgtggttcacctcttggatgaacagctgcagcttcatcaccagggtggctgcgtggccatccgccttcccggacgccgcctccttggagccggccctgaaggccgcattgatccactccttcacgtcgaagtcgtctgccaggaacttggagaagtccatggcggaactgcctcaggcctggcgtccagaacttaagagttggctccgggcggcaacggggatgcagaagcgagcgagcctgcgagagcaccgaggctagcctccgaggcgaaccccagaaacgccaggacgggtaacttgcccctttgcgcttccccgctcagcgcactcagtttgcggctgggaatgaccctcgccgcccgccgttcttcttccggaagtcgttggccgttaccatagtgactgcaggcgtccggagcgctgagcagaggtgggtgtgggaaaacgccccggactgagagctcccggcaccgacaaatatcccatgtctgctaacatttgccgaggactaaactatatgcttactataaagccctgacatacattagcgcatttacgcggtggctcgcgcctgtaatcccagctctttaggaagctgacgcgggagaatcgcttgaggccaggagttctaggacagcctgggcaacagtggagcgcagtgggcagcaatggagtgcaattgaacgatctctgctcactacagcctcaaattcctgggcaattgaacgatctcagctcactgcagcctcaaatttctgggctccagcgatcctcccacctcagcctccagagtagctgggactacaggcgcgcgacaacacgcccggctatttctttctttttctttctttctttatttttttctgagacggagtcttgctctgtcgcccaggttggagcgaagtgacgcgatctcggctcactgcaacctccgcctcccaggttcaagcgagtgtcttgcctcagcctcccg

SEQ ID NO: 7162 - DNA, 6000 bp, Homo sapiens
gtgaccagaaggccaagatccaggacagcctatactgcgctgctggggcctgggctttggctcttgcatacaggtgagctggtgtgtgttctcctcgtaactttgagagtggataatagggttttgtaggaccaagactaattgagccgctatcttttggctctgctgctgactcactgtgcgacctatgactgctcacatccctttttaggcctctaaaccttttcattttctttttttttttgagatgaggttacccaggctgcaatgcagtggcatgaccttggctcactgcaacctctgccccctgggttcaagcaattctgctgcctcagcctccctactagctgggattacaggcatgcactaccacgcctggctaatttttgtatttttgatagagatggggtttctgttggccaggctggtctcgaaatcttgacctcaagtgatctgccagccttggcctcccaaagtgctgggattacaggtgtgaaccaccatgcccagcctaaaccgtttcatttttctaagagcttatatcagaccagttctaagattttatgactttgtgaccaaaacttcttgtctctaggtttgtaaatcaccatttttagtcattggtagaatgaactacctgcccactctcattgtgttgattggtttcaataatggagagaactgatgatgactaaatgttgcagataataaaattagaaccccaagtacttaacaaatttgttcaaaatgatgcaactcattaatgatagagccagggtcagaattcttttcccctacccaatttctggttttatcactgcacttcagcatagtatctcttattaagtttggtcataagtgaaataattgtataaagttaaaaaaaaaaaagaaatagttagacaatacaaaatttctcctttatttatttcattatatgtagaaagcactgaatgtggatgctaacacataattgtaatacattttaaccataattaagatcagtaagattaactttctgaatattaatttcctgaaagcgatccatagttatgtttctgatttaaaaattgtatcttccacatgaacacgatttatctgtttgaaattactgatgtgttggattttaaaaagaaaatcaaacactgagataagatgcagtagtcttctttagcacacttgaatgctgacatcactaaaagcatttccttacatattctaggtaaggacaatatggctttattaaatgtaaaactggtactgatcttaggagtacagggagcatcagtagcaccttcaccaaatggtgaagccaataatgagacagactgatgttaattgccattcctgatttgacacaatgggaaatacaccttgtgctaacatcttaccaagttatctaacatgagtctacatatgaacaaagctgaattgtggctgtttataagacaacttgcctggactctttaaaaatgtcagtattacagatgactaggaaataagtatgaggatggctagactaaaagagactaaagaaatacaacagccaaatgcaatacatgatccttaattgggtcatgcatttaaaaatactgtaaagtatgaaagtatgtttttgggacacttcagtatttgagccaagactatgtattagatcatatagtatcagtattaaatttcttaggtataataatggtattatggttatgtaggcaaatctccttgttttctagagatacttctgaagtgtgtaggagtgaagggtcatgatgttcgtagcttactttcaaacaatgaagaaaatattatagagaatgcaagctaatgttaaaatggtgaatctaagtgacgaccaaaagacttattcattatagcatccttttaacttttttgtagatttgaaatttttctaaataaaatgtttacaggaaaattgctttaacaaatacaagaggataggcagcatatggacaaaagtcagatattaaccttttcccagaatgcttctaacatcagatagagactttaaagtcctcattttgcaggcacactatctatgtagaatatgcctctattaaaacacttgtgtctgacctcaaggggaaaagtactgtatagagcaaattcatgctaatttttgtgcaatgccagcatgaaaaagaaggtatgatgtgctaatgatgaataacttactttttactgacattcaccatactatgtcaaaataataatcattcttcccaatagtgaatggtatatgcaatctatgatttaactgggaggtaattataatatactttttaaggagagaagtgatactttttaatcatgtgagaatgattgccagatatttttagttaagattaagtgaaacaatgaataaatcacttttattttttagtagtgggtgattctcatccacctttggaaagttactgatttataataaaaagcaacttgtggacagaaggaacatcttaaccaaactaggtttggttaaggtatttaggttaatctaactattaaactaaatagttagattttaggtgttctttatttttaaaagcaagagatgtaaaatatgctcaattgattttaaattaaaaccaaagaatataaagctctatgccaaaatacatcatgtatcatcctggatgtgtgtttagttgaaggcatccttgactatgactaaatgcctgctctgatggtattgaacacactgcagagcaaagaaaggcagcacctaccttaacttgtggctgctacttaaatccaagcggccattgcataacctacagggatagctaataaaaatcagctttagttcataacagtgaatttaaaacaatctgttggtggatttttttccaatagaaatattctttaaagtttcagccaaatcgctgtagaaatattgtatactatttttaaaagaagttggcttgcttccttgaaagaaggaaaaatctgcctaagtttcatcataggatttttttttcattgcagcatttctacttttgctgggaaaatggagtttcactgtgacagaattggtagacatcaccagaacacaggattagccagatagttaaatacttaattatcaaaagctctgcttccttttcaaatgcatttccaattagtttcatgagttatctctctcacccaggcgaattgatgatgacaagggaaggacccatgagctggagcactcagctataaaatgcatgagaggaattctctactgctatatgcgtcaggccgataaggtaaaacattgtggtgtggacgggaattctcccatcattctgaaggattaatttaactagtatcgcaatggtttcttctgaagaagaatgtacttttcaaagggaaagccacatcctagggcggcctagataggttaacagcctttgccattctagcccagggtttgaaatcctgagattgaaggaacaccttaagcaagaggtgattgagaattgttatttagacttggatttgtttgtgttttgcatctggtgttgcttgataaagacccagtttctcaggaacctcacaatatcgataattctaaccaatattttattaaagaatatccttgtcagaattacttttggacatgtgaattgctctggcttaagtgaactttagtttaaaaatgtaacacttcattcatttacatacaaaaaggctaggaattataggcttagaaaacagctttacaggccaggcgcagtggctcacgcctgtaatcccagcactttgggaggccgaagtgggtggatcacgaggtcaagagatcgagaccatcctggccaacatggtgaaaccctgtctctactaaaaatacaaaaattagccgggcatggtggtgtgcacctgtagtctcagctactcgggaggctgaggcaggagaatcgcttgaacctgggaggcggaggttgcagtgagccaagatcatgccaatgcactccagcctggcgacagagcaagtctctgtctcaaaaaacaaaaagaaaaaaaagaaaacagctttacagcgttatgtggaaattaaagaaaataatgtacataacaacatttaaaaaactataaagctctatacaaatataatggctattcccttacttacctacatctctgtgatcccaggtcctaatatagtaagtgcccatacgtgtacatcaatgcatatgggtccctaagaccatccacaggtttgatgcttcattaggaggactcacatgactcatcagatagtcatagttgtggctatggtttattacatgagaggagacaaagcataatcagcaaagggtcaaggtgcatggaacacagtctggaggaagccagatgctagcacctaggagtcctccccagtggggtcacacagatgcacttcattcccccagcaactgattgtgactaattgtaacatatgtaaaatgtctgtcagggaagttcaatagaagcttgagatttttattgctcagggtttttgttagtggttggtcatgtgggtatcctctgtctagcactcaccaaagttccagacatccagaaggaaaccaggtgtgtagtatcaaccatattgttaatgtaaacactttaggtttacatttaggtttagcccctcttgtgagagaatagtggaaaccctttcatgatctgagtgtccacatatcagccaaggggcaaccttacaaacaattctttctgtggttagcagtctcaggcctactatattaactcttttcaggacaatctgcataaatgaatgtactggtttccagtctgcttccaactgtgtgatgttggacaaattatttaatttccatgtgccccgtttttttcctctgttaaatatggataccagtaatactgcccttattaggttttgtaaggattaagaaataactcatgtgagtgagtcagtgttttgcaagaaagccgccttggcgcagtgaaggtgaaggccagcgcactccctggctgaggtgggatcccgaggcctctccagtcccctgagggtgcaccactggcccatctcacccagggcggtgccccagaggtggagcaccagggcacgtgttaggacctgaaagatgatgaactgtgcctggtcagggcaaagctggaggaaactagtggaagtccctagcagtcctgatgtgtaaatcgattggtcatccaacctgggtataggggtgaaagactgatggaaccatctagtgtctggttccctccaaggtttctctcaggatggctggcactcttccaaaacccaccccacatggtttcatctgtaaagtgaatgattggaggttttacgacccaaaggatctccacctactctcacactttagttgggtaagaagcccggcttgctggcgtgtggagccgggtatggaatgtgagtgcctagtgggccgcttctggtaagcagacctggctctgcgggatgaaccgaatgccggattaaggtgcccaatgcccacacactcatcagaccccagaaaaggtgttggttgatacaggaggagggcggccacggaagtcagagtgggtgggggtggggaagggcagagaatgtatagagaacatggtgtctgcccccataccaccctgaacgccctatctcgtctgatcccagaagctaagtagggtcaggcctggtcagtacttggatgagagagagcacatagcacaagggctggtaccgggtgaacatacagtaaatatttgtgtcgttatcattagtagtattccctttcccttctagaccccgtgtttcagatgcgtttccaacttctgtattttagcagagatgcacacaagtaactttgcaggcagttttgatcacttaatattttgtttattttttatcatacaaacatattgttttaatttgcacttgaaaataataggccaggcatggtggctcacgcctaaaatcacagcactttgagaggcagagacgggtggatcgcttgaggc

SEQ ID NO: 7163 - DNA, 6000 bp, Homo sapiens; identical to SEQ ID NO: 3270

SEQ ID NO: 7164 - DNA, 6000 bp, Homo sapiens
ttctacttataagcaccattaaatgagaagcctcattaaaaattataaattatcaggctcccttacaagctaataactgaaaagaatgctactctcctgagaatatcaagattataaaacttttgtattctgcaccatcacccaatactatatatatccattcaatattatattgatttatttctctcaaattttcatatttaatataatccattatgaaaatattcaaataaactttcaaaaactgaagtgcattgttaaaaaagatcatttcaccagtttttctaacataaatatgaagcttgcttcttcctctcaaataacacaatatgaatatgtcattgtatggtatcacacttctagctaaacctattctaaggcgcttatcattcagataaaggtagacttcttctgaagcacttgtccagggatggtgttcaaaacttgttttcttgccaaatctttcctttccctcatcttcttcatctcagtaaatcacacaccactatctatctagtttctcaagccaggaaccaggaaatcatttttgacacttttcttctcacatccaatccatcatgaatctgtcagttgttcctcctccacacctcaccatctcctctctaaaatatatgtataatctggctaccatcatgtttttcctggactactgtagtattacaatatctttactttcacccttgcctttctccaatccattctcaaagtagcatttttaaaatgtagattaaagcgtatcacttctctaattcaaaatcttcaacgactgcaatgtctttagtaaaacctgtaagtctttaatatgccccacaaggccctgtataatctgctttctatctctcatttcagctcatatggttttctgccttattatgcttctgccatcctgaacttttcatttctttcaaatattaagttctttcctgtgtcatagccttcaaacatatttttctctcttccaagaaactcttttctctcctgacctgtcttcttattctgtttccacttagaatcaccaactgagggaagccttctctgagaatacaacattaatttctccccattttctccaccatagcactctgttcttttatttcactgaactgatcataagttgtaattttccatttgtttatttacttgttctttatctgtttgcactgttagatggtaggttccatgaaggcagggatcacttattatgcacttaatacatatatcataaattaagggagcacttcataatatatacatttaatgaataaatggatgtgaatgactttgagtccagagaataaattacagttcaaagtggtttccccttctttgggtctcccattgtcacttgatcagctttccaactgtttctaaaagaaaggaataaaaattgtttctgaaagcttaaagacaatacagtagaggaaatgtcaggaagttgtacatggtatgccaaataagtgcaacaaataattatactaagatctcatgggaaggagaaatccctaagggctacaaggacaagatacgattttattcacaaggtggaatttgacctgagtattcacagactggtaaaattccaagaggtggaaaagtaagggagtgaagcccaaataaggaagtaaacagaggcacaaagtgctagggaacagttataaaactggaatgtggcactttaaatttacaacgtaaataagtgtaaaaaagctaaatcttatataagaaatctatatcccacgttaagacaacttcaaagaatttgaaaggttaaaataactctatctcatcagtatccataaatctcttctgactccaatctttggcttctgaagttttccaagcacttacaacatgcttccattagtttttactctgaccaactgcctcaagtttccatattcttacctgtgttttttattcactcattacccgatgaaatttccccagtagattaattcatagtttttctttatagactctctaggatttcatttttcttctctgttatttacggaggtaagcttttttttctatgacatttcgatcaataaacacatctttagaaaatcttaacttttcatatgtaccaaaattttgttttactattgatagatgcaatagattttactttaaaatctgtatttctacttcagttcttgcctcttatattcatatatcgagcccctccttcagctctatcctgtttccagaggtaaaccaggaaggtctagcacagtgccttgtagaaagcattcggttgcattagataagaagtttgtaattaaagtttctaaagatacttccaagttgaaaattctatggtttccttaatcttatcttgtcacgggctttttccatggacaccgttttctatctgtattcatatctgcccaccccataagtttttgatttcagaggatagacctcatagggtacttagaatcctacaatagtaaaactggaggaaacaaagttttacacaggaggaaactaaggctcacggatgtcaagaaacttaatattatctacacagttaagtgacaaagtcccgattctctctagccagcactctatccaagaagaggattttactggttataaaagcatcataattttttttttcttaatagagacgggatgcagtcttaataagttgcccaggctggacttgaactcttggctcaagtgattctcctgcctcagcctccctattaagagccgcccccgattaaagtagcctgctcatacaccttacttagtatgtttttgactagcattgcttttatctgatgttatttcctgtgcctttaggatatcatctcctggtcaattaatcacaagggttttttgttgttgctgtttttaactgcaatactatacatacttacctgaaactgttcaggaatgacagttacccttaatcaaaactgggaggcaaccacttttcccaatgcacttcaggtctgtaatacagacttcacgtctacattatatggtctatagtttataggaaactctccaaggacagagacctgccaatactttgtggtaaactataactacataacgtgaatttttaaagcaatagaagaaacggccgggcgtggtggcgcgcacctgtaatcccagctactggggaggctgaggttggagaactgcttgaacctgggaggaagaggttgcagtgagccgagatggcgtcactgcgctccagcctgggtgacagagcgagactccgtctcaacaccaaaaaaaaaaaaaaaaaaaaaaaaaaagcagaattagaagaaatggaaagtcttcgaagatacataatacagacagaacttgcttcgagcaatagaagtcttttatttaatacttatcaaatatcgaacgtaaggctccatgtggcctgttgttacaacacagcatctctaaattcacgttctgtaaacccaagggaaaagaaacactatgatcatccttttgcattgcaaaaaacaaaaacaaactcctccctctgcaatgcagaatcctcctttaagttcagcttttgtatattcaagtgtttgcagacctagtggttcttttaaaactacttctacagttatctagagtctagggaatgggtaacattacacaagataagccttcttttcgtttaagatcatagctggttaagtagaactggagattttaagaactggaaaaaaggaaaaggtgaaaagtagcatacaaaattgagaaactaaattctgacggtaattttattaatgaaaataaactttatttaatacaggggaattcttaggtatgaatatttcacataaataaatgtcacaatagcgtcaaatcccagactttcaggaaagtaactgtagcactgttaatatcacaacaacaacaacaaaattctcatctactttgttctgaaaagttttatttttcttaaaaaagaaaaaaaagcaaaccaccccccccaaaaaaaattttttttaaaaataaaaataagaacaaacagaaaccagtctgagctggcagctgtgacagccagtgagacacccgggctttccgggtagtgcttggctttgggctggatgtccacgcagagagccctggagccatcccgcaggtcccacacccaggtacccagaaaatgacggcggccgcacacacgggggctggcggggtccgggccacgctgcagacggggagaggcactcggggtgaaggatcgcggggaaggcactgcggtcggaaccgagaggcaaggcctgggaaagcgccggggacgtcccgtgctccgggacgtcgggtgcccgcgcgggacgccctgtcatgactcacggaggcgagaaagcacgggcagggaaagaggctgcaggatggagggaagcccgaccgtcgggagggaacccaacccgggggaggccccgacctcgcgcgggacggggaagagggcccgccttcccacgccctggccgcccggccctcacctccacacgacgcaacaggcgcggctgccgtgtcccgaccccgggggctgtgggccggggggcgggggcagcagcccgcagccatgacaggcgcggggcgggccgcgggcgggctgggccgcacgtgcaggcagcgccccctgcccggcctccccgcgggcccgcccgcccgaccccggccccgggaccggatccctcacctcaggcgggggcgccgccccgcctgcccctcccccctccccccaccggccgagcagcggcggcggcggcggcggcggctgcacgtactcaccgccgctcgctgactctcgcgcttcgccatgactgaggcgcccccgccgccccccgcctcgactgagactgacactcgcggctggccgggcgggggcggcctcaggcgaccacccgtctgacacgacccgcccccgcatctccccaccagttgagcagcggccgctgccccgcggtgcccccgggcttcctccccacgcccgaggcggtgggtggcagcggcggcggcggcggcacttaccggctgcgcggccaggcccccctgtcagcgcggggcagggagggagtggagggaggagtgaaggggcaccgcctcccccgcgccgccacgcacccgcctgattggcccagttcactcccccagcgcgaccccaccagcccctgcgagcggcactccggcagcaccggcgcgctatttgcatatttgtgcccgcgccgctgattggcccgggcgcggaggggcggtcgtgaccgccgccgctcctgccgcggctccagccgcgtcgggctgcctaagagggagcgtccccttcgccgctccccttccctcctggcgcggcccgacccagggcggagggcggtgcgaggcggggtcgttgctccgctccaacatggccccgccgcgccgccgacccaatcgctggcgcggttactcccggagccctgggcggcctcggggcggggaaggcttggggccgggcgccctctggccggagcgcggggcagtgcagtggtccgggctcccccggcagccccgccgcggccgccacgtcaggccgcgccctcacggcggcctctcccctcgcgccgcccgccccgcggccccgccgccacgtcaggccccggcagggcacgccccagccgcgagctgaccagtggcggggtcggcgcagaggtcactcacatgcagggcatctctcgggcagctcgggtccgccgaggaagggcgagagtttccaaagacgtccttcttaaggagccgtggatttagtcccacgttctcctttcgcgcggagacccgggtgtcacgcgcccgtgctgtagaatcgggagcacggagcgtgtcgcgatgatgctgcgattgagcccaggtgccagcacctgcagtagccggcgcccgccgcggagacccagctccacgccgcgagctaggggagagcgcgcacctagcctgcggttgcaaccctgtcttcccgaggctcaggctccc

SEQ ID NO: 7165 - DNA, 6000 bp, Homo sapiens
cattgtgcatctgagctgacaatcagtgtctggcttggcaagcccagggtgtagatagccccctgcagccaggccagatataagagcactgagtttgcagactcctgacctctgtagcagctactgcttcatactcagtattaaggatcccagatattttggccacaagggctcccaaagggctgggggtccctaagactctgagcttccttggggagaggagagagtccactggggacgcagaatcacagaaggtcatgggaccccatgcaggaattataaaccccatttaccaggtgatgaatctattttgagataaggttaggctgttaggaaatggagcaaagcccatcccctgattcctgagtctatcatgcttgggctccagacccaagtgggactattttccagccttatttccttttatcaatttcatcttaggatgaattctgctacttccaaaatcaggatcctgccccactcctaagtctagcatgcagttaatatcattgaacaataacaaaatactaatgactacatttatggagcccctattatgtgacatcatttcaaggagtttacatatattgtctctgatgccatctcaccctgcaagaaggtgctgtggttattctcctcttctgtgtaaggaaactgaagctcagatcagcaaaggtgagtgatttgtctatcgttacctttctagcaaaagttagactcagaccctgaacctaaagactatatttctctacaatgcacagctctaagctggcctcaggacaggactcaaacagaagcagccatgtgcaaaggttaattcacagtggccacttccctggaagaaaggcaaaaatgagcacccagtcaatcttcctgctcttccccagggatcagcacagaccaggatcacaggtgcaaagggaaactctagaatcactgcctgatactgcctcctcatggagaccagctatttgagaaggttctgaacaaagctccggaatttctgagagtggctttcccctcccagagcctcctgcagcccgtgcatcccagcagctggccatggggaagatgttcagacaggctgatcttttccagtaattcattcagaaaacattagccaggggcctaaaccattgccaccttcatcatttcaaaatatcctccattctgggccagcatgaacagtcagaattgcagaggttacagtgttaatactggcaccagaagagcacactgagggctgttaaataacagaccgggtgagtcctggcttcagtgtaaccctgagccagggcattggaaaggaataaatcttgtggtgttatctcaggtcatgttcacctatggctgggaacttgaggctcagagaggggctgtactatgcccgagatcacacactgagaggcagagctcagactcaaactccagtcttaaacggctgcttctgcaactgcaaagacccaccttcctgaccactcactctcatctctggggctaatttgggaattactggatgagaattgatccacaaaaagacagagaagccaggaggcctccgcagagataaagcccagagggagctagctgagcatgtctgaagggatgaggggtaagtgagagaaggagttacctcatagtctgagatggagggctgcactgctccctaacaccaactgtgaacatcctaaccagaaatggaaattcactggtataatatccccaccccttagcctggctttcaaggcctctgcagcctggccccaacttgcccctgcacccttatctctcctggcttgccctgcagccagcctgcactcctgttctctgagatgattccatgtacattcctgccccaggtgcacagctggagatctcctcccttctcaccgcttgtctgcaccttccccatccagagcagctgagcttcaaccacagcccacctcctcccagcccttcctaagcagcccttcctcaggcctttagagcatttgtctaaagcacttgtctctccatccatttcatacatcatcataatgacattaacaaaaatcagcagccacctttcctaaggccacaatccatgccaggctctccatgagttattatgtttggtccccacaacaatgttctgagctgagcaccattatttccatttgacaagtgaggaaactgaggcttggagacttgccaaagccttacagctagaaactggaacccaggactccacagctaagaccactaatgaataggctgcccctgccccactgttgtatgtggcttcactttattagttaccactgagtgtttctgttgttgtttctgaatacggttggaggtctttgagggcttggagcatttcattagcttattcaacagcagtttcttgggcaccttctaccacattcctgtgatctaggacttatcttgggcattagaaacacagagattaaaaagtcacagtctctgccctcattgtgccttttcctgtttgggagacagacccacaaagagacaaaccaccaaacaacttggagtgagctgtgttttgagatagcaagcccgggagaaagtgccctcggtcagcttcacctaaagactggaactcgtgacaagtttgctccattttgcatcctaagaacctggtttatagtacactgcatacaacaggtgctctttattttgctggcaatgactaaagagcacacagtgtcaatgaaagccctggaatatccatctagctgacttgtcaaattggccatctggatgcttttagtttcaacaaacacatagagcaatgggaagaacttctagcagcatgacaataaagactcgggtgattaaagctcctggcaggcagaagtggtggttcatgcctcttggtgaccgtgacccctgcagagcctagcattgtgcctcacgccaagaggaaccagaaaaatattactgattaatgacagagccttccactgtctagagacaagcagtctggggcggtcactgaggacaggcgggatggcgggtcttaaggtctctcattcatcatctccctgcctcttaaaagatacagagaatctgcattttctcccttcctgggcccaaacagccatgcttaaacctgcccagtaacgcttgagaggctgcagccgccaaaggtgggaaagtttcacctctggattagcttctccttttctcacctttctctctctgcccatgaccatcccagggccagacacaaacattgagcccgcagagtcacaagttgtttccccacggatcaggccccagacctcagatgcccctgaagctcaggactgctgttccagctatctggtctcagagtatctgacaatgacagacccatctcaggaggtgtcagggagaccatggacgcaaacctccatctgtcagctccaaccttgggttaactttctcgttggaagagctaactgctttcttactcaagatcctctgctcagagccacctgtgctctatggtgatcccactccttttttttttgagacagagtcttgctctgtcacccatggtccaggctggagtgcagtggcgtgatcttggctcactgcaacctccacatcccgggttcaagtgattctcctgcctcagcctcctgcgtagctgggattacaggcgtgcaccactacgcccagctaagtttttgtatttttagtagagacgaggtctcaccatgttgcccaggctggtctcgaactcctgagctcaggcaatctgcccactttgtccttccaaagtgctaggattataggcatgagccaccatgcccggccccactccttttttgcaaacaccaagtattgcccgtcccaaagcaagtgtccagagtacacatagaagcagagttgtaagtcctagagcctgtgaacaggtcatgagctttccctctacccagctccaaattcttgcccttcctccctctgacctcccttaagtccagagtcacagctaccgccaagcaatgcagcccagtggagagagagaggctttcagagctgggtcccccttctccaatttcttcctcaaaaggtctattttcccacactctttgcagggtacctctgagctcatcccagcaaaagtggcaggagcaaagcccctcaggaaggagctagggggtgggggccagcaccctgacttccagaccgcttccctggcccggggttctatgttattcttcctggattggctgtaggtgatctctaggctctcattttcaggcaggtggccagttggaccatccagcagaagggggagagagtgtggctgttccactggagtcttcttcaggcccctctcccactcctccctgcaatgcggctagaacttgaggaggtagaggtttcaccccaatcatctgggcctcctgccttgaggaccaggccagttcttggcacctactggcctgattccacctgggctgtgctccctgagaatggcattatttctgatactggcttcttcttgtgtgtttctatccccaagaccacagggcctccccaggtgccttcagaaaaccgaagtattcccactgcttctggcccaaaggttcctgcccccaggctcagagtgctagatttagggtcactgtgggcctggttgtcaaatcccacccacttctggtgccccttcaagagctcttggaatctccacctcccttccagcagaccatcaaaaggtcaggctcccccacccaacctggcaccccagattctgtcctttccatccatacccctaccatgactttagggtcatgactcgatttcactcttctgctgttttgcttccagggtgcccaatcctgacacttccgctggaatgagctcgaggtactctgcaaagagcctgggaaaatgaccttccagaggactccaatctttttttttcccgttagccctgtccagttctttctgcgccccagatttgcccctgtctcctcgcctcccttccgtgtgtattccagctcctgtcccagccaccgctgcagacagtggacctcccagattcaaattcccagcccgaccccacgctcaccgccgccgttcttgtagcagaggtaggggaagcgccacacgttggccaggtccactgcgaagccgactacggacagcaggaagtcgatcttcttgccccaggtctcccggggctgcgcgtcgccgtcgcggggcgccagcaggcactggacgccgttgcgctccttcaccaccagcagctccgcagttttgcgcgcccgaaggggctgctctggacccgtgtccgccccgttgttctcgggctgcacctgcgggttcatccgcgccagaagcatggatgcggctggcgagaggaactttaccggtcctgggggcacgccgaggctctgcttggataaagggaaaagaggtggttacccggccgttcctccctacttgcaactcccaagaccacccgggagcgccttagacactgggatgagcgcgcgctgagcggacgcagggttcccagaaaagggcgcgcgtccgctggaaaaatttggaaacagaggttggggcacgccggaactcaagagttggagacttctgacagccctctgggggcggctgaagaccctgcagcacttttcctcgttcacccactctcgcctgccccaaatggctgggattgaactcaccgaggctgagggcagcgtgccgaccccctccccagctcaggtccgcgacacttcaacagccacaggagccttctcggacacttaacgtcactgcactacaaactcgctagccctctgctggcgcgtctcggcccgggcctcccaggcagacctagccctgtcccgcgctcagggcgcactcacgtgtccggcggcgaggggatccctggtgccttgcgccctgccggcccccgaccggcggcgccttggcaggctctagggcgcgggctggggctgggctccgccgtgtggcgttcgggcggggccggggaag

SEQ ID NO: 7166 - DNA, 6000 bp, Homo sapiens
tgcggcacaaagcggcgctgctcaggctcagcgcccaccatcatttctcatttaactccttttccttccacagtgcagagcatcacgcccacagtgcaggcacatttctaagtggcccccgcccccaagcatgtctcatcctagcccccggaagctgtgaacacgtgagatcacacccatgcctgtgctgttacatggcataggaatccttaagggaggggaaacggcccggaggatctgggtgcagccactggaatcacaggagtgttcaacacagagagccttctctggctggtgacagaataggaagtgagatttgaaatacgagggggatgagagggtggccggacaactgggggagaggacacacatgggaaggaacctgggcagcttgaaggagctgaggccccagatggcggccagcagggaaaccaagacctcagtcacaactgaggaggcgacggggattcttccaacaacctaaacaagaggattctttccagataagagaagagccctgcctaaccagcatcttggttttgtccatgggacaccctgaacatagaacattccaagttgaccagcctggccaacatgatgaaaccctgtgtctactaaaaatacaaaaattagccaggtgcggtgactcacgcctgttaattccagcactttggaaggccgaggtagatggatcacctgaggtcaggagttcgagaccagcctggccaacatgatgaaaccccatctctactaaaaatacaaaaattagctgggtgtggtggcgggtgcccgtaatcccagttacctgggaggctaaggtgggaggatcacctgaacctgagaggtagaggttgcagtgagctgagattgcaccactgcactctggcctgggcgacggagtaagaccctgtctcaaagaaacaaacaaacaaaagaacattccctgctgagtgttgctaaatttgtgctggttatgcaaccagagcaaaccaaaacactctctttacaggggctagaaatgaggctcagggaggccgagggacttgtctacggcataggtgggtagacaagtcatcgatggctaagctgggattggaaccaagatcttctccctgctcactttgtgaccatttccttgtatcctatctagggttcaggaaaggtgaggcctaaagctgaagatgatgagttcttggaatcggcaaagatctcagaaccctcatcctgtgggaaggtgagggggccctgggaggggggacagataggtgtcaacatcccagaaagcaggtagagtcagagggtggctgtcattgggtcaacgttcctcctagcaggactgagccccggccggggggcctcagctcccaggactcacccacgctgctccgtttggccgtctgcatgaaagagcaccagctgccctttccggtcgtggccaatggccgtcctggctgatatcacattcacaaatttgctaaaggaacctgaaggaaaagcagcctggctgatcaccgccccttgggaggcctcctgcttcttgcctaactccacttcccactggtctgagctacctggtacctccctgggaagcacagcagcctccttgctcgtctccctgcctcccctctgcacatcccagtctccccagggcagccggggggtctcttcttacaggtaaaccaagctatgccagcctccaggtgaagaccctctaatggtttcccctgttcttagaacaaaatccaaagagccagcatgccctccccagcctcttcctcctcctgcctcagctcctgggtgtcccctcaccaccctgcagccactttgcacttcctgttccctctggctgggaactgtgcttttctctagcttgctcctttgtcagatcacctccttagtgaggccttccttgaccgcccactctttttttttttttgagacaaagagtctcgctgtgttgcccgggctggagtgcagtggcatgatctcagctcactgcaacctccacctcccaggttcaagcaattctcatgcttcagcctcccaagtagctgggactacaggcacacaccaccatgcctggctaatttttgtattttttttttttgtagagataggtctcactatgttgcccaggcaggtcttgaactcctgggctcaaccgatcctcccgcctcggcctcccaaagtgctgggattataggtgttagccaccacacctagcttactgcccactctaaaatggtcatggtatcctgtccccatcccagtattctgcatcccagtggttctcaaccttgagtgtcggtcagagtcaccatggaggcccgttaaaacatagactcttgggccttgcctctgattctgcaggtctgagggtgtggggctttgaaacaagctcctgggccacgccgatgttgcaggtccatgaagatttttttctcttcacttttctcttcctgtacccacagctccggtccccatctctcccctttcccctaactttatttttgtttctgagcacttatcaattcttttcagcatattctataactattttttgtcctatatattcaatataagcctatcttcctccccatgaatccccagtacccagaatagtgctgggcacaaagtagctgctcaatacttgttgaaagacttaagaacagctccgcccagcccactggtcctggttctcgagagggttgttgccaacagcctccccatccaacctgtctcctgtgtctcgtcacactctgtggcttggctctcgttgatgtagatgcttccattacgaatcagccacacgaccccactcagcagctgcacaaatgggttctcagtgtccagcacctcctcctcagacaggtacctggatccggggaaggtgggaagctcactcaccagcaggggcaactgcagatagtcaggctctttctccctagccatcccaacctggctgctagattccccctcatgccccaggaacctcctggggcctgagtgtagctgggacaacttaacagccctaggaatctccctgttgtcagagctgaagctggacagggttctgacaatacaatccccacaagcctttgcaaacagtctgtttcatttaacagaaatgaccatcccccaacagagctcaaatccatctatggccctcaatccccaggccatacccagcccaactaccacttgatccctgttacggcccttcattggcttccttgtttctccactgctctctcccacctggtcccactcaggatcagaacaagctttatcatcaacaaatactttttttttgagactcaaataatttttaagataattttaaataattcaaatcatcaatcttgccagggcgtggtggctcacacctgtcatcccagcactttgggaggctgaggtgggtggatcacttgaggtcaggagttcgagaccggccaggccaatatggtgaacccactcccccgttccccaccccatcccgtctctactaaaaatacaaaaatcagccgggcgtggtggcacacgtccgtagtcccagctactccagaggctgaggcaggagaatcgcttgaacccgggaggcagaggttgcagtgagccggtatcatgccactgccctccatcctgggcaacagagcaagactctgtctcaaaaaaaaaaaaatcatcagtcttgatgagttgatgtttctgacaccccactcctttttcagtccctcatacacacaagcccccctgagcctctgagcctttgtgcgtggggttcctttggactgaaacgctcttcctccagttctgaccttggctcacttagtgattcatcttcaagttcccactcaaaggtcacctcggagaggcgtgttccagatcaccctccctaaaatcaacactatttacaacgggttcaccccgttggttgctttgctgcacacacagcaatcagaatgtatgttagctatttacccggcttttgttgatttttctagtaatgggggagggctgttaaggcaaagactgtgttgttcacggctatctcaccggggcgcggcacattgcctgatacaagcaagtgctcaatgatactggatgatgaataaactctgcaaggaagcgattcctatccccattctgcagaggaggaaacaggggctcagcttggttaagtgacttgaacacggaggcacggctacaacccaaatctcaggccctctgccctcgacagcacggggctccctgcctcctcacccggtgaccagggtcccgtcgcggcggatcccgaactgcgcgttctgcagccccccggagctgctcacccgccgctcgtcgctcaccacgttccccaggcactcgcccgagttcatgcggaagaagccgccgttctgggcgacacggcagtcggccgcccgcgccgtctcctccacggtggcgcgtcgtctcgccgcgcagccgccgggtccaccgggctccagcaccgagaaggtgcgcaggggctcaacggcccgcgtcaggtggccggccaccgcgcggtccctgaagtgcgacacgaaggtgcgcacggccagaccgccggcgccgggagtcgcgggaggcggaggccaactctcgtgctcgcggttgccggcgcgcacccgtgtgcagtcccgggggaggcgcgcgcgcgcgcgtggatagggcagtagcaagtcgtcgtcgcgggaggccctgcggggacgggcggccgtgagctcagggggctgtcctcgtgagctcggaggacaggggggaccccccgaaccaggctggcccagggagctgcactcaccccgagtcgaggccgccggacgcttcccagaggaagccgaatagtgcaagccggaggagaagccagcgacccgtggaggtcgccatattggaccggggcctcgggtcatgtgggctcgcctcacgtgactcaagtcccagggtggccgctttcagctcggactgaattacctgcgctcttttcggctggcgggctggcgggcggtgctggtgatgttaactttttatctccaggtaatctcaaacctacaggaagttgcaaggagagcataaagaactctcgtagaactgttattcatgtttagcagtggtttaggcttgcctgatttactcaatcatttgtactttgttttttttttttcctgaaccaatggcaaccaaattgcagatgtcatgatcctttaccccatacctcgccatgaatctcctaagaacaagggcattttcttaaccacagggcaaatatcattaggacaactcccattgacatttctgtgatgtcatccacagctaaccttcaattgtccctctaatgtctttttttttcttttcctttttgtccgcccctgaccctgtaacccaggagttgcttttagttgtcatgtctctttgatctcttcatctggaaggctcctcagccttttgtcttttactaccttgacatttttgaagacagcccagctacatgatttgtgtgactcaatgcaaaatgaaaacgtggggacacttactaaaaaacccagaaaactattaagaatttcaagatggtcagagcaaatggttgcagcaagccagggaccttctgagtgagcccatgaagctggccctgagtatagaagccagtttattttgtagcatgtacttcaagcttcctttgagaggattcttctcttcaggcctcctgtcccagtgcagtgtccagggttgggtggtgtcttggtgccagtgcagtgcgtgggccattccaggagccacggcaagtctaattggcttgatactgttgcggtcttgccagtgcaccttaatatagcagtttctccttgtctgaactagtcccggggttctttgtcctacctccaagaaaactaaggagcgtggacacaagggtggggttggagcgaacgtttaataagggaaagaagaaagctctccaaagtggagacgggagtccgagtggattgt

SEQ ID NO: 7167 - DNA, 6000 bp, Homo sapiens
ggagtttgagactagcctggccacaatggtgatagcccatctctactaaaaatacaaaaatgagctgggcgcggcgtccggcgcctgtaatcccagctactagggaggctgaggtaggagaatcgcttgaacccgggaggcacaggttgcagtcagccgagatcacgccactgcactctagtctgggcgacagagcaagacttttgtctcaaaaaaatgaaaaataaaaataataatgacaaatttcgctattgttaacagtaaaattaacctagtggctcttatcctttgactccttctctacttcccagcgagattctcagtgacccctcatcatcacctctcctaagtatgagacatcttcctatgcctgtcctaccccagaccctcttcacaataaaaacgtccattgtgtcagtgtggattcagtgtatagggtaaatcacgatttaattcactccagcgaataagtgatacctctttcatatatcctggaatgtttcacatttaaaagcttatcctaataaatctaaaagtagaaacgttcaggcagaggggaaagaattttttttttttttttgagatggagtcttgctctgtcactcaggctggagtgcagtggcgcgatctctgctcactgcaagctacgcctcccaggttcatgccattctcctccctcagcatcccaagtagctgggactacaggcgcccgccaccacgcccggctaattttttgtatttttagtaaagacggggtttcatcatgttagccaggatggtctcaatctcctgaccttgtgatccgcccaccttggcctaccaaaatgttgggattacaggcatgtgccaccacacccggctggaaacatttttttaatataggaaactaggtttggctgggtgcggtggctcacgctcgtaaacccagcactttgggaggccaaggcgggcggatcacctgaggtcaggagttagagaccatcctggccaacacggtgaaaccctgtctttactaaaaatacaaaaattagctgggcgtgatggcgggcacccgtaatcccagctactcaggaggctaaggcaggagaatcacttgaacccaggaggcggaggttgcagtgagctgagatcatgccactgcactccagcctgggtgacagcgcgagatcctgtctcaaaaaaaaaaaaaaaaaaaaaaaaaaggaaagaaggaaaaaacaggctctatgaagtttcaaagtctgaaactatagtgtttaaagttatctttatcctgatttattcccaaaacacgacctaaaaagacaaaaatgattattttcatgaaaggtgggaagtatataaaagacaagttacttccttaagctgtaaagaataacacccaagtcccataggagcatcttagcacgctgtccagcagcaatgaaaatccagtgctgagcctggagtaactaactggctgtacacggtacacacggatgctccactctcattcttcaggagacagctgttttagaggctaacagtatatttaacaaaagcattatcaacagcacagtcaatggcatagaaggagggcaagtcttttactccctgtttcctaatgctgtaatcatctgtttttgtctttctcaacagactgccccgctggcagtcaaggacccagctccagtccaatctgtgtccccccagggctcaggcttgtacacagaagagagttcatcaacaactgaatgaaagctgtaaaacagaaatgaacacggctccacatgcacagcaaaatctaacctgcttccccagattcctttcttctaaaacaaaaaagatccttaagagcctttacaaacattaaaacaaacggtaggagcctaaggtgtcctatttttaagaacacgttctttgcaaagttgttttgagatatcttcagtcattttaagtaaaatttcagtttttccaggattttccaggatttacttctcagagagaaactgaagcactccccctcccccaggccaggcgtggtggctcacacctgtaatcccaggactttgggaaaccaaggtgggaggatcacttgaggccaatagttaaagctggcctgggccacacagcaacaactcttatttgtctgtttggtttctttttttggtagagatgagctctcactatgttgcccaggctggtcttgaactcccaaactcaagcgatcctgccttggcctcccaaagtgctgggattacaggtgtgagccaccatgccccacacaattttaatttttgaagttcattcaatatttccaacacatctccaaggacacactatgtctcctgactcacacagtcttggtccacttaatatactggaaatgatggctacctactggagactggaagaattcatgccaggttaaaggtaccagtccagactctgccactaggtggaccatgatcttcaccaccaggccccacccagtttctttagctacaaaaggaaggcgttgttttcagtgagccttaaaatccatttcaactttgagaaccctgtcaatcctggtagagtttatcagcagagctatattcagtattaaccttaaactcactcacttggaaagagaaaacaccactcaagctaactggggcttatcttaggctccataaagaggttctctctaaggattcatttccctcacttactgtgctacacatgtctgaaaactgtcagtactcatgatcaacattaccaaaatattcatgaactagaaagatttttttttttaattaccaaaatcagaagcaaggaaaggtaacagctgttaagatatttgacacatttctacaaagtgactattaaagagatatttaaaggggagggggcaaaataaaggtgagccaagggaaaaaaccctgaaaatacagtatatacaaggtccatacatcaatgggaaaaaaatggggcattattgctggtctaccctcagggccacttttaggttccaggaaattccttgttcggatgtgttagtctcacatttcctacccttactacccactcttcgcagagacttttccagaataacccaaaagtactaagcaaaaaagaaaataactatagtttctgttatgagaaaaagggcatctctcctacataaatgttcccagttaacttttcattggtgaaaacagaagccaggtctgaggggggccgctggatcgctttagcccgggaggtcgaggctgcagtgggctgtgattgcaccactgcactccagcccaggtgacagagtgagaccctgtctcaaaataaaaaagaaaagaaaatctgtctttaatgctgctctcagggctcaataagcctagacactacagtaaagagttcattaaggtgactaacaagaaaactactaacaaaaaaggcacgtgtaagtcttgctaaccaacggactgcctcaagaggctgtctgaaaagatatgcttggcaagctaaggtccattttaatttgcttaagtttctcaggcataagaaaaaaaataatggtcaatgagacctgcaaaactatatccaaactcaaatgaatgctaaactctttctagactccgggaaactaggcaaaagcagacaaacagcaccactgtgtgggctcctgacgaggatggcggcaggcattcgcagtccaccgcgatgaacacggtgcttcccttccaaaccggtgtctggaacttaggcaacaacagatacctggatctgcggcgttctcttgctcaagcgggaaataatcacttcgcatcatctgcgtggagtaaatattgtgatggtgacacctgcacgtttaaccaaatgccagcacacctaagctgggtttccagtctgaaccggcagaaaagggatgtattcggtattcctggtgccaaggtgagaacgtaatcgcaaacccaagagaagtctcccaccccagctcctgggctacagacaggaactggcaacaccgctgtgggccgtcccgggcgcggcgaggccggggcccagcacattcccctcctctcgaccgaggcactgaggtctgtaagaggcactcgcacccgggcgggctccctcgacgggaaaaccagccctgaaggtgacgcgctgggtcccggcgcagccccgcttcagagccgaacggcccagcgcggccccgggggctgttgggccccagaagcgcgaccctcgcccgcagcgcgcttgcgggggcggcggtggccggggtacggcaggcaccccgccgcggagggcgcggggtgattcagcaggcccggggccccgagcgcaccggcccccgcccgccctccgccggctgcctcctcccaggcctccgagaggtccgcaggccgccccggcccagaccagcccctggccctcccggctcggtcccggcctgggtccctcacggggccccgggccccgcatccctcggccccgccggccggcagccaccggccccgctcggcctcccggctcggccccgacccctcacggcgtcccaggccctgccgccctccacagctcggaccccggccccgccgcacccgccgccctcgcggcgacactcaccgaaggtgcggcgctgcttgaaggtcttctccgacggcatggtgcagggatctgggcggcggcggcggcgacgacgcgagggtcccggcggctcccgggggcggcggctgctgcggcggcgaatccgactctggcgatagccacttcccttgtatctcctcagcccgcagcctggtcaggtgactcgcgacgcgtcaccgaggggcggggccagagccggccggggccgccgccatgacgggcgtggcggaacccagcagcggcacgcagcgtgggggcggagcaggtgtgtgcgcgtgcgcgatgggcgaaacgcgcgctctgcgcatgctcccggtcgtgccccagccccgcccagcaccgctgggcgcctgaggcccctgaggtgacggttgtgggctgggccgcaccccgggtctgtgggcgctcgggagcctgctgcccggccctgaggagatggcagcgcggggcgggggaggctgagccacaggcggggtgtcccggggcactcttgagggaggggtcagaggaagggacatggggcaaatccgaccatcctttcccctccagagagacttggtggtgctgcccgagacgccggcacccggggctgaggcgcgcagggcaggccgcgccgtctccgggaggcagggtcgccgctcgcccgtggagccctggccccctctgcgtgcaggggcgcgcgtggtccgtgggtggcttccggggagtggccgctggtgacctccgcccgcggtcactcgacgcccagccttggcgcgtttgcgcaactgcttttgtcccgagccttcattctgggcgcagtcccctctcccagtccccctgccgcggcgcctggaactctcctggtggctgtaagattttcctaccgttaggtcgtctgtggcgactgccaggcctgccccacatcgctagccgccctgtctacccctcagcctcccagccactaaactcgctggacaaccttacgctagtgacagtttttgagtctcagactcatctgtgaaagggcagtcatatttgaggactccaaatgggctgcagtgcgtaaaccaccatgcgatatttggttgctattgcccacctcagcctgtggccaatgtgtctctgtaggaacagcactagattctttggggtttttttgagacagggtcttgctctgttgcccagcctggaatgcagtggcacgatcatagctcgcggcggcctcggtcgcctgggctcaagggatcctcctgcctcagcctcccgagaagctgggagtagagccgggatctcgctgtgttgcccgggctggtcttgaactcctggcctcaagcaaccctcccgcctcggcctccttaagagttgggattacaggcgtgagccactgctcccggctatttggctgttttt

SEQ ID NO: 7168 - DNA, 6000 bp, Homo sapiens
cttctctgagtcttggttgactcgtctataaaatgatataagaaggcctcaagagccatgataaggagtgaatgcactaacttgttctagggaacagagcacacatccataccacatgaaacctcaccaaacccatgctgaccccttctgggcagacaccagcctgcgttcccgtccacaccagactactgtccactcccccttcccagctgcctgggaaacggcggcttcttgtttcctggcgttcttatcagtcaaggccgacgggcagcatcccatcaactcctgacacgtgagcaaatccacatgagaaaatacaccagaatttggatactttgcacaaaaccctgtgtttgaggatttgcagagagttctgactgccccttgaaacaccactgccaggtataaaactggcacccagcctgcaagccagcacctcgcacacagaaccaacccacatccaagaagaatttgctcctatgcaccagggtggaggacacgagggtcccactatatgtcaagcatctgaccctctgggggaacttacatttcccccaatccattgaactctcaccatgtccctacaaagcaagtggtatgtttccacttctcaaccaaggaaactgacattccaccaggataagaaactaactcacaggtacttagcaagagaaagggcagaatttcgaaatctgcctcagatacctactgactgagtgttgtctgacttatctgagtcttggttgactcatctataaaatgagatgagaaggcctcgcagcgccatggtaaggaacaaatgaactggggtcagtcttgctccaaaacttgttctcttctcccagtttcagcccttttgggaactgcagctcttctgactcccaggggctgcactgctatatgccgaagaggagagcttcagcatctgtgacgggagacgacgtgctcatccaattaaaacgagagaccatcccaccaaagccacaaagacagcttgaaagtccaaagctgtcatcagtagaaaaggaaatctgagtagagcatgaagacaggggccgcgtatcgggggagaggtgggcaaatcatggcagagcgcacttcccgggtgcagccactgtaagtgaacatgtcccccagatagtccacctccgtgccccacacgtgcaggtgggaggcaggatcaggaagctttcaaagggtggaatgaccctttctgaacacgacagcgccacctttcccatccacacgtccctctgcccacacatggccagcagctgccactacaggcgtttgattaaaacaagtcgcactgactgtctttggcagaaatgagcatccatgccccggtggccgggttggtgactgccactcacagacgcctacatctacctccccagacccaccgggggcagttcctgcttggtcccttgcaaagccggatcccaaattaactgagccccgtctggctcctcgcgggcgggcagcaggaaggcaggcgccttataaacagggagagtgccaggcctcccgtctgcctcctgcacagctgacttgcagagaggaaagactctcttcccgctgggggaaaagtctgtttaggccactgtccctcaaattccacacccccatgtctggaaccctatttccctccgccgtaaagcaagcacggtctcaaaagaacagtgtgaacttaggtggaaaactctggaaaagccaagccacacgggagctagaacggagaggaacttccacctctgatgtgtttcaaaccgggtgagcacggagacctctctgtgacccgcacggctggactaattaccaatgttatcaggcggatgacagacatgccccgaacttcctctgtttgatagatcccactgcaaacacacccaagttcaggcccgtgcctgctgttctcagcagtgccctattcttccctaagaccactcctgatccccactcctctgacccctgccccatgcctccaaggtcagccaggccaacgtacccaccaagcaccagcccagtgactcagggagggtacctcccccggaacaccccgcacagaaccagtgaaaactcctccttcagagtttttctgaggaacagaaaacatctctcccttccctgaatggattttggaggaagcgtctaagatgagatgaaaactgctgcttaccttcgtcgctgctgccaccggggagctccagctcatgggtccttggcgggtgagcccttggcccgcacacaccagggtcccacactccacgcaagcaccgatgatcagctgctgtccgtcatccaccaacaggctgtggcttgctcgcagggtgtataggaacaggggcagccgggccacccgcacggacttcagccccagacaccgtttcttctcctgctgacaaaagaagcacacgaacgtctccacctggtactgccgggaccaggcgctgacagcgtggtgggagctgcgggcctcatgctgcagccactgggccagcaggtcatggtagcagagcacacaggtagccaccaggccggtggagtccacaggcctggcacgaggggcaggcgggtacacggtgaggaaggggaagaagggctccttctcgcccaagcggctggcggggttcacgttgagctggaactccttcccggggcccagctcagccccacagatgtagcagatggacacggggccgccctgggccgacgccggcagctcggagagggcagggtcggaggcggagaaggcctggtggtacctgcccaggaagccctgcacggaggtgatgagctcctcgttctggcaggcccggtacagggcccagacatcctccaggacgctgaagcacttggggcagctgcggacttcacagcgcttgttggggccctgggcgttgggcgggcagggcaggaggctgaggaaggggaaatgcatggcgctcctggcgttgccgttgaggatcctggaggggaccgcccgggcatccggggtacagtcctccccacagaggtagcaggcctctcgcagggccccggagggcaggccctcttccctcgggagcctcctgcccttagaggccatgccgggggcgtggctgtccaggggcaccacatagagtcgctgcaggactggcacgttggccagctcgaagctctgccactgctgcgtgagggaggagaagcagctggcgcacaccaaggtactgccgccctcgctgatgggctgtgcccctgggggcgggctgtgcagccacaggaaggggaagaacggggcctgagccagcttctcctgcttctgcacgtggacctggtggtgcgaggccggggacagcggggccccgcagatgtagcagcaaaggccttctgctggtgccgcccggctgtcctggagagcccgggggacacggccactgttcttctctttggggttgcagacgcctgggaaaggctgttccttgtggtcctcttccccactggtgatgttgatgtcactgtcctcggaggtgcagaagccccgtagggtctcccccagcggcctgctctccagggtcttagtggctctgccagagggaggccctttcatgccgtctgcaggggcctcttggacaagagggccttgccagggatcctgaatgctcctcaggacgctggcccgggcctcgggaacccagtgcctcccaacccccttccgccggcgcctaaccccggacttgggctccccatccgcgtgggccttcgcggggagcccctcctcctccgcgcgcccctgcgccgaggcctctgcgccctgtcccggagcgggtcccggagccggcctccactcctggccgcgccccccgcgaggccctggccctggggccccgtcctggtgggggctggcggcgtcccgcgcgggcgggtcgggctcggaaagggggtcggtgtccgacagctccgacaggtcggagtctcgcgtctcctccgcggccccgcgcagccgggggccgccaccgtcgtcctcgtcgtcgtcgccggtggcgctgcccagcgcgtaggcgacgttccactcgcggggggccccggcgccgccacggcggccgcctgcgcccgcgtcgcactggtggggccgcttgagccagtacatgcgcttgtccaccggcgtgcgggcgcgctcgaaggcggcccactgctcgcccaggaagcagcggcacacggcgcacaccaacacgcagccgtcggccggggacagctcgcgcgcgccgggcgccggctcctgctgctgcaggaacgggaagaagggctgcgccggggtccccgcgcccgccgccggctgcttcacctgcagcttcagctccttgccgcgcccgatgccgccgccgcagatgaagcaggagagcggcgcgccgcccgcagcccgctcgcccacggctgccatgagccgctgcttgcgggagaccggggccggccgcccgctcatggccgcgccgcgccgcccgcccgggcccccgcgcgccccgggccgccctcagctcccgcccaggccgccgccgccgcgcccaacttggagcatgtgtgcgcgccgcaaagtttggcggcgggcggccggcgcgggcgcgggcgcacggcccctcgcagcggcgcccccccgggcctgccgagcaccccccggcggcggcgcgggccgaggcggcgccgcggcgagcgcgcccggaacgcggcggcggcggcggcggcggcggcggcggcggcggggcccgggcggctggagcggcagccgcatgtgcgagctccggcgcctgccaaggcgtggggtcatttaattggggaggagggggcggggcggcggcgggcgggaggggcggggaggggcggagggcgggcgcgcggcgggcgggggaatccctccccgcgcgctccctccccccgccctcctcctccaagcctgcctccctcccgcccgccgccgcctccccccgcgtcccaaactgcgcacaatagcggccggctcctctatctattttgtgtccagccggagccgcgcgcgatgattcattgccccaattaggggctctctgcagcgcgcccggctctagccgtctgaagggtctcctgggggacccgccgaaacccatcagcggctggagctggtctttaagtaaaggtcaatcaggacgcgggaggagccaggtaaggacgctgcgggcgcccctggaggcggaggaaccccccaccccagggctgcagtgagggcagccccagcctagatgcaggcaccctgccgggttcgttcagggttgtccgaccctctcaaaaggggggaccaagcgagaaagccatttacagtcccgaacaggcccgagttggggataccattcagggccccgcgttctaattttggagagagaaaagaggagccgtccccgtctcctagaacccgttagtgaatgcatcatcctgcggacagtctgaggcctgctctgccccttcccaccatcgacaggggtcactgggtcaccagcagaggtagaaagggtcctgtgtgtcccaaggtcagtgaatcaacctctctgggtcctgattttattcccttcaacaggagctgcagcaggggattaactgtttccgtgtctttattgtgcatgtgtagagatccattgtatttatttaacaagcagagggacttgcggtgcgaggcgcttagggttaactgtggtgatcagccccatttcacatacaggaaagaagtggcattgagtgttaagttttcgtccaaaggggctaagcagaattcagacccaggacgtcgggctccaggccctactcttgaccaccagggcgagtagccgtgcgaggcaaacgtctggtccacgtcgccagtctgctgatggggacgggaccgtccatggcaggacaaggccaggatccctggatcctcccggatgatctggctcaggccctggtccaatctaggcatctccagacctctcattccccatctgtgaaatggcacccctt

SEQ ID NO: 7169 - DNA, 6000 bp, Homo sapiens
tgatcccagcactttgggtggccaaggcgggaggatcgcttgaggccaggagtttgagaccagcctgggaaacatagggagacccccatctctacaaaaaatataaaaattagccaagcgtggtggcacacacttgtggtcttggctacatagcagaccgaggcaggaagatggcttgagtccaggaggtttaagctacagtgagccgtgatcctaccactgcactccagcccgggtgacagagcaagaccttgtcaagatggataaacaaactaataaattaattaaaataaaaatgtgaattgtacaattttgttgattctgtatgagttaaatcctattctatttgcatttaagccaagtattacacaatatgaagataaatggtaaatacatgctaataatttaaaattttaatttttcttgacttagaatgatgattttttatttttatttttttatattttttgagactgagtctcgctctgtcgcccaggatggagtgcaggggcacaatctcagctcactgcaacctccgtctcccaggttcaagtgattcttgtgcctcagcctcccgagtagctgggattacaggtgcatgccaccacacacagctaatttttgtatttttagtagagatggggtttcaccatgttggccaggctagtctcaaactcctgacctcaaatgatctgcccgtcttggcctcccacagcgctgggattacaggtgtgagccactgcgcccggcctcccaaagtgctgggattacaggtgtgagccaccgtgcccaacctcccaaagtgctgggattacaggtgtgagccgccgcgcccggcctcccaaagtgctgggattacaggtgtgagccgccgcgcccggcctcccaaagtgctgggattacaggtgtgagccgccgcgcccggccgccttccagcatttctggcacagaccggcacaggtgtgggctcctgtcctttgcatgttgttggctttctgttgaccagatggcctggagacctcctggcgtggatgcttccacctcattctctgtaacatgtgcgcaagcctcagagctcatgttagctgagcaattcttccatgcaggcaccgtgctgagggagctcctgtggcctcgtgaggcaggagcgcttttcccctcacctctcagggccctgggccttggtgcctgcctacctctcccacctccacccagctcagccgtgagtcttcatgcagtgtcctcagggcatcacatgagagccccaagcaccccatctctctgccactccctctcccttgttctagctccaccctgtcttgattcctggcaattctaataagagagaattgtccccaaccctggccaagcaattccctgacatgtaatgacctgtgctaccctcaccttgctcgggtggggccagaccttcactgcagtcccatcaccccacccctcccttccccttctgctccagggcctgcccaggacctccagcctcccgccccattctctgccagactccatcatcccctctggagccgtcacgccgctcggtaaaacctgcccgcttcctacccgcttcctggccgctctctgcctgcttcccggccgcttcctgcccacttcctgcctgcttcctggccacttcctgtccgcttcctggccacttcctggccgctttctgcctgcttcctgcccacttcctgcctgcttcctggccgcttcctggtcgctctctgcctgcttcccagccacttcctgccagcgtgcgtttgcactgcccttcgcggagtgtgctgaggggagaaggcccagccgtcccaatctgcgctactttgaattcctgatcacaaacttcaaggaacctctttaagccacccgggaatcctgctgcaggtcccagtgccagaaccagaagcatctgtgccatctgggaacattctggtggagcaatcgccctgtcctcgaggtcggccatacacgctgggtcttcaccaccccggggatgcagatgcctcctggcgaccccctcctccatccaaggacccctcccggcacagccccgagcacacccgctgtctcccctcctttccgcccgtctgtccgatcctctcacagctggctgggccatactgctctgtgaaactgtgcccggtcagccccggagtgggtgacccaggacccgctggctgtgtccttccagggcacaggtcccagcctctcctgtttcgtcgacactggctacctgtgtgggcttgtctgtttctgggctctgagccctatccccacagcactgactcccccacccacctgaacccccagcccagcccccgaagccccacggacccagcctcctgctgcgcaccccagctggagttcagggagcattttaaattcactttttgtgttttttttttgagatgaagtcttgctctgtcacccaggctggagtgcagtggtgtgatctcagctcactgaaacctctgcctcccaggttcaagtaattctcctgcctggggacacgacacgtaggggacgcctgagccctgcgcctttgggcctcagtatctgtgaaatgggcctgtgaaaggggtggacactcagaggccagggcgggccttggtgcttggtctccctccacacagcccactcctctccaattcacaccccaccagccggccaggaccccggggcccccgtgttgaccgcctgcctggctgctgcagctcctgccctctggtggccaaatcccaacgtgcctccgtggggccggttcccggctccagttcaccggggcctcgcggggtcctgcaaggcggggtcctgggggctcacttcacccaagaaccagctgctcctccctcagggtgggctctgcctgtgggctctgaagacctgggaaggctgagcaggtgctcggagccaccactgcttccatgggtgtcctgccctttaacccacgccctcacccctgagagcaaggctgctgttacccctgtctcctactcttggaaactgaggtagagaagacaggtccagccccctggctcatgggagatggagccaggatgtacgcacaggacacaggtccagagactccagagctgcgtgtagaccagcaccactgccctgccaggcccgcctgcccgctctgtacccagtgggagctgggagcctcagcccgacctgtgaggccacccctcaggggcggctctgagaggccgctttggggctcagtgtccgtccaccgcagcctacgtccccctgaagctgcaagcagggactgagggaccctccccgtctgctcctggcctccgactggagatttgtcaaagctgaccttttgtcgacaaggagactgaggcccagcgggaggtattttagagacacttccacgtttggaggccctagatgcccccttccacccatgacacccactgagcttctccatggggtcagacgccaatcagcaagaattcgccaagagatgtggaggctactagaccctcaccatgaaaatagcttggctgtgtaagagccattggccgaagtaggttctgcccttcgctagcccagccgcagctccagactccaacttccgcctgtgcccaaggctttctctctagcatgtcctgtgataaccctgaagctccccgcaccctacccggggagaagatttttcttttatttttttggatacggagtctcgctctgtcactcaggctggagtgcagtggcacgatctcagctcaccgcaacctccgcctcccgggttcacgccattctcctgcttcagcctcccgagtagctgggactacaggcgcccgccaccacgcccggctaattttttgtattttttattagagacggggtttcaccgtgttagccaggatggtctcgatctcctgacctcatgatctgcccacctcggcctcccacagtgtggggattacaggcgtgagccaccgcgcccggccacagctttgattttcattcagcaaatcctttccacctggaaggaaattgtggggccggacaacaggccctgctcttagctgggcgggaaggcagatgactgcgcagagaattccagaacagagagtaagtccggggactcggcgctcctcacacagcctctgagaactcttcctggaggaaggggtacgtgagctgagtcccaagggtgcctaggaccgcactgggcgccacaaggaaggaacagccggcacagtggacaagcggggttgtggggcctctggagggcctggcgggtccagacctcatcctagggaccacggggagggccagtgggaggacagcggcgggtctgagagcagctctcccacctccttgagtcccaggaagccgccgcgtcccctgccccacacacctggccccagtttcctagaatcccaggaagcagccgcgtcccctgccccacacacctggccccagtttcctagaatcccaggaagcagccgcgtcccctgccccacacacctggtgccagcctcctagaatcccaggaagctgcctcgtcccctgccccacacacctggtcccagcctcctagaatcccaggaagccgccccgtcccctgccgcacacacctggcctcagcctcctagaatcccaggaagccgccgcgtcccctgccccgcacgcctggtcccagcttccacccacagtggtgccctggggtccccgggcctgcaccaccccaggtgggcaccccagtaccctggcgcaccgactccccagcccactcaccctggcctctgcgatgcagacttgctccctggcagggcccggcctaggcagctcccacgccaggctcacagctgggctggccctacccggccacctgctgcccctcccaggcccctcctcaggaaggtgaaactgccccatttcctgcaggaaccctgtgttctctgaaagtagaaagaggagggaaatggaggaggggaggggaaggttggagagaaagggccaggggtcggaaggaagggctgcaggagggagagaggaggagggagagaggaggagggaactttgctccaggagatggctctgcgtcctgacctcccccaaggctagaaacttctccagcagcttcctcatttcctgagagtgccctgagatgtcctggcagtgtttttccctcatgtgtggatgtgccacctcccagccaggggggtgcgtgcacagctgtgctgtccagctctgtgatgtcagatcttagagaatgctacacatcagtacacataagccatctgtgtcctttttctcatgcattttcgttgtgaaaatacaacatgtataccaacaagacatataggtgttgggagggaaactgaggcagggcttgcatgatgtcctttggaatgtgtctagacttgctggctccttccttctagccctcctaggcccctattcccattatctcaagtagcagaacatgctccatataaatgctaaaccggcacagctgtaatcatgtgcttaatgcaacgtggtcttttgacctccatattctcaccatctgtttctttgttgcattaccaataaataccgtgggctcccagagctcgggcttttgcagcctccacaatagcgatggccccctggtgtgccacctttctctctctgtgtttttctgaatcctttgactccgccggactttgtcacccccacgacctggggttgggtctgatcaccccaacatataggtactgtacctttacacagaaactacacaggtgttcgtagcaggacaatttagtatagccaaaatgtgggaagagtgcagatgcccaacacggggacagataaatgtgtctcttcacgcagtggagtattactcagccatgaagaagagtgacgtgctgacacgtgctataacatgaagaacctcagaaacatttcgctaagtggcagaagccagatagtcgggtgtggtggtgcgcacctgtggtctctgctgtgaggctgagg

SEQ ID NO: 7170 - DNA, 6000 bp, Homo sapiens
gggcaacagccgtgtcagaaagatagagatgggcacagacagtagggtgcatggagtgggaggggttagggggaggaaggccgtattctagcatctaacaaagacttggaccttccccatcttcctcatttcagtaaatagtatcttcatgctagaagttgctcaggtctaaaaccgtggcattgtccttgacttcttttctcctcttataccctacattagcaattcatttctacactacatttattcatatatacatgagtcagacccactttttgtctcttctaccactatcatcctggtgcaagccactctcatgtgtcacatctgggtgatatagtagcttcctgtctccctgttcttactttgtcccctcccacttcccagtctgttctccacaccacactgggaaggatcctctaaaggggctcaaaccttcaatagcccccgtcactcacaggctgagatccaaagtccttaccctgtgctgtgaggcctacatgactgtccccgacccaactccttctgttaccactcttccccaggattatgtactttggtcctatggccttccactcttcttcaaatatgctaaatacactgctgacttgggctttcagtcactgtttcctctgcatctgcaggaatattctcctccaaaatacctacctagctaacccccttaattccttcaaatctctgctcaaaggtttcctttttaaagaagcttctcagcacaccccagctaaagcagccccaccgtccactctaccacatttctgttttacctcgttggtagtatgttatcaatttctggcatcacatgcctacctgtttgttcatttattgtctgtctcctaacaggctccttgagtctgggaaccttgtctggtctgtccacagccccattcccagtacactgaacaacagcacctaatgctcaataaatatgtgttaaatgaatgaaggaaggaagagaagactataactttggtgtacctaacagatcaatgtaggaatttttggcaaggtttgagaaagtttcttctggcttttagcaactgtgtatgggggatctagctgtttgaggacacagttgaagctataaaaaagtataaagctataaaatatttcaaacgttatgttattcaggggagaagagatggaggtattaacagacattaatacaaggcaaataagtgagctaggaggactctaatctatcaaaacaaaggggattctcatatctctatgtccagcccaactcttttcccaagccagtatttccaactgtccacctaatacctacacctggatgactcatgggtgcctcaaactacacatgtcccaaatcagactcatcacttctctctccttagccactgccaccaccaatgcttccttctcgtgggttcccagtctcttttcgtaaaacaattagcacacagtcaggtaagccaggaaccaccttcaagtcaccccagcgcccctttcacctcctcaacactcagccaatctcaagctctacttctcaaaccttttgcaaagtcataccctcatctctcgccccttctctgacttgcacgccgactaagccttcttgttcctccaatcaacctccccatggtcagggaggtctttctgaaatgctttcctgccttaagtccatcagggacaccttccatcccctacagaataagatgctcatgttttgacagagctataaagggtgctctccatagaacagacactgccacccttactatcctcatccctcgctgccttcccccaattatataccctagcaattctctattctttggggtgcctgtttcctcccttcatactcctgtacatgctaagtacacactctctataacacatccccaaccctatcttgtcacatggggaactcctatgtatgctgcagccagctgggaaagtcccacctatgccaacccctcccacactactctgaatcttctatactgttcttccctagtgcagcagttgtgattatttcatcacacatatgtctccctctctagtggcaaatttcctatagggtaaggtccacagatgctcaactctgagtcctcagcattaagtctggcacataacaggatcagatacatatttgttgaattaaagtgacctgttccctgaacacaccagtgaaagatcttccctctaactccatattctttaaataaactttttcatgaggagtgggccctctcaccttcggatctttgctccaacctgtccccctccttggcacatccatctttctgtcaaccttattttctacatcagtctatgaagaggctggttcagaccctcaggctcaccacatctccagctgttcacactgcacggtctttgcacctgctctacccactaccagcaatgctctcagatagtcccatgacctgctcattcatttcaagcaggtctctattcaaatatccctgtcctcctttaagaaacagccctgacatcacacttcctatctgtgcttttattgctagtggtaccctccacaggcttatcagttcaatgagggcaggcctgtctcattcaccactgcatccccatgcctgcaagagtgccagtaacattcatctagttcatattttttgagcacctactgtgtgccagacctaggtgctaggaacacatcagtgaacaaaacagataaaaatcccctcactcacattctacagggggaagacaacaatacacaagaaaaatacgtgaaatataagtgctaagaacaactaaagcaatgaagggaggcgggaaatggggaaagcctcactaggtgcctccctagtgaagacctggaagaagtgagtgcaaactacatggatattaacttgcaagcacaaatgccctgaggctaaagcatgtctgacgtttggaaagggagggagcagaaaatgagactgggaaagtaacagtgggtcagattatgtaaagccttatagctcactgtaaaggggtttgtctatcattattaatgagatggggacccattggagggttttttttttcttttaagtaaaggaatgatacgatctgacagcctgtgttttaaaaagatccctctagctgctgtgcaaaaaacaggggccaggacagaagcaggaagaccaaatgggaaactatttcaataatccaaaccagaggtggtgacctggcccagggtggcaagtattatttgtggcgtgaaaaacagaagactgggtgtggtggcccacacctgtaattccaacacttttgtgggaggccgaaatgggcggatcacttgaggccaggagttcaagaccagcctggccaacatggtgaaatcccgtctctactaaaaatacaaaaattagccaggtgaggtggtacacgcctgtaatcccagctacttgggaggccgaagtaggagaatcacttgagcctgggaggcagaggttgcagtcacacgatgacacgagatcgcaccactgcactccagactgagcgaccgagggagactgtctcaaaagaaaaaaaaaaaaaggaaagaaaagaaaaagaaagacagcagtcaacgatggctcaaaagttattagccaaggtctttcctattattgagatgagaaaaaagaggcaacaggagcagtttggggagagtaatgaaggggagcttgctagccctctcttggcatgtttaatttgagttgcctataacccatctcagtggagatattaagtgggtggctggataaaagtcaggggtgagacctgcgatggagatataaatacggaatctgttagcctctgatatgtatgtatttaatgctatgaaatcaccatcaatgaaaataaaaatattgcaaacacaaatgcacaaaggagaatttaaagaaaaaaaaataaagaagaaaagctaggatgaccgaggataccctcccacataccctggaaagaatacaaaaaggtgaccctcgcttttgctgaaagacaactcggtcaaaataaaaattaaataaataaaacctccttcccacgtctggcagaagggcaaatccagaccagaggctctgtcaacgtgtctttcatactttcaccaaggacccatggggtcggccccataattttttcaaaagaaacccagtgaacttgggcatcgcctctgcagggaacgggatggagtaagcacagagaagggtgggccacccctgggttccaatcaccagcatcctcctggatgtacaaaaggtaagccaagggttgggataagttcccctcgccccaaagaccccttccctcgcagagcaacgcctccctacagggtgtgtccacgaggggtaggcaagcaggcagggcacggtcaggaaggtaagcaggcggggcgttgtggcgcaggcttaggcagggtgggctcgcggggcacgaggtggaggtgagggcaggggcgtggcgcgagggcaccacagtggggaagggggagtcgggaggcctaggttctgcattcagaaagtggacgaatgaaaggcacccccagggatgcagcccgactccaagcctcgggggcggctcgacaaggcgttgtgtcgccggcgtcaggcgtgcccggctgccatgaggagaacgggaagtatgagcggcggggttccgagcgtggggacggcgctccacccagtcacggggtcctgggttcaaggacaagcccagggtcgcaaggacgcgaccagacacacccttaccttgtgctacagccgtctccgccgctcaggtgccggcttgaggacgcggccgccgcttctcgcgccgctctcccccgcttcctgattggccaaggctggccgctcccagaagccctcgcgcggtgcgacgccaaatgaactttatggagacccgtgggggaggacaagaacaggggcggggccgggggcggggcggaggtggggccttgggccaaaccgtcacccctgggccacaggcagccacggacctcgcctttcccacttggttagagtcggctctgccgggagaaagcgattccagaattccctaagttaaaggaatttcttactccttcttgagcgccatccaagggccaggccttagtctaggaactggcaacaccgtggcgaccacgtcagacaagatcgctgccctcattgagttcccaggttggcaggggaaacaaaaatgtaataaataactgcactttgcaagaagagctatgaagaaaaaacagggtgatgggagagagaatgcttggatgttgaagggaggcctttctgagatggcgacatcttgagctgaataaagaaggatgagaaaggatggggcttgcaaagttctggcttcaaagaattccaggcagagggaacaagagtgaagtctccaggggaagccagcttagtgtttggagactagaaagaaggggtgtgcggctggaagatggtgagtagggacaagtggggtcagactcatccatagactggatggcttatacacaacagaaatttttttctcacagttctagaggctgggaagccttagattaaagcacccgcagattcagtgtctgctgagggcctgcctcctaattcatagatagcacttgatatggtttggctctgtgtccccacccaaatctcaccttgaattataatccccataatctccacatatcaagggtgagaccaggtggaggtaaccagatcatggggggcagtttctggcatgctgttctcacgatagtaagtctcatgagatctggtggttttataagcgtctggcatttcccctgcttgcactcattccctgtcctgctgccctgtgaacatgtgccttccaccataattataagtttcctgaggcctccccagccatgcggaactgtgagtcaattaaacctcgtttctttataaatgacctggtttcaggtatttcttcacagcagcatgagaacggactaatatagcactcttctccctgtaaccacacacagaa

SEQ ID NO: 7171 - DNA, 6000 bp, Homo sapiens
aaggctgaggcaggagaatcgcttgaacgcaggaggcggaggttgcagtgagctgagatcgcaccgctgcactccagcctggtgacagagcgagacttcgtctcaaaataaaaaaataaaaataaaaaaaccagttacctgcagacgtgggccaaggccctcagggctccctgaacaggtgactggacaaaatgaaagcctatctgcaagggactcaaactaatgaggaagaacaaaaacaataaaaaactcaaagcgtttcaagttcagaaacaaagacacgtgagaagataaccacaacagcactgttccagggaacctgtgtccaaccaggactgagtgagaaatcgtgctagctcttagaaacgaggatcatggagccattcattcagagcacatttaccaagcaccctctacaggcaaggcagggttctagagatctgggatcatcagtgaacaaatcaaacattcctgcctagtggcacacttctagaagtggaaaacaaacaataaacataacaaatgtgcaaatcacatgtttggaaaaagtactctggagaaagagtagagcagcggggcatcaggaatgtgtggatggcacgaaacaaggggcaacgtccacaggacgaggccgacctaggagcccaaatgcagaggaagcgtgcactcaggagtcacagagcacgggcagtatcgtgcgcttctcctttctggaaatcacgtgcacatactcacatacgcgtaacgaaacgcacaaaacagacaaggcaagccacaaactgttatacaggtaggaaggaggaagatctgagtgaggatttctgctctatctgcttctgttattttagtgccttcaaagcagcaggtatcacatggaaaaaagttcagaaatcagaaaggtaaggaatagcttggttgtactgagagtcttcccactgttagaagctgtttctccaattctgtcctatgtctgcaagaactctttgtattacacactggtctggaggtacaatgcccgcaacaatgcttcaactccattagctcagtcccagtgactaaaatcacccaaatcatgtgaacagtaaatcaacattcagctttaagcaagtcgtatatagacttctctagatgtttctcttagccgtgcaaatgactggcatacttacaaacttatacttgacacctcatcccaaaactgagctgggatttgagggacaggagatggaaatggcctaaattactttctaattttaaaaccctaattctatgaaaatgatgagtgaactataaagaacacttgtatactgaatatttttatcaagttcagcaccccccagaagtctctaaagtttaaaacactcagcttacacatgagagttattaaaaataaatgtaaatatgggtgatgagaatgttctagaactgactgtggtgctaatgacaaaactcaatgaatatactaaaaaccactggagcatacactttaaatgggtgactgttatatgaattacatcttgtaaagctgttgtaaatgccatgacagggagactggggggaaaaagctattataacgacgtaaaccctcaaaaccttggcgcatgcaaacctcaaaattgcatcttccagaataagaatggccaattcatggtttcaggggttcttcagagcttcaggcctggtcccccagcaattaagggaaaatcaatggttaatataccaaacatttcttttagagagagagaaaaacaaagactccagattgtaaggaatgtttgtcaccgcttcaacatggacggatttctgttgagcctctgctggggagatctggtatatctgggcaccccttactcaggtgcatcaccacacaaatatcccaactgacttcagtgacggctgatggtattccagactgctttaatatcttatgttgagaacacattcatgtattattcatgtatgacttacgtaagttataacttaacagagaagacttgtctaagagcctgcagttcgtcttcatctgcctcctatgtgctggagatacggcaatgagtaagacaggcaggctccctggcctcaaaaggcttacactctaagaggctgagacagcaatactcaaatagacatgcattcatgaggcatccagtgttataaggaaaagcacagcaaggtgaggtgacagggagcttcctgagaaaggatggtcaggagaggccgttctaaaagcacatttgtatcgagggtgaatgattagacaggagcgaccacccacaactcggggctctacgggaggaatggagtaaggccagggggctggggcagtgagcaagtggggatgggtggttctgatggtagtttttgggttttgagtacaacagtcagtaataagatcggaaaggcaggcaagaccagctctaaccaggcagggtgtagactctactaaggcaatgaaaagaccctggagagtttcctccagaagccttccctgaaacccacatcgggctaaatgcttctacccaggagccatctcttaataaaacactgtcttcacccatccgtccctcttcagattgcaaacagcctcctggaaagtgtgtgtatttcatattctttttcttctcggtgcctaacagtgtctggtacaaagtagatagacgccagatacatgcaaaagtaaatgtgctgtatgccagacacagaactaagctctgtccatatacttcaggtgagcaaagagattcctgagcttcagtagctagtccttgatagaaatgagatgaaaacccagctcaggctaggaagtccaggctctttcgtttccattgcctctataatgtaaacagaggtgatgcaaatggttgggagttgtgggggcaaggtggggagggaggtcattaaggtcagtcagttatggtgcagaagatcttttgaaaggggtagatctcgaagcttaaaaaagtggaacggaagggaagggtaagtggggaagtatcagtataaccaaagatccagaagagattcaatttgacttataaacacttcttaatctagaaccaagccctgtgagaacatttatatctcccctaaagaccctcaagagccgaattaaggtctttaaaactccagcacagggctttatacacagcaggagcaaaatgaaattagttcagcctatttaaaagtaagaaaagtcacacttaccatgagctcgtacacacacagaggtggaaattgctcgcttgccaactaggctaaataccctggtagccaacattctgaaagataaaaatgtacaccttctctatgaataaggacaaacagcaaggaattagtcttctttttgccccagagcattttggaatttttttgtttgcttctccccaacgcaaatgatccattctttatcactgtctctgaattcacaaaatgacctaggatgaggtttttcttagtaattggcatgcttttaaggagcttcattataaatcaactgccataatatatacgcgcttcaggtaattaacagaacattggtctttttaaaaaaacaaggagaggccgggcgcggtggctcacgccggtaattccagcactttgggaggccgaggcggacagatcacctgaggtcaggggttcaagaccagcctggccaacatggtgaaatcccgtctctactaacaatacaaaaattagccgggcatggtagtgggcgcccgtaatccccgctacttgggaggctgaggtagaagaatcgcttgaacccgggaggtagagactgcagtgagccgagaccgcaccactgcaccccagcctgggcaaccagagcaagagtccgtctcaaacaaaaaaaggcaagaagaaaaaatgctaacaaggtgactctgaaaaagctagagatcattaaagcactgtgctgccgtgacagactccattcttcagggagcggtggggggaggtgacagctcacagggaccgtggcacgcatcacattcaactgagtgtttaaaacctaataccgcctgtacatagactagaaggggaaattggagaaggctgccaacacagccccgatcaatttccaatccctgaggagagcggaaaacctatgagaccccccctcacccgggccctcctctattcaggcccatcaaccttacacggccccctttaaatcgacccttcggaggactggtgagagtgatgtggggaaataccctccttggggcagaataaacaagcatgacgtcagggctgaacgcccgcgtctagcttctctccttgggcctagcccttgcgtgagcaaacaataggcgccttccaggctggaaagccgagcgccgcccgggagccccgcaaaacccgggaggggttgcacagggaccttttgaaggagcaagggcggaggctgcaggcacagagcgcgggcccgcctccccgcagcctgagccctcggccagcgggcgctccaaggtcagtgcccgaggccggtccgcagccgctgcgagaccgggtaagatggaccgggcacttcggggcggccccccgagcctggagccaccgagcccggagtccccacgggccggcctcaatgtcacctggctccgaggcccattcggtgcttcctgctgaagccgagcggccaggctgcggacgtgcagacttgatggctcccggccccccgacccggcccggcctggcggcgccgcaccggccacctcctgtctcacctgccgccactgcccgccgcgaccgccctctacacccggtgtcccgcgaccggaagagagcaaggccgcgccgcggagcaccacgggatcgaggaagactccgcccgcacccggccgcacggaggtcaccgtggagcggaaaagggtagcgctgcgaacgtcgtaaaatgccgggccgggctgctttccggcaggcgttggagaggctgctttccggcggcgccgggcgagaagcgcgactggagtctggggctgcggcttcccagaggcgcgagtcgcttttccaggagccgaggcccaaacggggccgggcctgaagggtcccccgccagcccgcggccgcgccatcaatcgccgccgcctcgtcccgcttctcggctgaggcgccgcgcggccaggcagcgggtccaggcctcagccgcgcgcccaggggcctccggggccctcccgggtcagcatgcccggggtgaaactgaccacccaggcctactgcaagatggtgctgcacggcgccaagtacccgcactgcgccgtcaacgggctcctggtggccgagaagcagaagccgcgtaaggagcacctccccctgggcggccccggcgcccaccacaccctcttcgtggactgcatccccctcttccacggcaccctggccctcgcccccatgctggaggtggctctcaccctggtaagcgcggaaagggccccttccccttgcaggcagcctggcctcccctcagtcagcagagaggaagctggcccagcggtcgccctccagcaggctcctaggacccgctccctagggttgccgtggccaggaatggggtgatccacgatggcgcttgggtcttggcgctgaataaatagcgtcccgtagtagcagcgactttaaccgtcgtggatgcttttagaggcactttaaggcgacgagttatacgttagtttcctgaaatcagtagcctttgtagaaacaagtcatcgttcacttggtggggattcgacagagtttcccttgaggatttcgagttgcaggaagtgttcacgttgttgggacattaatcgctaggatttggttcttcgcaccttcgcagagccgattccttatctggcaaagtgtaaatgcttctttggctgtcggtactcgggcaccccggagctcagacacttgtagaaaggtagttgcatggtcagatctgtgtgatgcatcttaggcctggctccccttgattgaatgtgcctgagctttgtgtaaagagaatttgttcccgttaat

SEQ ID NO: 7172 - DNA, 6000 bp, Homo sapiens
cccagctactcaggaggctgaggcaggagaatcgcttgaaccaaggaggtggaggttgcagtgggcggagataaagccactgcattccagcctgggcaatggagagactgtctcaaatggaaacaatgacaacaaaaaaaaccactgaaagacacataccaaaatggttacagtggttctacctttcaattgtatgattacagatagttaatttctgctttaatttatttgtttatagggagcatatgttacttttatacttagataaaacatattttagtatttttaaaaacttttcaaataaattggttcactcctgtaatcccggcactttgggaggccgaggcaggcggatcatgaggtcaggagatcgagaccatcctggctaacacactgaaaccccgtttccactaaaaaatacaaaaaaaattagctgggcgtggtggtgggctcctgtagtcccagatactcaggaggctgagacatgagaatggcgtgaatctgggaggcggagcttccagggagctgagatcacgccactgcactccagcccgggcaacagagcgagactcggtctcaaaaaaaacaaaaaaaaacaaaaaaagaatacgccgggctcggtggctcacagctataaccccagcactgtgggaggccgagacgggcagatcacccgaggtcaggagttcaagaccagcctggccaacatggtgaaaccccatctctactaaaaatacaaaaattagctgggtgtggtggcacacacctgtaatcccagctactcaggaggttgaggtgggagaatcgcttgaacctgggagacagaggttgcagtgagctgagatcaagccactgcactccagcctgggagacagagcgagatgccatctcaaaaaaaaaaaaaaaaaaaagaataaatcatactttctggtaagagagtggcacaaaaattcaaatatatatgctagatttaattttatttgtatatatactagagcttaaaagggatctatctcctacaaattgttctcaaagatctgtctacagctacttgccagcctaaggaaaagatagcctttgaaaatattaaacttttggctagttcattctgaaaggcttattatcatttgtaatatcacttaacttagagagcctacttagggctgttactgtatccactaaatgttaactggatttaatttctataaattctttatgcagaagacctggttatctttccatataaaggcataacgttcaaagatggtattcccgtacctatgggtttttcatgagaatgattacacctctaatacacgtataattaaaaatttttgacatcaagtactaactgaaaaagacaccgttcaaattatagaaatagaaaatagtatttaatgggatttgagtagaagggagactcagtagaagaaatgtattacttgcgcaagcaactggcctagctggtggctagcattctttgcagctcttggagtctcccacttacaattttcacaataaaagaatatcacaaagattataattctgggcataactaaaatacatctgaaattatctctttaaaaataattagaacataatttaggtgagtgaaaatgacttgtatcacccgacaatcatctaattatgcagctatgccttgctttgtaataaactagtttactaaaatagctccaaaggagactgaattgtgtttagaccacgaaaggttactatccagtccaattaaaagtcggctgaaaaactaccaccttcagaactaattgcatacttggctatattaccattgtttaacaggctaacaattaagtcatgccagaccaaactatggtaaaacaaaggtgtcttcccttttttttttttttttttttctttttttgagacggagtctcgctctgccgccagggtggagtgcaatggcgcgatctcagctcactgcaacctctgcctccggggttcaagcgattctcctgcctcagcctcccaagtagctgggactacaggcgcatgccaccacgcccggctaatttttttgtattttagagacggggtttcactgtgttagccaggatggtctcaatctcctgacctcgtgatctgcccgcctcggcctcccaaagtgctgggattacaggcgtgagccatcacgcccggtcgacaaaggtgtattcgggtgtattcttacatccgatgcaaccatttattctggcacactccatccatcaggtggtcttgtattaaaaagaaaaaaaattcatcccaatgtatcactacagtcaagagtgagaaaccttggtctgtggtgtcttcactgcctactgtttcacacacatcactcttgtctccttttattcttaccccttagtcatgcagtattagctggccacacatagggcacctccaaacttctaacttccttattttactttaaaatgcctttcctcagctgggcgcggtagctcacgcctgtaatcccagcactttgggaggccgacgcgggcggatcatgaggtcaaggagtctgaaaccagcctgaccaacatggtaaaaacccgtctctactaaaaatacaaaaattagccgggtgtggtggcgggcacctgcagtcccggctactcgggaggctgaggcaggagaatcgcttgaacccgggaggcagaagttgcagtgagccgagatccaccactgcactccagcctgggcgacagagcgagactctgtctcaaaaaaataaaaataaataaagcgtttcctcaagcagaattccgcagcactgatggcagcaatgtacagttcaccttagccttcagtcttccaagtttttttttgttttttgttttttgagacatagtctcactctgtcgcccaggctggaatgcagcggcgtgatcttggctcactacaacctctgccgcctgggttcaagggattctcctgcctcagcctcccgagtagctgggattacaggcgcctgccattgcgcccagctaatttttgtattttcagtagagacgggatttcaccacgttggccaggctggtcttgaacacctgaccttgtgatccgcccgcctcggcctcccaaattgtgggattacaggcgtgagccaccgcgcccggcccagccttcctagttcttgttaacctcctgactagaagagctcccacttcttccctaggtgcttcaaaggttccgcaagctctgcattggaattttccctttttatatagaaaggaccaactcttgattatacggggtgcctggggagtgcagtcgtttgacacgtgtctgggtcaggtcccagctcccattctcaatcaacagttttgctgtcatccgcatcacacattagagcataaaataaacttttatttgtcaaaagtgttctgcataaatgcttaaacaaaatgtggtatagccatacaactgaatattatttggtcataaaaggaatgaaatcctgattcatgctacaacatggatgaactgtgaaaacatgctaagtgaaagaagcctgacacaaaaggccgcatatcatatgtttccatctgaatatacgaaatagtcattaaaggcaaatctagaaagacaaagtagatgaaaggttgcctgtggcggggcctggaaatgggcattgactacaactgggcatcagaggtcttggggtaacggaaatgttctaaaagtggatttggtagtggctgtgctgctgtaaatttactaaaaaccactgaatagtacacttaaaacaggtggattttatggtatgtaaattctacttcaatgaagctcttacattaaaaaataagtataaataataaaagcggattctccagattgaaaaaaaaaaaaatgagaggaattacttctcttctgcaagccctccttttcgtagacatacaattggagaccttgacgttaggagggcttacctacacagttcagactaaaggatgagtctccagaattcaacgcaggtcgtattccactccacgtaatttcgaagtgtcaatcagaatctaataacttaatttgtgtagacaaataggccaagattctcaggggctcaacccaatatgaaaggtaaacatcttaataaaaatactgacgatccacaacggtcttaggtagcgcaaccatgccaaggcgaggcaagatttttaagaagctacaggtttaaaaggcaatctggttctgagagttcgccgaacagaatccccgcatttccaaaaaccagcagcgcaatatgcacagaccgagataaggcaaagaatcgacgtcttttaaacctgacgccagcactgccccggaagcgcacctagaattgagtctgtctggaggctccgggccagagcagggcgtattgtttcactcggtgaatgctcatttcacgtaaagaaaaccaggcaacggaacaagctgccggagcgcgcagacccccgcagggccgcggtacaggcacgctgtgtccaaacaagcgccggaggccccgcgcccacctcccccgacccggcccggcccccgcagccctcgcctcggggcctcggacgcaaccggcacacctgagcgagcgggccgccgccgctaggcggagcgggtcggggaggccgcgcgcgggcggctgacgtacctgcgccgccgggagctcagggccggcgggcccgggataacggcgcctccgcggcgaacacgcctgggcactccattcggggctgtttactcccaactctcgcgagactgggcgaccgggccagcgaggcccacagctgggagcctcagctccgccgacccagcgtgccctgtctgtcccgcgctcccggggcttgcgtgcgcgctctggacgccgtgggcagcgggaccacgccgggaggatggacgaaggtctcgcgacatttgcggcggcgggggccggtggcagggtggaagcggaggggcgtggccagcgagctgccaggcggcgagaacgcgctgggggaacccttggtccgctctgcgcgtcgctctaggatccccgaaaaggagcacgggcgcgaaagcggccaggctgggccaggatctagaaagactgcctggcgcaggctccctgcccccgcgggcctgctgtcatggactcgtggagagctcgcttcccgcgcggacccttcctgcaggggtccacgtccaggcaccggcggctcggacaccccacccccggccgggcacctgccctgggtgccccttaacccgggcggtagctcgttaagatggcgaagtgtccggtccggaacacgcgaaaccccaaatcccgcctgcccgacctcctgacccccggccccacgggacgacagactgggcctcccgacgcgcagcgcgctgccgggacaccggtgcgtgcgaaacggaggacctttgtaacgccacgtgtttgctctttttgaaaaaacaagaataaatgtgttaaactgtctgaaaagcttgccgcctaaaagatgtctgggtgacttagatgctaggatcagtttgttttcaatgtaaatggaccagcccggactccgtacggcactagcaggggactgaaagcgtcttcaggtactgctggtgggcggtgatgcgctacaggccgatcagacagttttgtgtcttttggaacttgacactgcaccacggtaatgctgaactgcaccaatattacagatcacagcgcatcatcttccttcaacatgatttaacacagttgacttaatatggtggataaatgtagaatcacaaattaccataccccacctcaggcttctacttcgtaattttgagcaggttgtttaacctctttgtacctcagcttcttcattacaaaaataggggtactagccaggcggggtggctcgcgcctgtaatcccagcacttggggaggccgaggcagccggatcacttgaggtcagaagtttcagaccagcctggtcaacatgggtgaaacgccggctctaccaaaaatataaaaa

SEQ ID NO: 7173 - DNA, 6000 bp, Homo sapiens
tgccctgggaggagcatagcccagaatggcatgaccgaggtgggcttgagcaccaggcacagctgcacgtgtagttgtggtgagggtgagtgaccaaggttcctgggagctgggaataagcagacgcacccctgacctgtcctctcgccctcagccctggcctctcagccttccttcctcgcagctccaggcacacagccctgtgccacacaccatggcaggggctctgtgcagcagccgtgccccacaagccactctgcagcctccaagtccccagggtgcatggctcaccacaagggcacccacagacccaccgccctgccaggaaggaggcactcctgcccgagccttcctgtctgagccacgctcccgcctgccccaagaaagctgtttggagctggcgttcactgcttgggtgttatacgggttcctggggtgctgcctgtgtgcgtggctctgcgtggctctgcgtggctgtgcgtggtagcagctgacttttaaaggtgtcggtgagaacgtggttcagctgggtcctggccgagcagggggtgaagcccgggagctctgtcctccacctgtattcaggcagggtcttacgtgcccgtttgatgtgtggcggggcatgcgtggtgacggagccacgtggagccaccggagagaggggtggggctccccctcagctagcgccaggctctggctcgcctgcctcgagattcaatcacacggtcatctgttcccaagccaccttgtttcagatgcctgacagaacgcacgaaatacagagagatgacgtaaatatccaaaacgagacgaagtgaggaggagaaattgagaccccctctggacatggcatgtgaggtggacctcaggcctccctggtcccccgagctcctcacagggaaagagcacccctgatccgtaatgaaagtcccactcaccacaggccacaggacacccctggcaggggcacgggagggcctgaacctggatgaagtcgagaccgggctcctctgccctgggtccagccctctttgccctgaccagagttcaggatgtccggggcgcgtcccctgtccctcaggcaggctcctggtgatgtttgcgagtgacgagcgctggatgattttgactccatgtgccccatggggcagggcctcagggcacagagccgtccggagacatccacgcgggcctcagcgacatccggaaaccccgagggtggcctggtgtgcgtgaggaggcacgcggtgtggcgttgtcttccctggcctgcgtgaggaggcacgcggtgtgacgttgtcttccctggcttgccccaccccgaccctagactggttctcgggatggaattgtgagcaaaccagcacccagcctcacagcacagacggtcgcagcccatcatacgtgctgggtgattttacaaggaacactggccaaggcaggaaggaagacgctaggagctggctggactcagtggggtggccaggctagagctgctgcccccagccagggctgactcccaggcctgcctaggtcacacggcaggattttgcagaaaggttcataggctagcttgatgtgcagtggtggcaggtagcagcccctcacccgattggggacatgggtgcacgtgagtgggggcagcgaatgttgctgtggacagaggggccaccccgtgggagagcagcacgtgggcttggagaggtgggcaccagtgcagatggacgtcggtgaaggagaaggcgagagaggcaggaggaagacaccagcacggccaagggagactctgggcgcgtccccgtgttggggccttgggggatgtggtggctgcactccagcctgggtgacagagcaagactctgtcttaaaataaattttaaaattaaagaaaagttacccgttgagcctgttccttttcctgagctgagtcccgtttacaaggagcttccgtgacgcttcccttgtgtggacaaaccttcgctgctcaggttcactgagggtcagccacctgcagatgccatacaagttgcaggaggatgttgtaaatattgtccaaggggctgaccagggctcagggaggagcagtggacgcaggcaggtgagcaggaggcagtccagggggctctgtgaggggcctcgtgtgtcctgctggcctgaggtgagcaggcctaagcaagtggacagccgggcgcctgggacggatgcataggtcgtgccagaggctacacgcggccctgtgactggaggaacgcaagaggtagcaacagggaggggcgccaaggcttccagctgccctgagattgggctgcctgggccacctgtgggtgttggtggcagcagttaggaggcctggaggtgcagagctgcggccaagggccggctgggaactccctcccccgggggtgctctgtgggctggacgccagtgatggtcccaaagcacatgagcgcccggccccacctccaggggcctaaagccgctgcccccgcgagaggttcagcacagtaacggggctgcggctccttcttcagcagagcaggcagagtctggaagaagggcgcctggccggagtcacgcggagacccaagcctcgggcttcccataagacaccgagttctgagagccggtggaagctttgaagttattcataggctttgatctttttaaaagacggctgttggtccctgctggtgaaggatgcgagaggaagtgcgcagtccaggctgtgcggtgcagccgagggcctttgagtggacaagggggttgaattccctcgtgggaccttgtccaagccacatgccttctgcaaagcctcagtttctttgcctgtgaagtggggatgacattccccgctgagggttctgagcgcggcaggttggggatggagctgtgtggttgaggcacacgtgatgtgtgttaccccagtactccgggactccctcggaagcctggagcagaggcactgcctcagagaccagcattatcttcagagcagaaggagcgtccaaccccgagtctgtgaggctctgcagcagagacttggggtgtctgcgagtcaaaaccttgctgacagtttcagagagtcggcctttgggagaccttgtgtccctgtgccgtgactgttgagatgaccccatgggctgtaagcgccttcctatttatgcagcctcacacctgccactcaaaccccacggtgcggtggcatcattctgagccccttcctctcctctgcaaccactgagcatccctgtccccttccgagcgtcctggcctccctgtctcctttccagcgtcccatctgaagctcatccctggggatcctgctgctgctctctgcctcaaagaccccaacaaccgtgagaacaaagccagaactcacccgtgtatttttaaacttcttgtttattttactcatgagtaaagaaagagcattttcattttttttttatgttcagagacagggtctctcgctatgtaggctaggttcgtcttgaactcttggcctcaagcagtcctcccgcctcagcctcccaaagcgctaggattacagacgtgaaccactgcgcccagccgtaataattattttcaaccaaggaaaaatgcctttccttgatttgattaatgtacccatctcttaactatgtgtaacggcagagaggccccccaaatgcctgagatgaattcctgtgtaaaagagctggaggcagattctgtgctgagcaggaggagtgtgtggggccaccactcaccagggagagggggccttggggcctggttccctgggagacacagtgccccctcctgcctgcccagaggccacgctcagggcagagcaggggccaggcctccccacccgctcaccaggtccgcgcctaacatctcccatgtgccctcgagcctcggccacgctgaaggcatcaggaaaacaattggacttacgtttgacggtgcctcgggactcctggaagccggctgcctcggagccccagcccagcgcctcacagtcatgtgcgtccacctggccggctctggccccagggctcggccctccccgggtcctgtccaccagccagcaggacctccacagccccacgctgcgcctgcgcccatcctccagcgtctggcacacccagttggaggtgaaggccgccacgttgttgaggatgagtgagaccagggccaccagcacggccgcggccacgagtctctgcacggtcatcgctgacgccggtgccgccgcttatccggagaaagccaagtcccagtccgcggccgcacgtccagggagagccgacgctgctaggggtggctagaggacatcaccactcatcctcggggcggcgcgggcggaggcccatgggatggtccaggtgtgccgcctctcggcccggccttatcctccttcctgcacctggagcagggccaggcctgtgctgaagctgctcgcctcggggcccatcccagggagcagagggtgggcagcagcaagaacccagggccaggagtgcgccgtcttcccgggaagcggaggccggcctgtgccgcgcgtgcctcttctcgcctgcagcagtggaaaacagagtcactcgggaggccggcagcagtgggagtcgagcccgcgccacactccttagcaccggcctgctgtgagtgccaggctccgggcagggtggccggtgtggagcgggttcacagctcctctgtgctgcctgggcccctgtgtggatgcctccagggcagttggccggtcctggaaagcagagtggctgctgcagggacgcccgtgtgcgcagagctcgccttccctggctctcagcagagaggaaatggttgtttttgagactgtttttggtgagctggaaggcgtagccaaccgcaacaaatagcggccctgccgcggcagccagacaccaacaggatgtgcttcctgatgggaaaggccaggagacttctgaggccctgctccaggcccacctcctgccgcccctccccatcttcctgtcccagaggagaggccagggatgccgggtgcgggacagatccctcgtctcgcctgttgcttttaagcctggtggcccccggggcctggaggctggtactgagcgactattgcctgccctggggacttcacaccccccagccatccagttgcccccaggaccataggtacccccaggaccataggaaccacaagcctccccccgcccgtgtgttccaggcctgcccccgccacgggaatgctgccctcaaaaggggggcagatatcacaggattgctgggaaggggagagacccgtgtgcctggagggagcaagttcacccagacctgcagggccagggacctgtacttggaggacctcggggccagggacctgtacttggagggccttggggccagggacctgtacttggaggacctcggggccagggacctgtacttggaggacctcgaggccaggtcattcttaggtggcaagaagggtaagattctggatgtgctgggtggggctctcagcggggcctgggacagagcgaatgtcacgtggggcctgggccacctctgctattgatgggaacggtcaccccccacagctggggacaggactaggcaggtcaccttgtgagtggtcaggctctcgggcagagcttatgctgccagggagctcagaagcatcttcgtctattctgctcagaattattctgcccagctgggcagacaccacgagagggtctcctactctgtcccatctccagagacccgaaacccagcatgggattcccagcctacccaggctccaaagcttcgtgaatgcaggtgtcccacatccgtgcaaactgttcatgggcacacgcccaagacagtgctgggacagagagtcctgttcccagcctgtggtaacagcagagctttgaccgtttcctgtccttgcactgcccgtgcttgggccctggctcagggcggtcccgagagctgccacttcctgggaccagtctccattca

SEQ ID NO: 7174 - DNA, 6000 bp, Homo sapiens
gcgtggagcctagagcgaggaccaccccaaagaggtgaacggcagggacaggccatcgccgcaaggttctctgcctccatcccggagggcagcccccctcaccttcaactcgatcttctgggatgaggggggcaggtgggcggccacgaaccagtccccgggggccgggtgggaaacgttgacggaggcattgcttctcggtgtggtgctcagcggcaccccgacctggaaggagggctgtaccgcggtgtcgtccgggaagctggtgcccagcgggttgatgaccggaggggcgccggaacggaagtgcctggagacgggagagcagcaccgggttcaggcacagggcttggccaggcgcgggagggtgggcaggcgggcgggcagccacctacacggtgatctccgcgtcggtgcaggcagcgccgctctcccgggagacctgcaggagccagcgtagaagcacagcatctgggggcacgcggaagcggaagagcctggcactgccgtaccagctgtagaaggacagcctctgcggggcctgcgagaagtgctcggacaccagccccacctctgtgaggagaaggaggtgtcagccaggccgggaccctcctccagggccgcagatggggaggacgagtcccccagatggaaagggctggaagcccccggggacccacctggagatcttggcacaccaactctgaccttggcaaaggtcaccgacaccctctggcccctcagccagatcctctgctgtccctccccagatggcctacatcccaccctcctggcatctgggtcttttcacagctgccgcctcactgcagcagcttccaaacaagccgcagggtacctcagcagccatcgccaccctgactgccatcgccacccgcactgccatccccacccgcactgccatcgccaccctgactgccatcgccaccctgactgccatcgccacccgcactgccatccccacccgcactgccatccccacccacactgccatcgccacccgcactgccatcgccacccgcactgccatcgccacccgcactgccatcgccactctgactgccatccccacccgcactgccatcgccaccctgactgccatcgccacccgcactgccatcgccacccacactgccatccccacccgcactgccatcgccacccacactgccatcgccacccgcactgccatcgccactctgactgccatccccacccgcactgccacccggaccccctccaaccttagaagactacactccccatggccaacccaggtcgaagccgaaggacccagcaggtgtcaggaaggagcccccgcccctcatcacagatgccctggatatcaaggcacggtcctcccacctcctctcagcctcccacatctccatccctggatgggttggctgcctgcttgggctatgatgactttggacacggcgagaccggagcccaaattccccttacccagagggagatactgcatgtgggagggacccaggccagaagcctggccagtcatgagaacaaggggacagctgccctctgcgttccaagcgggcaaggctcctaactgtcctcagggaacgcacccacgcctggtgcggggatggagaagggcccgtgggagacatcctgctcatggccccaggcgaggactcaggctctcacccccagccccccgtgccagctccagcctcgtgcccttgcgaccttgggcatccttccctccctgggtcccagccttctcctgggtaggtcagggcggagggcacatccctttgggggcccctccctccgaggttaattaacgacaaaggcttcagaaggaaaagcacagtggacacagcagggggcgggaccctcccctctgctgcagctccccctccccacacactcaggagcgctgcctaggtctcactggagagtggctggctcaggcccaggcccctcctgaggagggagacaggtgagcagcaggctctcctgccagcctcgtgaccctcccatagaggcaccagaagaaacgatacacctgccaatagcagcctgtcggcaaatccaggccaagctccaggggaacctggcgtggcgactgggcaggggctggccaggctccacccacgacgcactccaggctttccaggtgtctgctggccaccaggtcccacccaccaggctgtggcctgataatgtgggcagagaaagctcaagtgctgggagctgaagcaggacagccccccaggaccacggtgtcccggagaaagccggcctctgcgggggcaggcaggggaggccacctgcagcacacacagcccctgggctgctggggcaaagccctcagcccctctggccctggagcgccagcctgagggcacctagaacccagctggtggctgtgaagtttcagcaggtacacagagataagagatctgttcaaggttgtcctaacacccagtccccgactcccagggctcacagcccctccaggcctctcccagggctctgcagcccaagctccctgcccaagttgcccacacataccaggctgttaggggtgctctgagccgaggtgaccacagggtgaggagggccagctacacagccccctgcctgccccacagcccctccacggacacagggctgggtggggaaggtggtaatgcaagtccctggccctgtcctgggaacctgagtgaagaccccagacccacgtcctccaaaccgggacaggcacccatgggagaccctgaccacccacaacgccacagagcacttactcctcggcaggctgggaggagtgaggggctgagccagcacaccaggcctctccactgtccacacacaggggttccatctcccaggaacccctcaccaggcctgagttctgggacaggagaatttcctttgccagtttccaacggagtaaggttttggtatttctgagggtctcactctgtcacccaggctagagtgcagtgccatgaacacggctcaccgcagcctcagcttcctatgtaactggaaccgcaggcttacattaccacacccaggttatttttttttctttctgtctttcttttttttttttgagatggagtctcgctctgttgtccaggctggagtgcaatggagcgacttcggctcaccgcaacctctgcctcccgggttcaagcgattctcctgcctcagcctcccgagtggctgggattacaggcatgcgccaccactgccggctaattttgtattcttagtagagaagggggtttctccatgttggtcaggctggtctcgaactcctgacctcaggtgatccacccgcctcagcctcccaaagtgcgggattgcaggcgtgagcttcgcgcctggccatggagcaatttaatccggggcacggtcctcggggaaaactgcctttcatctctacctgtgccaagctcagaaagcaggaggcacagcccccgaaagaaacaggagctcaaaggagcattatttcaggggcaggggaggggaggggctgggggccgggaagtcggggaacagcaccgcatcagctgccgggcacctgggcacccgcgtggctggggacgtgtgggaacttccagccggccagaaaggacacggcccctccagagtcccaggccacagaggccggggcaagtcctcaccatctcagggtggccaaggcctgacggtctccacacccacgtccctaccccgtggaagggctacgccttctccctggtccagccgcctccttggacctcagtcagggacggggaccctcagggaacagaaatgcaaagggagcccggcgagtttcccaacaagaggggagaggggcgccctttcctcagcccctcttccgccagctgggagtccctcctcccagaagccgggccggcggcaggaagcggccgtaccagggctgggggtcactgcggaagggctggagccatgacgcccacgggcccccgctacagggtctaacaactttctcccggctctgcccctctctcaggccggacccggccggtgagctcacggcccagccactcctcccagctggagtcccgggcagagtcccctgggcccctccacttccccgcgccgggcgcgccggacctgggcgctctgggaggaggagggaggggagggggcgctccaggggccgatgtggcccaaccccgatcgggggaccgaggaggaagcgcggggtcccgtccgcctcgacccctaggacacgaagcgccccaaagggccactgtgcacccccaacccgcggcggggacccccaaccccgcgccggcgccagatgagcgcacaggtgcgcccggggtgtcacaatcccgccccgcccgcagccccggccccacgcccccgatggcgcccgcgcctcccgctcaccgctcttcccgctgtagccggcggaggcaggcgggggccgggcaagcagcagcagcagcagcggccccgccaccaccgcggccaccgcctcgcccccggtcccggtgccagcccggcccatggctccgcgctcggcccggcgctacccggcccgcgtcccgcgccgccggcccccgccgccgcccgggcagcctctgccgcctccgcctctgccgcctccgcctctgcccccggcgcccatggcccggccggtccccgccgccgtcgccccgggcacttccgcccgcaggccccgccccgcaggccgagccgggaaggcgagggcggggtcggggggcgggaccggggggggcgcggacgccggggggaggggtcacgtggggcgccggtaggggggaggggtcacgtggggcgcgcgggggacggaccggggcgcgcgcggtccggggggacgctggagggagggcgcgggatggagggatcgcgggggtcccaggacggagaggtcgcgccgggcgcgctcggaacacgcaggaaattctccccgaggcgtgggctccgcggggcttccccgccggttcgctgagtcccagctccgctcggccgggacctccgtggcaggctcggggagcccgcggggggcagaggcgccgacctccgcctgggaccgagaggaacccgcgccctgccctgccccgcccggcgcgcgtgggcctgagtcaggcgcctcagcacggggacccccgggccggccttcacgccgcagagccgctgcaggtgcgtgtcagatccacgcttttatgcacagacgagaaggctgcttgtgtttagggactgtagtacccgatcggggtggcggttcacacgggtgcgtggcatcaactcccggcgctttgcacctggatggattcccaccatgtaagatttgagccgaaaaaaggaagcgataaagcctagaaaactcggggaagctttttccgtcttagggccaagtcggcttttccaagcgtggcacagagtccagaagttccgccgcgtcgtgggtgggaggggggtgggggcgtctgcaaagccaaactgcataagcgaagtccaaaagacgagcccccgactgggaggtgggggacacagcttgcagctcacaccgcagagctcaccttaataagactagtaacagtgcagtaataaacagctctaaatcaatcacagaaacgctcccctagaaaatactgaaggacagctgccagggatacgctgatcctcctccctcagcgcagaaatgcaaattaaaaactactccagctactccggaggctgaggccagagaatcgcctgaacccgggaagcggaggttgcagtgagccgagatcgcgccaccgcactccagcctgggcgacagagcgagactccgtctcaaaaaacaaaaacacaaaaacaaaaacaaaaacaaaaaacaaaacactaaagtgtccttcccaggatgtgagggtaaaaagtttaaaaaaaaaaaaaattaaaggaaaaccccattaaagtgacttctttttcctttcacctaacacattggcaaataaa

SEQ ID NO: 7175 - DNA, 6000 bp, Homo sapiens; identical to SEQ ID NO: 1882

SEQ ID NO: 7176 - DNA, 6000 bp, Homo sapiens
gagatcgaaaccatcctggctaacatggcaaaaccccgtctctactaaaaatacaaaaaattagctgggtgtggtggtgggcgcctgtagtctcagctacttgggaggctgaggcagaagaatggtgtgaacccgggaggtggaggttgccgtgagccaagattgagccgctgcactccagcctgggtgacagagtgagactctgtctcaaaaaacaaaaaaaaaatcgctgtcatcagctcatctttctcagcctcaaaaacccaatcccaggctcatcccacctcccatcttgtccatcttacttcttacagctttgtgactctgccccctgaagcttctggaagatctcgggtggcagaaaaggagagagctttcctccttcatcggagtatacacggcggtgtcggccggcaggctggggaatgggagcagctgcaggcatggttggcttcaggcgtgttttccctgcaagccatgggtaaccaggggtcaagcggtgggccacatcccacagaggagatgcgggcttgggggatgccccaggagagccgcctactgcaggagacccaccaagcttggcggccgtcgactgggccctctccagacactgctgtgctagcttcagcatcttggaggtgtcggggggcacagtttccccagcttctgggggagggacaagaaggctggtcacagtcggctctaccactgttacttactgctgagataaaatgaggcaacggaaaaggcaggcaagcccactgcccccctcagcacccccactgaccccgggcaagcccactgcccccccatcccctcactgaccctgggcaagcccactgcccccccatcccctcaccccgggtaagcccactgcccctcccgtcccccaactgactgaccctaggcaagcccactgcccccccatcccctcaccccgggtaagcccactgccccttccaccccccactgaccccgggcaagccgactattcctcatggaccccaggcaaggcccctgcccccaccatggaccccaggcaagtccccccacccacgcatttctaatcatctgccctggttttgcctcctgagtctgctaaggctgtgggcccctcatcgaggcccgtcacagcctcgaccctaaacaggcctttagtgctcactcagcttcacttgcaactgcaggcctctgggaagtggccgttttacagagacaaggacgtgctgaggggatcgcctcacccatctcccaccggctgtgtccccaaagtcctgccttcccgtagcttggcatggagcacctctgcgcgaccatggacctgctcacacagcccttctgcgcgccgtgggagctgcctctctgtgactcgcccctggacccaccgccccagcgcctgacccacctccctgctgcccttcacagaaaacttctcatagactcccattttctcatcccgccccgatttagcccccgactccccccggaaactgcccttacccgtccccaccttgccagacacggtgggccactggagttcctctgtcttctgggactttgctctccccaggggatcctctgccactcctccacccaactcctcaatcttggagcgccagagctcagccgagctcaccggctccctagggagctggggcaactgttagctccccctgacctgtgtgatcctacgtccagtggctgccccgacctctgtgatcccacgtccaggggctcccccgacctctgtgatcccacgtccagtggctcccccgacctctgtgctcccacgtccagtggctcccccgacctctgtgctcccacgtccagtggctcccccgacctctgtgctcccacgtccagtgggtccccctgacctctgtgatcccacgtccagtggctccccctgacctctgtgctctatgtccagtggctccccctgacctctgtgatcctttgtgcagcggctgctggcctctcaaacttaatgtgttcattgcggaacttgctattcctctccttgccagtttgctcctgccccatctgcctcctgcaagtctgctctgttccaccttcaggacgcaccccgaggccgtttactgctcccatcctgggtggtctggccactgccatcctcagtcctcacctgaggctccactcccaggctgtcctctccctcaaagctcaaagtctcttcaagtttccctgcacaccagaacggccccagttccacccaaggcatgcacacagccccaccccgcccactcctatttcagggcctttgcacaccccacagctggaatgctgccccacgtctgtgccgctcactggagccagtgtcttgccacaccccagtctccatcttcttatccacaacgctggtcccttcctgccactatatcacactgagtgtgggctggtccacctactacaaatggtcaggctagaaggatacaagagacccccgccgaagcctggcacccatcaagggctaggatgcccacaatttgtccagcatggaggaagcagcagggctcagccatgcctttttctttttcttttcttttttttttttttgagacggagtttcgctcttgttccaggctggagtacaatggggtgatctcggctcactgcaacctctgctcccgggttcaagcaattctcctgcctcagcctcccgagtagctgggactacagacacccgccaccaggcccagctgattttttagatttttagtagagacggggtttcaccatgttagccaggatggtttcgatctcctgacctcaggtgatagcccgcctctgcctcccacagtgctgggattacaggcgtgagccaccgcgcccggctggctgagccgtacctttagtggtttccacttcttctagtaacacctgggagatatagtggatgctcctcaggtattccgtgtatgcctcctgtgtccaggaaagagaaagagtggggtcaggccagtggagggaagtgactccattattccggccaggtgcccttgtgggataagcaaggaacaccaccacctgcttatctctgagatacacccagagacattgagcctgcggtggttagctgcagccggaacacggttttctgcgcagggcacaggcagcatcgctgctctccagacttggaaaagacatcaggacctgagagagagagagagccagggacgagctggacctcattttctcctctgactgcctttctctccagcacaggaactgatattctcattcagtgggcctggggaagtgacctcagcagtttgctgtcatttttcattctatgcaatgtttccttcttgtgcaactcaagggtgattcattcagtggcttaaaaaaatacttttctgagaggataaagggagtgatactggaagttttcaaatcacttcccggtttaagttccgagaaatccctttcccagaacctgcgagttacgtatttccagtgcacacaggagcctagaactgttacctttcaaggctgtgtgacccctctgacaaggcacaggtcattggaaccacagaatggtggtttgttttgttttgttgagacagagtctcactctgtcgcccaggctggagtgcagtggcaggatctcgagtcactgcaacctccgcctcctgggttcaagtgattctcatccctcagcctcccaaggagctaggattacaggtgtgcaccgccacacccagctaatttttgtatttttagtagagacggggtttcaccacgttggccaggctggtctcaaactcctcacctcaggtgatccaccgcctgggcctcccaaagtgtcaggattacaggcgtgaaccacagcgcccagcaatatgctatgtttttttgttttatccctagctgttaagtttcctatctttaagtctatgcctcagagagaaagacgaaatataatccaggcaggatttctgacttgcgggggcacctgctgccctaaaaaccaacttggggaaagcagcagattcaggaacgaggcttctcctaggcacaggcaggctccttccctccttgggcagccgggtgtggctgggccagcttctctacctggtcgccaaccttagattcggccccatctcaggaacgggccacacccctccggcctgcttttccttcctaagacgactgcaaacagcatcacaaatgagcaggtatgtggccttctctgcatgccgtcccctgtggcaaccggattaaatctaccatctctgcccagaaaaatgcacgaacgcacggacctgcccgtcactcggattttggaaggtggcctggcggaccctcctgctacatctcctctacaggtggagcccaggctgtgatgcaccggctcagcgagcggagtggaaagccaaggtccgcaggatctgagctgtccaaggtcactgcacgcccggctgcgccccgcccccgtcctcgcccgggaaccgcggcccgggatcccggctggcgcccgctcccaagtctccagcccgagccggccccgtcctcgccctccccgggcgggggtccctccaggggccaccctcagcggccaagccccgcccccgccccgcctcacccggggccggttgccggtgtccagctcgatggccccgttggcaagcttcatggcgctctgcagcggcttcaccgtgccgtccccggccgcagcggccatggcgccgagcgggggaggcggcggcggtagccgaggggctggacgggcgaccggaggcccggaacgcagccggcgctggtgctggagccgcccgagcagcggaccgcaggaagggacgcggccgcacttccggcgacgggccccctccgcgcgtactgcgggccccacgggtgttagtggcgggggcggcagagtccgggtgggttgtcgcgacggagccgggcctcttcgccgtcttgagacggggctggcgagaagggcccctcacggagttgccatgggcgtctaaccgcggcagccaggcccctctctacgtgagaccccggcccccctcccctttctgcagcccgcccgccacctgcgcgccgcgtggcctccgccggcgcctgcccgccccgcgcctccgtctcccacggtaagaggcggtgagggccgcgtcgcctctccctggaggactcgtcgtgaggtgtcggcgagcccctccgcccaccgccccgccccaggccagcgctccattggcgacagaggcgggcacggccgccctcgggcccgagaggggagcggtacgagcgggggcgctggcaccgcgggtggaacctcggccggcggggtcccgcccctggcccctggcccgccccgcccgcctcgctttgcttctcgctccgcccctcccccgccccgcctcgcttccagcgcgccgagcggagcctaacgccgggtcctctaggaacctcgggccgggcagcacccgcgggattctgctggcgtcctccgctgccatgaagcgggaccggctgggccgcttcctgtctcctgggtcgtcccgacagtgcggggcctcggacggcggcggcggcgtcagccggactcggggccgcccttcccttagcggtgggccgagggtggacggggcgacggcgcggcgcgcctggggcccggtggggtcctgcggggacgcgggcgaggacggcgcggacgaggcaggtgggtccgcggcccgggcgtggcgggttggggtcgcggcaggggttgctcgtgggaggagccgcactgacgcccggaagccggcgcggcctctcctccacccggccaagggcgtagcggactcggggctgcgtcgggataggcgctgggcggccggctcggttttcctcgcgctccgtgacgccggcgtcgccggcccggcctccccggccgcgggctcggccagaagggacccggcgtgaggagcgctgtcaccgcgggcaggtcgccctggggtgcccgcgcgtgggaatcgccctcccctgcttcgt

SEQ ID NO: 7177 - DNA, 6000 bp, Homo sapiens
ttgtgtagacatactctattcctggagtcctatccacaaaggtttgtaaaatgagctcaagaaaacaaaatcgtggtctcagagaaagagctaaaggaaagaatatcacttttaaaaaatcagcagctaagctaagccttctatcttccctactccctacagtactaaaacttttataaatatacaatgtacacaaatgtcaagaaaagttaatttaccaaatttacactatttgaggtttaaaaaaaaaaaaacacaaactcactctagcattttttttttttggctctgtgtctgagacccctgatctacaaacttaaaaataaaactactcataaattcacaaaataggtattcaatgacttggcaatttccaaacatatttaataattacaccctcttcatttttgaaattcgagtaatacagcatacaaagtacagcttacaaaacgttctcattgtcctctgggccaacatatttaatttaacgtactgccgcccagctccaccgtcccacagtctccaaggacagagctcacaacacctgggccctaaaaatgccaaggtggcaagcagggggttacacccacagccccgtccactgacaccttcagactcaagagcgagtgccaccgccctaaacggaaagacactcatcacggcagcatctttcaagtgaacagaaagtgtagtttctgaccttgttaacatagtccttaaagtgctctaggttaggggaattctcgggtgaaaatagttttcgtctacatccataaaatcttcaacagcaaagttagtaaaataaagaaaaatcagaagaaagatgatgttcccttgccagagaacaaatacataaaagatacaggagctcagatcacaagccagagaaagagaatgccaactggacacataggatgatctcacaccaacgacctatgcaggccctacctcaaccactggacgtctctgactgacactattacttctgccgtctctgattgaaactattacttctgccatctctgattggaactattaattacttcttccgaggattccctttcctgaggcttttaactgtttaagtatgcagtgtgtggggaccacaaaatacaatacagcttcacaaaagcaggcttttaaaaaaaatcagtgttattttctctacatacttccacaacagatgttcccctcaatcctgaagattttagtaaaacataaggactgtttaaaaaggaggaagtgggggaagaaatgtagcagattacttaaaatctttctttttcgtcctacttattttaatatcattttccagatctcaaagacttttgtcctatattagaaaaaacaagcagcccagtaaaaacatcaagaatagcagtaaggagcttcaaaccagggaccaggcaccagatccaaacctgagaggatgagggaggggaataccagctctccggcaggtacgtttctcccttccaaatcacctggtggctggagaagctcaatatgaagctcttcacttaaggcaaatactatgataataaaatatccttaaacaaatgatggctgaaagctgaaaatgcaaactttttttaaaaaaaaaaaaagacctagataaaagacagtgtgtactcagaggtaagtaactccgtctaattctccagagacctgcaggactgcgccgacttcctatccctattttgaggataagcaaagtgaggcctagagaggagaaagattttattctccacgttttcgcaaaaagggcagagagaaacatttggatgggacttcagggtgaccaaatgaatgcaaaggcaatttccttaagtgctaaacagtgctgaatgctgaagggctccatacccttacattcaccggacgtgcccccacatttcagccaaccagtggttatgcacgttcaaagttctccttccttctaaaggtcgcgtctaggtcatctctgcacagcgtccctttctgcagtgtgaacagatctgtgatatttgacccgctgaaagaaaagtcacactgaccctgagatccccccatggtaaggcattctgagatacctgagctgtctgcagacactgaggctggaagcttttttttttaatttaatacaatcaggatcagggaggggggatgccgaggtaaagcagtgcacatacctttcaactggtcagcaaccacgctctggcccagccgttcaataactttcccatcttccatttcgtaccggtcatctaagtattttgcggtggcctcagaaatgtgaactttgccggccactcccagctgctccatgagattggccaggttcacatcgttggaccacacgtcaaatttaaacctcctcatgcccaggatgccgcaaaggacggtgcccgtgtgcaccccgactctcatgttcaccatctccttcttctcctggcagaactgctcgatggccttgatcatgcccaggcccatctcgatgcagcagtaggcatggtcggcccggggctcgggacagcccgccacgcagtagtaacagtctcccagggtgctgattttctcacacttggtctcctcacacaggcggtcgaagcgaccgaacagatcgttcaggagacccaccagggcgtgggcagacttgttggcactcatcttggtgaagcccacgatatctgcaaataaaatactgacttcttcgatctgctgcatcttaaaagggcggaaggctataggagctttttggatggaagactttttcttcctgttcttggggctcgaggtggcatgcctcttgacagaattctcactctcctcatctccctgcttcattaagtcatcggctatgattcttggcatcacggaatgaatcatcctctctttgagggctttttccacttccaggtccttcccgtgcataatggattgccccaccttgaggaaggtgctcctggacctcacctgggacatgacgaacaggtggaccccgatggcgtggatgcagccgtggagcagccccctgctcagcagctcccagtgcagggccccggctccgggcgaggggaagcaggcttcatcccggaaatggtagccaaaggtctcgaaaaggacagagtaggccacccccagacacaaactcaggtacaaaggtaagtgcatgacggtatagagcaaaaagagcacttcgatgcacatggagaagctccccacttgagataagcaagtatctgtgggccgggctgtggccgtaaggttggagctgtcgccgcgtcctgagacaggcgtcaagacctggaactgcgcagccagggtcagggcgaacaccagcagggtgagagccagcgaggtccacgcgtaatgccgggcgtacagcttggtgaaggtaaacagaaagaagcccacacacaccaggaggaagcacagcgcgggggcgaccatgacgatcagtctggatctcatgtggaccgcaaaatagatgctccacagaaggcaggcgaagccgatgtagaagagcgcataccggaaccggcgctgggtctgcgggaagcagcgctccaggcaggcctcctccaggttcaccgagtcgaacttggggtcccaccagcggctggaggccctctcgaacagctggggcagcttcttctgcctgcgcagccggcctccgccgcccactcgccgggggacgcccccggagtccccagagctgctgcagctagaggagatgctgtatttgcagtgcttggggtggctgttggaggacagctgcttggggttgatcttgacgcgcacgctgttgctgtccccgctggagtcgcagctcacctcggtgctgtggtgatgcagcagctgctggtggggtggggaagccatgttgtcgagtcccggggcctgccccggccggggtcaccagtacctgccagcaaaacggggagagttagcggcgctcccacctaggcatgcacgcctagaggcccgggacctgctcctgtcctaaggggcggctccagcacgcgacctggacaggcaccatctgttcctgtggttcccggctcagcggtgctcccaccgcccccaccgcccccaccttcgaggcgcacgagaaccgctcgggacggacctagaacgcccgggggtccccgccgcgtggccgccgtggctccgggaccgctttgctcgctcgccttccgcgcctctcgccccgagggtggcctccgcgccgcgcggcttctcctcctcgcgcgctcgcctcctccagctgcggctccggagggaagttcagaccttgagcgctcccagccccgcgagccgcctgcgcacaaacaactccgctggcggcgcggagccctccatcctgcaggagccgcgctccgatgcgtcaaaggcggcgcgcggccggccccgggcccggaccccgacccggagcagcgagcttcggcgggcgcccccggctcgcgctccccggccgccccccgcgctccgggccggccctgcccgcggcggcgggcgctgggggtgggggcgccccgggctgcgagtgcgcggagcccgtcggcgcggcccgtctagtggggcctgcttccccccgagtgcgccgccgctcccgccgcggccgcagctgtcccgggaccgagcgcgtggaaccacggacgcgggcccctcgccgggcggcggtgcagacgctgccgcagagccgggctcccgcgacgccggccgggacgcccgcccgcccgcgcccacgccgggggccgcctccccgagctagagatgcggccgccgccgcgcccgccgccgtgtcccccgcggccgctgcctcatgtcggaagagctgccgccgccaccatctccggcccctgccccgcccgctgtcactgacagacgcgcgcccgcgccgcccctcgcccagccgcagcgcgcacgcgcggcccgcgctcgccgccaccgcctcctggccccggacacgcgcacgggccgcgcgccgccccgccttggtgcgcgcgctgggctggggctgcggggcggggcggggcggggcggggcgcgcgctcggctccgccccccgccccgggcggcgccgcttctaggcggcgggctgtggccgctgtccgcgctccgggcgctgtgggcccgccctccctcggcgtcccagaggccgcgcgccgcccggggtcccgaccctgcggagagacctgaaggcgcctgccgtggaagaagccgctggccgcaacgtttgggaaatcaaaatgttgccttcccactcggcacgcctttgggataaatcgaagtttccaaccgttggatttccctcccgggaggctccccttgctctgtaagcaatgaatgcgggccccggggcactcggcctgccctggacctgctcacggggcgaccttcacgggcctagcctccaaagctgggcccaccgacgaccacgttcccccgccccaggggtagtttaccttgctgtccttgagcccttctccccctcctcatgaactactgcttttccttttacacaaatgagactttcaaaggagtccgcgtcccataatggcagttgtgcattggcctccataaacattgccacgtgtaaataaaatcctattctctctagcatgcagatcccgaccccttctccccacactccacagtgcctcctgccagtcacggggctctcttccatcccctccctcgcctcccaggcccagcgccggggcccacaccaggtctcactgttgaattagaaaataaaagtaaaatgtgatctgtccatgcaatggaatattattcggctacaaaaaggaatggagcaccgatgcatgctgcagtgtggaggaacccgggaaacgttatgctagtgaaagaagccaaacaaaaaaggccacatagcgtatgattccatccagatgaaatgtctcgaattggcaaatccgtagaggcgacacagattggaggttgccaggtgctaggggaggaagataagcagcttggggtttcgttttaggatga

SEQ ID NO: 7178 - DNA, 6000 bp, Homo sapiens; identical to SEQ ID NO: 1897

SEQ ID NO: 7179 - DNA, 6000 bp, Homo sapiens
tgaaggacagcccaaagtacatgcactggcccagcagagagtccaggtggccgcctatgccccggtaaaggtcggtctccagcacctgcaggaattgtgagaccttctgtagcacccagccatggaagatggcactctcattcacagtgtgctcacccatggcagggggcagcagtgggtcctcgtctgagaagatggcacggtactgggtgatgatatcaaagagatggacacgggaggcctcgatggtttttgtaatatggaaatagggatcatcattaggaatggcagtcaggatggaccggagccaagcatctcgggcctgaagaaacttcaccctcaactcagcctcagtgaagacgtccatgcgccgcaggtagccaatgacacggaggcaggcaggaagctggatgttggtcctcagttgctggatcagctggctcagcatcagctgcatggactggcgcacttcgttcacgatgccctgacaatacacagagagagtcacactgcgctgggaaggatgctctctagaacccattcccctaactctgaagactgcagaccaacattcccatggctttcctgaaatgtgaagtaatttcctaaagctgatgcctgtaggttcaccaacaaagatcaggttagttaactctcttgcttaaaaagcttaaaacctggccaggtgcagtggctcaaacctgtaatcccagcaccgtgggcaggcaggtcacttgaggtcaggagtttgagaccaatctggccaacatgtgaaacctcgtctctactaaaaatataaaaatcaggtgggtgtggtggtgcaggcctgtaatcccggttactcgggaggcagaggcaggagaatcacttgaacccgggagataaaggttgcagtgagccaaggtcgcaccactgcactccagcctgggggacagagcgagactctgtctcaaaaaaaaaaaagaaaaaaaaaaaagcttaaaatcctccagtgacttcccactgcaatcaagaaaattccaaccacttgttgggacttacactggtggccctacctggctctccatcttcacctgcttcctagtgctctcccgctgctacaatccattaaccctggctgcctctgtatcccttaaacacctcaatttctgcccacttcagccctctctacttgttcttcacactttctggtttgctctctccccagatctttgtgggctggcacctccttctcatttaggtctcagcttaaatgttacctccctagaagagtccttcttgatcaccctacctaaagaaacctaccctagactcccttaccccattccctgtttttttcttcagacaccactatctgaaatgatatcatttctttgtcaattatcagacttcccattagcacgtaagctgcatgagagccaggaccactttattcacactgtatccccagcatatagagcagtgcttggcacatgattaatatgtattttgaataaatgaatgttttctgttcaggcatacctggctggcagaaactgatgtgaaacatgcaagagtttctacctaaagcttcagtcctgaccacagaataaatgattacaagaacattactttgagtcctctctgggcaaggtggctacctggatgacagggatggaagagtatttcctctccagtcggcgtacgtaggctgcaagctccagggcctcttcataataactgttccggacacaggtgtccatgagctgaggaatctccagtatttccaaaatttctgtgtgccggtttagggtcaggctattcatccggcggttggagctgatctcctcggcttccttcacaaagttcctagtaataatcagaagaatgttgatccttcactgctctgtacccaaaccttagctacagttaccaagtacctgctatgaacattgggctggatgatctatctgatttattcctcacaccccacctataaggtaagtattattacaattgaggaaatttttaatcccagagaggttaagcaacttgtccaaaaacatacaattaataaatctaacagatggagatccagatatgccacttgctggctgtggcaaggtacttggcctctctgaacctatttcctcattagtaaaacggtatatagggccaggcgcagtggctcacgcctgtaatcccagcactttgggaggctgaggtgggcggatcacttgaggccaggagttcaagtgaaaccccatctctactaaaaatacaaaaaattagccaggcatggtggtgcgcgcctgtagtcccagctactcaggaggctgaggcaggagaatcacttgaacccaggaggtggaggttgcggtgagcagagatggcgccactgcactgcagcctggccaacaaagcaagactccgtctcaaaaaaaaaaaaaaaaaaagtatataggaccctcctcataagggtgtaagaactaaatgagatgatgtgtgtgaagcatttaacatagaacttgaaacagagcgaatgcgtcaaagtaaaaatagtaaaagagacacagttaaatatttaacagtagctatcattattttcaaaatgaagcactaactgcctagaatccacaatctttcccctcaggtcttcatcttctcctatgctaatgttcaaccatagttcctgccacagtctactttcaacacttctccatatttgcagagacctgctttatcaagtcccctatctattctggagcatggaagggtacaaaagctgctgtcaaatatccaaaggctcaaaagaaaaattaaactttaatcatgaaaggctggaaggcagaactagggataatggagacagaatatgactcacaaaggacttttttttttttttttgagacggagtcttgctctgtcaccaggctggagtgcagtggcacgcatcatcttggctcactgcaacctccgcttctcaggttcaagtaattctcctgcctcagcctcccgagtagctgggactacaagcgcgtgccaccacgcccagctaattgtatttttagtagacatgggggtttcagcatgttagccaggatggcctcgatctcttgacctcgtgatccgcctgccttggcctctcaaagtgctgggattacaggtgtgagccaccgcacccagcctttttttctttttttaagagagtttcactttgtcacccagtctggaatgcagtggcacaatcacagcccaccgcagcctcgacctcccaaactggagtgcggtggcacaatcatggctcactgcagcctcaatctcccgggcccaactgacccccccacctcaacctcctgtgtacctgggactacaggcgcacgccaccacgaccagctaattttttattttatagagacagggttttgccatgttggccaggctgctctcgaactcctgggttcaagcctcaggctcccaaagtgctgggattacaggctgagccaccacatccagccatccaaatggagagactttttgatatctgatgccctcaaatgcgaggatttccttgtcaccttcccgtcaatggaagttttgaagcagatgacctccggtccacgctttcgtataaaataagtatataaatgtgcacatatattcagctcacacctataatgttaactgtgtcagacccgataataagagctttgcatgaatcctttttctttgtgcccacaactgcccttcgagggagggacgtgcttctgggtaaccagttctgaattcgaaacctcctagctgtgtccttggacgtcactaatctctgtcttgacttgctcatatgtaaaatggaaataacagggctgggcgcagtggattatgcctgtaatcccagcgctttgggaggccgaggcggacagatcacgacatcaaaagatcgagaccatcccagccaacatgctgaaaccccgtctctactaaaaatccaaaaaaattagctgggcgtggtggcgcgcgcctatggtccctgctactcaggaggctgaggcaggagaatcgcttgaacccaggaggcagaggtaggttgcagcgagccgagatctcgccactgcactccagcctggcgacagggcgagactccgtctcaaaaaagataaaaaaggaataacagtacctatctcgaaggctgttgtgaggtttaaatggattaataaagcgctcagcagagaacctggaacgtggtaaacgctttatgtgttagttatttctaccatcgtaaatgtcagcttttacagttataaaacccctttagcgccaggcgcgtcgcacctgcagctctgctggaagctgggcaaacggtcgagcaggcggccgagcgacgcctccacgtcgccaaacaggcggtggatgcgctcggtgcactcggcgccgcggatgaaggtcttgtagttagcgaaggccaagtcgcgcgtctgctgcagcagctgcgcccgctcctccgccaggcgctcgggctcgcgccgcagccgctccagccccgagccgctcaactcccggaggtagcggcccacatcgggccgctcgcgccactgggcctcggggaagcggtcccggaacagcgacgccaggagcccttcatcctccacctcgccgagagccgctgctgtggccgtggctaccgatgggatagtcgccgcggtcgccatcttcccagcaacaacgtcacttcccttccggaccacaaggggcgctgactccgaacttaggacaggaagaaacaggcacatttccggtctctatgctttctcatccggccggcttgctttcccctgcggtcgtccagactattgggcgctagcgagacgaactattggtacggggctagagaggaaggctttgggattgccggggagcagcgagcgaccgacttccgtttccagttaccaaggcacgaggatccggtgttccaacccagggggaaaaatgcggcctttgactgaagaggagacccgtgtcatgtttgagaagatagcgaaatagtaggagcgcgcggggcggacgcgggagtgtgtgggtgtggtggccaagggtggagtgggggcgcggtgccggagaccggttcgttcgggcgcggtctccagtcctctttttgccctcagcattggggagaatcttcaactgctggtggaccggcccgatggcacctactgtttccgtctgcacaacgaccgggtgtactatgtgaggtgaggcggggccgggcaggcagcatggacccaggggagaggggtcctgggtcccacgagcctccttcatccgcaaccttgctccccctttacccttttagtgagaagattatgaagctggccgccaatatttccggggacaagctggtgtcgctggggacctgctttggaaaattcactaaaacccacaagtttcggttgcacgtcacagctctggattaccttgcaccttatgccaaggtttgtggggcggtttccaattctgccacgggcgatgaagtcaaggattaggcagattgtccggcagcttctctcccacagagtccctgacagtgtgcttggaggagtttcagcacatggagatgtgtagaggtcttgcagcttgagcatggtcagggctatgggataggaatgctatgtggctgcgtagggttagttttctccagcgaagtagaagagcctagggagacccagctagagatcagaaagcaaataagtggcagcaatgaagacaccggggtccagaaaaagagctgttaacctggccatggaggatgatccttgtagagttgagaaaataactttttctatttttttctttttctttcttgctctgttttttcttttcatttctctttctctttcttcctgacacagtttcactctgtcgcccaggctagagtgcagtggtgcgatctcactgcagcctccactttccagtttccagtgattcttgtgcctcagtagctgggattacaggcatgtgccacca

SEQ ID NO: 7180 - DNA, 6000 bp, Homo sapiens
gaggccgagctaccgtgttggaagctcaaggcagctcatctctgattctgaacagtgctccttaagccctcccaaccgccttcctttggcctggatgcagctccagaggtttgtgttatccccgcccagttctgagggtcttggtgcagggagttgggctgggaagtgggagttagagaggaaggcctgtaaggaaaatggtcgctgttccctcagtcttccttgcagtctttattgttttattttgtttttaaaagatggggatcttgctatgctgcccaggctggtctcgaactcctggtctcaagcgatcctcccaccttggcctcccaaagctctggggtgacaggcgtgagcccccgtgcccagcctccttgcagtccagacagctgactcaggctggggaggaaccagggcaggcaccctgagaggtggtctcagtggggtaggtggtccaccagcctgtgtcggagaatcagactccttaagttcacggtcttcccagacgtctggttttgcctgctccatgaatgatacatcaagacactgaggcccagagggtggagaggatgtgtccacagtggcagagggagcagggctcagtggcattggagcaagccttctggcacccactcagggcctggctcccagagcaccgggtctcagtcactggggcttaggccggcccagacgggcttgcagctcctgcatcatgccagggtgcgcgaggccaaacctggaggcggaagtcaggcccgtgagaacaggttcccaggtgcccgcggtctcttccccaccccagctgagttgccctgtgcctacccgtgtcccaggggccttctcctggctggcaccggggtcccatcatgcctcagagggcttggctccaggggttcctccagctggaggggtctctgctcaggagctgacagctcctcctcaggagggttgggggctgggggctcctcctgctgctcccaggccggagtccgacgaaaagagggccgggagcgacgctgtgaggagcttctcgagaggtgcacgcgactccttgggacagagacgtctaggagggacccggggagcggggcctgcaggaaagggggcacagaggaccatggggccggcttcgggattccactcgttccccccgagaccccaccaagagccctcacctcgctccagctgttggcagcacctcctctggcactgcccatggcctcagccgtctcggcttccccgactgactccggcgcagcttctgcaggggcctggtgtgttggctgctcctcctggcccctgacatgttccaggctttctggctcagtctccttggcctctgccctccggcccccggtcaccatgagaccctctgcatcaaggagccttggtgcctctccctcagggtggtagtccccacaccgcccctcactgtcttccctctgttctctctcctgccatccaacagcctcttcttccaacagcgtccacttttctagaagccccccagcctccaccatggctcccatcccctctgccctcgctgtctgggagcccgcgggatccagcccacagctgtcctctgcgcctgcagattcctcggcctctacccgccctccccaaggtcctccctccctggactcaaaagcctctacttggctgcctctgccagtcacctcttcctctgctgagccctccagaccaaattcttgcccacctgcatgctctcctgctgctgcctcttccttttctttcgagtcccagccttgcccaagcaccccttccaaagcttcaccagcgccagcagcgctgatgtgtgggaccacatcaccccccataatcccagcagccacagagccagtctgtgcatcctcacggtccgggaggcccacagccaccgcttgcagcctccagcctcttctggatgttctgtcagcctccgcctcctcatcctcagtttctctggcataggcctctcccagtgacgggcaaggccctgcgtctgcccctgtgcttccgtccagctcctggttctctgagacagatgcctctccctcctcagttccacatcccgcgtcctgggttgtcagcccctccccgcctgcctctgggacttctgatagttcagactctcggtctccttcagcctcagccgccagggtctggcctcccgcagtctcctcctcctcccgctgctcgccatcggccgcatcctcctgagtatttcctctctccatgtcctttctcgtgcggttttcccaggctcctgggaaggcctcggaggcctcaggctttacagaccccgcgtgcctgggacctgcctccaggctcctctcctgctcctctttgctcagggccagaactcccatgagctccacctcccctgcctccctttcctcgggttgcttagttggggtctgggcgccccccatcagctcaggtccttggcctttggtgacgctgtgtgtgaggccaccccattccacgcccagtaggccacagctagtctgggccgcctcactctcctcccctgtgagctcctcctcaggcctggcctctggagttgcctccaagtcggcagtgccttcagcctctccatctgagggcagctcagccactggatccctgctgctccctctctcctcctgggcctcctctgcctgtaccagctcttccatcctggcccggtcggccctgatccccaagtcctgcctcatctcagcctccttaccacgcaggtctacctggccctcaaagctctcccctgcctcctggcctcccacagcttccctccctgcggtctggctctcagcagcctcttctgttctttcagtgcccaggacctggggctgtttggggaaagggctcacctcagcctctctctcctcatccccctcctcctctaggacccagacttttccagtagcctctaggagcctttctcctgggactgctccatattctgtctgtctgactcccagcaggtcagcctcctctttgcctgaggttgtccaggcctcgtcccctcctgaggctgtcccggcctcctcccctcctgaggctgtcccggcctcctcccctcctgaggctgtcccagcctccccgcctgaggctatcccggcctcctcccctcccgaggctgtcccggcctcctccccgcctgaggctgtttcagcctcctccccgcctgaggctgtctcagcctcctccccgcctgagattgtcctggcttcctccccatctaaaattgccctggcctcttccctacctggggttgtcctggcctcctctctgcctaagattccccagtcctcaggctctgcccctgggccccacgtcccccatgccctagtgctttcacaggccttctccaccactaccacctcttctcctttcccagccccttcggccccaggctcctcagtttcccctgcatctgcctccctgaccccctgctccatctcccggttgtcccctgccgcctttggcccaacagcaccagccttcccctccgtctccccatgccaggtccactctgactccgcccctctggccatccctggctctcttgccctgacctcttcctcctcctcctcctgttcccagcttctcagcctctcttctctgttcacttcctgctcatgggactcctgcctctcctgggcttggccgctcctgtcttggcaagccccagaccctgccttggatttctttctggcctccaagtgggcgcttggctcctggcacctggcagccttggctgtctccccagccccactgtcctgcctctctgcttgggacccatgggagctgccatctccccagccccaggtctgttctacagctgagctccccacttcatgtcttctgtcatctccaggccctctcagccttccagccccctcgttttggctgcctctaaggccctccaggtcctcctgggcttcctcctctacaatcttccctgtctttcccaccgccaccacccccagttcctcagccgcctgcgcctcccgctctacagtggggactgcatctcccaggaggtaggagacaaaggtgccgagggaatcctaggaaaaaagagagagagaggggagagtcattgaggagagtcccagccctttccctgggggccctggctggaggagcccaggttaaggaagagggtactgggatctgaaaggagaagaagaggatttgcagaaggagccagaaggggcatcgattaggggtacgaggacgcatggttggaggtggggactgaaattcagaaaatattaggccaggagtctgcctgaacctgagaaagcaatctccagtttgaggagatcagaaggaggaggggaaaggtgaggccccaggggaggtgcccggaagtgaggccccagggaatggggtgcaagtatctggcagctgtctgcccttctcaccagtgcccccctcaaggcctggtgcagcccagggaggtatagccggaggaagtccatcctgtctgtctctgtctgtgtgtccagaaagctgataatgaccgtccccacccaccaagacaagccaaccttccccaggaccaaaggcacttcctcttcccctgtctccctgatgcgtccccaccccaggccctgcccacggcccctgatgcccacagtagcccccactgcagcccgggaaatgggtgtacatcacacaggggactcaggtgcacatttggaaataaaggacaagcaagaggccagaaaggacaaagtgggagcaggagaccttagaactggggagggggagagggaggggacatgtggcaacagcagctcaagtgactcaggtctcgtatccgcacctcagccatttctgcctcccctacaagccacagccactctgcaagaggaagctggggtttgtggttcctgttttgcctgggaagaaagagtagcagtgaagagggggctggtgggagctctgacacatttcggcgtcattaatgcttcccccaggggcggaaggggccggattggtggctctggggtgcatcccctcacctatgattaggcttgcaaaaaagaacttggctaaactttatattgtggatatctgtgtctgcctcccaccttcctgtgacttccttgatggcagatgccatgtatgaaacgctgctgaatttctagagccctgcacgttagtaggattccattttccatcagctgagtgacctgggaggcacactagagagggcacatttcttttcttttcttttctttttttttttgagacagtctcactctgtcacccaggctggagtgtagtggcgcagtctcagctcactgcaacctctgcctcctgggttcaagtgattctcctgcctcagcctcccgagtagctgggattacaggtgcgtgccaccacacctggttaatttttgtatctttagtagagacagggtttcaccatgttagccaggctggtttcgaactcctgacctcaggtgatctgcccaccttggcctcccaaagtgctgggatgacaggcatgagccaccacacccagacgagagggcacatttccaactgcattctgaaggcctggtggtgagaaagagcatatagaggtggcacagcccatagcagagatgaggccaaggacaagaagagaatgcaggatgccgctttccacctagaagaaggtaagggtatgattccttatttggaactacataaagtgaccttgctctacttctcttccccataccctccttctcccctccccagccccactttcctattccaattagggcaattctatgaaatcacagcatcagaatcttaggccttaaaatcatttagtctggccaggtgcagtggctcacgcctgtagtcctagcactttgggaagccaaggcaggtggattgcttgagctcaggagtttgaggccaccctgggcaacgtggcaaaatccagtctctacaaaaaacacaaaaattagctgggcacagtggtgcgcacctg

SEQ ID NO: 7181 - DNA, 6000 bp, Homo sapiens
gtccaggagtcagaggctgcagtgaactgtgatcatgccactgcactctagcctgggtgacagagcaagaccctgtcacaaaaataaaaaataaaaaggaagaggccgagtgcagtggctcacacctgtaattccagcactttgaggggccgaggcgggcggatcgcctgaggtcaggagttcgagaccagcctgagcaatatggagaaaccccgtctctactaaaaaatacaaaattagctgggcgaagttgcacatgcctgtaatcctagctactcaggaggctgaggcaggagaaccacttgaacccgaaaggcggaggttgcagtaagccgagattgtgccattgcactccagcctgggctacaagagcgagactctatctcaaaaaaaaaaaaaaaaaaggagagtggtcacagagagtttctgggagaggccttggaggctggaagtgaatccaagtctgtgatcccaaagcccctatgtcagggcggggcacggtggctcacgcctgtaatcccagcactttgggaagtggaggcaagcggatcacctaaggtcaggagttctagaccagcctgaccaacatggtgaaatcctgtctttactaaaaatacaaaaaattagctgtgtctggtggcacgcacctgtaatcccagctactcggggagctgagacaggagaatagcttgaaccttggaggtggaggtttcagtgagccgagattgtgccactgctctccagcctgggtgatagagtgagactctgtctcaaaaataaaataaaattaaaaaaaaaaaaaaaaaaagctgggcgcggtggctcacacctgtaatcccagcactttgggaggccgaggcgggcggatcacgaggtcaggagatcgagaccatcctggataacgcggtgaaaccccatctctactaaaaatacaaaaaaatagccgggcgtggtggcaggcgcctgtagtctcagctactccggaggctgaggcaaaagaatggtgtgaacctgggaggcggagtttgcagtgagccgagattgcgccactgcactccagcctggaggacagagagagactccgtctcaaaaaaaaaaaaaaaaaaaaaggttcaggcccggcatggtggctcatgcttgtaatctcagcactttggaaggttgaggtaggaggatcacttgaggccacgagtttgagaccagcccaggtcccatagtgagacccccatctctataaaaaaatataaaaattaggcagatgcggtggtgcacacctgtagccacacctacttggaggctgaggtgggagaatcacttgagcccaggagttccaggctgcagggagctgtgattgcactactgcattccaacctgggaaacagagcaagaccctgtctcaaaaagaaaaaaaaataagataaaataaaataaattaaaaaaataaaaaagttttagtagtgatgcatttatttaaacgttcactaggaaaacgctggttttccaagtggagtcgtgatttaaagttttctttttaaaaatatgtgcactaaaaaacgttaaggctgaattggctggaagaaaaaagtaaataatcctacaggtggtaggtatgaggatcttgctaaatccggaaggtgataaggagtgaagtttggaaattttacatgctgcccctggggcaaaccagtggattcagtaaatatttgtgggttcagctcctttgcgcagcttaactctttcttccccctttcctccggtcacttccctcttctcatgccattgtcactcgctgaagtctcaggccactcaccagaagcccaccgcgttcttccaatgcgcgccctgatggtccaacagagggagccggggctccgggacggtctcctcccctgggagagcgagaagagggcatgacccccacctactctcaggtgcacgaccgctccttgcgtgtcctcccggggccgagtcagctctcattcccctcaggtgggctgcgagccagaggtggtcgttccatgagggtgggcgggaatactcaccctcggaatccgaaaagcgccgccgcgagcctgcacagcctcccatcgcatcaagttcaggtcccccgagggtccagggtcatagagtgtccaaagggggctcccacgggagggatgagggtctgcgacaggtgacaaggatcaacgcccgattgccggtcccagctccggcttgtctagggcactcgcgccccgcgatccatcaaggaagctgggggctccatctcgagcgccctacgacccaccacgccccacccatcgtactctcccccgccccgtctacagcagggaccctgaggcctgtacctttaagagcagcagaatgttctgcactatgcagaggccgtttgtcggatcacgtgacagcacccgcgtgttcccccatcacgtgctcagaggttttccctacttccgggtcctctctgtcttcgctttgggccttctcggcttcggagcgtgaaaaagggaggggctggagaaccctggaaccgcaggttttaaactggagcgggtgggagcagcaagcagagccgtgaccttagatcagtggcgcccaagaccgagacagtagcctgccagcaccagttatgactgtgggaggcttcagctcctttccttcagcactcacttgccagaaacaaatatggccacctgcctactcccttttttttttttttttttttgaggcaggactgtttctggttgcgaacaaagacgaccagcttcaggtcattcttatccccatctgttgaccttacaaattgttttagagacctaagtaaacataacactcatctaaagggatttcgtgaatgatctattggcagtatccaagatgttaagagatccctatttccaaattatcctagaaccaaaaaatatcacagcacttcaacccctggtgttacagatgagaaaaccaaggtacaaatatatatatatatatatataacaaaattagccgggcatggtggcgcattcctgtagtcacaggtaccttggaagctgaggtgggaggatcacttgtgcccaggaggttgaagctacagtgagctatgatcacgccactgcactccagcctgggtgacagagtgagatcctgtctcaaaaaaagaaaaagtaaaaaataaaataaaaaaaatatatgtatatgaaaaaaattggaaagttgctgacaatcattcatacaatgttagacctaaaggtgaccttagagacctgtatggtgataagaaatagagcaccagaggcagggagccattgggttggctccaggctgctgcaggattcctgcctccatcaaaggtggtgcttagaccagattttttttttttttttgacagggttttgctctgttgcccaggctggagtgcagtggcaggatcttggtttgctgcaaccttgacctcccaggctcaggtgatcctcccacctcagcctcccgagtagctgggacagcaggtgcgcaccactgtgcccagctaatttttgtgttttttgtagagactggattttgccacgttgcccagggtggcctcaaactcctgagctcaagcaatccacctgccttggcttcccaaagtgctaggactacaggcgtgagccactgcacctggccagactaaatgattttaaggcctaagattctgatgctgtgatttcatagaattgccctaattggaataggaaagtggggctggggaggggagaaggagggtatggggaagagaagtagagcaaggtcactttatgtagttccaaataaggaatcatacccttaccttcttctaggtggaaagcggcatcctgcattctcttcttgtccttggcctcatctctgctatgggctgtgccacctctatatgctctttctcaccaccaggccttcagaatgcagttggaaatgtgccctctcgtctgggtgtggtggctcatgcctgtcatcccagcactttgggaggccaaggtgggcagatcacctgaggtcaggagttcgaaaccagcctggctaacatggtgaaaccctgtctctactaaagatacaaaaattaaccaggtgtggtggcacgcacctgtaatcccagctactcgggaggctgaggcaggagaatcacttgaacccaggaggcagaggttgcagtgagctgagactgcgccactacactccagcctgggtgacagagtgagactgtctcaaaaaaaaaaagaaaagaaaagaaaagaaatgtgccctctctagtgtgcctcccaggtcactcagctgatggaaaatggaatcctactaacgtgcagggctctagaaattcagcagcgtttcatacatggcatctgccatcaaggaagtcacaggaaggtgggaggcagacacagatatccacaatataaagtttagccaagttcttttttgcaagcctaatcataggtgaggggatgcaccccagagccaccaatccggccccttccgcccctgggggaagcattaatgacgccgaaatgtgtcagagctcccaccagccccctcttcactgctactctttcttcccaggcaaaacaggaaccacaaaccccagcttcctcttgcagagtggctgtggcttgtaggggaggcagaaatggctgaggtgcggatacgagacctgagtcacttgagctgctgttgccacatgtcccctccctctccccctccccagttctaaggtctcctgctcccactttgtcctttctggcctcttgcttgtcctttatttccaaatgtgcacctgagtcccctgtgtgatgtacacccatttcccgggctgcagtgggggctactgtgggcatcaggggccgtgggcagggcctggggtggggacgcatcagggagacaggggaagaggaagtgcctttggtcctggggaaggttggcttgtcttggtgggtggggacggtcattatcagctttctggacacacagacagagacagacaggatggacttcctccggctatacctccctgggctgcaccaggccttgaggggggcactggtgagaagggcagacagctgccagatacttgcaccccattccctggggcctcacttccgggcacctcccctggggcctcacctttcccctcctccttctgatctcctcaaactggagattgctttctcaggttcaggcagactcctggcctaatattttctgaatttcagtccccacctccaaccatgcgtcctcgtacccctaatcgatgccccttctggctccttctgcaaatcctcttcttctcctttcagatcccagtaccctcttccttaacctgggctcctccagccagggcccccagggaaagggctgggactctcctcaatgactctcccctctctctctcttttttcctaggattccctcggcacctttgtctcctacctcctgggagatgcagtccccactgtagagcgggaggcgcaggcggctgaggaactgggggtggtggcggtgggaaagacagggaagattgtagaggaggaagcccaggaggacctggagggccttagaggcagccaaaacgagggggctggaaggctgagagggcctggagatgacagaagacatgaagtggggagctcagctgtagaacagacctggggctggggagatggcagctcccatgggtcccaagcagagaggcaggacagtggggctggggagacagccaaggctgccaggtgccaggagccaagcgcccacttggaggccagaaagaaatccaaggcagggtctggggcttgccaagacaggagcggccaagcccaggagaggcaggagtcccatgagcaggaagtgaacagagaagagaggctgagaagctgggaacaggaggaggaggaggaagaggtcagggcaagagagccagggatggccagaggggcggagtcagagtggacctggcatggggagacggaggggaaggct

SEQ ID NO: 7182 - DNA, 6000 bp, Homo sapiens
aaaactgcaacccatgaagctagaacacaataagctaaccaaacttttaagagtgggtagatgccgggcgcggtggctcatgcctacaatcctagcactttgggaggccaaggcaggtggattgcctgagctcaggagttttgacaccagcccgggcaacacggtgaaaccctgtctctactaaaatactacaaaattcgctgggcgtggcgttgtgcacctgtagtcccagctactcaggaggctgaggcaggagaattgctagaaccagggaggtggaggttccagtgagctgagcttgtgccactgcactccagcctgggaaacagagtgagactctgtctctaaaaaaaaaaaaaaaaaaaagtgggtagaaaaactttttggatgtgacaggacttatcaggcatcctttctcaggaatttctggaaagacacacccccgtgaagtaaatgaggaaatttctttttttacatggggaaattccccacatagtaagtctacaaaaggcctggagaatgaatccagactggataggaatgtagaggatccaatgggaaaaacaaaaatgcaggataggtatatggcagatatgatggaatatctgcaaagaaattaagggtatgtacatagaaaactatgcaatctattttttaaaaagcaatcatttattccagtagggcaagctgcacaaaaaatgaaatactgtcccagcactttgggaggccgaggcaggtggatcacctgaggtcgggagctcgagaccagcctggccaacatggtgaaatcccatctctactaaaaatacaaaaaattagctaggcatggtggcaggcacctgtaatcccagctacttgggagactgaggtgggagaatagcttgaacccgggaggcaaaggttgcagtgagctgagatgatgccaaggcactccagcctgggcaacagagtgagactctgtctcaagaaaaaaaaaaaaagaaaaagaaaagaaatactgtacattacttggttctgaagtacatagacaccacatggttaaaaggtaaacaatgattactaatttaacaaaaaattatgatttaattacactgggacaatgtagataaattatgttagttaaaaaacaagaattgaatatttaaaaatgataattcaagaaaattagtgtaaaattttattttaaaatatggtaataaacactagaagaatcagctacaggttttaaaagtggttgcatctgagagagaaacaggggtgtgggggagaataagggtgaagaatagttatttttactttgaaaaatattttaaattataacacaaacaagagtttctaaattttgaaagtgcattgcattaataaaaaaattaattgggatatttgttttaacttatcagaacacatgccatttacatcttttaaatttccttaatttctaataaaaaaaaaatcacctctatgcagttagttcacttctcatatacactcaacttcagtttcttccccactccaagcatgctgacattcactacccaaaaacacttctcaagggaaataagttcctgtttatccatttataactttcccctcaaagttctagttcaaggccatttttctttttaacatgagtttgagtttactcaaaatactgtagagtctgagaactaatcagcccacacagggactttttaaatacagcttcctaagtagtctttaatcttctacaaaccaattcattctgcatatagtttacaagtaaatcaatttaaaatactgttttcatcatctctcctttgcacaaggacctgatgattcccctcttctaatgggacagcattcaaactcttttttgtatctgaaggctcccagtctgcccttcttatctcatgttcttagtccttaactccccgaagtgtaccttccacttttgtcaggcagatctttctacctcctcttcataacatgctgttcttacttttatctcttataaatgctctgtccccaaaattgaacttccaagttgaacgtcttcacctaactttttatttatactaaggtcaagctcaagttccatgactctggaagctgcccctttggcctgcactgacccatctcttcttgcttgaattcagacagccacgaatgcttgcttcaaatgaatgtagtttcaaaactgtgttgggtcactatcatggaggtagaggtgtgggagtggtcattgtttcatgcaatgccaaccacagaaaagaaaaataactattacttgaacattttaaaaattcagataattaaacttgaattccttccaagtcaaccttaaaaactcaccatcagtcaattaaacaaaaaaattagaacactgactttttccccactgcaaaataggcccctcttccacaaaacacaacacatggctaatacaatgagactactgtgagtgactgctgcctcaagatgaggcacagaacgagacacattcaagaagggatacgagggatacgagattgcaaggaaataaagggtgtttatatagaaacaaacctggatccactcaaatttatttctttaaagtcatttttaaactttggtattttcactatttttccaaaaaatcacttgctactcatacctcacaaacagtggttttgcatcccaacactaaggctgactttaaagacaaccaatcagctactgcatatccattattatattaatgactaaagttttatcaaaataatcatatttgtacttacttgaaagatacctttactttgggtttaaaatagggtgcattctggtctgccaaaaagacgattaagtcatttcctaaagaaaacaaatatatgatattagaaaaatgtttgttgataagatatctaatcagtggttacaagaaggtttctgggcactgttctcaacaagaaaacttttattctactccagttcatctgccctctcaagcatagtcccactagtccaatggagatgcctaacattatatcacaagttcaatgttcaaagtagcagagaaatagaaaggatgaacatgggaaaaagcagctgatcaagagaaactgaagccagtggattctgcgaggagtcagattggttgacttaaaagaaccatataaagatgccttataactatactacatgtcaagacttgtcttccccgaatctagcaatgctgtcccttgtaaggctgtttggttcattacacagatgcatcacaccaaggatgcagggactcccattgtagatatctgacaaagacataattaagcatgtgagcacaaaatgctgaatcctccaagaccctcctcctatggggccatcctccagagggtgacacattcttggagctcaattagcactcattgagacagacttttggaattgtttaatcaaacacaggccatctttaaagtcaaggctactctctgtatccagtttggacacagcagcaacaggtttggcagtacactgcaaaatgaggagtcaaaaagattgggaaaatattcagggtttgtaagaggttcctgcatccccgcaagggctccaagaagtctggttcaggatcctgtcaggcaagctctgagtagctcttccttccttccttcacagcattgatctttaagcagcacctgcttctgtaggtactcaagaaccctaagaccccctaatgcccactgtcagcatcaagatttacaaaaaagttagtttaacgattgtcaaagcaaagaatttccaagaacaagttagcaaagaaagtagacatttggaacactaaggtgatgaccaagatgaggaaggagtacacgaaagaacaggcagctcaagagagaaatttctgtagtttgagactgctttcccaaggaggcattgggtttatcagtggtccctgcaaaatgcttgtgtgagctgtttagtgtttaggcccttggaagggtacattcgcttcatagaaagttgtggccttgacaaagaaaggggtgggcgaattaggtaggtggggaggcaagaagaagccccctatgagaagagattgtcaggttgcaccttttcatgttcatcaacggggaaggaagactgaagcaaaatagaaaggaatgagtgggccttgggagcgaacgttgaggcaagctacaaagattcctaggaatcaggaagcactttggaaaacaggtgattccatggggaggagggggtaaggtgactgggtgagggccgcagacttcttaggaacaaaactgaggtgctgtcagggcttttgagggtaggtcaaactgtagggtagctgggtcagaacctggggttggaaagggtggtgcaaaaggacaagctgttaagaatgctaaagggaaggccacagggctgggagagaaggaccaggaaatgcagaaggaccggccattgggcaatgggtttggggaacaccgggagaggcacacggacagcgaacagagggagggcccggcaagcactgactttcccgcagcacgaagagatccgtctgcttgtcggagttgaggtccccgaaagccgcaagggtgccccaggcctcggccccaaagagctcggccgtgacgttgtgcagcgcccgcgctgggaccggcccgactcccagtagtgcaagccctgcgaggagcggcgagaagagggcccaggagctcgggagccggcccgccgccgccatggcagcccctcagcccccgcccgccggcccaacgccgcgcttgacgacagccgcaaagcaccgcgttaccggccgagagagtggcgcgcagccccgggacgcgtaagagccgctgccggctcctttttctctctcccactagggctgcccttccgacgctaaaaaagcagtggagctagggtgaaagccgccctcacgctcacttccggcaggcgcgcctcccgacagtgtcgtgcggggggcgtggcccggcattgctgacaggcggccccgggggcggtggccaaggcggcgaccggagcgcgatggcgggggcggcgggactcacggcagaagtgagctggaaggtcttggagcgaagagctcggaccaagcgctcaggtttggctggctggggcgccgccccccacccgagtaccttgggtggtgcttcgcctcaagcgccttggcgggaggcaggtgggggccctgggaatgaacctgtgccccgagttcctccttagaaagcaggtggcggccctggccttgtttctaatatcttcctccacctctaaaaattaggtggcagagccagctccactctgcgtgtgcccccgactctattccgcttgtgagccccactcggaaagtaggcagcggtccggacttcccttagagtcttctaacttaaaaatcgggcggcggcacattcctgggaaagggaatgtgtcttccctgtgaatgtgtctttcctgtgaatgttctctgcaaaagtcagatagcttaatcagaccaagtcagatgtaactacgatctggctgcagaaagccggcgtctgggctccttgctttatgtcttatatcccttttacattccccacaggttctaagcagtagacctgtcatctatctagcagaaactgaaggagactgggcctcagatattgaagagtatagttagggcccagaaagaaaagggcttcttaagtggccccaggttgtgtggtttccaaacccgaaagcatagaggtcagaaggtgccttgcaggcagttttaacagttccaagtgtcccgaactgacttgttcaaattgcaacgtcatgacttgtggcgttattaaaacttcctgtattcctggttggctggatataatcttgaacaaaaggcatgcacttaaacaggaaaggtgaaaggcggaatgcaggttttcagctaaggagcttcccttttaaagaattgatgaagtgtcattattgggggtgggtgtgaaaggtgttagctaggaaaattaactttgcacttgcattgatattaagaaatta

SEQ ID NO: 7183 - DNA, 6000 bp, Homo sapiens
actggctttcacttttggcaatactggatagtttctggccaaagtaccaatgaaaagctcagctgtgaagcaaggatgtgctttaaaataattgtcaaatgaaatcgcacaataaaacatatgcctataaagataatgtccaaagaactacaataggggaaagcaaatcatttccaatataaatggagtatttctaaataagtaagaaattataaatgcaaaccactcagagtacttaaatgcaaacacgacaggccacattcaaaacacaatgcaaagttaagcctaacaccagcaggtatggtacttattattttaacagatacaaattttaagtgtgtctttatagttttactaagttttggttagatgaactcccaaaaaagtgtcaacattgaaagtaatgtataaagaatcattcttcaaaacggattataacactaaagtttgatatttttctagtctgtttcttggtgcattctatttcaatttgatgatacagtacaggaaaagcgtcttgtatataccttcaaacactctatgtaatgttaaagcacagttcttgggtttagaaattttcaggactgttgatgcataaaagctatctttaaacattctatttccccattactactgaatgactgtgctagtgcttaaaaccactttccttcttagtagaaaagccaagatggaaaacagagcttggtgcttataaggaaagaaaacagagtctagagatatatgtcctcctgttcttttagttcaaagataaaatcagaaatcaattggcattgttacatgtaatattttgtcatttagcagatgacacctagaaatagaaatcattttagttccttaaagagtttttgttttctcctgtttgattcttccttaagttatttcttatttattttctttaagattttcctcctctatcttgccagaacaggacttgaaatataaacgaaaatgaatgaagagggagaaacacttctgaaaggctatggtgaagccaaggagttttcactgtgtttgggggtgctcatctcacatttgcctgttcatgagtcctgaggcttgaaatattctgcttaagaggcattatagaaaaggtaatctcttaccagcaggcttctccgagttttctagtacataataggttttaaatggcccaagttaggccacaactacagaaaagggctgtaaatgcttcagttttcatttcagctatgtggccacctaactaaatgtgtggcttgttctgtaaagtgacactgaatacatccaaaggcctggttgctaatgggaatgcataggtaatcatgtctgggtccatgaatcacccagaaattgtttccaaaatcctgtgcacacgtctgaagagcaattccatagctttcatccagctctcaaaggggtgcatcaacacaacggtctaagagccattgtgccaacatctgttccagcccttacaccaggatgccacaggataaaggccaaagcacatggcctcaaaatattccctggggcaagtcgcttcctgtctgtgaaaacgtgtatattaataacctgcttcacagtaagctgatgaagaacagataagtgggatgttgaccaaaatttcctaatttgtagaagttacttccattgtggcaagaagacaaaaatcatttaagaaatatgctatgtgcacatttgacaatgggagctcccagacactaaggaactgcctctgcttgcaaatatcggggcaggcactccactctctgttcttttcacatcccacatgagaagaacacaataggccacattcaaaacacaatgcaaagttaaacaaaacaccagccgggtactcaggcctgggcccaccaaagaagaaataaagacataatgatatcttatagtgaaatcaaccttcagaaacaaaggtatttaaaattaccaagtgacccttttggggtctacaacacttaccagaccttaagaaagcggaagacggagagacgactgcatcaggtgagcaggccatttcaaattgttggctctaatcataagcgtcgcaggctaagctatagcaattttaaaactgtttagtaaaggttagaagcaatcagtgttaaattaattgaaagcagtgtgagcagttattaacatgatgcagtatgcaacaaaggcagtaactgaggatcattataattttattttctcttttatgacttgaaaatgtgattttctttgctttgataaattacacttgctcatatggatgagatagaaactatataatatccacttattagacattacataaaagtagtatcctctgttgtgcagtgaagtaattatgctactatgtaacaatgctcagaactctgtggggaggactctatactggagtcaggttagtcaagtgtttaacaaagctccatttatatattcttctaaaagtaacaaacagaatcaagttgattgcttttaatgatacaggaagttattaactcgagttattaactttatcctctgtacttcatatacttacaagaatctgaaacctcaaatttaactattaatttggaggaataacttcaagtggtatctctttactactatgatgtaaacatacaggaacattcaacattgatactatgcactttgcacataaaagtggatttaaataactgcactcaacaacagttaacactagaattttttttctcagctaagaaaagagaattaaggttttcaaagcttactgttatgacatgcatttcagaggaaacaaagactgacgaagaaaatcaactctatgagcttatgaaagttaaagagaaatgttgcaaaaatatatgttgggggcagtactcaggtccctgtaagaaaactccagttattctctttgttcagacataaccaatccaataacactttttatatccagatagccacatcgttagtagccaactcagtatttctatatcacacaaaaacaatttaagaaaaagtgtgaaacaaatacatgtgactattccaagtcactttattgattcttagtagtactaaggactactttttgaaaaaattatctcatacttcatagatggtaattttactataaccctaagtatataaagctgaactttttgtaaggtataaaaaaacagagtgttcggtgtatgatttctgaaattagattttcagaaattagatttactttctccaaaaaaaaaaaaaaaaaagtcagtgtgcacaacagacaactaagaacttcataaataggaaaagcccaaaacgtaaggagaacatattaggtgagaaaataattttttttttttttgagacggagtctcactctgtcgcccacgctggagtgcagtggtgcgacctccactcactgcagcctccgcctcccaggttcaagcaattcttctgcctcagactcccgagtagctggggttacaggcgcccgccaccacgcccaggtaatttttgtatttttagtagagatggggttttaccaggttggccaggctggtctcgaactcctgacctcaggtgatccgcccgcctcggcctcccaaagtgctgggattacaggcgtgagccaccgcgcccgtccgaaaataatttcttaatatcaatgcaagtgcaaagttaattttcctagctaacacctttcacacccacccccaataatgacacttcatcaattctttaaaagggaagctccttagctgaaaacctgcattccgcctttcacctttcctgtttaagtgcatgccttttgttcaagattatatccagccaaccaggaatacaggaagttttaataacgccacaagtcatgacgttgcaatttgaacaagtcagttcgggacacttggaactgttaaaactgcctgcaaggcaccttctgacctctatgctttcgggtttggaaaccacacaacctggggccacttaagaagcccttttctttctgggccctaactatactcttcaatatctgaggcccagtctccttcagtttctgctagatagatgacaggtctactgcttagaacctgtggggaatgtaaaagggatataagacataaagcaaggagcccagacgccggctttctgcagccagatcgtagttacatctgacttggtctgattaagctatctgacttttgcagagaacattcacaggaaagacacattcacagggaagacacattccctttcccaggaatgtgccgccgcccgatttttaagttagaagactctaagggaagtccggaccgctgcctactttccgagtggggctcacaagcggaatagagtcgggggcacacgcagagtggagctggctctgccacctaatttttagaggtggaggaagatattagaaacaaggccagggccgccacctgctttctaaggaggaactcggggcacaggttcattcccagggcccccacctgcctcccgccaaggcgcttgaggcgaagcaccacccaaggtactcgggtggggggcggcgccccagccagccaaacctgagcgcttggtccgagctcttcgctccaagaccttccagctcacttctgccgtgagtcccgccgcccccgccatcgcgctccggtcgccgccttggccaccgcccccggggccgcctgtcagcaatgccgggccacgccccccgcacgacactgtcgggaggcgcgcctgccggaagtgagcgtgagggcggctttcaccctagctccactgcttttttagcgtcggaagggcagccctagtgggagagagaaaaaggagccggcagcggctcttacgcgtcccggggctgcgcgccactctctcggccggtaacgcggtgctttgcggctgtcgtcaagcgcggcgttgggccggcgggcgggggctgaggggctgccatggcggcggcgggccggctcccgagctcctgggccctcttctcgccgctcctcgcagggcttgcactactgggagtcgggccggtcccagcgcgggcgctgcacaacgtcacggccgagctctttggggccgaggcctggggcacccttgcggctttcggggacctcaactccgacaagcagacggatctcttcgtgctgcgggaaagtcagtgcttgccgggccctccctctgttcgctgtccgtgtgcctctcccggtgttccccaaacccattgcccaatggccggtccttctgcatttcctggtccttctctcccagccctgtggccttccctttagcattcttaacagcttgtccttttgcaccaccctttccaaccccaggttctgacccagctaccctacagtttgacctaccctcaaaagccctgacagcacctcagttttgttcctaagaagtctgcggccctcacccagtcaccttaccccctcctccccatggaatcacctgttttccaaagtgcttcctgattcctaggaatctttgtagcttgcctcaacgttcgctcccaaggcccactcattcctttctattttgcttcagtcttccttccccgttgatgaacatgaaaaggtgcaacctgacaatctcttctcatagggggcttcttcttgcctccccacctacctaattcgcccacccctttctttgtcaaggccacaactttctatgaagcgaatgtacccttccaagggcctaaacactaaacagctcacacaagcattttgcagggaccactgataaacccaatgcctccttgggaaagcagtctcaaactacagaaatttctctcttgagctgcctgttctttcgtgtactccttcctcatcttggtcatcaccttagtgttccaaatgtctactttctttgctaacttgttcttggaaattctttgctttgacaatcgttaaactaacttttttgtaaatcttgatgctgacagtgggcattagggggtcttagggttcttgagtacctacagaagcaggtgctgcttaaagatcaatgctgtga

SEQ ID NO: 7184 - DNA, 6000 bp, Homo sapiens
cagctagtcagacgtgcatttattcagtatgattaactaacaaaagcttgagtcaacaccattagaatgtaacagacattgtggacttcccaagtaaaaagcacttaaacacccacggtcttaagattatgcgagtaaacaagctagctaggtaaactacgctgcctttcttttatcactatttttatttgtttaattaaaggtaaagggatcaggccgccttcagccagagctaattaccgaagttatgccaacttctcggccttccaagatttgtgtctatttctataactatctctaatatctttcccaccagaatgattgaaccccaacacacctccctctctcagcagggtctgcctgttcagagaacacagcttctctttcttgccttacacacaggggcaagaatagattcactcttgcagagagtacatccctttctgttactgaaaatcactttccaaaaaaaaaagcaacacatacacacatactcaccacacacacaggtgggtcagagaaaaaaaacaagtacaaatggcttagggacatgagaagtgtggccctaactttcgctgaaagggaccctattaacattaaccctcacctctgggtcagagagggttggcactctagggcctgccttgaagctttacctactgggaccaaaaggactgcttggaaagctattttaggccaggtgtggtggctcaagcctgtaatcccagcactttgggaggcagaggcgggtggatcacctgaggtcaggagttcaagacaagcctggccaacatggtgaagccccgtctctgctaaaaatacaaaaaattagctgggcatggtgggcacctgtagtcccagctactcgggaggctgaggcaggagagtcgcttgaacccgggatgcggaggttgtagtgagccaagatcgtgccattgtactccagcctgggtaagagcaaaactccatctcaaagataaaataaaataaaaataaatttaaaaaatactttttaaagccctattaccacaaaataaatccaggaacgcgtgacttggtacagcctctttggaaggcacattagctattacattagaatccacaccccgccgggtgcgatggctcatgcctgtaatcccagcaaattgggaggctgaggcacatgcctgtaatctaagctccggaggttgaggcaggagaatcgtttaaacccaggaagcagaggttgcagtgagcaacgagcctgggcaacagacacagactctgtctcaaaacaaaatcaaaaacaaaaagcaaaaaaccacatacccttttcccatttgcacaaagctgggaaaccccaaatgccctccacagggttctatgggggggcgggggtgcggtgagcacacttgttcctgccgacacagggaagtcttcttagcagctaaagagggcagcctctgcgtactgcctgggaacatggcaaaaccattttaggctttaaaaaaaaggtggagaacaagttgtacattatgatcttttaaataaataggccagcgatatatttgtaacagaagcagctccggaagcatacactgtcagccgcagaaactctgggggtcgggggtggtaaaggaggagaaatgtgtcacccaggcaggagctcagtggcaccatgcttggttcaagcagttctcctgcctcagcctccgagtagctgggactacaggtgtgcgccatgacgcccagctgatttttgctttttttttgagatggagtttcgccttgttgcccaggctggagtgcagtggtgcgatctcagctcactgcaacctccacctcctgggttctagtgattctcctgcctcagcctcccgagtagctgggattacaggcatctgccaccacacccagctaattttttgtatttttagtagagatggggtttcaccatgttggccaggctggtctcgaactcctgacttcaggtgatccgcctgcctcggcctcccaagtgctgggattacaggtgtgagccacagtgcctggctggtttgaatttttaaatgatgatgaattcatgtatgactgatgtgatttttattagaaagagaaaactaggcagcgccccatcctacgtctccttcctggtggccaatgaagcatttcccacgactcactcctggcaccagcaggaagtcagagactcagcacccaggggctgcttttttttttttgagacaggcttgctctgtcacccagactggagtgcagtggcgggatctcaactcactgcaacctccacatcccggagcatgcctcagactcataagcagctgggattacaggcgtgagccactctgcccggctaatttttgtatttttagtagagatggggtttcaccatgttggtcaggctggtctcgaactcctgacctcggtagatccgcccgtctcggcctcccaaagtgctgggattataggcgtgggccatcacacccagccaaccaggggttcattttttaaagataagagtgcaggctgcgtaagctactatccatgtcgttacataccgggccgacatgtacctaggcgggagggagactgaaccagtgaaattctaatgacaaaaaaagaaatcagagtcatcccctacattcacatctccaacgcccagctggaaggcacaggctctccccactgctgtcctgctacgatttttcccggctttgacctgcatggtggtgcggctgctcgactcagagcctcagagaaaccacacagagccctgctgagtcttgccctcggggcattctcacatttatgaagaaatgcctccccctccccctcccccccaaagtacggtgtggcagaaaacagcgccaacaggtcctgccagtcagaagccactcccctgatttcatggctcaagaccccaactataaattagcccttcccaccttgaatgtgtacacacactattgagatgcaggccgatccatgccatgggatgaatctgagaattgccaagacccaccttcccacgccacccaaccaaatcatgtggcatctgctacaagtgattttccccctgaaatcccacaagaaaactattttgaggccgggcacggtggctcacgcctgtaatcccagcactttgggaggccgaggcgggcggatcacaaggtcaggagatcgagaccatcctggctaacacggtgaaacgccgtctctactaaaaatacaaaaaaaattacccgggcgtagtggcgggcacctgtagtcccagctactcgggaggctgagccaggagaatggcatgaacctgggaggcgggcttgcggtgagccgagatcgtgccactgtactccagcctgggcgactgagcgggactcagtgtcaaaaaaaaaaaaaaaaaagaaagaaaaagaaaaagaaaactattttgaaaagcagttatctctggcctggtgaagaacacaccagcaccatgcccaccaaaacaggagccccatggctgtttcccagagaaacctgggacccgcacgtccattcactgcaacacagactgaatctgcagccaagctccgctctctcactactgggaaccctcaggggggatcccttagcctaaatcagcaccagtcactacccgcacacgatgttattactactgttttcttatgagtcagcccgtgtcactgattcctgacgagctggtgtggagagcagaaatgaatgattttttttttaactgcaatttccttctcaccaaccagtcagcaatcggagctctaacagtaaaccgattgctcagttactccacgtgggtgccacgcaagaggctgggagtattgctcagcggggccaacgggagggtggcacttgcctaaaccgcttaagtgggggaatggaatgcccaccgaagggcagggcagggaccctgctgtcccgtcactgaagatattcccagcctgtggggagaagtgtaaaagaatgaatgaaagaaacgcacgtggtttctgggaccaatgaccttagcctagaactgccgggatggtccaggaacgtaaagatgtagagatgtgggagccaggggcgtagtgatgcaaggatgcagggacccagagactacgacctcccaacccccggcccgcgccccgtactcacgcacgcagaggcaggccacgagcttggctgcctcctcgggcaccgggcaggtggggaagagcggcttgagcaggtaggtggcgaagaccagggccacgatgtactgcgatgaaggccggatgatgagcagctcgatccagagcttgaggaaggcgggcagcgagccgtagacctccagcatgtaggcgtagtcgccgcccgatttggagatggtggtgccgagctccgcgtagcagagcgcgcccacgatggagaagacgccgcacgcggcccacaccaccagcgccagccccggcgagcctgcctccttgagcacgcccgtgggcgtcacgaagatgcccgagccgataatggtccccacgatgatggccacgccgttgagcagcgtgatgttccgctgcagggtcacgccctcgccctcgcctgccggcgccgagccgtccgcgctcttggcggccagcatcttctcccgcgcctcttccttctcctcggccgccggcgccgctagcgcgcgccgcttcgggcccgcacccgccatgctctgcgcaccggccgggcctgggacacccgggagccgcggcccagcgagcagtgtgcgcgccgcccgccgcccgcagctgcgtcaggaaccccgcccgcgccgccttttaggccccggcccgccggccccgcccaccgtccgcggctcctccccgccccgtggcccggccccgtccctcagccccgccccctcggcccagctcggagcacgtgcgtcgtccggcccagcctggcgggctattcccaggcccgcgtggtcctcgaaggccccagtcctcctgcgccatggagaccccggcctcgcgacctcccccctcccggcgcccgcgtcatcccagcccgtcctcccggatgcgcctgggcggggcctggcagtcagggcgcgccccttcacccactggcccgcagcctctcgtcaagcctgggagcgggcagtgcaccagggctggcctgaggccaaggatggagtttggggtaccccccgaagggaacctaggctcctgtcccggatgggccgaggggatggaaccgcccccacaaccagctcctggggcacgggggagggatgagaggatgacctgaggggaagctcctgcagcctccttccagcctgggggctgcatcagtggggctggtgagccgcgaactgggacgagggaagaaccgaaccgaggccacccagtaattcccattgtatcccaaaagaatcttgccaaagacggcgatccggtgcccgtagctttgagaagcagtaataacacaggctttgggaagccagcaatctgcctgagctcaatttaatcaacagaaccgggggttcgctgggagccataagacccccacccccaaatctacctggggaattcaaaggcaggcttcagtgtgaaggggctttaaagcttgttattcctagggaatgcgagaggcatcttagctaaaaagggttgagaggtaatttcagttagaggcgagagcaggatgccaaggctcctaggcctggaaatgggaaggaatataaatactgccccgagattgaccagactggtgagcggccaaagacctgttcaaagggtgtgtgtgggtcagggaggaagctcctcagtatcaccccaccccggggttccttggcgtgtgtgcaaacgagtccttggaagctcacagcaggcatgtggggaggcctttgttctgggtgagcgttcagcctcccagggcaaacacgcaaacaccggttgcagagctgggtgttcacagcaagacagtctgctgggcagatgcctctggaatccacagaattctgaacaatagccg

SEQ ID NO: 7185 - DNA, 6000 bp, Homo sapiens
cctccggctcctcatcggatctctcctcttcgctctgggcctccggcgtgggaggccggcggggcaggatctcggcttgcagctccagagtaccgtgggcagccagcagttcatagagccgctggatttcggagggcgggggcatccagggctgcccatccgcaggcagctccacctcctcgtcgctgcagggcacgcaccagtcctcggagtcctcctcggcaggctcttctcccccagcgctggggacttctccctgcgcctcctcgcccccggacccctcacgctcggtctcctctcggcctccttccccctcgtcctcggccttaccggccgaggcagaggggcctccggtatcctccacggccagagcctggaggccggaggtcacttccccttcttcagacagaggcgccgccgtactggccgcagtgtctccatggccccgagcaagggacataggccactagggcagggaccctgcgacgacagatactggagtccgaagccagggtcccccagggatcgggctcccctgggggttcgggaccgtttccagccaatcacgctcccgcaggggactccgcggccagaccgcccgtccccgggagggggcgctcagtccccaccaaggaccccgccccggagatcgaggttcggtactccgaggctcccgggccccgcagaaaccactttccgaaagagggaaagggggaggagagggacgggccactcttctcgcttccacgacgcccctctccacacccggacacggcgccttctccccagacctttcagttgtgggccacgtcaagtcagatgccgtacgcacctggagctaagacccgcctcccaggctgcgcagggtcacgctacgcaggcgcacagaaatggcgcgggaggctccgctctaggcaaggctacttggaagaggaaagcgagggaaggcttgcacatgcgcgagtaagcgcacaggcttcagcccacagtaaagatggccaccgggaagtcgcatgcgtataccacccagtaaggttctgccagaaaggcagcaccgccgggccggcgggacgaacgcaggaaccaaccgagattggaggcgagtctcatgcagtctccgtttattggtgtttcagactcatgcagcatccggcatacaaaaagggagaaatcagtttgataatagccttttttttttttttttaagaattttagtttttttcttcccccagactttttttttttttttttttttttttttaaggaaaaaaacccccgccaaatccgaaccgcgttgtagctcggtccccgcctcctcagcgggctgtcgcgtgcaacaaacctcccccatcatcttagaaaataattatagagcgcggcgccccgccctcgctcctgccagtgggcgctttggtcctattttttggattatttcattacgaagcacgtgaatgaatctagcccccacaccttcaagaaagaaactcgcggactggggttgaaaagcccaggtgggcgggtcaactccagctgacctggaagggtcagcgccgcgtccctcccttctcccctgcgtgcgttcggaaccagtactcgccaccctcacccgagtccccatacgaggcccggcttgccaactctgcgacctgccaggcacccttgggtgtccgaccctgggtggtcccagcagagaacagtccgagcctggggttggggagccctctcccaacactgctccctgcccccaagcctcgtctaagtgctgtcaattttgcagagtaaacggtgacgggaggttggagaagaggatgcttaagggagatgaggaggcaggaagaggaagggggcgggacgtggagaggaaaggggagatgataaagaagggaaggaagagaggactgagggttgagagatgccaagacaatgaaagttgggaggaggcggccagggtggaggtccagagaatttggggggctggaagaagtgcagggaggccaggagagatgcagggaggctgagagcgcagagttggggaggtgttcagggaggtttccagagtgcagggaggtttccagaagtgcagggatagggggccaagaggccggaggggatgcaggcattagtgcagggaggttggaaccagtgcagggatgaggcaggcctacagttggcagaggagcctggcaagatgcaggagcaggacagaagctgtaaacaaggccgctcaggctcccttggtccttaggggtgggggccagggccatcagttgggctccccccaggggagggatgggcccaaggcagctcccaacaggaagaaaagtcttgggatgcggggcagagcccctcacttatacactgtgggagaggagagggaaggacagacggggggagggggagacaaggagagacaaaggagaggtaaggaggacagacaggagagagcaggggcaggggttagtaaagctgcccttgccaacccttccattcctcccctgcctgtcccaagcccccactcaccgcctaagttgatgacgcaggaggcgatgatgatgaggactccccccaccagcgccacgatgcttaagagcttggctacccggcccagacgctgggccccgtccacgtccccctgctgcaggctgttccgggactggggttagggcgaggggtggaggcacatagccggggtcaggagaagccagcccagaagggatcaggtggaaaagtcatccagaagagagagaggccagccccatagatggcgggtaagggaggaaggaggagtgaaggggcagggggaggagggcacaggtcagcgaggctgtgtgacacgtgtttccatatccctcccacccaaaggggcagggcagtggtggctcagagggttaggtcctagggagaggcaaacaaaggccctggaattggggaggtgggatccatgcagagaggagaggggaaggaaggcatgattactccagaggctctattgcagcgctggcgggaagctgggagccacagcaggcctgggctagggtcccatggggctcaccatgacagcataagcgaaggccacgatgttgacaggccacatggggcagaagcaggacaggatggcaaggatgatgtagtcccgaggtttctgggtgccttcacccccctccaccccaggacctgccaactgggagctggggtggcggctcaggctacctcggggagatcctggatgcccactgtgtgcccttctcattcgatcctcctcaaccagctgctgcagcactcgggggggggccccattggctgggggggatttttttgagggtggtgagtgaggctcaggggctgggccctcttccccatcaccagcctgcaggggcaccactgccccattctcttgcttttcccctacactctcagacagaatctcaggggtggggtcctcctgggtagggagctctggttgaagggctggcttgggggtaggctgggaatctggccgggggtctggttggggagcaggctctggggctggttcaggtggggctgcagactccagcctggacccctggtctgcagtggcctctttgctcacttctggtttggacactgtttcttggcatgggtcttcggggctgcagttggcctttgattcccctcctgggcttaagctgaggtctgtggcctgggctgtttctgaggccccagccggggtctctgtggtttctggagccagcccagccttgggccctgagtccacaggggccgcagtggtgtttggacctggctgcggggcctctggctggtctggtacccctgctaggacctggggagggccagtttcagcttcagaatggccaggcccttcgcctggaaccttgggactctcctcaacccccttcatctcagagatctcagagctgctggctgccatcttgagatgggagaggggagagagcccctatggggaggatggaatagcagagacagcggcaaaccctggaagaggaggagataggcttggggtgaggagggaagagggcgctcagcactgcaggcccaattgggccacattcctgtctcagggccagccttgcactgcctctagggagaggaagaaaagttggggtttcctttgccttagggtgggacatccctgcgggaggagtgctctactcaaagtcttctgcttggagagccctggggaagattaacccttttgtaaacaggaccttctccagggtctctccctgggtccatccaacaagatccagactctcagatcccagcaccccaaaatcaacgagctgtgcaaatagcactccgacaggccgactgggcagaggacccgacattcgcattccactccctctgcatcctcccctcctccctgggctcccaggcggtgcgggttttcttgctgcgcgtttagggcgaggacgctcccgcccctttctgggggacctggttatctccttcgatcccctgtcagcccctctcccggggcttccctcgccttcggtgggctggcgcctcctcccgatggttcagcccgcccagcaccaccaccagccctccagacacccgcattcccgtgcagtccgcccggcgtcagccgtcggtcggtccactcctacccgcagcctcagtctgcccgggtctcacctcgacgccggcctccggacagctcccgctgccgctgctggcttttgcagcagccgcagcccgggagggagcaagtcagctagggagggagggaggcggcgggtctccctcttctcctctcccgtgtgctcatcccctcctctccggtcccctcccctacgctccgccgccgtcgccgcccccgcccctcgcgagcctccggcccctcccgccagcccaagggagccacgcgttacccaggcaaccggcccggggaccactcgcgccccctccctgccccttctcacgcgcgcctccaggagagacgcctccttcttaagtccccggcccctcccgccaacggtcaccgggattcctggaagagacggggatttgggggaaacggagagggttctgcgaggagacgggaccagtgagacaggcaggaccgggtggaggcgtctctacgagcaggagggcaaggaagatggggcaagacgcggggaggctgcagaggaggagcagggtggggtttggagagaatggagcctgcagaaaggagcggcagaaactggcgctggaaggctcaaaaaaggggccctggaaaggacggagcggggacaggaaagggaattccaaggggcaggaggagctgggcagaggagcccgtgtaaacacagagtggcccatgcccaggatgagggacaggtgcagctttcattctctacctcgctgctcccagtcctagggctcggactccccagcctttccgcagccgcatccacccaccatggcctcagggccgtgacgcgcgtggggagggatgcggctgggggctgagcagcggccatgagtgtggacgggggagggcggcattcccgtctggcagctctgtttgggtttctgacggggcctcttcaaacctccaggggctattctgggcctgtccgagttgggaattccccagagacctggaacttgctctccacagccacagccttggccccgccctgtatctgtgctgccgccagtaaggctgcccctggggagggcggagccagaacctcacagcctcacagggcagagcaaggctggattgacggacaccaggccgagaagaaacccttggggttggcggcagttcttagtgagggcaattcattcaatccagagccagaaacaggattttatttaaaatttattgtaatggggtccgcgcaaaaggaaggggtggagggtggggtacatgcaggggacacaggaacacgatgacatggccagggccacaacttcttctgtcgtggggaagagggatgaaaagacaagaccagggctggagctggggtggaagaggggagg

SEQ ID NO: 7186 - DNA, 6000 bp, Homo sapiens
actacttttataccatgagacattagtgaaaatcagaatgtaccaaaaacttagataaataccactaatgtgttgtttcaggaagatgtcttcatacacatgcctaaatttaggagggtaaaaaacctaccacaggagaaataaagaggaaataaagaggaaagcaccattctgatataatataaagatcaccagctcacgatgaagctactaacaaagatgtataaccaatgcccatccttttaacactacctactgacaacacagaacttaaaaaatatctgcaagtatgctaaacatgcttaaagagcaaaattttaataccaccaccctttgtttaaagctaaataattaatatctaggggaaaatggatagtcaatctgtttataaaataagacctctaagaggaagccttatatgggaatttccaagtcattttgcactggttcaaaatgctgttttttaaaaatagtgttgctcttaacttttattcaagaaatagcagtttaatttgaaagatcccaaggaccccaagaagtactgaaatctacacacacaggcagtattcataaaatgctaaaagttgtcaaaggtggccacttttacttctgtgtacacttttctaagaggtactacaaaggaaatgaagaactgatttttcaaaatcaaaagatgaaacttttggcactaatgtagctttctgccctgccatataaacgcttaccattttcctcctcctttttctcttttctcctcaaaacaatttgtcaaaaaaagatacaacctctctattgattggaaagttttaagattttagccacagaataccacttggggatagacagtaaaattttgctcaccagtttctaaattcctaaaactttttagcagctcatttttgatcaatacctggaaatccactaatgcaaattaaatgatataaaattcctctgtagtcactcatcatccacccattctcacatatattgcaaagaactgatacgaaacgttactgactacaaaagtaagaccacttgtcctcaagaaagccaccctctatcttggtcactatgtgcataatacaatcctgcagctaaaatacagcaggcttttacaaaaaggaaggctgttctagattcttccaagttatgaggagctggtagtctgttaaggacctaatttcctatgaccaagcaccacaatagtagctattagtcataacttcaacttatttgaataaagaaacacaactttggctaaagaccttgttaccctgttctttttaaaaagtaatacttttaattcacaaaacaacaaaaccacaataatgccattagtgatatattaccccatccttcagacaggaacaaaatctggatagaaatgccaccgggctttaaaaaacataaagaagtgagtctaattttcactagtggtttaggctgcactgtgaaaacaaacaacatcaagaagaaacaagaaacatttcattaactaggggcctcccaagtctgattccaggacactggtacctgtttctgtgctcaacgttcagatcctacaatccagtgctaaaatgaacagtaagagatatgaagaaataggaaacaggagttctggctaatggtcattcaacataatgacattaggtaagtttctttgtgcctaggtctcccatttgtaaagataacctgcagcagcttacatactgggtttcctaacatacgccaagaatctttaaagtagggggaaagctagagcctataaagctctttggatgatgaagcagcaatgcgatgctctcctaaatgaacatgctggtatttatacacacacctgaatgctgttcctttaaaaaaaaaaaagcaccacagaaaatcatacacttattctaaaaatgctgccatagcacaaaagttcagacatttttctggaattgctttagagtcagcaattcattcttctgaatatacagcagtggaatatggatattcctaatttcaatttacgttttgcttatttcttagatttgaagcagcttattgaaaacttatgcttatgtacataaagctaatgtatggctttctaaggtaattttcctgtgacttaaaaaaaaaaaaaaccaccttgtgacttcataaatgcaattcatatttagggaagagaggagtcacactcagtatcttcaacatcagttcctcacttctcagccccagtgtgtctgagaacacaaataactttgctttttctctttactgcaattctgctcctttatcactaggctaggatgttttgagtgatggagttaatcattttttctgaaagatgattaccagaaagcataagcctgacccctcacattaaacagggattacctataccagctgccctagcacacagaaacagcttttctataccacagcttttctagtccacagaacctctgcaaaagggccacaatggaaatcacatgtatgcaaagtgcttacatcactcttcggtcttctcaatctctcactaaatgacttgtatccacatgaaatgatccggcaataacgaggacccatcacagattctaagaactactttttactataccctataaaacattattaaagctacacaatcagttaccagaaggaaaatttagccgacccttcatgctaattaaaatcatcttcatcaaagagataacgtcatatcattatcaaattcattgctaaaccatatattaagatagttttgttccaattattactttagtaattatacatgaactcttctatatttttactagcttataagcaacaatggctctctggcttcccaacaaggcttctcagcactactggtgcactgtatccataccacctgaaactttactgccaaaggaaaaaaacaagtgattatccgctaaggaatttccttccacttgggcttgaaatacatttctgaagtcgctccaattttttccaactttctttctggaataacatacagcatgcaccaagagtaacaaacacagtgctcagggagcccttaaattgagagtggcttttctgtcttttgattacctatttattttctaacaaacggagcccttttggaatttttgctttagggaatttacattttagaacaaacactttactgaacttagatttgtgatgtctgcacattttcttgaaagttcatgggaaaatggggtggaaaaagaagtaatgaagggacatcagataaataaaatttgagcgtcggctgggcacagtggctcacgcctctaatcccagcaactataggaggcctgcaaggagtccttttggaggactgcttgagctcaggagcttaagaccagcctgggcaacatgaccagaccctgactctacaaaaaaattttaaaaatagctgggcgtggtggcatgcacctgtagtcccagctacttgggaggctgagatggatcactggagcccaggagttgaaggctgcagtgaactatgatctgcactccagcctgggtgacagagtgagactctgactctaaacaaataaattaaattaaattcaagcttgcattgcccattatagaatgtgactggggtaccttacaaacttttgccctgtggggaggaaaatgttacataccactcataggacactcaccttcaggatttttacaaccactctctcattgttggtgatattaatggcctcaaatacttcactatattttccccgaccaagttttcgaaccagttggtaatcatcttgattactgtaaaaggaagacacacacataaatgccaggactgggggttaaccaagcctatgcccactgtacacgtcattcagccgcttccaccaggcaaacacttggaagtgtctatacatcacgtcacaactcattccctaaatgaaagccacgacataatcttggctcccttcactctgcagagctcctaacctaattggtctctcctaacttgggaagatggggcaggaaggcaacgctctgagccaatccagaggggcgagcaaagcacccgtcctgaaggcctagagggtgccccctgtgccccgcggctccccagcacctgcttctcgtttcacatcttcaaggtagacaatgcctgttttaaaaatctggacgtctttaagaaatttcctcccaccacctcatctcagaaaacctaaaaggcagggcattttaatagctccaaaggacagctgttgacttcccaccccagtggaaacccagaagtgtgaggaagggcagctccctcacttccacccggcgtcgatccctggaccccacacttctccccgagtaaaaaagcattccttgggggaaaggggtgcgcaaagcggggagaaagggacgaaacgggggtaaaggggagggaagaggaagacgaggacatgtgcgagagcgggacctctgcctccctgcgggcccgcggaggggtcggcgggagacaccaccgggcccgagtgcggttcgcagggggtggccgggcgggggcagggatcagcgggcccggcggggggcggcgacggctttacccccagctcgggacgtgagcctcgtagtcccagtactcgcggctcctcagactgttcacctcggcgtagacccgggccctgctgcccgcggccgggccgggcatggcgggcgggaccggggggcggcgcggggcgcagagggtggcggcggcggcgcggcgggggacgcggggcgtcgggcggaggaggcagcgggccgccgggcgctggaggaggaggaggaggagcgcggcggcgggcggccgcgccaggccgggcccgcgggggcgggcgggctgggggcgcggggggcgccggccgagccggcccggccctggagcggccggcggggcggcggggcgggcggcgctcgcgctccgcggcggtctccgctcggctcgcggcccccaggaggcggcggcggcggcaccggcagcggcagccaccggccgggaaaggggcagcggcggcggcagcggagaagaaggaggagaggaggaggaggcggaggaaacccggaaaaggggccgcgctcactgggagcggccgccgcccggcctggggccgcccaggctcacagcgccccctggagcgcggggggacccgccgggcggtgccggccccgccccggccccgccccggcacgccccgccgcctacctcgcgccctccgccaccctcgccctcccgccgccacaggtcggactgtccaaatcgcctcaccctcgggctggcttgacttcacgccacaggagcccccccttccactggccgttgccctagagccctcgcccgcgactcccgaccctttcactgtccttggagaccctatccccagccctgcactcacccagcttttacccacccaacacatcccatactgaccctattctgaccctcctgtcacccaaactgtcaagtccctccccagggcctcactcaaacctcagaacctcccccacctcaatacttctcccttcccccgagacatacccctccttccccctctggaccctgccctgttagggtagactcctcagtccccaaggcttcctacccccgtcattcagagtgctcctcacaaaacctttctacacttcccccaaatgcccttccagagccttccctgaatatccactttggtcacttggttaagctggcattgaccaggttgtgccactgcaaagttacaatttttccctttgtgattaataagtcatttgtggggagagactttgagagtgtaaatctcctgtttgtgtttaggaggagggagagcaggagaattgcaaatccgacctgaagggacaggctgggttggggatgtgcccagagtaggtggtcaactgagctggcctggcttccagtgctgcctgcagccttgaacacccttctcctttgatcttctaggcctttcttctgtcttcctttcccatccctcatcctttatcgacagcacc

SEQ ID NO: 7187 - DNA, 6000 bp, Homo sapiens
gggcgtggtggcacatgcctggaatcccagctactcgagaggctgaggcaggagaatcgcttgaacctgggaggcagaggttgcagtgagccgagatcatgccactgcactccagcctgggggacaaaaacgaagctccatctcaaaaaaaaaaaaaaaggtggttctcaaacttgagctgtgcattagaatcacttggtaggcttgtcaaaacacatcttcctggaccccacccctagactttctgattttgtaagtttggagtggggccctaggatttgcatttctttttttttttttttttgagacggagtctcgctctgttgcccaggccagactgcggactgcagtggcgcaatctcggctcattgcaagctccgcttccccgggttcacgccattctcctgcctcagcctcccgagtagctgggactacaggcgcccgccaccgcgcccggctaattttttgtatttttagtagagacggggtttcaccttgttagccaggatggtctcgatctcctgacctcatgatccgcccgcctcggcctcccaaagtgctgggattacaggcgtgagccaccgcgcccggccaggatttgcatttctaacaaggtgtgatgctggtacaactggtccaaggactgtttgaaaaccatcaaactaatacccttaggtgttcactttatcttgagataataccctttacatttcaagctgaactggtgtttataacagaaagtttaaaaaatggtcacttgtccaattgaccctgttggaatttacattagctcttgctgagatgcacagactcaccccattcggtggagagtgaccatcttactttcaatggtgttttgctgttccaaaagagcatccagctctctctccaccactttctgaaacacagagaaacatcctgtcagcagaatgatcagaaggaaccttaagagttatctaatccaatcacttagctgaagggtgaatctcatttccaagtccttttttccttccactatgttctccttagactttaacaatgcttcattttgcacttatgttgcatgattgttatcttacgtatatcttattccacctggcagatgagcaccataataggaagaaataaacttttaatcagtatcattagcatagtgcctaatacaggaaggcatttaaaatacaatgcctggccagcactggatcccaaagtaatcccagctctttgggaggcccaggtgggtggatcacctgaggtcaggagttcatgaccagcctggccacatggtgaaaccccatctctactaaaaatacaaaattaggctgggcgcggcggcttacgtcggtaatcccagcactttgggaggccaaggcaggcggatcacgaggtcaggagatcgaaaccatcctggataacacggtgaaaccctgtctctactaaaaatataaaaatacaaaaaattagccgggtgtggtggcgggcgcctgtagcccaagctgctcaggaggctgaggcaggagaatgacatgaacccggggggtgggggggggggggggcggagcttgcagtgagccgagatcatgccactgcactccagcttgggcaacaaagtgagactccgtctcaaaaacaaaaaacaaaaaacaaaattagctgggtgtggtggcgggggcctgtaatcccagctacacaggaggctgaggtaggagaatcacttgaacccgggaagtggaggttgcagtgagccgagatcgtgccatttcactccaacctgggtaacaagagtgaaacgctgtctcaaaaaaaaaaaaaagaaaatacaatgcctaaacaaaaaacaccacacacatcttgctgaaatgaaatttccagtgacagttaccaaaatttttcttcttggtgcatagtcagtagccaggggttataaatataattatctctcattcaagccatttattgtgcaacctcaatttatgtaacatttttatgcttcggttttttcatctgtaaaactaggatagcaataccaatctcactgggctgttgaatgagtcaaacaggaaaccacacaaagtgcttaacatggtatgtggcatatagttcaacaacagccattaaaattaaccatacatttttattttttgcgggggctcaagtgctcttcctaccccagccccccaaatatctgtgactataggcgtgcacaaccctggtccactgtttaatttttttgtagccacgaggtctcactatattgcccaggctggtccccaactatctgctattgcccaggctggtctccaactatagctcaagctatctgcccatctcagcctcccaaagaactgcgattagaggcatgagccacttgtgcccaggcagctatacttttttttttttttgagacgagtttcgctctttcacccaggctggagtgaagtggcctgatcttggctcactgcaacctccctgccctggggttcaagcgattttcatgcctctgcctcccaattagctgggattatagacgcccaccatcacacccggctaacttttgcatttttagtagagactaacatggtttcgccacgttggccaggttggtctcgaactcctgacctcgggtgatccacccgcctcggcctcccaaactgctggtattacaggcatgagacaccaagcccggccatatacatttttattaaaatcgttctgtaggttccagaggaaaacgtcctcttgacagtcatggaatacaaatacagtacttatatcattttgtctgtaagatttccataattttccacccaacatattaaatgactgaatgaatgcgagcttaggaatgttaagtcaagatactaaattttttttttttttttttttgagacagagtctcactctgtcgccgaggctggagtgcagtggtgcgatctcggctcactgcaagctccttctccctggttcacgccattctcctgcctcagcctcccgagtagctgggactacaggcgcccgccaccacgcccggctaattttttgtatttttagtagagacggggtttcactgtgttagccaggatggtctcgatttcctgacctcgtgatccatctgcctcagcctcccaaagtgctggggttacaggagtgagccaccgcgccaggctttttttttttttaagagacacaattttgctcttgttgcccaggctagagtgtaatggcgctatcttggttcactgcaacctccgcctcccaggttcaagcaattctcctgcctcagcctcccgagtagctgggattacaggcatgcgtcaccacacccggctagttttgtatttttagtagtgatggttttcaccattttggtcatgctggtctcgaactcctgactcaggtgatcctcccgtcttggcctcccaaagtgctgggatggcaggcgtgagccaccgcgccccgcaagatactaaattttaaaacacatcttgctgaggccagacaaaaaaagccccacacactaaactagccaggcacggtggtgtgcgcctctggtttcatccattctgattgcagcacaacagcactccagcctgcgcaacagagagcggccctgtttctaaaaataacaaaacaaaacaaaaaacaccacacacatcttgctgaaaaacgtatcagaaactgctagagttagtgcaagtttatacttgaaaatactcaaagatatcaacgatcacctctccctcaggctgaaactgccttttgtgctcaactttgctagaagtttggtctgggaaacagctgacaagcttagagcttagatctcttttgactagcaaggaacccaactgacattcgaaagtgaattgacagcatcgagttgccactgaaaattaaaggaggcaggaaatagaacgttatgaactgaaaggaattggagaatagtccacacccctcatttgataaaatatcaagggtaccagagatgaagtgacttgtccaagattagagaattgtgtctgagtcttaaaagctaaacctctacaaagatgtgcatttgaccaaaacgctaaaatcacacccccaaatcactccccacaagaggaagtcttaaaacgcttcaagaagttaatctgcaaaggcttccctcttaaataacaggatgagagcgtttcataatttgtaaattaagccaatgcaaaagggcgcttattattttgagaaccaagcaatttggcaaatactctcagactaactttactcccgtggagaaactggtgatcatggatcagggaaatcaacgggggtctagggaggagaggctgcagatcgcccaggtatcagggaagacaagctcggcgcgtccgacagcgtgaaaagagttgacaggactactcatatacccgactagcttccgcttctttgttttcccgcttttttgtatcccccagcaaggagagtttcccacagcccggatttcccgactgaaggctcccactctccctagatcctccatgaaaaagaagaggctcgaccccgcacctcctcgccgcagagccgttcgtatacagcctccagctcctgcagctctgtcagggagcgaatgagctcagcggagatttcggagcagcggccacctcccaccccctcagacggctgctgcacccctgacagcttcggaggcgaatcaaggtccgccatcttggtccccattcggcacttccggtcccgcgaggccccctcttcgttggcgcctatttggggctgcccacagaagtgcccaatgaactctaatggttttttttttttaaagtctacttctaaaaacgtattaattttctattctcctggaaaaagcaaagcaataaagcatgtttaaataatttgtaatgccgtgtggaagcaagacggaagcattttttaaaaattatatatattcttcaggcgcggattgggtgcctttttccgccgcgcgccaccagaatgtccctgtcttgaggtctaatggcggacgccagtatgttggagttggtggtggcttaagttttgaagggaggtagcatccgttggatatccacaccatccttctcgctgcagggtaaaaaaacagcctggagacttccccgggcccggggaggcggagaccggccatatggaagggggacccgagactttggcgggggtcacgggcagtctaggcccgagaggctggggaccaggaggaggtaccgagggatggttgaggcgccaaaacggcttcctgcagttatctctcgcttccatccacagtgtgggaacatattctatctcaaaatagggctcgtggagattgcttttaacttctggggactctgagacgggggaggtgtgacaagcagcgggaggcatggatgtctccctctgggtagagtaaatggtacaccgaggggaagatagaaagatggagcgtgttaaaagcgtaaataacggaaacagtctttagagccaagactccggtttgaatttgtattttggtagttgggcaacttgtctcctcctctgaacctctattttctcgtttgcgtaatggaggacagagtttaaatgcgatgatgtttccttggaggatggagaagatgcagtgagcaatcatacaagctttttgtaataatggtaaacagacgtgggggaagttttttttgttttgttttgttttgtttttgtgacggagtcacagtctgtcgcccagactggagagcagtggcgcgatctcggctcactgccatctctgcctcccgggttccagcgattctcttacctcagcctcccgagtagactagctgggattacgggcgcgtgccaccacgcccggctaatttttctttttttgagacggtgtctcgctttgtcgcccaggctggagtgcagtggcgcgatctctgctcactgcaagctccgctttccgggttcacgccattctcctgcctcagcctcacgagtagctggaactacaggcgcccgcca

SEQ ID NO: 7188 - DNA, 6000 bp, Homo sapiens
agctcgcggaggcaaggccgaggataaggaggtaggtatcagccacgctcggggtcgggcccctgggcggcgccggagagcggtcctggtcactggcgccttttctccctttagtggatgcccgtcaccaagttgggccgcttggtcaaggacatgaagatcaagtccctggaggagatctatctcttctccctgcctattaaggtacgcgtcggtcgttggggcgttgagcaagtgcgaccccggagtcatttgggctggggttggaggattagcatctgccattgactcgcattaaagggcccagcgtctcgcgtgagaggttgaggttgtgttgcgggctggctgaggagaggattccacttagaggttggatggatacctgagcgaagccagagccacaaaaggcatttcagcgcatcttcccacattcgcagcgaattcatttcgaaagaactgaaagagaagcagcgcttggttcatgccatccgagaggatgatgaagttcaggttgtgggaggacactgtaagggttagcaaactgtcatagtccgcgtgtacgggacagctgtcatctgcatccagcgggtgcagtggggaaaggctaatggcatatttgtcatgtgagcgttcgccctagcaaggtacggtggtcatggctaggccaaagctggacaaagcaaaaggaaatctgagtggaaagccacatctcaccaaacaagagaaaaagggcaaataggaagaaacgattgagatgcagaaatagggtaaccttacatacaagcttccaaaaacgaaacgaaggggacagatcggggggaagccaggtgagggggttcatgacttcttcggttttttttgggcggggtgggcggttacacagtttcgccctatcgcctaggctggcgtgatctcggctcactgcaacctccacctcccaggttcaagcgattctcctgcctcagcctcctgaatagctggggttacaggcgcactccaccatgcccggctaattttttgtgtctttaatagaggtggggtttcaccatgtggccaggctggtatcggactcctgaccttgtgatccgcccacctcagtctcccaaagtgctgggattacaggcttgagccaccgcccccggccgtgactttggttcttgaatatcataatggtattaagtttttttttaatgctctccctacaattttcttgtttgtttcaggaatcagagatcattgatttcttcctgggggcctctctcaaggatgaggttttgaagattatgccagtgcagaagcagacccgtgccggccagcgcaccaggttcaaggtacccggctgtcctggagggggctgcgctgggcttgccgggactctctcggctctgcatagttgcacttggcttcacccgtgtgactttcgtaacggggagagagagaaaagatctcctcaggacctcggatgggccttactgtggcctctctttccttgaggggtgcaacaggccctgggcggtgggcagtgattgggtgtagggccaccagctgcctcacacacatcttttcgcaggcatttgttgctatcggggactacaatggccacgtcggtctgggtgttaagtgctccaaggaggtggccaccgccatccgtggggccatcatcctggccaagctctccatcgtccccgtgcgcagaggctactgggggaacaagatcggcaagccccacactgtcccttgcaaggtaggctggtggcaggtgatgggcctgccgtggggcaggctccctcgggcccccgtctcctgactccttccctcaccaggtgacaggccgctgcggctctgtgctggtacgcctcatccctgcacccaggggcactggcatcgtctccgcacctgtgcctaagaagctgctcatgatggctggtatcgatgactgctacacctcagcccggggctgcactgccaccctgggcaacttcggtaggtggtccacacatggggcatagccatggtctctcagctccgcttaaccacacgggtccagtgtgtgcttggcgtgttttcagggaggcagagaaaggctctcctaatgcacgacagacccgcccagaatggcctctctgttcctaggagtgcgacaatttttgggttgggggacttgcctcaagcacaccactgaccctcctggggttcttttgttttgcagccaaggccacctttgatgccatttctaagacctacagctacctgacccccgacctctggaaggagactgtattcaccaagtctccctatcaggagttcactgaccacctcgtcaagacccacaccagagtctccgtgcagcggactcaggctccagctgtggctacaacatagggtttttatacaagaaaaataaagtgaattaagcgtgttactgtttttttcccgtgtcctgcatggttagtggtggtttgaatctggggcgtggggccaatagatcacaccagacacacaggcaggttgcagggctttatatttcagcaacagtcatacagagccacacagcaggggcacccacagctgcctcaggaggtggcagcggcggcctcttttgcagcttttctctcttgcagcatcctctgcctctgtttggccaggcacttcctggcagaactgtaggcccccaggtcctgatctggggaagcaatggaaacaagctgggaaccgaggcctctgctacatgcaaagggggcaaagtcaagtgagcacaagggaggggagggaagatttgcaatggttctggcccccaggcctcaggaggatggtggggggttgggggtgggtggggcacgcacagcggtcctggtaggccttggccacctgggtgaactgctccacttccttgatacagttctgctggtagttctgtccttccctctgctgacaggctttgagccgatcctgcataatgttgataatttcttggtcgactttgctggtggagaaaaggagcaagagaggctaatcacaaggaatccttttcctgtaccctgtgagaacaattgaaagcaagagccctggggtctggctcctcccatgtcacccctaaaatctgggcatgccaccctgtggcatcccagggactagtgtcccagcagcacacggtgcagatctccacactcccagcatggctcacgtactagtccctcttccactgcatttcggcttcatacatgcacatgatgtcctcctccttgcactcagtgatgtctggcacgcggcggtactgccggtggtagtagtaatacctgttctttgcgtgctgccgctctataaattctgcaaagacaaagccacagactcaaatgcctcatcggtttggacaggcttttagctttcttatttctcataagccctttggaggggagagaggagaacttcctgagtgttccagcgtttagaaaacagcaattcgtctctctaagggatgtggccagccaggcaggcctgtgaaggcctaggctacagctgatggagagctcccgagtaccaggcatcatcctcagagttccacatgcattaccttactctgtcccccacacaagcctacaggcagctgcttctcacagatggcaaggactgggacgcagctctgccagtgcacctcccccagctgcacagggaccctgctgggtgcgcaaagaggctccaacagggagcctccagcaagcagaacttaccaccttacggcctcagcttcctcactgggaaatgaacgagctaaaaggagagctcgaacatccagacacataggacagacatgctctacaactgctacaaaagagagggagctgggtccgctgttgcacggtttccagatctttgggggtttgatttggagacttcaccctcttacggaagaaccaccagagcatgctatgcaccccaagtgttcaaaaagaactgaaccaggctggacacggtggctcaggcctgtaatcccagcacctgggggccaaggtgggaggatcacctgaggtcaggagttcgagaccagcctggccaacatggtgaaaccccgtgtctactaaaaatataaaaattagctgggcgtggtggtggtgcgcctgtaatcctagtactggggaggctgaggcaggagaatcgcttgaacccggggtggggcagaggttgcagtgagccgagatcgcgccactgcactccagcctgggcaacagagtgagactgtctcaggaaaaaaaaaaacaacaaaaactgaactgggcattttcccggttcgttccagagatgctgaatttgggcatctcggccatcaccccgacacttggtcatccggcagagagacatttgagagaggcctgaggccagcggtgcagtggaggggtgcccggggcggcggggggcggagagcagtgcggggtcctggggcagtgggcgctgggtgcggcagggagggaagagtcctgggaagaagcggggcatcccggggtgcaggggagagtaagggatcctgggaggtgaggtccggggtgcagtgggaggccaaaggaggcgacggagctcggaggtctccgggggtggggagttgtccccggggtgcagcggggggcggtctcaggcagacgggaccccggaggcattggaggatccaggcagggtgtgggatccaggggtccccagaggccggcgagggagccccgggctggggcttcgtacctctcacgagggtcacgggtcggtccacgatgaggtcgaacgctttcatcatgtagacgatgggattgggctgcaccggcgtgcggcgcgggggctcagggtacacatccttgtcccagctgtccggcatggcggcggcgggcgcggactccgctcccggacgcgctgccctggcctctacctccgtccgggtcccgcggcctaggtcgcccgctacagaggacgccgagggcggctgcgtctgcgcgctggcgccgcgatgcaccatgggacttgtagttccccggctccgccgggcgcggccgggacccgcctcgccgcagggcgcccccgcgtggggcctccgttctcggtctgtgccgagcgcctacgcggtgctggtcgctggtctgggcgcctgggaagcagccgcgaaccggacagattcctgcttacgatgaaagaaacagacaaaaggcaactgacataaggaataggagggggtcattcggttcccactgcgcgccaggcactgtgctgagtgcagcagggaataagataaactgtgatggagaacacaggccgttagagcgcacacgacaaagtgaacaaatagcacgcgattccaaacaccctactcctccaggaagctttcctggattgcctagtccctacagacttctctgggccccgctctctacaagggcccctcatggactggctggtgccagttaacttgggagcctgtctgggggagggcagggagcagaccaggaggcagggcttgcccttaggcggctcatagggagaaggcacctaccctgggcacagggccctctggccggctttgatggttccatcctggccctggggcactctggtgcttctaggcagctccactgagcagggtcctgctggccacatcttcagtctccacacctggcacggcccctggctgctatccaggggggacactggtcatgtcctgtcctgaggttgaggccagcgacacagaaccatcaaccctacagacaaacagtgagaggtgacagcgtgctggcagtcctcagagccctcgctcgctctcggcgcctcctctgcctgggctcccactttggcggcacttgaggagcccctttctgggctggccaaggccagagcgggctccctcagcttgcggggaggtgtggagggagaggcgcaggcgggaaccggggctgcgcgcggtgctttgcgggccagcgcgaattccaggtgggtgtgggctcggcgggccccgcactcggagagcctggc

SEQ ID NO: 7189 - DNA, 6000 bp, Homo sapiens
ctgcaggcctggaccctcccaacccagacactgacacccttaaacaggaccccgtccccactgtgttgccagggtcagaggtcacccagctgtggcagctgcctctatccctcactgcggtgacaaagggcccagccgccctccactgtccacccatcccctcctgccagccgaccactaagcagtcctgcccacctcccctccccacacttccaggagccacagagtggctgggaagctgggtggggccctgggtgtctccatgacttcctggagtgccttgggctggtcacctgtgagtaacacaggcccctacttactgagggcccagcagggtgagccgggctcagcaatgccctttgcatcccggcctgaccactgcttgtagaggtggaggcggaggcggagggtaggggaccaaggtggtgcgtgacctggagtgccctccacactgacactggctccactggggctggaagcaagtcccttcagcagctttgacagggctttcactcattcattcgttcacaatcattcactcctttgatgagctggtctgtgcctggtcctcggctcgacctgcatgtaggtatgcccagagatgagtgcaacagaccctgcctctgtcctcaaggtgctcacagcctagcacaagaggcagacagacacaatcccatagacaaacatgtgaagggaaggttcaccgaggacacacagtgacagagcagggggactgggcctcagcagtgggggaaggggtgatccctgcgatcccaaggtcatgcagaaatcaaacacctcacaggaagagagtttcagagagaacacaacctgtgcaaaggtcctgtggcaggtgggttcatggcctgtttgaggaacaagatggacaatgtgcctgacagcctggacagtgtgggtgagggctgaggctcaggatgggcaggtggaggctagacgggaaggggcctggtgcatgtggggagggggagttctgcctccagtggacgagcaatgaaaaggtgacggtgcgtttcaagcaaaagaggctaggccaggcctagtgactcatgtctgtgatcccagccagcactttgggaggctgaggtgggagaatcacttgagcccagtaggtcaacactgtgaccagcctgggcaacatcatgagaccatggctcttcaaaaaattaaaaattaaaaaattagcgaggtatgctggctcacgcctgtaatcccagcactttgggaggccgaggtgggtggatcactggaggtcagcagtttgagaccagccaggccaacatgatgaaaccctgtctctactaaaaatacaaaaattggccaagtgtggtggtgtgcatctgtaatcccagctaattgggaggctgaggcaggagaaccacttgaacccggcaggtggagtttgcagtgagccgagatggcaccaatgcattccagcctgggtgacagagtgagactccatctcaaaaaataaaattaaaaattagcctgctgtggtagtgcacacctgtggtccagctactcggctggctgaggcaggagggtcacttgagcccaggagtttgaggctgcagtgagtcaagatcgcatcgccagctgggcatggtggctcacatctgtaatcccagcactttgggaggccgatcactttgggtcaggagtttgagaccagcctggccaacatggtgaaaactcgtctctactaaaaatgcaaaaatgagctgagcatggtggcgtgcacctggaatcccagctactcaggaggctgaggcaggagaatcacttgaacccgggaggcggaggttgcagtgggccaagattgcaccactgcattccagccttggcaacagagtgagactccatctcaaaaaaaaaaaaaaaaaaaatcacatcagcctgggtaacacagcaagaccctatctcaaaaaaataaaaatagaaagaggataggaccagactggcacagagtagggatcacactggctgctgggggcacaggctgggaggagtggaaacaggtgccaggacagaagctgagggcaagtaggataggcaggtctcctgtggcccctctgctgcccttatgagaggtgggaaacaggcctggggccacctcatggcatcagaggctcacctgtgcgctgagccaactgcctgaggaggcctggtgctcagcctccctcacccccgttccatcgtcccagccagccagccactgactcaggagctgaggccgagtgggcaggaagtcagggagggcagggctggctcctctgacaggtcaggccagtcttccttgcctcaggcagagccatctggacaactctgccaggcaggggcatcctgtctgccgtggcacgggccaagaaatggggtcatggcacccagccccaaaggttggccaagtgttggcatgggcctgaccccaggctgtgtgaagagagccaagctgggtctgggtctggaacatggtacatgagccccagccaggcagagggccagaggtggtaagaggtattgccggcacctctcctgctggaatctgggcctgccactgggaagggctctgaccctgacccaggtccaggggtctgtcccaggcataaagttatagaaggtctaaagcccagatctgcccccgcccctcagccaggtcccaggagctagaagacaacctcagtaccaactgggaggcacgagcagtttcagcctccggataagccccgccagctctcccaggactcctgtgattagcaccgaggggaagcaccaagggtgtgcttgctacaaggagcagctgcaaggctcctcctctgtcctcccctccagcccatccctcccgctcaggccccttcccaccaacccagacattctgccattgcgccagttcaaagcaggctgggtcccttggatctgtccctatcacccaggctggagagttagttaggatcctttgacccccctccacccccacagcccctagctcccccgctgtgtgcagactgctggtaaccaggttctaaaggcgggtggcaccttgaaaccatacaaggcaatgttggataaactgagaggggtctcctaaaagcttcccttgagcctctgggtaagtggggacctgtgtaaggccagggcacaggattggggcagggggtgaacaccaggcagatggggtctctccgtctacaagaacctgccacagaggtgagaagcttcaaggacatcaggaggtcctgttccttgaggaaagccaggctggaggctcttggagccctctttacccctgaccctgggcatctgtggatgcttctgagggcttcagaggacacagggccaagggaagaggcagggaaacagtccgacaagaggctgcacagcactgattggaaactcagatggttctggggccgggcaggaaactcaagtgagtggacagcttggcaggaggcagcagggagtggtggggactggggtgacccatgagcccacattttggcagagggagcaaccgccactcagccccagctgagagttcctgttcaatgcaagctgggaagccccattttaatatgaaaccacctgatttttcaatgttagcagtgccttcaaagttgtaaaaactcccataaagcctgcactaaatgcacccaaaggccagccccaacccaggaacagaggtccgcaagccatgccctaatccatgtagaccgagaaacgtatgggttgtggagccctgccagccctggaaaggggccctgtggggagagggccctgtggacgggaggtccagaaggtgactgtcccagccaggccctgcttagcccttgacggctagacacagaggccatcctgccttctggagataactgagtcctccagagactaggaaaccctccagctggtgtggcccagcctcccagggataagccttcaggccccccaaagactagagctagcccagccaagggccttggctacaggccgggctggagggggtgtgggtgtcccaaggctctccggaagtcaggagctgagctgggcccccaaaggctctgaggcatgactgaccacaaacgcggagggggaggagggcagagtgttttcctggaatcctccaaggcaggggatttttctggactagtccggcccctggcacccgcccctcctgcccaatcaagggccactgtcaactgcagcccaggccccacccaccgacggtgaccacccctatgcctccacagctcaggcttgaagctgccagtaactgtggggccgtgggcagaccaccactgccctccctgacacagccccttcatctcataatatggtggggaagagagtccagggctgctcacaactcttaaggctgtcgtggctaagaggaccctgagctcagatttggcattggagtttatacttaggaggctcttgaaagggctttgtgtgggctgccaggagttttttgaaattgggattagctaccaacaataacacattgagagatttcacctaaaaatctggatttccagtttctcttcaaaaatccaaagctctagctggcccgggctggtcatgaggactcagcccttaccagccccactcccgccatcctgcctctccagggccgcagaggccctggggtggacttctggcatttgtcacctgcctggtgcctcataggcatctgggctgtgacgcttaggattcctaaatagtctctcgctttttacacaaaaagcagaaacctgcccagtgtcatccggcaaacccacgacgggcaaggtctccccgcgcaggtcaggtggccgcagggtgagggccagggcaacccggcccacgagcccctcggtggggaaggggcgtgtctccacgcggctccgccccggccaatggggagaggccccgcccctgccgcggcgggcccgccccccgggactcttaaggcgcgacctgcctccagcgagccgactccggagcccgagcccggggcgggtggacgcggactcgaacgcagttgcttcgggacccaggaccccctcgggcccgacccgccaggaaagactgaggccgcggcctgccccgcccggctccctgcgccgccgccgcctcccggtgagtttctgtggggctggggggctgcgggcggggaagggggcgccacggccaggctgtgcacacgcgcggggaccgccgccgcgcgcacacacgcactctcgggcgggaccgcggccccagccccacacggtcacctgggccgcccggcgggcaggccctgtacgctccctcccccgccgtcctggggcgccgacagccccgcggccggccagggtgcgcgcctgagtgtgcggtgagcccgcgaggctgcaagcagacaaaataaacaccccgtcccatgcttcctcctcccacggctgggcctccggcatgaccagttttatgaatcaaacccctttgagggggatagccaagccacaggcttgggtcacttttccctcctggggtccggcagtaggtgctgctgtgcagaagggctgcccggggtcctctggacccttgtcactcaaagcacagctgggggctacagatatgcagccctagggaggggcggggagtggctggtgggcgtccgatgcccatccctccaggtgggggatggacctgtactggccagggcccttagagcttcgggtatcaggcagggtgccgggtctctgcctctgccagggaaggggctttgcttgggctgcaaacccagtggcctggagccagcctagtcctttgtgtccctgggctggcagtgctggggcctgaggactgctgaggtcccctgtggtcactggcaggccagccgattggtgccaaccattctgcctctcccccattcgttaacgattgccacaccagggtcactgaccgcctcccctgctgtggcccaggggtggagtgtgcagggtggaaggaagaggtcctgggggtctaggt

SEQ ID NO: 7190 - DNA, 6000 bp, Homo sapiens
tgtcatctaccttttttcttttaaatagacacaacgtaatctgtcccttcaaagaaaaagtgacagtatatgagagttacagcttttcaaaaagaatctgtaccaagaatagagcatttgtgaaaacagacgtttgaagaggtttccacaattacgtgactgcgttcccaatgatgctacaagcgtactgtctatatgaacatttacacccgcacaccaaaacatcttcaacaccagaatctccacctaccctgatagcccctgaacatacccagcccaaattcatcaagggccctcagatgatgggtaaatgaaattgaaaaacaagtaccctgcctcgtaagcacagggtctgtgcctttctctgtatcatgttaatgtgtaaatgctgttaataactagggcctgaaatatacagaacttttttttttttttttgagacagagtttcactcttgttgcccaggctggagtgcaaaggtgcaatctcggctcactgcaacctctgcctcccaggttcaagtgattctcctgcctccgcctcctgagtagctggaattacaggtgcccgccaccacgcccagctaatttttttttttttttttttttttgtagagacggggtttcaccatgttgaccaggctggtctagaactcctgacctcaagcaatccacccacctcggcctcccaaagtgctaggattacaggcgtgagccacctcgtctggccaataaacagaacttacaattgatcttaaatgctgggacttaggattcaatgagagtttataaatgggatgtggacacatggctttcatctttaaaaagcatgtttatacaatagtttttgtagcattcatatgttggataaatttaatcatgtttatttcacctctcatccttttttttttttctctgttagagacagggtcttgctctgtttcccaggctgcagtgcaatggcatcattatagctcactgcattcttgaattcccaggctcaagcgatcctccctcctcagcctccacagtagctgggacttcaggtgcacgccaccatacctggctattttttttttttttttagtagagacagggtctcactatgttgcccagactgttctcaaactcttggccttaagggattgtctcatctcagcctcccaaagtgctgggtatacaggtgtgagccaccatgtctgtctggccttcgtccctttaaaagatccaaatttgtatatatttctatgtccataatacatcaggacagtaattgtaatttataacacataatatatattgggctgcatgtttacattcattcttttacacataacagtacacatgaaaaaaaaagtctgaggcctttttttttttttcatgcagggtctcactcttttgcctaggctggagtatagatagtggtgtgatcatggctcactgtagccttgacctcctggctcaagtgatcctcccacctcagtctcccaaatagctgggaccatgggtgtgcaccaccatgcccggctaattgtttgatttttttttttttttttttagagatgggatcttgccatgttgcccaggctgttcttccaacttgtggcctcaagtgatcctcccgccttggcctcccaaagtgccaagattacagatgtgaatcacttgcactggccaaggccaatttataacctcagtggcccttgtggggatgaggtaggaacaaatgcacaacccacagccattggctgagagctggggaggctggtttgaggctgtggcactggcatcgcaggccctgatggagccctagcttgctggcgctcatactcagcaccacaggcgctgcctggagttggaggcggctgcctccctaggatcacaggctctgcgtttacaatgaagctctggcaggggttcatagggtgtatttttaagccagagacgtggttccaaagggagctatcgggacagacttccacaaaatctctgctactgcctgtttccctaacccttgccgtggcttcagtcccgttctccagccagctagctgttctgcctccctaggtgcaggaaacgaggtaatgaggcaatggaaagtccccagagggaggtaaccatggatgttctccaacaagcaagttagcaaggacctcgttacacggctcccgcaaaggcacctgtctgcctgttgactccaaacctctccaacaccacaaacactctgagccattcaggggaatggggtctgcaaaactctcccaggacagggcctgacatgcctcactcttccccacaagatgtgggccttcagtgttttgtctgcctagaatatcacccggatacctttctctacctacccatcacttcccagcccacttctagtaccatggcctctgtgaagcttgtttcaggggctctttgtcttggctgcctgcacaatggaattttccagggcactttaagacagaaactgacatctgaggcccacccctggagattctgggctgttttgggcccaggctggcttcccaggtgattgtaacgggaagcctgggtggagaccctctgctcttcttggagccaactctcctccacctctggtcacctgttgcaccttttctggatgtgtcatgtggtactcatcttgttctgtcttatgtcacagttacttgtgaataaagcatctctttagctctatcctaagacccctccaagagcagggactgtgtccaattcatctttttttttttttttttttttgagacagagtcttgctctgtcgcccaggctggagggcagtggtgccatctcagctcactgtaacctccacctaatatgttcaagcgattcttctgcctcagcctcctgagtagctgggattacaggcacgtgccaccatgcccggctaattttttatatttttggtaaagatgaggtttcgccatgttggccaggctggtctcgaactcctgaactcaagtgatccgcccgcctctgcctcccaaagtgctgggattacaggtgtgagccacttagcccggcttccaattcatctttccattgtgcacaaggccttccccgtcagagccgtccccaaagttccagaatgcttcccctcaatagattccacagtctccggaagcagggctggggaagaaatggcaaactagggatcttacctgggccttcccagttgagactacgtcaaaatgggctcccatgagactgcctggctcatgcagatggaaggctaacatctttttagaaacaactcgtgctaccctctcctgttccaaaagcctgtctggtcagaatggtggtaagtcactttaggaagggagagacgtcgtcctgtttttcaggtagagttagcaaaggttcaatttaaaagaaaaattatctaagaagttaaaaatgaaagtgtgggggagattcccatgacatccatttttatctatttttccctttctcttacatttctcatgaggcaaactttctaaaacagtcttagtcttttcaagtttacaaaaggcagcgcccagactatctgaataaaatgacgggatgcccaggagaagagtgaacctctcccacgtgctccctgcctgggctccatgctgtcgcggggtctcggctactcactcagcgggcatttctggagttccaggaacacaaaccccaacaagatccaatcgacgccttcccggagtgcacagtccaggacgtaacccggagaacaagcggcaattaccccctgaggacatggcttcatctgtgcgacagacaccaagcgccttccccacgcccctgaccataaggccgtcccggcccttctgaagcgtggagccggcttggaacagagccaagacacacggacgcgatgcacacaggcgtcctgaccgagggcgccgagaacgcggcctccggcgactgccacaagcccctccgcctggactagcggctcccctttcccgttcccacacagtggagggcgcagcaaacgcccgccgcggaccgtgggccttggattcggatttggaggctcctcggaaccagagggtgggagcaggcggaatccaacccgggcggctttgccaccgcgcgcccggcatccctgcggccggaaagcggcgccatctccgcaagtgcgcggcggacgcctgcatccctcggggccggggctgtcggtcgctacatatccaccttctgggcgcacacagagggcccgggccgtgccgagtctccgcagggtcgagcttccccgcgcggcgcgggctcaggcactgcccgcagtgcgggacacgcccaaggctcggatgggagccgacgctgagggagcggcacctgcagggagcgcccggagccgaggccgcggcaggaggggcgggcgcgggcgcggccggaggggatgcggggtcgcgggaggggcccgcaggccaggccggagctggggggggcccgaggcccgagctggccggcgagggtgggaagggcggacccgggtggggaccgcaagccccgggaacgagcgcgcgagcggcgggtcccggcggcactcaccgagcctgggcgccggggcggcggcggccggcgcgcggccctctcgcggggtcccctccctcggccacccgggctccgctccagcctcgcagtggcggcggcactgacagctgcgtggccgccctggaggggagggtgcgcctgcaacccgctactggcggacgcagcggccgctccggctcctgcagggggcgccgcggatggcgcgtgcgcagtcggccgcccctgcaggtgcccggtccacccccggccgcctcggccgctccggccagcccaaccccgcgcctgcgcggtgccccctgcatgtcgcccatgcccggcagagggcgctctgacttgcgcgtgcgcagtcagccaccctgcgagtacgcggttcgcacccggccgcgcggcagcccgtgcttgcgcactgctctgtgcccgcgcctatgtccagcagggggcgcgcagcggcggtagccgagcgagggcgcggtggcctctgacaggaatgactctgcgcacgtgcgtttcgcagcagtggaagtcttcacacccggaaactcgactttggccgtttctccatttctcctcacgcactgtctttccttgggccctcgtcactcctggcaccgggggaagggcttccccgcctctggccgggcgctggggcgcgaccgaaggcgaggcggcggcgaggaaccttctggaattcggccgtcggggcaggcgtcgagtttacaggagaaggcgcggtgtcccgggatgagcggagtcgccctcacttaaggagcgagggaggcctcgggggtccccagccgggtaggagtcacctcaggcaggagggcccggccttgtcggggtcacctggcgggagggtcccggggtggggcggggccgcctgtgaggagggtccagagagggtcggggtcacctgaggggagggtgggggggttcggggatggttggggtcacccgacgggatggtccggggagggtcgggttcacctgaggggagggtcggggagggtccggagagggtcggggtcacctgaggaggtggtccggagagggtcggggtcacctcacggagcgagcggaacggggtcacctggagggagtgtccagggcgggggccctgcagggagtcgcctgcagggagggtcccgggcgtgtcacattaggcggtcccagggacgggtcgcggtctaacgggacgggagtggggaggtgggtcggggtgtccctgggccggaccgggtcgtgggactgggtcgccccaggcaggagagcctgggaggggcgggcccccttggcgtggcagggagaggtggagtgagggactcccgggctccagcatgagggcgggcgccgcgcggggccgacagttgccgcgggccggggccaatgggtccccgagcgccgccagcggccggaccacagtgaggtgcgtccgtgg

SEQ ID NO: 7191 - DNA, 6000 bp, Homo sapiens
tcatattgaattatagtgggcactaaatctaatgtaactggtatccttatcaggaggaaatgtggacacagacagaaggaaggccatgtgacaacaaaggcagagactgcagtgatgcagttgcaggtcaaggaacatgaagggttgtgggcaactgctggaagctaggaacaggcaggggaggatttgtgccttcctagaacctttagagggatcacagccctgctgatatcttggcttggcttagacaccttgacttggacttctagcctctagaactgtaacaggataaacttatttggtttaagctacccagtccgtggtaatttgttatggcaggtcaaggaatcaaaatataaagacattgatcttagtttttctttttcacaggaccaagataccacagcatttccaaacacttgaggaagtgaagatactcaccagactggatgtaagacgcagcaaatgggtggttcctaaattgctgaagtcctcatatctactgcctgctttaatgaacaaaccaattcttgatacaggagaatagttttccaaagaagcaatcaccaagccatttggtaacttggtaaactgtatttaaaataaagtagagatataatgaatgtcttcgtattaccaaggagagtaaggcatgtatagcttccagcgagcaagttagtgggactaacctcaaggtcctgaggttgtggcggtgctcctgcaggcgcagctgtggctttaactttgggggcaactttgagggaataaaatctctaaacataaaaaacacaggttacacgtatttctcacaagaacagtgctttatataaaagcatggtatcttagggtacccaagcgacagagggtgttcgggggtggaaggagcaataaccacctccatgggaggatttacctgcataacattttttttttttttttgagacagagtgtctctctgtcgctcaggctggagtgcagtggcgcaatctcagctcactgcaacctctacctcctgggttcaagccattctcctgccttagcctcccaaatagctggaattacaggtgcgtgccaccatgtccagctagtttttgttttgtattttttagtagagatggggtttcactgtgttggccaagctggtcttgaactcctgatcttaagtgatctgcccaccttggtctcccaaagtgttggaattacaggcgtgagccactgcaccccgcctagctgcataacttattatggacttactaacccaccagtttacccaagccattcttaaacctctatttattagtgatttatagagttcttgatgcttattttttaaatgatgtaaagaatcactgtattttcttatctttcagttaccttataaaagtttcatggttctgtgtagttctaaagctttggcattttttgaaaaagtgtcagatcaccccatccacaaccttttttgttgagttggagtcgtgctctgtgtcccacgctggagtgcaacagtgcgatctcgggtcattgcaatgtctgcctcctggattcaagcgattctcctgtctcagcctcccaagtagctgggattacaggtacatgctgccacgcctggctaattttttgtattttagtagagatggcgtttcaccccatagctcaggctggtctcaaactcctgagctcaggcaatccacccgcctcggcctcacaaagtgctagaattacaggtgggagccaccacacctggcctgtgtccacaaccttttataggtttcagcttcttgcttcttttatctgcccaatgaatgtcatccgttcagtctaatttccaattgaaatggtttcatctccttaatcatcttagtaacctttaaaaaagacaaactagccgggtgcggtggctcacgcctgtaatcccagcactttgggaggccaaggtgggcggatcacctgaggtcaggagctcgagactagcctgacaaacatggagaaaccccatctctaataaaaacacaaaataagcggggcgtggtgatgcatgcctgtaatcccagctactggggaggctgaggcaggagaatcacttgaatccgggaggcggaggttgcagtgagccgagattgtgccattgcagtctagcctgggcaacaagagcaaaactccgtctcaagaaaaaaaaaagaaaaagacaaagtatataccaacttcctccaagccctcaatattttccattgtatcttcactcttgtgtgctgtattaagaccacacaaccaaaggtcttagtttttttgactaaataaaacatttatgacatgtatgtcatcctgagattaataatggcttcatccacatcagattctcaatatataaaatgcagttactggtagggtgaaagggtcccattaaatattagataatggacccaaaatgcattcattttattcagtttgttttggcaaatgttatacaatgccatacaaatcattctgattatgactaaagttcatgaggttattagaggagatgatgagtgaataaaatttggtgctcccaagacccaatgaacacctcctcactggagtttcccggacatccctgcacagtctgcaatgcctccactctgtgctgtccagaaggctgtttgttgtacatcattagtgctgtactaggttggctgctggttatcacttgcttttagtactgcttttcagttatgaattacaattagctttactttatcgtcatcaatttagtttgctgggtatggtatagttaaccttctttgtaattttggcctataattttccaaaaagtaaacttttaagatatatgggcatagcaattcaaatatgaataatctataattccgttaccaagtgagattttaggtgttttccaaccaaatgtgcccaaatagtaactctttgttggtaatttttttttttttttttttttgagacggagtctcgctctgtcgtctaggctggagtgcagcggtgcgatctcggctcactgcaacctccgcctcctgggttcaagagattctcctgcctcagcctcctgagtagctgggattagaggcgcccaccaccaccacgcccggctattttttttttttttgtatttttagtagagacggggtttcaccatgatggccagactggtttcgaactcctcatctcaagtgatccgcctgcctctgactcccaaagtgctaggattacaggtgtgagccatcgcgctccgccggtaatgtgcttcttaatcgtcccattcaaatcagcaaattatcctagtaactgtcatgcaatcttctaaattattttgttctaataacaagatatatctaagtttattctcctatataaagtgctaaaattagacacataaataattgctttcaagtttactgcaatttgtttactttgggcctctccaactgttttctctgagctttttctgttgcaaaatagaatggagaaggaaatgttggggtcttttgccaatctaaccgtgcttccctccaagggtaatcactggtgtgtctaggtatacctggaaggttaatgcaattacagcctaaatcgatatagcccacagcacatttatgtaaacataaagcataagaacattccatgcccaggtctggtcttctgcatctccatctaggggggtttctcaacacaggtactactactggcacttggggctagataattctttgctgtaaggcgaagtttagcagcatccctggcctctccatgccaatagcaccctccttacaagttgttgcaactaaatatgtctccaaacatcgccaccggttccctgggggcattctgtccctcgctatgattttttaagtgttcccccttacccctcttaataaccactgtcccacagtgatataaccctgatgtgtgagttttccccaagtgacagctatgtttaatttaggcttgaaggggaaacttaattaaggagcttttgaggacaaacagagacgtcttggaggaaccgtctaacatacgatcaagaaaagcaacgttagactactaagacaccatagtatttaacaatgaagttccaggtactgtaataagtgttctatctgcattagctcctttcttatacttttattcgctggggaaactgacgctccgtgataaaccaaggagcagaggctgcagcggataaagtgaaggtggggggctaagtgcgccgtcctcccgctccccctgggtttcacggtctctttctccagcacttgagtaccggagtgaccttcagaagtctctccaaggactcgcttcaactccgctctcacgtcctgcccctctcttcaggtttcccggtgttaggtctcttgtgctcacagcatgagctgggcctccaaagcctgacccagtctgcagcccacttggcccgcagggttcagctgaagggcagaccgaatcccaaggcccagaccccagaccagacacctccgcctcgtatcaccttgtcgacacactgctccccagccctttcccaaacccgccacctgagctcaccgagaaagagccggctctggttagtagcttcatgattcaagattgttctgacacacggtcactgccggattaaaggaaagcaagatggtggcggaggccgggagtttcccagcgttccccgctaacactttcccacgtccccttcgtgaggtactctctatactgccgcgctctactgctctctttataaggttggaccagtccaattcctccaagactcagaatagggagacgcacaatttcccaagtaaatatatgcagagaataatgtacgtcactgctttttgcgttcttctcctagcctgaatatccagtatgcaccccttttctaagtacgtctgcagcagcctgtcacaactccccccgctatcttgggctcttccgctcagcattgtccaatgggacgcgcctctcttgggactccgcatgcgccctccgggatgacacctgcactggaggccctgggtttccgcgttcctggacgttggaggcttcaggagattcctgccactccacctttctgcagaggtattgggtatcgaagcccggcgtagttgcctctcgctgggtgaagtccttactggatctttagctccgtgaaacaggggcctcgttcaacgtattcgccgctgtgtcccccagagcaggcccgggacacaccgggagggtcagcaacctcggggaatcatcacaaggcttttggtctcgtggaatttacgtcctaggctggggctacatagaatataaaaacttagctatagtttttgtgttaggaaaatagaaatgttttggatagtaggtgtgttatgtgagccgaaaccggcagttggagaaagtcagtcacgtgacgacttggggcgggggcgttcactccggtcctcagcgagtgttaacccagaaagtgccttgagctaggcactatgccaacgcgagaggcgtggtccctgccctttagggactttagagtttcgtaccttgctacgttgcttggttgggaaaccgacagtatcagcatcaatatcatttaggagttgattagaaatgtatgaactccaggtcccatattggatccgaatcggtgtttttacaagatcctgggatgacttcgtatgcacaatagtttcagaaaggctggtggtgtagacgttacaaggcataggcaaatgtactttctttttgccttgtgtctgaattgctccaggcctacaacggacttgggctctctaattaagatctgggcattaagaacctggcaccaacccaatttctgtgcctgctggggacgccctcaacccaattcataccacacagtttccccacatgtggtagatttaacactagtggtgcgtgagatgattttaagttggtacatagatgaacacttccattttttccttttaaaaatttgtataaatttaaggggcgcaagtacagttatgttatatggat

SEQ ID NO: 7192 - DNA, 6000 bp, Homo sapiens
ctgaattccgactgtgggtgtgtgtgatttgtgtgggttgaggaatctgggccggtgaacgggacctgagtatgagggggagaggcttgggcgtgagatgactcatatctttcagggtgtaggagggcttattggagggggtaactttcgattcgaggggttctgtgtacacagcacccgaaggaaagatctatacctgtgcggtgcagcaccggcatgcatggtgggcctcagggggccaggggtcctgggcagtgtatgggtttgcccgtctgtgcatgggcattcacctgcaattctgggccactgtacgcacaagagaacgagagatataaacgagaggaaagaacaggaggtgtttttgcacaggggcatttagagagcgacgtacctagcaaaggcccaggctctgggatggctgtcctgagtgtgacgcctgctggttcctcccaacccacacccactgggagcctccacttcccagtgtggaaaatgagaataacaagaaaatcaccctctagaggtgtaagaattaagggctgtaattcatttaacacttgccacatgcttggcagacagtaagtatctaatgttgctatttaacatcatttacatgatcaccagtctcctgtccagatgttggttctaataatgatcattgtaagtgacatgcattgcctggaaactgtaatgaaaaaactaacggtaaataataatgtatgcttactatattcctggcatagccacgcacaccattctcaattaatcctcacccaccttacaggtattgttatcaaccttttgtaaagatgaagaaacaagctcagagaggttaagtaatccaaccagggtcacaaaacagggcatgtagggcagggattcaagcccaggatgcaagctggggttgtgactggaagcaagtgtgcctgtaccccacacccccaggcctcaccatgcagacggtaggagctactcagctcaatcagggagtaccctaaggggaggacacacctggaggaggaggagttggcacaggtgtccccagctgaaattccacaccaattccagctacatgtggaatacgctggccgctggtgcatcattcatgaaaatcgccatttccccaagtcagcgcccagagctgggctgaggttccagagcttcgctgatggctgcccaatattcccccacttcttgtgcaaaggaaaagtcagagtggagctggggccattaactccttcctcactgcgacatggctgtcaccacccaccagttgactgggaaggaggcatggaggtctctgccccattctggcgatccccacaccctgcaggctccttccatgggctgcctggggacactcagtgccataatcacccccttcccaacaggaagctgggagccctccagaaaagtggcccagatgtccaggcccgagtcctcaagaccagaagggtcaattctatttcctgtcatgccatgttgccaaccaaaagggagagccggccatgaagctccccatctgcatccctgcctggctttgcttatgggagagctaagaaccgcataccccttgagaggatgttgacaatctgggcttcttccggcaatgtgatgcaagaacgaggggggtttggtcccagacagatcggggatccctgcagccaaaggctgggactcctgaatcacaaagcccgggccttactggcctcatctgtagaatggacatgatcaggcaggaccacaaggaggggaagggcttaggggagcaggatgctgagggagctgtctggctggagtggagagcccagggaagtggacctatagagaaaaacatctctccccttaacccgtcagatcctaaactacacggccagccacagaatcagatcctttcttccctaaaaagtcacaacataatcgccgctccttctccctcaaatgtaagctccgtgagggcaaagatctgtgtctgctttgctcagtgtggtttttccaaagcctaggacacctggctgtctgctttgctcagtgtggttttcccagagcctggcacacctggctcatagcaaacattccatcagtatttgttgaatgaaagaaatgattcctcaggactctggagatgtctgaggagcgtgggcagagtggggtgctcagcctcacccccagatattctgaggagtttcagagacaacgaaagccctggctcctctcgtccccatgccctgcgtgagcccggcctgcacagtcctcctggagcaggctcagccaggagcacctctggaggacaggtctgcagagcctcctggccagagcctgggggtgatagcagcccctgggctccaaacagcccagctggaagcgccaggctgcctgcctgtctcagccacccacatctgctgcccgggcctccctgtgcctgcacgcgcgcgcacacacacacacaggcccacagcctggaaccaagggagcaccgtctgctcccgcccggccctcagcgccccagggtcagggaagctctccaacctgctccatgaaaacaacaacggcacagaaaaggccgcctgagaccggggctgggcacggctttgacaggcaggagcattatataattaactgccccagactcctcctcctcttcgggtaataacgaaccctgcttttcagttgcataagccaaaataataattactctccagccccctgccactcctggatgtggccgtggagcaggtgttccgagctttcttcatgagactcggaggcagcgagcgggcggggaggactagagcacacgtacgctcaggatttttattctcggcagaagcacaagtcattgctgcgtctcactcccttcccaggcatccatgcctgaaacaggcgagccgcccgagggaggcagaggacccagtgcctctgaggataagctcccacatgggagtggactggtcggggaagccagtttgtttggggtctggcttccaggaaaggaccggctccatgcgtgtcaggtgcactgaggagtggatatcggagagtccaggcaggcgggcagctgcagagccggccaaggttccctgcacagaaaccatcttacagcagcagcagcagcagcagcagcagcagcagcagcagcaggcagctccctggcttccggccccggctctgccccgaatgcggtggcatcttagaatgaaggcacagatcgattccctcaactaatggtgaaaacgatgcagccactgaaagacgagattcctgggctctcactgagcagatgggcctccctcctccctccagcagcctgcttcgacagcgctagtccgcgtccaaccacctagaagtgtactgcctggctgttttggttcgggttggcatcccccgcccctagcgctccccatcactccctttctctcggcttgggcagattcggggctgaggaaggccctcgggcgccgcaggaacaccagaagcgaagctggggcctgatcgaagggcggcctccagggtggggggcaaagccaacaaggggaggggcccttctcccagccccctctgcccttgctgggttccccagggccgcgggcccagcctggcccttcccgcaggtctccggcctgctgtgtccgacgcacggaggctctgctgggccccgcctggctctgcccctggaaagcccccaacacccttcagctggcacaggggcactgtccccaccaggcagcggggcaacctgtagccaggagccgccgtggcttccagggaagcccgggaaaggcccctggtgcccacggcccaaccggaggacgcagctcaacttccccagagatccacagaaggggcgcgatcggaagcacgtccctcccgccccggcccggcccggcccgcggcacctacctccgtccgagtaggtctcggtcccgtagccgtcctgcagcccgttgctccaggtcccttcgtatttggccccgttgcccgcgcactcccgcaccccgtagcgccccttgaatccgtgcgtccactcgcccttgtacacccacttccccttgctctccaggccgatgccgtggcgcttgccctgcgcccaggtgccctggtacgtgttgccgctgggccaggtgtagacgcccagcacctcgaagccgtggctccacgagccggtgtattcgccttggcccttggggccggtgcagacgccatggccgtgcgccttgccgtcctcccagcctccacagtaggaccctccgtcgtcaaaattaaacctgcccccactggacatgcatgtaactcggttccagatcccgcaaacggtgaaaacggactcaggcgatcgacacagcagagtcgcggccgccggcggccctgggtcgcgagcgttttccggaggagaggaggacgcggccccggagcgcggtctcgggcgcgggcggccgcggcgccggctccggaggaatttcagtcaatcgggggcgattattccttttcgagctgcgccgcggagcctgaccagcgtctcgcgctcccgctggagacaggaccggaggggagggggaggggaggagggagggagggggcaggagcggcggcggcggggcccgcggctccacctcagcggcgagagggcccctcgccggcagccccgcggggagggcgccgcgccgaggccgggcggggggcagctcaggcccgggccgcggccccccacctgcggctgccgcgctgcgggcgcccgagggcggcggcggggcccgcgggcggcggcggcggcacgggcggcggcgctggcggctgcaccatattgggggccgcgggccgggcgcggggcggcggcggcagcagcagcagcaatgcggcggctcgggcggcggcggcggcggtggcggcggcggcgtgcgctccgggcccggctcgcgcgctcgggccgcgcggcgcgcgcccgcaccccgcccgcccgcgcgcccccgcccgccccccgccccccgccccccgcccccgcccccgcccccgcccccggagcgcggcggtcccaagaggggcgcggcccagcaggctagggcgcggcgcgcgggcggggaccccgggcgccccgccctccgcgcccccagccccgcgctccccgccctgggcttccccggggcccccgccggactggaaaccggggtccagccggggcgcccccgccccctccgggagtgggatttaaaggcacaggaactgcgtcatgggaaggcgcgcagcactcagggcgccctcggccccctcccgggagctgggcggtgaggcctgcagagcaggacctgccagctgagcgcccctaccctcgcccctgcccgcccccgcgcctcgcccctcccgccgggctcggatctgccccgcctgcccctgactcgactgaggccctttgcaaaccacaggtggttttctccggtgacaaacaatgcttccttcttccttccgggcagcttgggtccaagagtggggggaggggggcttaccccagaaaacagggatttggcgagtccctctcccctataaattgagtgagagtcgggacacacgcgtgtatcttggagcaaagtcacccgaattccgtgcgccctgcgccctggccaacaggtagcgcccccccactcggggaacggtcgcgcttttggggagcaaagtgggaccgccattcgggcgtttctaggtctctctccagacatactctcaccctccgcccctcttcccacgcacaagagagagtctgattcttggatccgagcatcctgggatccatttaaaatgcatttcctggaccataaatcctcaggcagaagccggcgtccccagccctcctgaaatgcgtgcgggaaatggcagcagaccggtgcagtgggctgatgggggtgtggaggctgcccagggtcctcgctcctgggagtgtgggccggtgaccgcagcgcggtgagccagaaactgcaagccaggcctggagcctgagattaggacaggaga

SEQ ID NO: 7193 - DNA, 6000 bp, Homo sapiens
ttgtccaggtccacatccgacgtcccgatgcccaccatctaggaacaggggccaggcagagggcgcggggctgggctgccggagccaggttccccagaagcaccctgggccgaagcaacttaccatgtcggtgccgtagacgggagaggtcatcttgatctcccagaagtgctggccctcccccagctccttggtgccccggatggccgctgtgccgcagctgtactccatgtggaagctgaccttacggttgtcacagctcagcagggtggctgatgacttatttaagtcatcccagacccagtcgaaatctgcaagagaggcccaggctggggcagccctgagagctccatggggctctgccctgcccacccccaggcccgcccgcagtgcagtcccagcaggggctgggccccacgctcacactcgtcttcctctccgcagcggcagtccctgccccggtgggccgagtgcaggctgctacagaaggaggcctcgctctgcccagcacagtcacagaaggactcgccggtcacgggcaccgcactggggatggatggcggcagcgtggagtactcggggtcggagtccgagtcgctgtgctgggagagaagggccggctgttactacctgttgcccgctctctaccctctcacccttgccctctgtccctgtcccaccctgtccctgacccacccaggaaaggatgggggtccaggcctccagggacttcacagtaccccgagcgcacagcccaggctccctcccaacgggctccggctctgccccattctgcatgaccaggagggccctggaggcccagccacagagcagtagccaaggctgcctggcctccaagtggtttctagacggtggataagccccaggtccaccccacctgcccagagctgagatggtgtggacaccttccctgctaggccagccctgcaggggcccccaggcaaggccaccacccccacaccaggcccagctgcagccacccggcctcagggcagtccccaccacactgtggcccaacgaccttcctgttacctgagcagacctggctcaccacagggtcctactgcccagtgcccactacaggccccgcccctcctggtgcaggtttcagctgtcacctccctgaggcttctccagccccttcacccctgttccatttttcttcttttgcttcactgaagttctccttggtcctgattcttggcctcctcccaccagaacgtgagctccttgtgggaggcagtgcccctcccagcctcctccctgtcacagactgtgtgggggccacccaggggctgaatggaccagggggtcagcagggagagtgctaagtggtggcggggggcctgtggcagaggccttgtgacagtgagggttgagggctggtccagagagatgatgtgatccccaggagaagccacaggggaccatgacatgggcgccaccagcttccaggtgaacgtggacctatcgaaagccagcttcagggcaggacactgtcctttctggaggggatggccccaccccacagacaaggcaggcccagacaactctaccccactgcctagaagtgcgggtccccagagccagggtagaccccctgagtcaggagcccgggcacagaactgagcacctgcactgcaggcccagggccgggttccctggagaaggagaaagactgaagccactgcctacctcctgcccacaacagactgcaggcccatttggtgacacaggacaagcagcacatgtgtcgaacactgccgagcccgcaggcacgcctgcatcccacagccacgagcctgtgaggctcaggcatgtgacctgcaggagctggaggcgggcgggaaggcaggtgggggcctctccctggctggagcagggagctccaggagacctcaggacggcccccacccggtgggtaaggaccctgtttcccaatttgcccccaaggcctaatggacccaccgggcttagggagtcctcactcagaggagaggagcccacccctcccaggacacctggctgagccggaacagcagcgcaggggagctgtgacagcagagagcagcaccaggtcacacaagcagccgccccggaaggacacggcccatggtgacagaggacaagcagcatgcgtgtgtcagacactggcctggcctgtggacacgcccgcgtcccacagccatgaccctgcgaggccaggagagactgctccagggcacatgacctgtggtagctggaagtggggcagggaggcgcagccacactcctgctctggtccgagggagatctcaggaaaccgactgggaaatcaccccccacagggacccccacccctcccagcctcactgcgcccgtcaggccaggcagctgccctcagggtctgccaaggtgggggtcaggggccatgggggcaggtagctctgcctgcaaagcccacaagcatgtcagatcacctgggctgcagacagacaaacacctgagctgttctgaataccttcaggttcctggcctccctgagcaagtgcagaaatttttaccttcaaggatcagggtttttctgtttgtttgttttttaacacacatatatgtgaacaaagagtatgcgtttgtactggcagaagaagcgtctggtaagacaaccagcaagttaacaatggtcacctccagaaatgggctgggtaaaccaaagaatttttttgtttttgttttttttgagtcagggtctagctctgtcacccaggctggaacgcactggtgtgatcacggctcactgcagccttgacctccctggctcaagcaatcctcccagctcagcctcctgagtcgttgggactacaggcacgtgccaccacgcctgacacattttttaaatttttgtagagacagtgtttcaccatgttgcccaggcaggtctcaaactcctgggctcaagtggtcctccagcttcagcctcccaaagtgctaggattataggtgtgagccacagtgcccagccccgtagtggagaatttctgttgaatgaaccaaaagcaactgccaacctctccatgcaccatgtgtttcagaggagaaagcacagtgaagaatgcagtgtgttctgaggtcctgtcacccctgaggctgtgtgtgtcctttgccaaattaaagagtcttactgaatgcggtgcatccaggagacaggcccaggtttggactggtcctctagcctcagaagcatctttttctccgactgattccgtgttcaggtaatgtctgcctgcctgcctagggcatctccacaccttaggccagccacgtccgcctcgcccgctggaacctacctgcccatcagagtcgtagccccagttagtggagcctgctagagccacggcccgggcatctgcgtctcggcgggctgcactcaggacgaagtgccaggccctgctgttccgggggcgtctggccatggtggaaagaatctagaagaaaacacaggctctgggcaaaggaagactcacagcactcccagccctgagcttccaggctgggccacggacccactcaaagtggggactgcaggggccgcaccggtgcccagccagggctccagaacgcttcaggagcccgtacctcactccaggatctgagcagctcaataaaacccaggtagatcctgtgaaacgccacccagacacccatgactccggaatgcgaatcccagcccctctctccggttccacctcacgaacctggctgccccgcccgcctgtcccgcaggcatctaaaacctccactcgctcctcctctgtcgtccggtttgacaaatggcatctccggcctcccagttcctcatgccagaagcaccgtgaccgctccccgacaccttcccctcacgcccggcccgaccgccgcacccgcctgcatcctcctcccgccaccgtctcctgggccgcgcagctcgccttcccctccgctcgctaccgccagggctcctcgtgaaacacaaatcttaaaacctgctcagcgctggccgctgttatggtataaaatgcaaaaggctgcgagggccaggtctgcgcttcccaggccacctgcctggcacctccctcgccagctccggggttcccgcctagccttccagggccgacccctgcgccgggctcgcggctggcaacgcccgctgggccccgggtggggttccagggaggccggggcggatcgcggcgcccggaccgccgaaccctgcccagccccaggcgagcgcgtgtgcagcgggagccgccctccccggcggcagcccggcctggctgttccctcccgcgggcgcgcgggttccggagtcggcggcaccggggaagcctctctcgggcgcggccctccggagaggaacaaaggcggcgccctggccgcgctgctaccgccgcgcccgcaaggtcagcgcgcccgcccagagcccgagacgtcggcccgtgccccgccactcacctgcagcccccgctgcgcgctccgccggcccggccctgacccactttccgccccggagcgagacgtaaacaatccccgccccctgcgcccattggctccggcggcgaggggcgggcacacctgtctcggagcttcgggagagggggcgggagtcgggtgacaaagctattgccgagaggtttcaggaactgtcagtcctaatccaacgttcctattggtcagttcccaagcggttggagacaaagctcgcgcgcacattggacccgggtgggaggtggtaccgcaggccgcgttgaccggaaagtaggtccgtgtcatcgtctgcgccggaacctgcgggaccggatcgagagctcctccggcaagctgattggctgggacagcaggattaggcctgtcaagaagagccacgggcgggcacgcactgcccattggttggaaggcccttcgctctagctgggaggctgacggcccgcgggcgtaagcggactgcagccgcgagctcctggaggcggcgggatggaggcggcggccggtgagtggcgggccagggtgcggagccgctccagggcctcgcttggggccccgccgcgtcccttcccggggcggcctcgctgcgtcgcgcgcctccggtgcgaccatcaccggccggcgtggctgggccgggccagaggccgcggcgcgggcattttctaaacagggtcgtttcccgcgtgctcctgcttcgatgtggaagctccgtgatctcggagggcctgagtcgtggagttgggggagcttttaaagttaactttgttgagcaccgcgttgtaggcgggcgcggtggcgcctgtgggccccgctatcctggaggtcgcggttgcaactgcaccgcagcccgggcaagagcgagaccctgtctctaaataaatcacacgcgcgcagtcatgaaagtaagacggacgccagaatctcacatgcttttaagttctttgtggaagtggcgctctcagtgttcagaaaagtgtaagttgcgcgggacagaattcacaccagtggggacgatccgttcgccagatcagcgccgtgggccctcctgagtagtgggagccgcatttatcttctaagagacctcgagtccgataccaaaaggaaaacattcctcggacagcaaggtcttgcagcacaactctgacagattagaaaccgagtgctggagtcttttgtttttgagacggagtctcgttctgtcgcccaggctggagtgcagtggcgcggtctcggctcactgccagctccgcctcccgggttcacgccattctcctgccgcagcctcccgagtagctgtgactacaggcgcccgccaccacgcccggctaattttttgtatttttagtagagacggggtttcaccgtgttagccaggatggtctcgatctcctgacctcgtgatccgcccgtctcagcctcccaaagtgctgggattacaggcgtgagccacggcgcctggcccagtgctggagtcttatt

SEQ ID NO: 7194 - DNA, 6000 bp, Homo sapiens; identical to SEQ ID NO: 721

SEQ ID NO: 7195 - DNA, 6000 bp, Homo sapiens
ccagcctccagcctgagtgacagagtgagaccctgtctccaaaaaaaacaaaaacaaaaacaaaaacaaacaactacaacaaaaacccgggcaacagagcaagctcgtctcaaaaataaacgacaaaacaagagtggaaaaaaaattggaacgtggctggcaaaagtaatcaactaataattgtaattaataactgcaattttttttttttttttggagacaaagagtttcactcttgttgcccaggctggagtgcaatggtgcgatcttggctcaccgcaacctccgtctccttgggttcaagcgattctcctgcctcaacctcacgagtagctgggattacgggcatgtgccaccacgcccagctaattttgtatttttagtagagatggggcttctccacgttggtcaggctagttccaaactcccaacctcaggtgatctgcccgccttggcctcccaaagtgctgggattactggtgtgagccaccgcgcccggcctgcaactgttaatgattactaacaactgcagcagaaattatcaataactagtaaacctgaaaagtcataagacctaacaattctatttccaagacatcccagaaaaattctggcacatgtgcgtggggaatatatgttctaaaagtccagcaaggtactatttttagtagcaaaataatggcaaccaaatgcagatgattaaggaaaaggacaaatacaatttgctgtgtacacgtgtgtgtgtatatttgaaaacagcacacaacaatagaagcaaagaactagatctacgtacaaccatgagaagttcgaaaaggcaagaaaagcaaattcttgtacaaactaaacataacaaaacaataatatattcattcacaagacatttgtttctcaacagatagtctcgctatgatgcccaggctggagcacagtggccattcacaagttgagtcatagtgcaccaaagcttcaaatgattctcctacctcagcctcctgagtagctgggactacaggtgtgggaccaccacgctcagctctattcatgagcggtttttatttatttttttgagacatcctcactgtcgctcagactggagtccagtggcacaatctcagcttacagcagcctcaaactcctgggctcaagtgatcggagctcctgccttggcctcccaagtagctgggactacaggcatgagccactgcgctcagcctcatgagattttaaatgcctcagagtagctgattttgggaagagaaatgggcctacacattaatctatactttttgttatgttgaaaaataacgtgatgcaaatgctaggagtggttaattatagatagtaagagagtaagttgatgttttggttttgttgcgtgtgacacggtccacccaggctggagtgcagtggtatgatcacagctcactgtagcctcgacctccctgggctcaagtgatccttccacttcagcctcccaagtagctgggactacaggtacatgccaccaaaccttgatagcttttatatatcttgttgagacagggtttcaccatgttgcccagactggtctcgaaatccttgcctcaagtgacccaccggccttggcctcccaaagtgctgggattacaaacatgagccactgcacccagctaagaatagatatttttactttgctattttctatacctttctatttgttatctgactaccatcaatgggcaacagtaaatatttccctccccactcaaatgaacctcactgtcaacaacccattctgtctgtccagctcccaagttctcagggaaggaggctataccatgtcagactcgaggtcatagtcgtcgctgttgctgtcacccccctcccagcgctgaagcaccttctctttgtgttccccattcactttcgagttcatggcaatggctgaatcggtgaacttgtctgtgggggcagaggtgaagatcaggagtcaggctatatttcacagacttctttccaatatcccccaaccccactctccgtaagtagttcaggaacaaagtttaagaagtccagagtacgtgtgcccgtgtgttaggatggccagggggtggggaggcaagagaagaagagtataaaaagtctatcagtactatgattccaaagaaaaaagaagttaaaaaccaagcaaagaaaatatgaagaaccacaacacagacaggaattcatcgcattatatattagacatcaagacatatttttaagaagaaaaatccacccacttcgctcaggaaaaaaaaggcattaaagcaaaacaaacaaacaaaaacaaaaaaacaaaccaaacacatcaccatgttccacctgcacacaaactaccctctgtcctctatgcacacagagcaggtctgaggtaacagcctaggacaatacctttagtagcatagttgaagtcaacatttcggaagtgaacaagcatgacatcacttggcttaaacaccatggtgtccacaatgtcctcccgacgagggccacctgctggctcagatgctttccggtgcacagcatccacggctagttcaaactacaaacaccccattccccacacccatgggtcagtttcaagaaaagtgaaggcaaaaatagaactggatttctcttaaatagaactggatttctcttacccttcccaaacttttcacaacactacatcctcaacatgcttggaaccaagtgcattgttttctcaacatcagccacaggacttagcaaaagtctcacaaaaatttaaacttaaatattttaacattaaagtacccagccctcaaatttgtcttttttccctgcagcactattcagcacaggcctacagaaacaactaaaggcatactctgacatcacccaattgacaccttcaatgagcctatttcattctcctcctactctgcaactccaaaaataattaaatttgagtacactgacctttgagcttagcgtcttgaagataccctcataagtggtaccatttttcacctttacatcacaagtggagccctggcagagtgggaaaaataagaagagtgtctccagaaagtagatgcattacgttccttaaacaacccgggggttaagtaccaacttaccacaacagctgtaaggaaatgcagcattctggaattgttgtagacgccttcaaacacctgtcagttaacataagagggagaattaaaggagtaatcagtcaacacctcattttcttttctaaatgcccgccgcactctactcattctgccttgtgtgtgccgggcccacagccctcctgagtacattagactctatctagacctaatgtgccctatattcccacattatgcatcttttaggtctatgtatcttaaacagggtgggagaagacactcacaggtgactgtgggggtccctttcctgtgctctgtcccctataaaagaaaacaagaaattacttaagtctgttcaagccctcttagaccactatgaaattaatgttaaatcctagaagtatataccacctgatgatgctgatttagactacaaaattgttaatcagtaagatttttctattttttttgagacagggtctccctctgttgcccaggctggggtgcagtggcgtgatctcagttcactgtagcctcaacctccaaggctcaagtgatcttcctgcctcagcctcccgagtggctgagactataggtacgaaccaccactcctggctttttttttttttaatttttagtagagatgggatttcccatctgtgttgcccaggctggtatcgatctccttgggctcaagggatcctcccacctttgcctcctaaagtgctggcattacaggcgtgagccactgcgcccggccaataaataagattttcaaactgtcaccttgtagaggaagaaaaaaatagacattaataagccagcaaacacatttcctccaaatgccagcaaaaagatctcaatcaacaatggttgtcaattgctctaagaaccaacgagaaaggggctagggctgcaggctaccaacagatcaatgctacagtattaaccaaaaagccacgccagctgtgagggcaaaagctccaggagtgcagctttggaactacctagctcaggtacattacctcccaaacagaaaagacaatcattttcagcagcctgacgcctcaaaactgtgggaggaggggtatcccctccacaccccatcccctcgacctcatgactcattcagcccgttacccactctgcggggatcaccaatcgccaggtaaccctgctcgtcgctggctgatgtaaccggcggttgagggcgaagagggggccgctggcggggctgggggacagcgcagccgcaaaagccatccaccgggaggcctcgcccggtctgcgcctgcgcactaaaacccacgggactttccgaacccccacctccagcgatcagagcccactgcgcctgcgtgtgctgccactcttaattccattaacacacacacactcgcacaggaaaaactgagcagggcctccactactcatgcactgccaccagacgagcccctccacgaactagtccctgccctaggtgttcccggggcgcgcgaatgcccgggtcatgagaccgagcatccacgcgcacgtacgggaagggggcgcgcgcgccagaggctcccggcccgcagtcctcccagtcatccctccttccgtccccccgcccacctcgctcccctcctactggccagaccgggaagggggaggcagcaacccgctcccaagtccctccctccccattggccaaactgtgggccgcgcgcccccctccattggctacggccggggaccccttcccgcagcagactccccattggctgaagccggggaccgcgagacccttcgtggtaatggaaccggggaccccgatcagctccttgcccccccccaactccccgttccgacggcgccggcgggatgcgccccgcctcccctgaaggccggggctgcgagccctgactaggccccgagagccgagcgcggcccctcagtgctccggtggccgcccggggaccctttccgtccgacctgttcggacctgagggggccctcccccagcttcacggggactccccacccagccggtgcccctgacggtgccgggtcggggtccgccccaccggaaccgagccacagcctctgggtggccgcggctccctcgcccggagcccacccttctcacctggcgctgccgatggcggctgcccccggcctctcctggtgttgctgcggcggcggcggctgcggcgccaagatgccttcggctccccggcggagcccgctcccggcagcggccacaggccccaggcagggggaggcggccgctggaggcccgggaggagccgcagaggtggccagcggccccgggaggccgccgttgggagggctggtgcccccggggggccgacgggccacggcctgttgcgtggggggcggctgctggggctgggagggctgttgtagcggctgaggcttcaacatgatggcagcgtccggaaggggaattagagagaagggagggagagagggggccggggctggggccccgctggagagcgcgggaagcgagggggatcgggcagccggggcccgccgtgggcgggcggggggagccccgcggtgtcgggggtggagagagaagaccgcggcgcgaggaagcgccgcgaggcggaaggggagggggtctcgcggctggaggaaagcgagagggcgcgagccgggctggcgcgcgtgcgcgtcgccggggagcggagagggaggagcgcgcgggtgggagctcccggggggggggggggggggggggggccaggagcgagcagtggcgcgaggtgccgcgcacaccggcgcggttagctcccggcgggaaagtgggagagaatcaagtcggtgaacctcgcacccctagccctgggagtgggtaaggagcggcgcgggc

SEQ ID NO: 7196 - DNA, 6000 bp, Homo sapiens
aatggcctggcggtgcctgcgggtgaggatggccaccagccagcaaccgtgcagggtcaccagaaagttcatgcgctgcccgatcacgttcacggccatcaggaagcagatctggggaggggagagggcggggtgtggggatgcactgagtctggggggagggactttcttgtcccacccagcaggcctcaggcttgcagcagccctgcctggaggctgcgggcatcaagcaaggacagggccagcggcgctgtcaagagggcaggagtggctggcagttgccatcgtgcaggggaaactgaggctccaggaggtgggctgtacagtagagcagatctaacttggccccctgcctgttgtcagcaccgacacaccacaggagtccagggaagccgtgcctggccctgagtcccccaccctctgtggcccaggcaaacccaggtggggccaggcttgcggtgcctgcacggtgcagccgtccctccctcccgaaggccaagccctgccccagggggaggcaatgtccttgcctcacctccagcccgaatttgtagaagaagaagttgatgaagtacttgaggcagccgagcagatcctggtccagctgctggcgggtgccgctggcaaacacggcctgggcaggcagcggggccagctggtgctgccggcggtagtgctcctggcgccggtacacgatggcctcgaataccagcagcagcagcacttgcaggtggttctgcggagggcaagggtcagggggcagccgggtactcgcccgcccagccgcccaccagcccttcaactcacctggatgtagcccaggttggggaaccctttccgcaccccaaaccagttggcagggtccacgggcccccggtacagcagggactggctgatctccgtgggcagcaagttggtgctgttggggaagggctggcaagaggccaggcatcagtgccccctcccaggccacagtgccccctggccctgcccggagcccaccacagccacagctctggggcaggtccactgctccccagccagggacacgggggctgccagccttggagccaccttcacggggaaggggaccaggtgtttgagaaacagggagaccacgggcaggggctgggggagtgaagagaggtccagggagaaggagggatgtgcgagaaggtcccaggcagagatgcctgactgtctctccctgtccaggggtggggccctcccgtcctcactgccggagaccctgggactccgcccctactggacacccttgtgtgcagggagtgcgcccctggtccacagttgaggtcgaaggatgctgcctccaggaagcccccttggcgcccccaggggagagtcctccatctccattgctggccccactgcactgaggcagctgccccaggagggtcgggctgcgaatacagagttgcctggagcttcctcccgtcccagccctcgggggccggtacctcggtgcagttgctggaatactcctgggggttgacaaccttgagctggtacagcatcttacacacgatgatgacgcaggtccacacggtggacaggcaggaggccatgggccggaagcgtgggtagggcagggcgaaggcccacagcaccaccagcagcaggttcatcaccgacacctgagggcagtgggcacgtggggctgggcttggggagggcagtgggcacgtggggctgggcttggggaggccagctgggcaggccagagcgaccccaccccagatgggaagctgagttgcctgccacactcacctccttcagggccacccagacggtgtacagggccaccagcttgaaaacgtgaagctccagcagccgccgcaggaacacctgcacgcgtgagaggacgtccgagaagccggctgccagctccagcagccgctcagccaccaggccccacttggctgcccctgtgatggtgtgagggtcagtgcggggcacaaacggggattcccgggtcccctgtgaggaagaggctctggagcccagaggggactctgccaacgccccccgagctgggacatggcacagcagactgggtggcagctgtgctctgcccgcccaacccaccttcaggcacctgcgtggcctggtggggagtggccacgcccagcccctcgtccctggagtcctcctcctcctcctcctcctcctgctgctgctgctgatgctcctgctgctcctcccgcagcagtggggtcccactcactgcatcctgcctgggagagggtccgaaaatgtcatctcccaactgggttcctgcccctcatttcctggggctggaagaagccctgtcggcaccgcttctgctgcagctgccagttcaggtgcacagctgtgtcgcaactcatgcccactgtccctgtgacctccacgctactgccatccccttggtatgagcaaatgccccttgggatctgaaggtggaagatgtggctcctgtccaactcccacctggctccctccctggcccaggaggctacacctctccagggccggacagggagggcggggccgcacctgtgagcccagcgcgggaggcgcgtgccaggcagggacacgtgctccatgtcggtgagctgcatgaagggcctgtggaagtagtgcagctgcaggatgcaggccaggaggaagaagccgggcaccaggatgctggagaagagctcggacacgctgaactgctccaggcccaggtcccccagcctgtggaggggcagcatcagcaccggcccggcccccggcagagccgctgcagccccggggaagtgcacggggtttcggcgcccctgccccaccgccccagcctggactcactgctcgtcggtgaagccagtgaggttgcgccagtaggcagggaagtcctggaactggaaggtgtagacggcgatgaggaccagcatggtgtaggccaccacgagccaccagaaggccttgagcagcttccgccacaggctgtagtagacctgccgggtgaggtgggggtggtgaggaccgcggggagggtccgtgccccagcccccatcccggccccccagccacctggaagagggtgaggcagagcaggaagaggaacatgtagacaatcttgtagaccacgaggcggccggcgaagctgaccacgatgaacatgccagcacacacatagatccagtacttggcgtacacgcccttcaccagctcccccaggctctgcaacagcgtctgcgtccgcgtgggctctgtgggccaagccaggggcaggcgatggcatcagggcgggcaggcaggagggcaacccccgcctctggcccaccactcacctgtgtctgccacggtgacctccgtcagcgcagctggagactctgcccacttcagcagcttctctttcacaaactggcgcagcaggagccagaaggtcagggtgtagagcaactgtgacaagcgcagggtgtcacagtcagccggggggcccagcacccctcccacagccgggggacccagcaccctcctatagcagggggcaagagctctcaggcggctggcaccagcccatccaccgcagcctccccacaggcaccgaacaccctctcgctcacacccactcagaggcacacgagcacacactctcacatccatggatgagtgcatgggttcacttgcgctcacacgcagagtcacacacgggttcactagttcacgtgggcacagatccatgcacgcacctgcacacatgtccacatgctggagtgcatgtttgcccacatgcgtgctcacatatgcacacaagctcacaggtgcatatgttggcacacaggctcacaagtttcacaagatgagacccactggcctgcaaacaggtgtccagacacgatgctggcacccgtttcacatggacacgcaggcaccctgtgaacacatggcctgcacagcttgtcactgagacccagggctgtgcatggtgccaatgggcagagcccacgctcacacacactgtcaggggcgcaggggtggtgcctgtgccaatgggcatagcccatgctcacacacagtgtcggggcacaggggtggtgcccgtgccaacagagcccacgctcacacagtgtcagggcacaggggtggtgcccgtgccaacacaaggttgtctgtttattcagtcaacaaacgctcactgagaagctactctgggctggctctgggtgggcagaaggggacagacagacacatctgccttcttggcgctgccactcccccgggcaagtggacattgaacaggacgacaaccctgatgggtctgcgcacccaggcacccccggatgtggtggtgcacactcaccatggcaccaaggtccagacaggggtagcgggtgtgctccagccccagctggcgcaggctgacggggcccagggtggtgggcagctcagggcgcaggtccatggcccacacgtagcgtaggcagcacagcgtcatcccatacagcaggatgcagggcgagcacagcatggccagttggtggcggctgcgcaccgtccagatgaggcaggcccagagcagcagtacgaaggtcagccagctgtggtaggtgatgctccatacctgcgcggcagagagggctgcacagctgcccagcgcaccccacccaggcgatgccccacacctgcgcggcagagggggctgcacagctgcccagcgcaccccacccaggcgatgccccacacctgcgcggcagagggggctgcacagctgcccagcgcaccccacccaggcgatgccccacacctgcgcggcagagggggccgcccaccccaacccccacagccgcctaccatcatggcaatgagcgcgcacacatagctctggtccatgatgaggtggcccaggctgtggagcggagacgcctccctgggctcagcccgcttgggccgcactgcaggtggggacagcggtcagcttcggcaggttgatctgcaggcctccccaccctgactatgccctaaaatctgggccctgggcaagcacacagcaggagagacaggcccccggtgggctatgggcagaacacgagggctccggcaattgggctgacaccgtccctgagcgtcagggatggccctgccagcacctgccgttctctgggcctcactttccttgaaagggtgggaaaggtggccctgaccccctttccagctctgcgcacctgaagactctcaggacccccaccccagggccgtggcttcatttgcttcattcagaaacacattgcaaaatggaaaatcaagggttagggtaaagaaagaaagtagccagaaagagcccccaggccctcccaaggcgacgtggccaacacagagttcccaggccagcccctgccctggacgagcggcctcctggggccactgggccacctggagcagctcccagagctaacagcacaagacagcatagccacattctctggggaggggttgggggacctggaggccccccatggggtcttggggatcaacgacgcggccactcagctgccctgggggtcttgggggttggtcagtgacatggccactcggctgccctgggggtctcgggggtcactgacaccgacccgtggatgtcctgggcccccgagggggcggcaggcagaggtgcggcgcgagcatgcgagagcgccaggcggccaccagggggcagcaccggcctccgccccgccccccgcacccagccataccttgcagtgtgcggtactcaccaggccgccgcaggacggagctctggccggtcagctcgtgcacgatgcagttatcagcctcggtgtcgggtgctgtgggcaccacgtgctgtgggcaagcagcgctgagccatgcacgggctggccgggcgccccccacgctggcgtctccacctgcctggctgctcacctggtcagactcccgttcctggggccactggtccagctctgctagctccagctcccgagcctcatacccctt

SEQ ID NO: 7197 - DNA, 6000 bp, Homo sapiens; identical to SEQ ID NO: 3268

SEQ ID NO: 7198 - DNA, 6000 bp, Homo sapiens; identical to SEQ ID NO: 3269

SEQ ID NO: 7199 - DNA, 6000 bp, Homo sapiens
ggaaacctggccctcacaccacctccctcactcaagcgtccctagcatctcggaccccaggactgagcaggcagggtgtgacactgcccggtcccggcaccccaggagcaccgcctggatggagggggcctcccgcgtatcctccctgatttgaggcccgggtcctcaggatcccagagaacgtgacgtcaccaaagagaggctgacccccatcccagcaggtagaacaacacatgaggaaggcgtgagactgggacctcctagcagggggtggggagctgtgtggcacagcaagactcccagggcaggtgggcagccaggacccggggctccagcgtcacttcttcttggcgcggtctgctgcgtccagggcagccatgttgcgggcggccgtgatcaggtggatgacgctgatgagcgacttcagcaaggcgatgggggcagtgacccagaggcccatccggaacagtcccacagagccaactgcaggaaggcagcaggggagtttggggcccgaaggagggggcctccatctccctgggcaggccagatccccctcccatcctcctgcccagcccctcatctcctacctaaaggtccctcagagaaatggaacaggtagaggaggcagtagaagagctcattcccagcacacaaggtgaacagagcaggctgcacacacagcaaacaggccacgttagcaagaggcaggcgtgtgccaccccctgcccccccagcactaatgaaggcacaatctcggcatattacttctcttatttttttttcttttttacagacagggtctcgctctctcatccaggttggaatgcagtagtatgatcatagcactgcagcctcaaaactcctggtctcagccaggcgtgtggctcatgcctggagtcccagcactttgggaggctgagacaggcggatcacctgaggtcaggagtttgggaccagcctggccaacgtggcgaaacccctctctactaacaatacaaaaattagccgagtgtggtggcacgtgccggtagtcccagccactcaggaggctgaggcacaagaatcgcttgaacccagcaggcagaggttgcagtgagccgataacccgccactgaactccagcctgggtgacagagcaggactctgtctcaaaaaaataaataaataaataaataaacccttggtctcacgcaatccttccaccttagcctcctaagtagagactacaggcgtgtaccactgtgcctggctaagctaattcaagattttgtgtgtgtgtggaaacagagtctcactttgttgcccaggctggtctcaaactcctggcctcaagcaatcctcccacctcagcctcccaaagcgctgggattacaggcatgagccaccatgcccagccattatctttttaaaaatccttccagaggctgcctgtgttcctggaatcaagtccacactccagccctgcagacctctctggcttatctcccttcccgctttcagtcccttctctttgcaggcctcattcccacttgttccctggagtaattcacacaggccttccccaccaatcctcctcctccacgcctcagcttacgggccctcctcctggagtgactgggcaggccctgctctgcgccctcgccttctcctaggctaggaccaggattcagcccagggcttcccacagccaagagcctgaggggtggggtgtgcaggaaatgcttaccctcgaggtgtagtagatccgaagcaccggattcccggacaagtcgatcatcttgtgactctcactgcctcggaccacagaacttggggagaaaacaggggaacccacaaggtttcatgaccactaccatgcatccaatcctcatgttaacacctattgtacagatggaaaactgggcacggctaaggaccagtatcctgccgaaagccacagttacctatttgggggcagagtcaggattcaaatgccacatttgaaagctcccatgccccttcctataagctgtcacctatatggaatcctagaatacccagccagaagagtcctaagaattgcttaatgcaactgtaaacatgactgaagctttaaagagaggcaggtttgcctggggtctttctacaaagcagagctaaaaaggagcccttccaggatgcctagtgccatcccagacacccttccgtctaggctcagcccaccccactgtaatgtctccaagtggcccaggcccccagaatcgcagcagacctgtggaggtgcagccagtgactggccacatccaaactcatgctgatttggaagaacagcgtggctccagggtacagcagggccaggttgaccaacaggcacatggtggagcagcggtccgtcagcatgtccagcatggccccaaaccgggttcctggaagattaggtgggcaagggctgttatggcacagtggatgcaggacaggtgcccatatttggtttatcactctgacgcagggtgtaaacgaagactggaagtgtccgcctgcctggggaggaacgcaggctagaaaacaggctgtgtgtgaggtcagtgggcaaaggtcaccatggcatgaactgagaaaggcatgagagtggagggaacagggtaggaggagaggaaagctatgtctgcaactcatcaaccccagaaccaagactccagggctagatagagacttgatgcctcaggggaagccttacagttgggtctggagaacagattaaaaaattagtcaaccctccagaagccatcacccttccctctccatcctccctctaagcatgccttctggaaccccaactgcttatgcagggcacacagtaggcctccagtaaacacctgttgaatacactgttttttgttttttgtttttttttttccgagacagagtcttgctctgtcgcccaggctggagtgcaatggcgcaatcttggctcactgcaacctccgcctcccgggttcaagcaattctcctgccttagcctcccgagtagctgggattacaggcacgcgtcaccaagcccgctaatttttgtatttttagtagagacagggtttcaccatgttggccaggctggtctcgaactcctgaactcgtgatccacccacctcggcctcccaaagtgctgggattacaggcgtgagccaccgcccctggcctgaatggacttgtattcagagagacctccagcagcgccaccgccatgtcatgtcttgctaatccacacctctcacaagcagtgagttctcaagagctagcttaaattccttttgctacaaaatcagtccattcttgctgggcgcggcactttgggagcaaggcaggaggatcgcttgaggctaggagctggggaccaatctgggcgacactgcaagacccagtctctacaaaaatttaaaaattagccgggtgtggtggcacgctcctgtagtcccagctagtcaggaggctgaggtgggaggattacttgagcccagaagatgggggctgcagtgagccatgatcgcgccactgcactccagcctaagtgacagagcgagaccctgtctcaaaaacaaaaaaacaaaacacaaaacaaaaagccccaggccatcctgttctgctttttccagagatgggaatgacagccctctgactctgaggtcccgaggaggcaggggaagggaggaggggattgttgaaccccaaggctggctgagaggggtgtctgtcaccttgattaagagcgcgagcagcgtgtccatcgaaagcgtccagcaggccgctgagcaggtagaaggaggaggccgtgagggggcagcagggcatgaagtagaaagaaatgatggcgaagacaatccgggcataaccttggaacgggacgcggggagacagggcaggatcagggagcccgccaaggcccctcgccctctcgttcggcccggggccgtgggcagcactcaccgatgaggttgggcacgaacaggaagatattttcgtctggcatcgcggcgcctcccttgctgccccgggcctgctctggagatgccagtgctgtcccagccccgcagcgcggcctcagcctccggcccggcgcatcggccgcaccacctgcgccctggaccccgccgccccaacctggccccagatgctgaagcccgcagccgtcgggagcatggaccggccccgaggtgcgcgggacgcagggggcgcgcgcagtccgcccttcctacccgcaacctccctcgcctctgccagccccgcaggcgctccgggcctccagctgcggtcgccgctgctccagctgcgcgtggcttccgggaacctcctcctccgcgcccgtcgttgcaaaattggagagaggaaaaagtggcttaaaaaaatagttgcggcccctttaaggcctgtcggcttcctttcccttttcctccctccgcccctctcccttggctcgtaccaaagcgcagaggaggagagggaggaaggaaccattaacgtcaagcaaagttagaaacggaaaaggaaagggtaaaagagaagaccgaataaaaatctctgctttccttttgtggagggtatgacttcctggaggcaaagataaggcgataaaattcctcctcctgagtctttgcgtccccaagaggccaggagatttggtgcagtcctcactttactccccgccccctaagtctccagccgcctttgctctcgcaggctctaggcggctagagaggctccagagcgccctgcagatgggttgcttttcgcgtgccccttgtgatgggaggattaggtcgcaggctccaccctacgtcatcctcccaagcttctcaagcgtctggcgcttggggtcactgccctcaaggaggcacctggaggggtacggaggggaggctggaggagcaaacggggcgcgctaggaaattcctctgtctttagttctagaacccctgatctcctagcaacgaggctgcggaacctctgcagactccaagggttttatagcgtccggtagcgacacggagccggctcccccttttccagccttcctccccatctcccattctccatcccccacgacctataccagaggtccttaggcctccacgtctctccttttgccgagtagcccaaggtttccacccatctgccaggtctggggcgtcaagtcggctgcctcggcttgggaaggtgcttgggagggaagaaggaaggagaggcccaccaggcgaaggggtgaggggtagggggttgcgggagttccctctcactcccgaagatataaagcaacctttattattattattattttttcttgtgagagggaatgaggcagcgggatgtttcctctaaaggccttgtttaaacctgggcccggggaatggtggtggactgggttctgggggaaagcgggctggtttctcaggtcaactcaggcttcgactgttcccagggggatggcgtccactccgatggggaatgagggggagaagaagagcagctggccatctcaagctgcaccctccttgagaggaggtccggtgagcactgcagggaaccctagaggtgggaatgtaatgaagtgaaagcctcccaggcagaggcaccccgtgccaggtctgagccacgggccctgagactctagcctcaaccctgagtcctgaagccccgactcatagctctcagcactaggccctgactctaaacccccaccaaacccccctcccccaggtccagagctttctagctaaatctcaaggcccagtccttcaggagcaagctccttggacccacaggccccagcctgggaactcccacagccagcactcccatgtgggagctcccaggctgaacccctccggcttttcctttcccaggcttcgttatctcgttctgaggaatacctgtcccagatcagtgcagaactcatggaggaggctttgtgcactgcttgctgccacttgaaccctgtgcccatcaaaaaaaagcagtcacaagacc

SEQ ID NO: 7200 - DNA, 6000 bp, Homo sapiens
aactagtggaagttggactgtgtgggccccatgtagggcagaacctgggggcatcttttctccagggaaggaccctaaggaccatgagaaggagaacctgaggcggatcagggagattcagaagcgcttcagagaacaggagcgcagccgggagcagggccagcccaggcccctgaaagctctgtggcgctcacccaagtacgacaaggtggagtcccgggtcaaggcccagctccaggtacctgcttcagggagccagaagtattatccattttgttggccaacaggcaactgtaccctgatctgagttctggggtgggagggaagtcacagaggtaacagaggactaagagaccctggctctgctgcagggcgaggctggggggcttctcagaagtagtgatggtggggctgatcctgagggcaagtagcaattagtcaaagggacagcagaagagaacattcccaaaagatggaacctcacagaccacagggcacgcagcagtggagatgctaggtacagttcactgtgaggaaagaagggcgtgaagttaggccaagaagtcagctggacccacgtcaggggccacaaaagccacttttcagcccttatttctgaggacagtgggaagggcaggggtatggtggggggctctgtctcagggactcagtaggaggagcaggagtgagaggaaaggcaaggtcacacaaatgtgttgtagctgaagcatctgtggggttcccagggggtgggagtgtgtccaggaagcagatggaaattcaggcctggatctcaggagtgagacctaggagttattgacgatcaggttgaggacaacgagaccaaggaattgaccgcctggatttgaggacttggaggccagctgttaggagccttgcagggctagagccaggaagcttggctaggaaggaggaaagagagtggtagctgggccagtactgaggtggaaggagagatggtttgttgttttcttaaaaatctgacatactcacacatttgtgtgctgatgaggacaagtgtcccttgaagagggaagagggcccgagggacatggatgcaaaggtcagaagggccaagatggccagggtcttgcagcttgagccccagacctcagcctgcctgctctctctgctgtgccctgccctccaggagcctggccctgcctctgggacagagtctgcccacttcctgcgggcgcactcccgctgcggccctggcctcccaccaccccatgtatctagtccccagccaaccccaccaggtcccgaagctaaggtgagaggatgtatgggggctagatggtggttgggcagggctcctggtgtggggggggtgttcagggacacaacataatgctgtctgcccccacccacgcttgctgtgtcctgcaggagccaggcctgggggtggacttcattcgtcacaatgcacgagctgccaagagagccccccggaggcattcctgctcactgcaggtcctggcacaagtgctagagcagcagcggcaggcccaggagcactacaatgccacgcagaagggccatgtgccacattagtaggtctcactgcccgacactcagggtgaaggacacctgtggagggtgggaaccaacctctgccctcgggtcatcaactctgagcctgtgtacccacagcttgttggagcgcagggacctgtggcggcgggaggccgaggcccgcaagcagagccagccggaccctgccatgcccccaggccacacgcgcatgcctgagaaccagcggctggaaacactgaccaagctgctccagagtgagtacctgggcagggaggctggaggggggccccactggggaccgggcacccctgcccaacactcactgttctcactgttcccgggccccctgtaggccagagccagctgctgcgtgagctggtactgctgcctgctggggcagactcactgagagcccagagccaccgtgctgagctggaccggaagctggtgcaggtagaggaggccatcaagatcttttctcggcccaaagtcttcgtgaagatggacgactgagcccctttgggggacagtggcaaggagctccatgctgaggatcgccacatggctgcaaaggacagggttggacccaatcccagagcagaggtctgaagacaggagcaggggggtggccagtgtccctagagcactcttcccagtcaccagtggctgcagaagggccaccctagccttttaactgctttgtcaaaattaaacattttgtacacaggatttgtttccataagagcttttcttaccctaaaaatgccaagcctggtggccctcctgctgcttgattgcaggaagttctccccaatgtcactcctgccttagtccagagcagaaggcaagctggtgagaccagggaggaggctggaactgggacacacaaggaccatgactgtatttgtagaaaacctttaatgttccccaggctgagggagccctgtgagccagctaaaaacccccactgtgaagtccctgccatgtcccagcagtgtggagtggcatggggcttcatcctgactgtcagaggctgaagccactaccatctcctcgaatgcgactcccccagccagaactggcctgctcctggtcatccagggagggcagagagctgcgggtaccaggatgtcggcagccagggtgcaggtcccagcacgggggcccctgagacagcccattggaactgggaggctggcggttctcaatgaccaggtcactgctgtcatcgtcactatcaggctcagcaggcccaggccctgcagagggaggacctgtcaaacgcccagatgcccctcgcaccacgttattgcgctggttggcgggcttgacagtgacaatgaggttatggctgttggcaaccatcatgtccgtcacttggtccaaggtcttcccggctacttcaatgccattgacctcgaggatctcatcactgaccgccagcagccctgtactctcagccagacccccacgtaccaggcgggagatgaagattcctggaacccgctccaggccctggggagccacacgcacgctcatgccatctcggatgtagaagcccagggggcggtctgaaccatgcttgtgcagccgcacccgtcggtgggtctcaggcagtaggtccacgtctatgactgaggaaacctggcggaaatcttggggcaggctgattagcaagggtggccgggtgcgcaggggtgccactggccgcagcaagagccctttcttgcgccgctgcagagagttggaggcaaaagccaggccgctggagtcagcttctgctgcagaagaggggggatgttgagatcagagacctgctccccgacttgggctgtttacagggggcactgtagctatttcctaccacttagaggtcaagccaagggcagggactgcagagggtgacgcttgggtaccctgggcatggactaacccttgtagacctgccccacagacaccttaccccacagaggctgcccactgtacccctcctcaccccgcttctgcaccagtaggcgcagtggcgggggcccgctggccagggcccggtgcaggctgtcgtcgttggtgaggggcagcaggtcgccatgagcatccgtatagccaagtagcacgtccaggcccgggatctggtgcaccgcccgcagcaaccgcgagaactcctggaagccgctcaccgaagcgcgaggcagcgcgaagcgtcggaactcggcgtcaaactggaagtcggggttgggggagaggaggagtcaggacagcctgcgcccctttctcaccgcaggctggcaggaatgggaaagatgcggctgccgcttttgcggcagccttaagcccagacctcagctccagtaccagggacgctgtccaaggtcttcttaccgccctccaggtactcaggccacagagagctggagaccagcagtggaggaaggaagacggatgggggaaggcgagcagaaaagcagaatgggacttggaggatagagggaagaggtggcggggaccaaggagctgggaaggggagaaagagggaattgggagcgcctagggccgaggccggaggagcccttactttgctcttcacctcgacgatgctatcgggactgcgcgccggagtcctctgcggccgggccatggcggggccgggcgggccggggacggtgccccaggcggcccgccgaggcgcaggtgcacagcccggccggcccgcccgcgccgccccgcccctggcggtagcacacgccccgccttcccatccggagcgtgacgtcaagggggcagcgacgcagagtggaacgcggagtccacgtttcctaggaaacggagccgtggatggagaggagccgtcctccgctcttgcgtcatcacgctgaggtccgcgcgcccccggagtctggggagcagggctccgccaatccgaggggagggcgaaggaagtaccatttatttagcgctgtgtgtgtgctcttatttccactggccttacaagaccgtgcactgtgtagatgaggaaactgagtcataataaatatgtgctgaaccgttcgggggtcacacggtgctgaaatggtttcgagtcaactcgctcggacggcactcggcctcagcctccggccctggaaccctctccagggacgggaccagcccttgttctgttccctaccggtaccacaggaatcttgacgaacggcccaaatgcctggccgctgtcagagtgacgccgcgatgagagtaaacgggccagcatcccgtgcaccagcggggtggaccagcgggagtctgcacacaggcccccgagcaggacgccctcgtgcgcaggcgcggggtgtacgtgggcggggcctcctcctccggccccgcccagcgaaggagcttcctcttccgaggaaaggcggggcctgggcgcccgcgggaaacccgggcccgttgcatccgctgggtgtagccgtggggatggcaggttcggggaggctggtcctacggccctggattcgggagctgattctggggtcagagacaccctccagtccacgagccgggcagctgcttgaggtgagcccccattcagggcccggagaccgaggcggaggcccggggtggtgggattgacgccgctcgccgccgtcaggtactacaggacgccgaggccgcggtcgcgggcccatcccacgcccctgatacgtccgacgtcggggccacgctgcttgtgtctgacgggacccacagtgtccgatgcctggtgacgcgggaggccctggacacctcggactggtgagaggccccgcgcggctctggaggtcggagtccggcaggagagcgcgaggtgggcgggccttgtgttcaggtgggcccggcagtgaggatcctgcttgttgcagggaggagaaggagttcggcttccgcgggacagagggccggctgctgctgctgcaggactgcggggttcatgtccaggtcgctgagggcggcgcggtgagtggtgagactgccttgggcgggttaccgggcatgactcttcgtgacgattctgagacccccccttccccccgaactcctccagcccgcagagttctatctccaggtggaccgcttcagcctgctgcccacggagcagccccggctacgggtgcctggttggtaagtgatgcctccgccctccagcagctctccccaccccagcctggccggcgctggcagacgcctatggggtaggagggcttgggcccccattaactacccttctctttttcttagcaaccaagacttagatgttcagaaaaagctctatgactgccttgagtgagtctggggttgggctcgggggccacgtgttgtttggtgaggggatggtgtatctaggtagacaggcctcagcatggttcctgagtcctggccactctcttcctgtagggagcacctttcagagtccacctcgtccaa

SEQ ID NO: 7201 - DNA, 6000 bp, Homo sapiens
tgggagcagctgcaggcatggttggcttcaggcgtgttttccctgcaagccatgggtaaccaggggtcaagcggtgggccacatcccacagaggagatgcgggcttgggggatgccccaggagagccgcctactgcaggagacccaccaagcttggcggccgtcgactgggccctctccagacactgctgtgctagcttcagcatcttggaggtgtcggggggcacagtttccccagcttctgggggagggacaagaaggctggtcacagtcggctctaccactgttacttactgctgagataaaatgaggcaacggaaaaggcaggcaagcccactgcccccctcagcacccccactgaccccgggcaagcccactgcccccccatcccctcactgaccctgggcaagcccactgcccccccatcccctcaccccgggtaagcccactgcccctcccgtcccccaactgactgaccctaggcaagcccactgcccccccatcccctcaccccgggtaagcccactgccccttccaccccccactgaccccgggcaagccgactattcctcatggaccccaggcaaggcccctgcccccaccatggaccccaggcaagtccccccacccacgcatttctaatcatctgccctggttttgcctcctgagtctgctaaggctgtgggcccctcatcgaggcccgtcacagcctcgaccctaaacaggcctttagtgctcactcagcttcacttgcaactgcaggcctctgggaagtggccgttttacagagacaaggacgtgctgaggggatcgcctcacccatctcccaccggctgtgtccccaaagtcctgccttcccgtagcttggcatggagcacctctgcgcgaccatggacctgctcacacagcccttctgcgcgccgtgggagctgcctctctgtgactcgcccctggacccaccgccccagcgcctgacccacctccctgctgcccttcacagaaaacttctcatagactcccattttctcatcccgccccgatttagcccccgactccccccggaaactgcccttacccgtccccaccttgccagacacggtgggccactggagttcctctgtcttctgggactttgctctccccaggggatcctctgccactcctccacccaactcctcaatcttggagcgccagagctcagccgagctcaccggctccctagggagctggggcaactgttagctccccctgacctgtgtgatcctacgtccagtggctgccccgacctctgtgatcccacgtccaggggctcccccgacctctgtgatcccacgtccagtggctcccccgacctctgtgctcccacgtccagtggctcccccgacctctgtgctcccacgtccagtggctcccccgacctctgtgctcccacgtccagtgggtccccctgacctctgtgatcccacgtccagtggctccccctgacctctgtgctctatgtccagtggctccccctgacctctgtgatcctttgtgcagcggctgctggcctctcaaacttaatgtgttcattgcggaacttgctattcctctccttgccagtttgctcctgccccatctgcctcctgcaagtctgctctgttccaccttcaggacgcaccccgaggccgtttactgctcccatcctgggtggtctggccactgccatcctcagtcctcacctgaggctccactcccaggctgtcctctccctcaaagctcaaagtctcttcaagtttccctgcacaccagaacggccccagttccacccaaggcatgcacacagccccaccccgcccactcctatttcagggcctttgcacaccccacagctggaatgctgccccacgtctgtgccgctcactggagccagtgtcttgccacaccccagtctccatcttcttatccacaacgctggtcccttcctgccactatatcacactgagtgtgggctggtccacctactacaaatggtcaggctagaaggatacaagagacccccgccgaagcctggcacccatcaagggctaggatgcccacaatttgtccagcatggaggaagcagcagggctcagccatgcctttttctttttcttttcttttttttttttttgagacggagtttcgctcttgttccaggctggagtacaatggggtgatctcggctcactgcaacctctgctcccgggttcaagcaattctcctgcctcagcctcccgagtagctgggactacagacacccgccaccaggcccagctgattttttagatttttagtagagacggggtttcaccatgttagccaggatggtttcgatctcctgacctcaggtgatagcccgcctctgcctcccacagtgctgggattacaggcgtgagccaccgcgcccggctggctgagccgtacctttagtggtttccacttcttctagtaacacctgggagatatagtggatgctcctcaggtattccgtgtatgcctcctgtgtccaggaaagagaaagagtggggtcaggccagtggagggaagtgactccattattccggccaggtgcccttgtgggataagcaaggaacaccaccacctgcttatctctgagatacacccagagacattgagcctgcggtggttagctgcagccggaacacggttttctgcgcagggcacaggcagcatcgctgctctccagacttggaaaagacatcaggacctgagagagagagagagccagggacgagctggacctcattttctcctctgactgcctttctctccagcacaggaactgatattctcattcagtgggcctggggaagtgacctcagcagtttgctgtcatttttcattctatgcaatgtttccttcttgtgcaactcaagggtgattcattcagtggcttaaaaaaatacttttctgagaggataaagggagtgatactggaagttttcaaatcacttcccggtttaagttccgagaaatccctttcccagaacctgcgagttacgtatttccagtgcacacaggagcctagaactgttacctttcaaggctgtgtgacccctctgacaaggcacaggtcattggaaccacagaatggtggtttgttttgttttgttgagacagagtctcactctgtcgcccaggctggagtgcagtggcaggatctcgagtcactgcaacctccgcctcctgggttcaagtgattctcatccctcagcctcccaaggagctaggattacaggtgtgcaccgccacacccagctaatttttgtatttttagtagagacggggtttcaccacgttggccaggctggtctcaaactcctcacctcaggtgatccaccgcctgggcctcccaaagtgtcaggattacaggcgtgaaccacagcgcccagcaatatgctatgtttttttgttttatccctagctgttaagtttcctatctttaagtctatgcctcagagagaaagacgaaatataatccaggcaggatttctgacttgcgggggcacctgctgccctaaaaaccaacttggggaaagcagcagattcaggaacgaggcttctcctaggcacaggcaggctccttccctccttgggcagccgggtgtggctgggccagcttctctacctggtcgccaaccttagattcggccccatctcaggaacgggccacacccctccggcctgcttttccttcctaagacgactgcaaacagcatcacaaatgagcaggtatgtggccttctctgcatgccgtcccctgtggcaaccggattaaatctaccatctctgcccagaaaaatgcacgaacgcacggacctgcccgtcactcggattttggaaggtggcctggcggaccctcctgctacatctcctctacaggtggagcccaggctgtgatgcaccggctcagcgagcggagtggaaagccaaggtccgcaggatctgagctgtccaaggtcactgcacgcccggctgcgccccgcccccgtcctcgcccgggaaccgcggcccgggatcccggctggcgcccgctcccaagtctccagcccgagccggccccgtcctcgccctccccgggcgggggtccctccaggggccaccctcagcggccaagccccgcccccgccccgcctcacccggggccggttgccggtgtccagctcgatggccccgttggcaagcttcatggcgctctgcagcggcttcaccgtgccgtccccggccgcagcggccatggcgccgagcgggggaggcggcggcggtagccgaggggctggacgggcgaccggaggcccggaacgcagccggcgctggtgctggagccgcccgagcagcggaccgcaggaagggacgcggccgcacttccggcgacgggccccctccgcgcgtactgcgggccccacgggtgttagtggcgggggcggcagagtccgggtgggttgtcgcgacggagccgggcctcttcgccgtcttgagacggggctggcgagaagggcccctcacggagttgccatgggcgtctaaccgcggcagccaggcccctctctacgtgagaccccggcccccctcccctttctgcagcccgcccgccacctgcgcgccgcgtggcctccgccggcgcctgcccgccccgcgcctccgtctcccacggtaagaggcggtgagggccgcgtcgcctctccctggaggactcgtcgtgaggtgtcggcgagcccctccgcccaccgccccgccccaggccagcgctccattggcgacagaggcgggcacggccgccctcgggcccgagaggggagcggtacgagcgggggcgctggcaccgcgggtggaacctcggccggcggggtcccgcccctggcccctggcccgccccgcccgcctcgctttgcttctcgctccgcccctcccccgccccgcctcgcttccagcgcgccgagcggagcctaacgccgggtcctctaggaacctcgggccgggcagcacccgcgggattctgctggcgtcctccgctgccatgaagcgggaccggctgggccgcttcctgtctcctgggtcgtcccgacagtgcggggcctcggacggcggcggcggcgtcagccggactcggggccgcccttcccttagcggtgggccgagggtggacggggcgacggcgcggcgcgcctggggcccggtggggtcctgcggggacgcgggcgaggacggcgcggacgaggcaggtgggtccgcggcccgggcgtggcgggttggggtcgcggcaggggttgctcgtgggaggagccgcactgacgcccggaagccggcgcggcctctcctccacccggccaagggcgtagcggactcggggctgcgtcgggataggcgctgggcggccggctcggttttcctcgcgctccgtgacgccggcgtcgccggcccggcctccccggccgcgggctcggccagaagggacccggcgtgaggagcgctgtcaccgcgggcaggtcgccctggggtgcccgcgcgtgggaatcgccctcccctgcttcgtgccctcgcggagccggaaaggaggcggcacctgcaattggcagacaggaaaccgcggcgtttcctggagggcgcagcgcctgccccgggtctcgcggtcgctgggaggagggtgcagttccaggtttcactcttgaagttgcttcgctggagaggccttagaggcctttgaaatttgaaagatttcttggaccagcggccacatcccccacagggcggcttgtcccgccgagagccgcgcgcccgagccgcttgctgtgtccgggagccgcgcgaagggcgctgcaggcgctgccctcggacctggagtccgggacgccctgtgctcaggagcctcctttgccagctgctaacacttcctgccgctctgtgcaggagcaggccgggctctcgccatgggtcactgtcgcctctgccacgggaagtt

SEQ ID NO: 7202 - DNA, 6000 bp, Homo sapiens
tttttgagacagagttttgctgtcgcccaggatggagtgcagtggtgtgatctcggctcactgcaacctctgcctcctgggttcatgccattctcctgcctcagcctccccagtagctgggactacaagcacccaccatcacgcccagctaattttatatttttggtagagatggggtttcaccgtgttgattaggctggtctcgaactcccaagctcaggtgatctgcccgttctggcctcccgaagtgctgggatgacaggcatgagcccagcctttttttttttttttcaagatggggtctcattggagtgcagtggctattcacagcagggacaacagacaggtaatacagcatccagcaagaggtaaaagtttttgtcaggccaagaaaacaaataatttttccagaagctctgtattttcttcagtcttcaaggaggaaaacgtcggccaggtgctgtggctcatgcctgtaatctcagcactttgggaggccgaggcgggaggatcacttgaggtcaggagttcgagaccagcctggctaacatggtgaaaccccgtctgtactaaaaatacaaaaattagccgggcatggaggtgggcgcctgtaatcccaattactcgggaggctgagtcaggagaattgcttgaacctgggaggcgaaagttgtattgagccaagatcgtgccactgcactccagcctagcgacagtaagactctctcaaaaaaaaaaaaaaaaaaaaaaaccacacacatacacaaatattaaaaaacaaaatctaagcactcaataacccagtactaactgtatccaacaaaatcccaacataaccagtgaatttatattgtccccaatattttattttatttttttgagacagagtcttgctctgtcacccaggccggagtacagtggcgccatctcagctcactgcaacctccgcctcctgggttcaagcaattctccctatctcagcctcccaagtagctgggattacaggtgcacaccaccacactggctaatttttgtatttttattagagacagagtttcaccatattggtcaggctggtcttgaactcctgacctcaggtgatccacctgtctcagcctcccaaagtgctgggatgacaggtgtgagcccccaatattttattataatgaaacaagacccacagttgacaacacctatgttatttcagctgtgtcaacattcagggggaggctgactctgtaggctactaccccaaagtaaaatcattccccaattagtaactttctaattaactacattattcaaatatccctataaaagaccacagtagactaaaaagtaagacatactatgaaaaaattattaaaatcataaaaaaaaaaaaaagcagctcagaaagagaatgctgacagtaaaggctgtggggctaacaaacgattccacatcgtgaacgaaatcgatctgcagcagccatcccagcaccaatggcacacagtacctgacacagagctagcaatgactctcgaaggatcccatgaatgtttccccgatgggggtttggaacccaaggtgtgggtcaacaggagacctacacaaacaacagaaggtggccatactgcacgttgtagggtgccaggtgcctcttacctcacttgatccccattgcccatctgagaaagtagaacctgagaggtaatgtgagtgcctgaagacagctggtagctgaaagtgtgcaatgagaattctgatgccccaatcttccagagcttttccatgactaccccaggaccacctcaaagacagtgtggcactggtactggtggctgggtagataccaggtagcctacagccctgaaggtacaaagtatgactcttcaggcttccaaaacttgataaaacatccaattcctttgctttaattcgcaatttagtccttttgtgatttggttaggagacaatctggttaagcctgatgcagttctcacagtaaatgtaaacactaagataggagtttaccattccttcttggagttttctgcaagtcagttcacagctcacagtaaataaccttgctaaattagtttttgtatatgtaaagccaagatgtgaaggtaggcaaaacacaaactcccttaaacagggccaagtgctgctgtcctctttccagtcaggccataaatgagttgacccttattccgggtcccacagacacacacagcacacaggtgcaacgtcagcaggcctatgaggccctgcccctccttgacctgtctatcactaacctcttcctcatactgatcacacagaactcaaggctggacccaccctagggcagtgcattttctattccatcttcctagcaagctcatctcaatccctcacttcctgcaggggacacaacaaataacagggtttatccctcctccattccctttcttcattttctatttcctttattctgcttccttttcctaacatgcctaatacttgcttatccattgtctggttcctccttgcacagcacgtaaactctacgagaacaaggacagagtaggtagctcaatgaatgaaagatgactgcatggaagcctccacagcataagcttccatgaggagagctgttagggtgttttttgttttgtttctttttttttttttttgagacagagtctcactcccaggctggagtgcaatggtgcgaccttggctcactgccacctccgcctcccaggttctaagcgattctcctgcctcagcctcccaagtagctgggattacaggtgcgtgccaccacaccgggctaattttgtattttagtagagacggggtttctccacatcagtcaggctggtctcgaactccccaccttaggtgatctgcccgcctcagcctcccaaagtgctgggattacaggcgtgagccatcgtgcccagccgtctctactaaaaatacaaaattagccgggaatggtggtatgcgcctgtaatcccagcttctcgggaggctgaggcaggagaatcgctttgaacctgggagccggaggttgcagtgagccaagattgcgccattgcactccagcatgggcaagagggaaactccgtctcaaaaaaaaaaaaaaaatgcaaattgctgccacctctccaacctctgcatgtcaccctcagtccacaagtcataaagctctcaaaagagagcaagccagtggggcagagcccttgcctgtcgtgttcaccaagatattccctggtaaatgattaacagatctatctctaataaatgagaagcagatgaatgatccagtccgggaaggaactcaaagatcattcaacgtccgtcctcccttcataaaggggtctatagcagttcaatgattcaaaactctcctgggctatattaggctgtacacaccgatattgcatatcgctgactttcaatatgtgttagcaaccaggaggacctctgcaatgctgatgccacatggccaaagctgaaagactgctttcactcatattgctagcaactaaaccatcatacactttcccaaatgaatggagatggcgggggggggggggagttcattcctgaagacaggacagaaatactcatgggatccttcttcttattttactgctgtctgaaaaccatgacagctttctgggatcaaaattcaaaaactctgcattagaaaaacaattcaacgttactgctgctcactgggatgtatcaatacaaaaataaagcaatcttaaaatgcagaatattccggtcttagaccctaaccctataaaacagggttatgagcagggcacggtggctcaagcctgtagtcccagctactccagaggttgagaaaggagaatcgcttgtgcccatgagttcgagatcagcctagacaacacagcgagactccggccccgctcccaaatttttaaaaataatataataaataacaatagggttatagcgatatctacctatagggcgggtataagacttagataatccgcgtaaagcccttagctctcagcattagctgttaacgacagtgactggtcgctgtataaagaacagtttgcaaaaccctttcacgcctcttatcgtgtctggttcactgagtaactgcgaggtggataaagccgaacgccgccgagcccaggaggacacgggctggcacgcggggccacaaagctggttcgcgaggaggtgggactcaagcgcaaatcgctcaacgcccggcgctttacaaagccgagcaaggaggctggaggtcccggttccgatgtccgaggggaccgggcatccagtaaacagcgggaattccgcaagaagtgggtggaagaggtagcgaggagaagagcaggagtttggagacggaggaggcgggggggcgggaagctctggccaggtgctgtcggcctcactgcgcggaccaggtcagggccgccgccctcccgcgctcccccgcggccggcgcaggcgaatggcgtcacgcggcgtccagagcagaccagccgcccggcaccggcggagagcgcctccccgctcacctgtcgggccttgcccagggccctcgcgctggtcttggccgtcctgccgcctcctgggccaccacatcgccacagcaaggccagcggcctggccaccgctctactgccggccgccgccagcagccggtaccacatccccagacccagatcccgcgccgcccgggcgcgcgcatgcgcaatgggagagcggtcctagggccccgcgagcgcagggaggactcgcgcaggcgcggcaggggcgcggcgccggctggggccccgtcttgggtgtccacgccgtcgcctgaccgttcgagggtttgatcgccagcgcagcctcgccctgcccagacagctgggccctaaggggatagccagcgcctttagacttatcttaaatcgggcatcggcatcaacacttatttctggggtcctccatggaaagcagctcccgaaacaacacccgcccggtccgccctccgctgcactggaaaaccgcccctggacgtttctgccgcagtgtccccctcacggagttccgtttgtctgcttggtcggttgttctctggagccccaggacccaggccgcttgtatgtgcctgcggccgcacggccccaacacgcggacttcgagcggtaccgggagacccgcgcggcctcctcggagtggacagtgaagcagcagctgggctaggcagtggggctgggcctgcccatggggacccgtccacgtctccaggacatcagcctgagcctcttcgcagcctcgttttctgttgaccgagttctgcaaggggacgtagaggaaccacagcgttcttgcgcttgagaccgctgtgattttctgacattttggaggcagaaatgcctggggaaaggcccacagatgcaactgtcatccctagtgccaaaagggaacggaaagcgattacccttgacctcaaattggaagtgttacgacgatttgaagcgggtgagaagctcagtcagatcgcaaaggccttagatcttgctatctctacagtggcgaccattcgagatagtaaagaaaaaatcaaagcgagttcacaaatagctactcctctgagagcctctcggttgactcgccatcgaagtgcagtgatggagagcatggagcagctgctgagcttgtggctggaagaccagagccagccaaatgcgaccttgagcgccgccatcgttcaggagaaggctgagtttgatgacttacagcgtgaacatggcgaaggttctcaaacggagaggtttcatgcaagtcaagggtggcttgtgagattcaaggagtgccactgtttgccccacttcaagatgaacagcgcagctcccagcaacaaggacatgtacacagaaatgctgaaaagcatcatcgaagaaggtgagtacaccccccaggtgtctttaacgtagatgagacgagacttgattggaagagaatgcccaaaggaacgtttat

SEQ ID NO: 7203 - DNA, 6000 bp, Homo sapiens
ctgagaatcaggcttttcaaatgacactctaaactggtatctcttaagcagatgcacgtttccccttacaacacttatcaagcagaagaactttatgtcagtatctctgcaatgttcctaggctgatgaagatgttaaccctttgttctaaacagcaattgccagccggtcctttattatttcacttcagttactatggaaatatatggaagccagtttcttcaaattagcacaccacaacaaggatgagaacacaggctcaatggaatgactctttgctcttctggaaatgctaaataaaaggagttttattcagtgatgtctgaatatccacattcttcctctcaatccaatgtgctgagctattagactgcagccccccattaggaaatcactgggttatcacagggtgtaacctaaagagggctttctgctgaatttcatctgtccaggtgaaacaacacagcttcctaattaacctgtacatatggcctgataggttggtcaccaattgtattgcacaaggaagttggaaactgctttctataaatgccacctagattttcgggcctggccccatccacagtagaattctcctgactcaaagtgactctcagtcaagtggccatctcaaaaaccatctctgcaagggaggactcaaaaaaatttgttactaggatacagtgacaccaatcccacattttgtggttaacaaaacaagtcctgcattcagcttggcacaaggccctgatctgatgtatttcaagccaagctggaaggctcacagggaaaactgccattcatgaatgcttcaggaggacaggacgccagggtcccttgtggcaaaccaggaaccagaaacttttgtgatggaccttttgaacagacctaccctacttcctaaagagagttggtgtattgtgctttaaaaaaaaaattgttttacctacaaaatctgttttcctgacatttttcttgaaaaaggtgtcctgtaaggttggaaaaaaaaaaaaaaaaaaaggagaagtaaagggaaagagaagaaatgctctgatttctgatttaacaatctcaaacatcactcacttcattttcccccctcctcggtgtaaccaaatacaagacacagaggactttcctggggaagtctacatccagccttcatttaagatttcctgcccagtacataattaggaattttcatcctaaagtggcacacctatttcctcagagagctcagctctctttgaataaaaaaaggcgaggcacccctttgggggattcagtatatatttttaaacttctcattaaatcaacctaatttatggggcatgttcaggaaaagcagttgctttggcggatgcaaagttaatttgcagactctggcctctccccctcctccttcccctcctgcgcactcccctcccccgagtatttccgaatgctttcgaccccctccgaagcggctcggctctctccgccggagcaccgactcggctccgaacaccgccgactccctccgagccccgcgcccagaccgcaccgaacctagccgagcgtcgccgaactgagccccatcgacttttccggcctcggctgggcgctgtccaccacttgcaacgcctgaaacctcatccagctcaggtggctggggcttctactgggctccgagtccgccactgctgattacagacttctgaagttttaaaacgtcccccctcgggagaaaggggtggcgcggcttgcatttacagatctgcaagggctccagacagatgcaacatgcaccttgttgcaaagggcaattccccaggccccgcctccccatcaatttgggttgcacaagctcaagagaagccccaagctaaattacccctggctcagaagggtgcggcgagccaaggggggctctgcgaagaaagccccagggagctctcgaataaaaataagaacatgtcaagcagatgggaaaattgtctccgagtcgctactccctaccatcatggcgccgcctagaacccgcttgtcatgcctgttacacatccaagattttttgcatcttggttctgaaaccgcaagcatgcttcgtctcccactcccaccttcccacgaaaggggtttttattttccattgtttccctacgcgatgcaattatttcggctattgtgtcaagttgaaaaataatcatttttgtttactgcacagcaacccctaattaggagctgtgtgtgcacgaaggtgtcacagcaaagcgacgtggaatcttcgctaaacggtctaaacgaactcctccgtctcgaactgacaggccaaccgaaacaggaggcccggagggcgcacaccccttcgctgccggccaccccctccccaagcaaacctgcctgtgggatcaccaggaactgccgagtggatagggcaagaagcgagcctgcaagtggaaaggaggggcgaggctccttattgagaaagtgtggaagggaaggaatatcccattttgttttaattttcaaccatcactcaaatccacccccagttaattaggaggggaaactgatagctaaggcagaagggggcggcggcaagtggggcctgaaatccgcattgtgggtagattacatggaacacggcctatgcagagtgtaaataaatacactgataaaggccacggagcgaacgaaaactgcgggtgtcaggagagcaatgctgggagggtgggggaggagaggagctgggggcagcaaggggcggacattcagcctcacaggcagcttccctcccccttccacctctaccttggataaaactgtgcccgtcacctacgtttggaaacccactccttcccctagcacacgacccctcccctaaccctggccctctttttttgcgggggagggggtgcgaggggatgtagaaaccacagcctccaattcagcaccaaacgcatgaacagcagacacttgatcctccaccccagtctagggctgggtcccctccatgttagccaagttcaaaatcactgccccaggaaaagagcagggggaagtgggattacggaccttgggggatagggaggtatggagggaagaggagaaagaaatagagacagaatgaaacagagacacagacagaaatggaggcagtgagacacagaaaatattccacaagcaagagtaatgatcataatcatgccaatagtgtgatgttctgatcaatatggcggacactgtcattcatacaactacaggcgctccccttccccctcccaaaaaacacccacccaggagttagggtggaggacccagaaccaacgtagggagtgggggaggggagtcaaatataggggtgtgtgtgtgtgtgtgtgtgtgtgcacgaattaaaaaacaggcctggagagcaatgtggagtaagcaatgtaataaaaacgatttaaaaattattcttaataaaagtacgaatcccaatgccacagggacttacttcatctgcttcacaatggtgctttttcctgattctccagcccctgttgggacacagacagtggggaaaaactggtgagtgtcagcttaagggaacagggggagggggggactaaggcatgcgagggggtgggcgatcctgggcacatggtggtgccaacttggggaccaggtctcccgggcgcgagtggggtgggggagctggtggcagggggtgcggagtggccggggtcgggggatgggggtagcagcggcggtccttaccgagcaggagtaatttcacgtctttggcggcgctgatgccatcctctttgaggtttttctcaatcgccttgctccgctcgagggcggctctctcctctgcgctcagagtacatcccatggtggccccttccctgccacagcccgcacgactcggctggcacggctccccggcttggagcgccccccacccccccagagagcagagcctgggctcaaggggggaaaatcacgatatcctctcctgggctggaaacaaaaatgtcgggaaaccagaaccctccaaaaagacagccgctaacaagattccagcagcggagactcgcggcagctggcaggggtctggggttgtcgaatcgagggtggccggggtctggggctccggagccaagggaggaggcgcccgcgggccgaggaggcgcggactgcaggcactgaggcttgtgcacgacccaaaataaataaaataatagtcgaggctggagccgcagccggagccgacagagggtggggtggggggcagggtgggtcctgctgccgcggctgccggaggaggaggaggcggcggcggcggaggaggaggtggaggaggcggcggcggcggcgcgggatgtggagggagtgagttagggggtgctgctagtgcatgtgcatcgccgctcttcagccgtcggtgcgtccgcggcgccttcgccgacccccgcgcgctgggcagggttgggcagggggccgggccgaggggcaggtctctagcgggaggcggcgtcgctgtctcccagagctcgcatcgctcggtgagcctaccggagagagagggagagcgccagggagccgcagccagccgggagctcgagggagagggagagagagagaggcagggagggaggggaaaaaaaaaatgggagagcgaacaagcgcgcgcgcgcctgggcccggggcggggaggaggccagcgcagcgcgcgagtgcgccagcggctctgcgcacccggctccgcgggccgccagctgacgtcagcagggccgcgcgccgggcccccgggacggggagggcgcggggcgggggaggcgcgcgccggagttcgcgtcagccggcggcggcgcgcacacgcgctcgcggagcggcctgcccctccccccagcgccctcccggcccgcggctcccccggggtgggtgcttgcgggactggcgggggcggggagtggggccgggcgcgcgccggggcgccccaccccgcctccgcccccgccccacgcgccggcggcgcggacctccttgtcaatgggagcgcggggccgggctgcccgcaggacggtcaggtgggccccccagctcgctgccagcgcggcctctgtccctctcgggccggctctccatcttgtcgcccgtagcccgccttctccgtggctctccagccgctggggccgcagagccgaggccgggttacctcaggaaacgcgatgtggtagtgggtcggaataaacccgcgcgccccagaattcgccttgggggcgtaaggacagattcggacttttcgtttcctatgtccacatttattgagcacctaatatgtgacacccgaggctgtaagaagaggaacgcagcgggcggagaaaagccagagctttttctctgtgagccgctgcctccagggccatagccgaccctgctccgagatcccagccgccgctctccgtgcaggaggggtgcccaccctggggaggccagggtgcccggagtggagggacagggcttcaagcgaccgggagtttccagcaaacccctgatccctgagcagtttattttaaaagcttttgcaaatgttggacggtttcgtttggtggaggccgtctttgcactaaattctcctgtcctcccccttcgaaacgcacaaaatgaattttgaacagattttggatgagaggttttcttccttttttcatcttctgaaacatttccccctcatttcttctcagataaagacccagaaacccgggacagttactcggtgtacagctagtcaaatactgaggaaaccagtcgatatttgccaaagattgggcatgttctgggtggtctcagattttgaagaaacgacttttttactgcacaaaatagttttacaatcagttccatcagacagccccaggggctctcctagggaaaggggccaataggcaaggttgcatggggataagagaggcaagcggccagtggaaaacggttttttgttttttttttcctaacagttgggcatttctg

SEQ ID NO: 7204 - DNA, 6000 bp, Homo sapiens
gtctccttgggttcaagcgattctcctgcctcaacctcacgagtagctgggattacgggcatgtgccaccacgcccagctaattttgtatttttagtagagatggggcttctccacgttggtcaggctagttccaaactcccaacctcaggtgatctgcccgccttggcctcccaaagtgctgggattactggtgtgagccaccgcgcccggcctgcaactgttaatgattactaacaactgcagcagaaattatcaataactagtaaacctgaaaagtcataagacctaacaattctatttccaagacatcccagaaaaattctggcacatgtgcgtggggaatatatgttctaaaagtccagcaaggtactatttttagtagcaaaataatggcaaccaaatgcagatgattaaggaaaaggacaaatacaatttgctgtgtacacgtgtgtgtgtatatttgaaaacagcacacaacaatagaagcaaagaactagatctacgtacaaccatgagaagttcgaaaaggcaagaaaagcaaattcttgtacaaactaaacataacaaaacaataatatattcattcacaagacatttgtttctcaacagatagtctcgctatgatgcccaggctggagcacagtggccattcacaagttgagtcatagtgcaccaaagcttcaaatgattctcctacctcagcctcctgagtagctgggactacaggtgtgggaccaccacgctcagctctattcatgagcggtttttatttatttttttgagacatcctcactgtcgctcagactggagtccagtggcacaatctcagcttacagcagcctcaaactcctgggctcaagtgatcggagctcctgccttggcctcccaagtagctgggactacaggcatgagccactgcgctcagcctcatgagattttaaatgcctcagagtagctgattttgggaagagaaatgggcctacacattaatctatactttttgttatgttgaaaaataacgtgatgcaaatgctaggagtggttaattatagatagtaagagagtaagttgatgttttggttttgttgcgtgtgacacggtccacccaggctggagtgcagtggtatgatcacagctcactgtagcctcgacctccctgggctcaagtgatccttccacttcagcctcccaagtagctgggactacaggtacatgccaccaaaccttgatagcttttatatatcttgttgagacagggtttcaccatgttgcccagactggtctcgaaatccttgcctcaagtgacccaccggccttggcctcccaaagtgctgggattacaaacatgagccactgcacccagctaagaatagatatttttactttgctattttctatacctttctatttgttatctgactaccatcaatgggcaacagtaaatatttccctccccactcaaatgaacctcactgtcaacaacccattctgtctgtccagctcccaagttctcagggaaggaggctataccatgtcagactcgaggtcatagtcgtcgctgttgctgtcacccccctcccagcgctgaagcaccttctctttgtgttccccattcactttcgagttcatggcaatggctgaatcggtgaacttgtctgtgggggcagaggtgaagatcaggagtcaggctatatttcacagacttctttccaatatcccccaaccccactctccgtaagtagttcaggaacaaagtttaagaagtccagagtacgtgtgcccgtgtgttaggatggccagggggtggggaggcaagagaagaagagtataaaaagtctatcagtactatgattccaaagaaaaaagaagttaaaaaccaagcaaagaaaatatgaagaaccacaacacagacaggaattcatcgcattatatattagacatcaagacatatttttaagaagaaaaatccacccacttcgctcaggaaaaaaaaggcattaaagcaaaacaaacaaacaaaaacaaaaaaacaaaccaaacacatcaccatgttccacctgcacacaaactaccctctgtcctctatgcacacagagcaggtctgaggtaacagcctaggacaatacctttagtagcatagttgaagtcaacatttcggaagtgaacaagcatgacatcacttggcttaaacaccatggtgtccacaatgtcctcccgacgagggccacctgctggctcagatgctttccggtgcacagcatccacggctagttcaaactacaaacaccccattccccacacccatgggtcagtttcaagaaaagtgaaggcaaaaatagaactggatttctcttaaatagaactggatttctcttacccttcccaaacttttcacaacactacatcctcaacatgcttggaaccaagtgcattgttttctcaacatcagccacaggacttagcaaaagtctcacaaaaatttaaacttaaatattttaacattaaagtacccagccctcaaatttgtcttttttccctgcagcactattcagcacaggcctacagaaacaactaaaggcatactctgacatcacccaattgacaccttcaatgagcctatttcattctcctcctactctgcaactccaaaaataattaaatttgagtacactgacctttgagcttagcgtcttgaagataccctcataagtggtaccatttttcacctttacatcacaagtggagccctggcagagtgggaaaaataagaagagtgtctccagaaagtagatgcattacgttccttaaacaacccgggggttaagtaccaacttaccacaacagctgtaaggaaatgcagcattctggaattgttgtagacgccttcaaacacctgtcagttaacataagagggagaattaaaggagtaatcagtcaacacctcattttcttttctaaatgcccgccgcactctactcattctgccttgtgtgtgccgggcccacagccctcctgagtacattagactctatctagacctaatgtgccctatattcccacattatgcatcttttaggtctatgtatcttaaacagggtgggagaagacactcacaggtgactgtgggggtccctttcctgtgctctgtcccctataaaagaaaacaagaaattacttaagtctgttcaagccctcttagaccactatgaaattaatgttaaatcctagaagtatataccacctgatgatgctgatttagactacaaaattgttaatcagtaagatttttctattttttttgagacagggtctccctctgttgcccaggctggggtgcagtggcgtgatctcagttcactgtagcctcaacctccaaggctcaagtgatcttcctgcctcagcctcccgagtggctgagactataggtacgaaccaccactcctggctttttttttttttaatttttagtagagatgggatttcccatctgtgttgcccaggctggtatcgatctccttgggctcaagggatcctcccacctttgcctcctaaagtgctggcattacaggcgtgagccactgcgcccggccaataaataagattttcaaactgtcaccttgtagaggaagaaaaaaatagacattaataagccagcaaacacatttcctccaaatgccagcaaaaagatctcaatcaacaatggttgtcaattgctctaagaaccaacgagaaaggggctagggctgcaggctaccaacagatcaatgctacagtattaaccaaaaagccacgccagctgtgagggcaaaagctccaggagtgcagctttggaactacctagctcaggtacattacctcccaaacagaaaagacaatcattttcagcagcctgacgcctcaaaactgtgggaggaggggtatcccctccacaccccatcccctcgacctcatgactcattcagcccgttacccactctgcggggatcaccaatcgccaggtaaccctgctcgtcgctggctgatgtaaccggcggttgagggcgaagagggggccgctggcggggctgggggacagcgcagccgcaaaagccatccaccgggaggcctcgcccggtctgcgcctgcgcactaaaacccacgggactttccgaacccccacctccagcgatcagagcccactgcgcctgcgtgtgctgccactcttaattccattaacacacacacactcgcacaggaaaaactgagcagggcctccactactcatgcactgccaccagacgagcccctccacgaactagtccctgccctaggtgttcccggggcgcgcgaatgcccgggtcatgagaccgagcatccacgcgcacgtacgggaagggggcgcgcgcgccagaggctcccggcccgcagtcctcccagtcatccctccttccgtccccccgcccacctcgctcccctcctactggccagaccgggaagggggaggcagcaacccgctcccaagtccctccctccccattggccaaactgtgggccgcgcgcccccctccattggctacggccggggaccccttcccgcagcagactccccattggctgaagccggggaccgcgagacccttcgtggtaatggaaccggggaccccgatcagctccttgcccccccccaactccccgttccgacggcgccggcgggatgcgccccgcctcccctgaaggccggggctgcgagccctgactaggccccgagagccgagcgcggcccctcagtgctccggtggccgcccggggaccctttccgtccgacctgttcggacctgagggggccctcccccagcttcacggggactccccacccagccggtgcccctgacggtgccgggtcggggtccgccccaccggaaccgagccacagcctctgggtggccgcggctccctcgcccggagcccacccttctcacctggcgctgccgatggcggctgcccccggcctctcctggtgttgctgcggcggcggcggctgcggcgccaagatgccttcggctccccggcggagcccgctcccggcagcggccacaggccccaggcagggggaggcggccgctggaggcccgggaggagccgcagaggtggccagcggccccgggaggccgccgttgggagggctggtgcccccggggggccgacgggccacggcctgttgcgtggggggcggctgctggggctgggagggctgttgtagcggctgaggcttcaacatgatggcagcgtccggaaggggaattagagagaagggagggagagagggggccggggctggggccccgctggagagcgcgggaagcgagggggatcgggcagccggggcccgccgtgggcgggcggggggagccccgcggtgtcgggggtggagagagaagaccgcggcgcgaggaagcgccgcgaggcggaaggggagggggtctcgcggctggaggaaagcgagagggcgcgagccgggctggcgcgcgtgcgcgtcgccggggagcggagagggaggagcgcgcgggtgggagctcccggggggggggggggggggggggggccaggagcgagcagtggcgcgaggtgccgcgcacaccggcgcggttagctcccggcgggaaagtgggagagaatcaagtcggtgaacctcgcacccctagccctgggagtgggtaaggagcggcgcgggcgctcacgcgcgccaaggatttagggtcttaaggtctcaaaccgccttagaagccggcggccgctgtcgcttcacaatgagcgtgtgaggcgcagggggaggagccgaaggcgccagaggaagggccggcctctccgcccacgccgtcgctgcgtcgcgatgcctccgcgggagtgtgaggcggcacgtcgtgcgtgaggctcttccgccacttggcggcccgtgggcagagccttaagtgccaagaaagtctccgggactggaccacccgagccactgcgcttttag

SEQ ID NO: 7205 - DNA, 6000 bp, Homo sapiens; identical to SEQ ID NO: 3266

SEQ ID NO: 7206 - DNA, 6000 bp, Homo sapiens; identical to SEQ ID NO: 3265

SEQ ID NO: 7207 - DNA, 6000 bp, Homo sapiens
aaaagtgcaaggtgaagcagaaagtgatgatgtagaagctgcaacgagttatccagaagatctagatgagataactgacgatggtgagtacattaaacaacagattttcaatgtaaacaaatctgctttctcctggaaaaagatgtcatctaggactttcatagctagagaagagaagtcaatgcctggcttcaaagtttcaaagacaggctgattctcttgttatgagcgaatacagctggtgactaagttgaagccagtactcactaaccatttcaaaactcttagggcccttaagaattaggctaaatctattctgcttgtgctctataaatgcaacaacaaagcctgaatgacagcacatctgtttataacatggtttactgagtatcttaagccactgttgagatctactactcagaaaataatattcctttcaaagtattatgttcatggtcacccaagcactctgatgacaatgtgcaagaaggttgatgctgttttcatgtctctagcacaatatccattctgcagcccagggatcaaggagtaatttttactttcaagacttatgattatataagaaacacattttgtaaggctacagatgccatagatagtgattcctctgatggatctgggcaaagtaagggaaagcttggaaaggattcaccattgtagatgccattaagaaattcatgattcatgggaggaggtcaaaatatcaacattaataggagttgggaaaagttgattccaatgctcatggatgaatttgaggagttcgagacttcgctgggaggaagagttctgtaactgcaggtgtgatggaaagagcagagaacagaattagaagtggagcctgaagatgtgactgaagagctacaatctcgtaataaaacttggaccgatgagtagttgcttcttacggatgagcaaagaaagcagtttctcgagatgaacaccactcctggtgaagatgctgtgaacatggttgaaatgacaacaaagaatacagcatagacatgaacttatttgataaggcagtggcagagtttgagaggatggcctccaattttgaaagaagttctactgtaggtaaaatgttgtcaggcagcatcgcatgctacagagaaatgtttcctaaagggaagagtcaactgatatggccaactttatcgttcttgtttgaagaaattgccaaagccaccccaaacttcagcaaccaccacactggtaagtcagcagccgtcagcatcaaggtgagatcttccaccagcaaaaggattataacttgctgaagggtcaggtgattgctatcatttctcagcaataaggtatttttaattaaggaatgtacatttttagacataatgctcctgcacacttaatagcctacagtatagtgtcaacgtaacacgtatacactgggaagccacaacactgtgtgatgcgctttattgcaatatttgctctattgaggtgatctggaatcaaactcacaatatctccaaggtacgcctgtagctgggttgtttttttttaaatattaagatttaaaaactatcatgcagctcacgcctgtaatcccagcacttcgggaggccaaagcaggtggagcacttgaggtcaggagttcaagaccagcctggccaacatggtgaaaccccttctccactaaaagtacaaaaattagctgggcatggtcgtgggcgcctatagtcccacctactcgggaggctgaggctggagaatcacttaaagccgggaggcagaggttgcaatgagccgagattgtgccactgcagtccggcctgggtgacagcaagagactccatctcggaaaaaaacaactatcatgcaggctgaaaaataaggtccctgaacaacaacaacaacaaaaatagctaatgacaatattgacttggaggaagttccccatcacattgctgagtgaataaagatgactgaatgaatcaaacggaaagtatcttcaccaaagtgtaaacagtggctgctctgacagaatttggggcgacttttacttattgtataaattttttggtattgctttaattgttcacgttggaaattttttgtctataatcaatagattacaatatagttttttagagccattttttttgagacagggtcttgctctgttgcccaggctggagggcagtggcacaatcgtggctcactgcagcctcggcctcccaggctcaggtgatcctaccacctcagcctcccaagtagctgggactacaggcatctgcagccacacccagttaattttgtatttttagtagagatggggttttgccatgttgcccaggctgggtctggaactcctgggcccaaatgatatgcatacctctgactcccaaagtgctgggattacaggcatgagtcactgcaccctgctgaagctatttttatttagaaaaagaattccaaggccaggctcagtggctcatgactataatcaaaccactttgggaagacaaggcagaaggattgctggaggccaggagttggagaccagcctggacaacatagcgagaccctgtttctacagaaaaaatttaaatcagccagccatggtgacacacgcctgtggtcttagctactcgggaggctgaggtgggaggatggcttgagctcaggagttcaaggctacagtgagctgtgatgacactgctgtactccaggctgggcaacagagtgagacccaatctctaaataaataaatgtatacaaaaagaattcgacaaaatatttttaaaatttctcttgtaagccattaaagaaattgcaggaaattttaaatgttagacttgacaataagtgaatacaagtttagtatggactctgatgcaagccaaattgtactaaaaaggcagatgccaaaaaagaccgtagacaaacttcacgaataattgtgactacaaaagtctaaataaaatattagcaaattgattcagtggttcataatgggcatacaagtatgcttccatattaagaaggctattcacataatgtatcttgagtgacactgaaaaagtgttttattaaaaatgcaacagccatacctgattttttaaatactgttgataaactatgaagaaaaacaatagttgctaaatatgcacagccacttctgctttatagttcattactggccattgcacaacatcctgtctcaccaatatcctctttgctcccagacatgctggcctatatttacttccttaaacacaagaatgacctttccctgctcaggggctctgctcagggtggctgtttttctgcaaagctctttgcctattgtgttacaagactggctttttgtggtccttcatgtctcggctaaaaagacattagccatggttatctaactctacatgctggaatttgatacaatttttattatctcctttataacttttcagatttttaatgttttattccatatacattcagtttttcaaaaggaaaaaataattttttaatctttagtatattttgataaaatatactagtatgtttggtatgttttagtatgtttgataaaatacaaaacattgatgtaacttttcccaaaaaataagtagacagttgtcctaatgtcatttattgcataatgcaacctttccctggtgaattaaagtgtcacattccacatgaacttggctgtttcttaagtttctagacagttctactgatctgttcattctagcaccagtacccccactattttaaagttcttaatagagcaagtgtctccttgtcttcaacattttcctagcttattttcattcctattttataggaaatttaaactagctcttgtttctttaaaaccctgttacaattttgactttcaaataggttaaattttagaacaactcagaatatgcacctttgcaacatctcatcttttttatctagaatcttggttatatctgtccatttaataaatttttactttatgcctcaatagagattcttattaataccttaatgcatagattgtttgctgataatgtgtttcatattttaatcttagtattcttatcattcatatataataacaggtactatttattgagtgctctccacatgtcagctctttgtgttaagtactttattccttaattttctcctcaccccaacccatttttcacatttaaaaaacctgagtcttaaagaacacaagtgacctgcctgaggcattacagccaagaagaggcagtgctttgacttgaatttaagagttcgggatcaatagatgcccaaacatcagcatctctcaatatatccttgtaacaaatctgcacatgcacccccgaatctaaaattaaaattaaaaaaaaaaaaaaaaaagagttcccacagaacggtctttagcactgcactacgtggcttacggggaccatgaaagctgagagcctgttcattttgtcatgggtcacttcactgactaatcacagacatcttttttttctaatgatgtttccattcattttcttagatttcccagagagatcattatatcaacaagtaataataattcttctttctcctttccaatattttatttctccacttcctccaattggacaataatcttttcttgtaatgcatatacctgtattaaataccacttaaaaccctgtataaaatcataacataacacactaaactttaaacacttcaagactattggaagatggcaggattaaaaataaggcttagacattgtttttataatattcattatgtcaggtgagaagttgctggaataaataagttgcatactttccatattctatttttgtgcctataatgacctgttgcttttgttatttttaaagtttagtccaagatattttaattctaagaaaagagttgattttgcttatcttcgtgtccttattcaaatgagggcacttaataaacatttgttggtgttaatgttacagaaagttgggggaatggatggagataaccagagtgagaactcacagttccttctcctggggatctcagagagtcctgagcagcagcggatcctgttttggatgttcctgtccatgtacctggtcacggtgctgggaaatgtgctcatcatcctggccatcagctctgattcccacctgcacacccccatgtacttcttcctggccaacctctccttcactgacctcttctttgtcaccaacacaatccccaagatgctggtgaacttccagtcccagaacaaagccatctcctatgcagggtgtctgacacagctctacttcctggtctccttggtgaccctggacaacctcatcctggccgtgatggcgtatgatcgctatgtggccacctgctgccccctccactatgtcacagccatgagccctgggctctgtgtcttgctcctctccttgtgttgggggctgtctgttctctatggcctcctcctcaccttcctcctgaccagggtgaccttctgtgggcctcgagagatccactacctcttctgtgacatgtacatcctgctgtggctggcatgttccaacacccacatcattcacacagcgttgattgccactggctgcttcatcttcctcacccccttagggttcatgaccacatcctatgtacgtattgtcagaaccatccttcaaatgccctcggcctctaagaaatacaaaaccttctctacctgtgcctcccatttgggtgtggtctccctcttttatgggacgcttgctatggtgtacctgcagcccctccatacctactccatgaaggactcagtagccacagtgatgtatgctgtgctgacacctatgatgaaccctttcatctacaggctgaggaacaaagacatgcatggggctccgggaagagtcctatggagaccctttcagaggcctaaatgaaggtaattttggaaaggggattgaagtggagaccggaaatatccttctccacacataaggc

SEQ ID NO: 7208 - DNA, 6000 bp, Homo sapiens
ctggctgaagttgtacttcctgcattgaggccccacccagtgaggaagagtgggtcagggtcaggcctgaagaggtgctttggccacagtcgaccataggggtgtgttgggctgtggtggacacattttgggaccaagtcaaccagtctcccaggctccggcaggggaaaagtgtgggctggagctatagagatggctgccgcccttcccccacccagggagcttagtgtgctaggcagttatcagtcccaatgttgggtgctgcccctcctgcaaggagctcaaacagcttagacagcaggcagctgcagctatggtgctagttttctctccctcaaggaacttggcaggcttaagcagattctagctgagaggctgttgagaatctgcacagctctggggttggtaccctaggcaccagtggcatgggttcaccagtggaatcttctgatttgtgggttgcagagttccatggaaaaagcatgatttccctggctgggtagcatgctcactcaccacctcccttggcttgggggtggggactcgtatttagagctttctcagcatacgatcataccattggcaaacagcactaatttgactcttttccaatttggatgccctttatttctttctcttgtcttattgctctggctaggacttctagtactatgttgaatagaagtaatgaaagtgggcatctttgtcttgttccatttctcagtaggaatgctttcaagtttttttaaagtccattgtaaaatggacaccacagaaatagaaaagatcattcgagactactgtgaacacctctacgcacacaaactagaacatttaacagacatggataaattcctggaagaaccttcttggaagtatattatcctccacaatatggaaatgaagtaacatatggaaatgaaacatgtttttcaattttttctgctattcattgctaattttattctactgcagtgggaaaacatactttgtattttttctagccttttaatgtcatttgggtttattttatggcctagaatatggtctatcatagagaatgttcccatgacacttgaaaataactttcttcttttgttgttgggcagagcgttacatagacatctgttaggcgcagttaatttacagtgtggatcaaatctttttttccttgttgatctttctagttgttctatccattattgaaagtggtgtgttgaattttccaaatactgttgttgaattacacatttctgtcttcatttctatcagttcccttcacgtatttgggtgcatatatgtttacaattgttatatcttcttcatagattgacccacttgtcattataaaatgtctcactttatctctagtcagactttttgacttaaactctctttaagagatggggtcttgctatgttgctcaggctggtcttgaactcttggcctcaagccattctcctacctcagcctcccaaagtgatgagattaacaggcatgggccaccaggtcagcataaactctattttaatctttaaagccattttatattttaaggctaaagtacagccattccgtttttcttgtggttcctgattgcatggtatcttttcccatcctcttactttcaaccttgctgtatctgtgaatcaagtaggttttctgtagaatgcatataaatgaatcatgtttttatccactctgacagtctctgccttttgattgaattgttctatgcattcacacttaatgttatgattgatatagttagatttatgtctcccattttactttgtgttttctatgtgtcccatgtccttttttcctctattttccttgtccacttccttttccattaagttaatattttctcatgttgcattttaatttctttaataattttttcactctatttttgaaggtaatttttagtggttgctctaaagtctaccacatacatcttatcagaatcagctgcagatttataccaacttaagtccaatgatatatagaaaatgatttctatataattctattattttcttccttttgtagtattattgttacagatgtaacatctattaatcctgataatccactgttataattactactataccttctgtagtcatttccttagtccaactttgcctccacccagctcctttatgctgtaatcgacaaacatgttatacatatatttctatatgctatggcctcaacgatacatcatatacatattatcttacataaatggtgtttaaataagttataagaaaaaacaagaaaatatgaatttatactgtcatacttaatagatatatgtaaaatattacatagatatatagattatatcaatatatatttacatatttacatacatttataatatcacattttcatactttatcactgttctttcctttttgtgcatgtggattcaaattatcatctgaggtaacttactttcaacctaaagaaatttctttagtagtttttataagataggtctgctagcaaaaattttctgtgtttttgttcacctgagataatctttatttggccttcattcttttaaagatagttttgctgaatattagactcttacttgatgggttttttcttcaaccattttgaatatgttatccaactgtcttggagcctcctttgtctctgttgagaagtctgttgttcatattattaggcttcctttgtaagtaaaaaatcttttttacttgctgatttcaagattttctccttgtctctgcctttcagcctttttactatgatgtgtctatttgtgaatctctttgtatttattctgcctaaagtttgtcgagtttcctatatgtgtagttttttaaacaaatttactacgttttcagccattctttctttggattttttttctgatttttctctctcctgtccttcagcacttgcattccatgtgtgctggtatgcttaatggtgctccacacttttctgagtctctgttcatttttcttcattttttctcttcctctatttttcagcttgatatcaatctatcttaaagaatgctattttttctgctagttcaatactactattcagcctgactaataaaatcttcatttcagttactgtacattttgactgcaggatttccatttggctctcttttatccattctttttattgatattccccatttgtcatgacattctcactgtaccttcctttacttccctaatcatgctttctcttagttttgtgaaaatattttcaatggctactttgaggtcttttcaaagaaggctgacatcacattgtgctcacaggtagtttctgttgcctgattttttcctcatatgtggatcatactttgtttcttttcatggttcataaattttgttggaatatggacattttagataatttattgtaacaattcagggtactagtctcccctaatggggctggttattggtatttacctatttgcttagttcccacagtcactgagaactgtcagtagtattggaagagatcttactctttccctgaccgcattcagctgttttatatatactacatttttttatatttttacatatacatgtttcttttttcttttttgattttttaaacattttattctatacacattaggctttcgaaggaaaaaaaggcacactatagtattttaatctttagtatgttttaaatgtgtttgataagatacaaaatattgttcgaactagtcctccgaaattaattacacagttatctcaatgtgccatttcttgaataatgcaggctttacttgctaatatagagtgtacccatgcagaatttaccggctaatatacagtgcacccaaattaatctgccaaattccacgtttttgtgtctatctgtgaagtttctactgatctgttcattccaacattactatcatattgctttagaattcttaatatttgatgtgcaagcatcaccctgttattcttttattcaatgtttttctagcttatctacatgcttatatttagatgaaatttagaccagtttcatttctccaaaaccctgttataattttgatatccagtaaactttcaattaattcaaaagagtatatagcttggtgacacttctcttcatattagaaaccttgatatgtttatcaatttatttaatttttactttacccctcactggagaatttgaaggtttcgcctgattcttgttaacatctgagtgccatgatttatttgttgacagtggggatgagatagtttttcattataacatttttcctgattctcgttaaatataacaataataggcaacatttctgagtgctaattgcctaccaactccttgtgttaagcactttactacttaattttcccccaccctataactcatgattcgcatgaagaaactgagtcttaaggaactctggaaccctacctgaggtttcacagcaagtaagtggcagtgcgtactatcttactagcagggaaagacttgatttcaagtattctaaactctatttctagtagtctttcagtggatagtcccacttttttcagatagatcatcatatcaacaaataataattgttcctactcctttcaaatacttttattttcttccttttttgaactacttatactgcatgtatctatattaattattttaacacatatacatatcataacacactaatcaccaaacacttcaagaatagtgtaagatgacaggattgaaaataagaattacacattattcctttaacattgagtttcccagctttgaagtagctgaaataattatatcgcataaaaactttgttatatttttcactttcttattttcaaaaattataaaattgggtgtaagacattcttaattctaagaaaatgttgattttgcttatcttcatgtttttattcaattaaggacttttggtaaacatttgctggtgttaatgttaaaagagagttggggaaatggatggaggcaaccagagtgaaggttcagagttccttctcctggggatgtcagagagtcctgagcagcagcggatcctgttttggatgttcctgtccatgtacctggtcacggtggtgggaaatgtgctcatcatcctggccatcagctctgattcccgcctgcacacccccgtgtacttcttcctggccaacctctccttcactgacctcttctttgtcaccaacacaatccccaagatgctggtgaacctccagtcccataacaaagccatctcctatgcagggtgtctgacacagctctacttcctggtctccttggtggccctggacaacctcatcctggctgtgatggcatatgaccgctatgtggccatctgctgccccctccactacaccacagccatgagccctaagctctgtatcttactcctttccttgtgttgggtcctatccgtcctctatggcctcatacacaccctcctcatgaccagagtgaccttctgtgggtcacgaaaaatccactacatcttctgtgagatgtatgtattgctgaggatggcatgttccaacattcagattaatcacacagtgctgattgccacaggctgcttcatcttcctcattccctttggattcgtgatcatttcctatgtgctgattatcagagccatcctcagaataccctcagtctctaagaaatacaaagccttctccacctgtgcctcccatttgggtgcagtctccctcttctatgggacactttgtatggtatacctaaagcccctccatacctactctgtgaaggactcagtagccacagtgatgtatgctgtggtgacacccatgatgaatcccttcatctacagcctgaggaacaaggacatgcatggggctctgggaagactcctagataaacactttaagaggctgacatgagggcaatttggaaagacagcattaaagtggagactaggaatatccttcaccctatgtaagg

SEQ ID NO: 7209 - DNA, 6000 bp, Homo sapiens
cattcgactgcattttcttccattttatacattttatgagcttgtggcttgcctttggggtaagattttcttaagtaatttatttttcagtaagtagtacattctcatagtcagacttcaaaaagtgctgaaaggtagatatgaacatctttctcccctcctgcctttcatctacccagttctgtgcctgtaacaagtaatcgctgttactggtttcctgtttaattcttccagaaagttttaatgaacatactagacaatatattgcatgttattttggaaggtggagttaaagtgttatttgtgaccaaaataagaatagggacttgagttgtgtcctgatcactccggtcccccaccacatccttattccctctggtttgtttttaaccttataactttcacttctttcctccttgcatgtttctttcttcatcagtggggagcataagttctctacactttatttccaccttcaaacttgaacctgggtcctaaggcatccaaactaagttcaccaaaaattgtaatccatctaccacagacaaaatgtcttctaaaacagcacatagctaatatagaatataagaacgattttattttgagttgttggagttagggttcctaataagcctaagaaaatgcctgctgactccacgtgaaaagaaagaaggacgatgcatggaaagggttttctatgtggacgaagggctggccattcactgggcacgtggttgtctaaaagttgagacctaaaggtctaaaaggagaaggaaggaaataagatctctggtcagtgacttggggaccaagagaaaaaatggaggggaaacgggctgaggtttccatctctgctaaactagaaacagccaagagccccacgatgaaggagggtgaggattctaaggcctttttaatctgcgtaagtcaatgaaaggcttgtcctacatgagggagaggtgagaatcaattccaggcaccacaaaaagcaacagctgttaaagtgagggagctgcaggggtgatcgtgctcaccagggcgtcgggagagccttgtagatgcacctgtaaatatgcactgaggctggcacggtgcctcacgcttgtaatcccagcaatttgggaggccgaggcagttggatcatttgagtccaggagttcgagaccagcctggccagcgtggcaaaaccccatctctactaaaaatagaaaaattagccaagtgtggtgtcatgtgcctggaatcccagctactcgggaggctggggcaggagaatcgcttgaacccaggaggcagagcctttcattgacttaggcagattaaaaaggtgagattgcgccactgcatgccagcctggatgacagagtgagactctgtcttaaaaaaaaaaaaaatgcactgagccccacgaatccacccacttcacctagagctctgtcttgggaggatgaggaaggcagaggctaataaacacatgccttgagtggtaatggggactcttggtagggagtaagggaaacatcacctactatgaccacattttggccaagaacacgcaagggggagaccttggagatttcagcggctggcagataaaatgattaaagaagaccacgtgggcaggtgagaagaacaagaagcttgggattaaacagtggaggctgcatccaggctctgccacttgctggatgtgacttaaggctcaagggattcttcgtttttctatgaatgaaggaaagatacccttttctcattaatggaacataacacttttaagaatattaattatttccttaataaatgcaaaaagtaccttcctactttgtttttttactttgcatgtgatctttttctttaaaagaattttattattattattatactttaagttttagggtacatgtgcacaacatgcaggtttgttacatatgtatacatgtgccatgttggtgtcctgcacccattaactcgtcaatgctattccctcccccctccccccaccccacaacagtccccagagtgtgatgttccccttcctgtgtccatgtgttctcattgttcaattcccatctatgagtgagaacatgcggtgtttggttttttgtccttgcaatagtttactgagaatgatgatttccaatttcatccatgtccctacaaaggacatgaactcatcatttttatggctgcatagtattccatggtgtatttttaatttaatttgatcaaaccaattattcctttcctttcttgttttcttcactgttttttacttagaaagtccacccttgtcctgagagtaaatattgtgctgcattttctcctggttgctttagagttacatctgcagggaaaatgctttaaccatctgaaacttattcaggtaagtgctattaggttggaatttaaattaattttccagagacttaaccagcttgtcccagcattgttcgttcaatctcttcttccttttgattggcagtgccactgttagtaaagcaaagtctgaggaatactgtgctctgcttctgggttttctgttttttcctttgatgaattgtattgaggagagaagtaacatataccacagtccctggggcatccacatactagcagaagatagttcggtaagacatagccatgttcaggccaggcacggtgactcacgcctgtaatcccagcactttgggaggccaaggtgggcagatcacctgaggtcaggagtttgaaactagcctggccaatgaggagaaaccccatctttactaaaaatacaaaaaaaaaaaaaatagccgggtgtggtggcgtgtgcctgtagtcccagctacttgggaggctgaagcagcagaattgcttgaacccaggaggcagaggttgcagtgagccaagattctgccacggcactccagcctgggtgacagagtgagactccgtctcaaaaataaataaataagaaatatccatggtcagagagagaataagacataagatgccactattgcctagtaagtagtaattttagtgtacgtaactaaggcttacaaatccataggttatattaaactctgaaggtaaaaaaaagcggcacagggaaactgattccgtgggttaatcactcagctgaaacactgttccatcccaagaatttcacctagaaagaatgcatttgtttggaacacttatctctctgtaaccgtagtgtttccctacatattcctatggccaggactccattaactcaaagctaccactgaacctactaacaaaaaggttggctgggtgtggtggctcatgcctgtaatcccagcactttgggaggccgaggcaggtgggtcacctgaggtcaggagttcaagtccagcctggccaatgtgatgaaaccccatctctactaaaaatacaaaaaaaaaaaaaaaaaaaatagccaggtgtggtagcagtggcctgtaatcccagctactcaggaggctgagacaagggaatcacttgagcccagcaggtggagactgcagtgagctgagttcgtgctactgcactccagcctgggtgacagagtgagactccatctcaaaaatcataacaataataataaaggttcaggctaattcttatgcctgatattacctctatagcaaagcccctttccattcttcccactctttccattctctggggtttatgtatttacatgatagattcatactgagcatctgtgttgtaccagcctcaaggctaatgctagatttcaaagctgagccaattaggcaccatctctgcctactcccagtgatgctcacagcagaatgagggacactcatataaacagacactcagaatccaaggtgacacgtgctgtgatgggggaggcactgcattaggaaggtcacgaacctgagtttctggtgagaggatgagttgggaaagacttcccagaagaggtgacatctaaggtgagacctgaagcttagctcgtctgataaatgggatgggaaaaactatttcagcctgagaaagcctaaaggtgagggagtatctgggcctttaaaataattgaaactatgattagtgcataaagtgtggagtggaggagggagtttcatgaggaactggggatgtctgtaataaatgacggtaagatccaggacattcagccgtgttcagtttagagtttatcctgggagtaatgaggagtgtatgaaggatttttcaagcagaaagacaagagtcgaatttgatttttagcaagcctattctctgtgtatttagaacagcaggtggcaggtgggcatacctgggggcatggagatcaactgcccaaatccaagtgagaaatcacagtgccctgaatgacatgagctgcagctgggactgatggtgaccagtaaacagagagacgtcagtaaattgtagccatattgagaaggtaaaattgccaggctttggtggtggttggatgtaggcagggagggagaaacgtgggtcaataatgacgctcaggtttctggccagacccgctgtgtagataacagtgataatgatttccatgttagccatgcttttcccaattccaaaacccctttccaggagctgtctttttaattattggtacaatgggctcatttgacctgtaaaatcttgggttgtataaatgtcatagtttctacatgaacactaccagagcaaagccagcaagcccctccagcccagccccaaaatacacatattggcttaatgcttatggaataaatttaaaagcctctcattgcattacaaacaaatctgtggtttctcatagcaccaagcacaggaatttgcaaatatttagtcgaaccctatgaaatggccatttttgcaggtcccaaagagtcaaatagtggagatttcctatgatccaacctcacactagaagatcaacactggaatattgcataattttcagagttcacaatccagggcttaccaacgtcacccaattaacccaactttcttcctacagacaaatggaggggaaaaatctgaccagcatctcagaatgtttcctcctggggttctctgagcagctggaggagcagaagcccctctttgggtccttcctgttcatgtacttggtcacggtggcaggcaacctcctcatcattctagtcatcattactgacactcaactccatacccccatgtacttctttctagccaacctctcccttgcagatgcctgctttgtgtccaccacagtccctaagatgctggcaaacatacagatccagagtcaggccatctcctactcagggtgtctactacagttgtattttttcatgttatttgtgatgctggaggcattcctcttggcggtcatggcctatgactgctacgtggccatatgccacccacttcattacattctgatcatgagccctgggctctgcatcttcctcgtgtctgcatcctggatcatgaatgccctccactcccttctacacacacttctgatgaacagcctgtccttctgcgcaaaccatgagatcccacacttcttctgtgacatcaatcccctcctgagtctgtcctgcacagaccccttcaccaatgagctggtgatcttcatcactgggggtctcacaggactcatttgtgtgctttgcctgattatctcttacacgaacgttttctcgaccatcctgaagatcccatcagctcaggggaagcggaaagccttttccacctgcagctctcatctctccgtggtctctctcttctttgggacttctttttgtgttgatttcagttctccctcaacccactcggcccagaaggacacagttgcatcagtgatgtacacagtggtaactccaatgttgaatccctttatctacagtttgaggaaccaagaaataaagtcttccctgagaaagttaatctgggttcggaaaattcattccccttagtggtagtgacttgacatccaatatgggggtctccatgcacctgcgttcaccacagtaa

SEQ ID NO: 7210 - DNA, 6000 bp, Homo sapiens
tatattttttatacctatattgtcttttccaacctggccttaccctaaaacaatctttttatttcctttattatagcagtgaattttggtctctgtaatgctgtttgccttaaattcaactttgttattaaaagataaagcatgctatctgcatttattaccataacacatatttttctttattattgttaaataaatttttacataccatccttttaatattatgacttttaaattctcgagtttttaattttgactaattccttggttggttgcattgcatcaagtcatttttaaaggactagtacatccatgttatatttattgaattttcacatattttagatttttcttttgcatatgtatttatatatctgaaggatgacttagctaggtataaaatttgtggacatctgttctctcatctataactcattttctgaaatagctgtgaaaaaatctgaagtaaggctgatattctctcttttctctacttcttatatggtcatctttccccccactgatgcatgtaggattattttttcatcagtctatatttttgtatttgctgacttttattataattttttatagcacaaaagtttccttttgattttcaagtctgcacttgcatttctaaacagttttctgctattatatctggaacatcatcgtttctttttttccttattctgcactttagtaagaccaagaattttgtagcaagtttgaagtttatatgccacaatcaatatacacgaaatgagagatttgtttttaaaaataaaaatggaaaacaaaatttataatattataattatgtaaatattaccacttcagaagcaagatgtatgattgaactcatagatttaaaaaaaaatcctacattattaaacctgtgatagtcagagcaaaggttacaagcttaatgtcaaattagtttccctttctcacactccataaatttctcaaatcaggccacattccatttgctcatttttgtagcatatgtcaatttctctctgttcctccctccctccctctctttcttatttatactctccccaaccctatttctttcttttttattcttttttaatggctgagcctcttgagataatgttcagacatcaagacacttcatcactatataatttagagttctgaatctcctcaaaagaacattctcgtatgtaactacaatgtcgttgttatgtacgagtcattcagtgctgctagcagagacttagatggtaggtccagggcaagcaatccactgctgagttcagaggcactgaagctgtttgaagcattgaagaatcctcgctgggagcagtgtacattatacctggtattatagttgataaagaataaagggagagcaaaatcttttaataggattacctaggggtcctataatttccattttattgccatttagagaattaaagaatgttctcatccagagagaggataagatacagccttggctgactctaacacattttgttaaagatgtagctttttattttattctgagctttgatcaggaactggtattgattttttaagaagcctttttgcctctgatgaggtaatcctaaatgtttaaattgaacatattagtgtgatttcaaatatgaaaagatgggattatttgtgctttagacatcattttgatatcaattttcacagatagaactggtctataattgtattcgtgtcttgtatttttcttctttagtaaattagctattttaattttacttaatttttggttctggaatgaattatatagagcctggggattattccttgagcgtctgaaaaggggagtatttggtccttgaaattttgaaaaacccagaaagcttcctcacccaaggatttttttactgtaatataatttaaatatagtgcacgaatcttaagtgtacagcttgctgaatttgacacccgtgtgaccactgtacagatcaagatacagaggatttatgtcacttcagaaattttccttgtgccccctcctcgtgagtccccacccacatccagaggtaatgactactctggtttctactgccagagagaaatttgccagctcatgaactttgaatagatggaatcatacaatatttttttttctggattcttttactcatcataatgttttaaagatttatctatgtcgtgtgaatcatcagagttcaatctttttcactgctacatagtacaccattgaaatgattatgccaccgtacttattctttctgctgatgaacatttgggtttttcagttttagctactatgactgaagcctctgtgagaattctaatacacatcttttgttttcatttattttgggtacttcaggagcaaaatttctgggctgtaggctgggtaaatattaaaactttgggcactgcaaatagtttgcagaacagttttattcttttacattcttactagcaatatatgagggtgttaatttctccacatccttgctaacatttgatactatcaatcttttgtttctagctattctgatgggtatgtagtagtatcttacgattttaatttgtatttccctgatgaataataatgttgaatatgttttcatatgcttgtcggcttcgagactttcattagagataattttttggcttattttatattattagtctaagttttccctcctcaaatatttattttaatggtctagtcagacattgtatatattgagccaggttttgcagtttgtctttgcgtagaagtcttattttgatttttaaatttacttgagaagttttagaaagatttaaaaaatcttcctttgtgattatattctttttaaaagtgcttgccatgtaacagttcctcactaaatgttagctttatttttattttttttgagacagagtctcactctgtcgcctaggctggaatgcagtggtacaatctcggttcactgcaacctccaccaccttgcgggttgaagtgattctcctgcctcaacctccccagtagctgggattacaggcgcccttcaccacactcagctaatttttgtatttttagtagagacagggtttcaccatgttggccaggctgctcttgaacttctgacctcaggtgatccacctgcctcggcctcccaaagttctgggattacaggcgtgagccaccatgcccgaccagcttttattatttttattgcaagaatttccattacaaccttgcaatagtgaaaaattagaaaaacataaatatttattaataagggagtgattaaactgtggaagatccacagtataggattgtatagcatgaagttaagaatgaaggcattctatttgtggtaataagacaagatcttctagatgtattgtttcataaaaaaaggaaactgaagaataatagatataaatagaatgacactatttatgtttcaagatcagaataatatatataaatagaatgacactatttgtttcaaaatcagagcgagagagcaagagtgaaggtgagagcaagagtgaaggtgagagcaagagattcaactgataattgggatggcggtagaggttgatttgggtggtagtcaaacagaacttcaactctgaatttttacattaaaaatggttgatacagtatctaggaaaagaatttaaattattttaagccacttaaaaaataactggatcttgaagtttctccaggaggagtctgcaggggcatccaacaacaaacacctctttaagatcctcccctgggctggatgcggaggctcacgcctgtaatcccagcactttggcaggcccaggcagggggatcacttgaggccaggagttcgagaccagcctggtcaacatagtgaaaccctgtctctagtaaagaaaacacaaaaaaaattagccgggtgcggtggcaggtgcctgtaatcctggctacttgggagactgaggcaggagaatagcttgaacccgggaggcggaagttgtagtgagccgagatggcaccactgcactcagcgtgggcgccagagggaggcactatctcaaaaaaaaaaaaaaattatccattgcttcacaggcttcccgtccacccaccgggttcctgctagtcacactctttcttctccctcttcacaaactatttgtctacctccatttgctgtcttttcatttacccaaaatttaaaagtagaatctatctcacacattcagataacacacgaattcaacctactatgtatctatcactacagtaaacactttgtcatatttacttcgggtctaatttcttatttaacagaaataagacagggtagatcgaaattaatagtgctttagaaagccaaaaaacaaggtttttttttctgtaactgttatcatgaaaatgccagtgagccagatttgccctcacgcctcttggggtgcagccctccatctgagcccccttttcagggcgcccttgacctctttgttgcgaaggctgttgatgaaagggttcaaggtcggcgtgatgacagcgtagaccacgctggccaggcggtcgtagcgggctgagtaggcagacgacggcgggaaatacacggagaggacagagccaaagaaaagcgccaccgccaccgccactaggtgggccccgcaggtggagaaggcgcggcgccggccgccggcaagccgagcaccgcgaccaggatgcgcgcgtaggaaaaggaacacgaggagcagcggggccaacaccacggccaggccctcggagaagatggccgtctccgcggcggacgtgtccgaggtcgccaagctcagcatcaccgtcatgtcgcaaaagaaggggcgcacgggggtggggtaggggtaggagagcgcggagaggagcagcgtgtgcagcagcgagtgcaggtgcgtcacggcccacgacgcacgcaccagcgaggcgcagcgccatggcgtcaccagcgcgccgtagcgcaggggccggcacgccgccgtcgggcggtcgtaggacatggccgccaggaggtagctctcggtgatgcccagagccacgaagaagtacatctcggcaaagcacgcctggaaggatatggcctggcccgggtggagcaggccggccagcagcctggggaccgtgacggtggtaaagcagacgtccacgaggctcaggtgacccaagaagtaatacatgggggagcggagggccccgtcggatctcaccagcgccaccatgctcaggttgctcagggcgttgagcagatagatgccaaggcagagcaggaacagcagcgggtgggcgtctgttccgtccaccaggccgaggaggaggaacacgggggcagatgtgaggttggtcggagccatggagtggactgacaggtgggaatgccgaggggagggaggaggcagccggccgaaattctagaactccgggtagacttcctgcatgttgaggttccagatatacattttaatatatgtttataaatatacaaatttctgcttgctaaatggattgaaaatcacgttgctcatccaataatcttaattttatgaagaaacggaatctcagaagagtgttctagcgtagtgggtaactctcagactttggtgtaggtcagacctgctttgaatcctggctctaccacaaaggtgttgagacctttctgagcctcagtttcttcttctttaatgaggaaaatattagtggctacccatggaattggttgttggatacagtgaataagtttaaaatacttcgcacagtgcctggcatataataagcactcaaaactcctctatcatctatctatccaaactcctctatctatctatctatctatcctcctctatcatctatccatctgtctttgctgtctatgtgatctgtgtatcatctgtgtaatctatctaacatctatttacttaatcatcattatttgtttaaacaattaggagcagaattcggacccaggccatttgagtaccagtctaaatttc

SEQ ID NO: 7211 - DNA, 6000 bp, Homo sapiens
gccgtaaagtatacaattaaagtgccgcagagtttagtggacaggaatatgagatggggcaggaccaggaaaacctttacagaggaagcacattttaattgagccaaaggatttgagaacttagaattagttagaggatgttccagataaagtaaatggttagaacaaagatgggaagatacagaatcaaagggtgtaaaaccttacaacctgagttaaagtggatgggaaagggcaaatgagaggtagtttaattaattacttaatatgtaagggaattgttctgctcctatagatatgtcaattcacagagtatttatagtgaatgatttttaagtcgatgattagactcagagggtgatacaacaggaattgttgatttaagaatttttaggagacaccctatgcaacatctcccaaatccgacagccaccaccttatggggacctaatttgggattctagctttgaggcttccaccagctctgcctggtgtccataactgctgctctgccttaattgcagatataaaatgaacctgtgtagaaaagggaatctctgcagggcccagagggggcagctactggctgagggagcagagagtgaaagaaaagaaccagatgttatgccccttccataaacgtaatttgaaaagctttccttcttcaatatcccagtacagtcaagtaacattggaaaaaatgattccttgaaagtttaacacaatttttccattttttggtggggatggcggaatgttggtggtagtgtaatggaatggagtccctttttgaacaactttctctgtatctttttcccatagtaattagcttgtttcaattttttcaacttttctcgagcaagttttcacatgatttttaatcatattttaccaattatgtccaatttttcaaaaaatatagattggggtaaagtgactttgtaagtactttttaatcttttaatgtaattgtgattattttcctttataaattgttgttttatacagttgtattttctttttattgattgaattaataaaaaatttaacaagtttatgtaccccttttcctacccataaaagatttcttgaacttgtttattagctctgtatttctttctactcaagttttgcttttattatgacttttcttatggttccttttctaatgtcttgattggatcatttaattctttcgttgttgtggatatactcatttaaggctacgaattcttttctgaacactgatttaatccattttttaaaatgtgctgctgtcattatctcctttttcttctcctgcagatattctttagttttagttttcattctctgtttggtccaaccgtttcttaaggatttctttaaatattggattttatttttaaaatcatgtttctttccattgggctgtgatcatatatcattgtttgtattatttgttcttttgaagtttgctgaatttctggttttatatatgctgtttctgggcagtaaatgtttcatgggcactttaaggaaggtgtacaatgtcaattggttctacctcttgaaaaatattgaggtttttatcgcctttattctgccaacttaaatttatatggactgaaagtcactaaaatccactgttaccctgtttctgactatttctctttgaacatcctgtgctttttgctttacgtatcaatgctatatacttaggacattcgttttcatacctattacatcttcttgcaccccttataaaatgctcttcttttcctcatttactgacttttttgaattcaaacacattttatattaagattatgatccctgctttattttcgtttacatctgactggtattcctttacctttcaccctttctaattaacttggttttggctgtatattttggcatcagcctagagttgtattttttagatccaacctgaaattcttttcttttactagatgagcttggcccactcggctttatcattgtaagtgtgtttggtactaattttgttctgttatgttatactgtttgcttttattgttttgaaatagcctttcactgtaagggctacatttgtctttgttttgtatgcatccttcctcttatattttagaagatttttttctagggttacttttataactgtaactttgtgtagagttccaatactctgtttttagtcagtgtctactaattccctggtataagcacaatgaaattagtatattcctgtttcttttcccttttctctctctcctataccatgtaatttatttgattatgttatattaatctttcttttatactgatttgtgtacttatacccccattatgtaatttatcaggtttaaataatatcttttaacattcagctatagaagatgaggaaatcaacacatacgtcctcctatctcctttttttgctaattataaacattttaccttttgagattttaaaaacatttacactttctttcatacttacaattttcacaaatgttttagtcttagacctattgttaaatacatttaatattaaccaccagtttatagactgcagagttcctatttttctttttgttgactgaagtctgtttcttaaaaaagcttctgttaaaaaaaacaaacaaaacaaaactctgaagtctgctttcttcaacaatggctaatgtttgtaactttccttgaattctcagattgccaacttaactttatatatgaatattatatttgaataatagtctagatagtttcaacaattttggatcacatttcttcccccggagactgcaggcatgttcttcattacattccaactttgactgttactttggagaaatgatatgctaccttaatttctttcctttagaattgacaggattttgtttgtttgtctgttttttgactaggctatccatttttttaatcattgatattcagtgatactccagtggtatgtaacaatgctggcgttctgtatgaatgtttcctgggacaaagtgtacacttttgaattgtaaagtcaagtgtttctgtaattttttaattaaaattgagttttaaataattgttcttttccacttttttgatttcctcctttggtaactcgaatgtacatagattggatctcctttgtcttttctcatatctgtcattttctctcttttctcattgcatcttgtcatcttttaaaatactgttcctgcatctgtctaatttttttccatgtattgtttctaatattggtttttttggtatagtaattttacatttctttaacatcttttctttcttcttccagctcatatttcttatctttcttgcaatcccttccctcagctcttatatttttactctgttttcttattttataccagaaaatgcctccttaagttttttttttattttatttttagagaggccgaaatgttgggtaacaattttcttttttattgttattattttatttttttaagttctggggtacatgtgcaggacatgcaggtttgtcacataggtaaacatgtgccatggtggtttgctgcacctatcaccccatcacctaggtattaagcccagcatgcattagctcttttccctaatgttctcgccctggccaccctcccatgacaggccccagtgtgtgttgtttccctgtctgtgtacatgtattctcattgttcagctcccacttataagtgagggcatgcagtgtttggtttcctgttcctgcattagtttgctgaggataatggcttccagcttcatccacatccctgcaaaggacatgatctcattctttttcatggctgcatagtattccgtggtgtatatgtaccacattttctttatccagtctgtcattgatgggcatttgggttgattccatgtctttgccaggtaacagttttcatatgttcattggcaacattctttgatggagtgaattttgtcatccatttgtctttcttgtttatttacctcttttttcttgtagaatccttgtttatatgatgtgcaggtttgttttaatccttaaatgacatgagtttttgccaaactagatattcacaagatgcttgtatcttgcaagtctaagacatgtttcagactagcaggaacctaccttgtgattcagaattggaggtaaattattttagcttttatttgtgtgtaatgaatgcagacaggtaaatagaactgttagaactgatgtatttttttctaccttttgcctccagttttatgctttatctatagcctgtgtacctaagtcttcatttagccttttctctgcttcttgagtccaattcagggtcacagaggattatggtgccatactttacaccatatacccattattgcaaacaagagctttggttttgttttttgttgattgcctccccctacccaccctttttttttttttaagagaattatactcatttaactcttatacagtcatggatttcctctctctgcttcttgtcactctcctatttgatctttactgttcttgaatccatccaatctagtttatggattggggttgtggacacttactagtttctttgaagatagaatctgtatgtttatttttctgcttgttttggaaagagataagttctgagaagagaacattttggatttactcggccatgttcaaaccagaagtacactttttgcttatttttcccaagggtttgtctttcataatctttacaaataggttcttgcagctggggggcgggttggaggagggaggtccagagtggtaatgttacctgtgcttacgcctgcaaataaagttattcaggtaaatgtagcgacagagtaaacaagtgtagtgtggcctaaggagcgcaaaattccttacttgtacagagggaacgtggcagagggccgggcaagtagaagggggtctgtttctttttcttgagtaaataaattattgggaggagtgattcttttcctccctggatgtttctttgcaggaactcatgcagccagaatctggggccaatggaacagtcattgctgagttcatcctgctgggcttgctggaggcgccagggctgcagccagttgtctttgtgctcttcctctttgcctacctggtcacggtcaggggcaacctcagcatcctggcagctgtcttggtggagcccaaactccacacccccatgtacttcttcctggggaacctatcagtgctggatgttgggtgcatcagcgtcactgttccatcaatgttgagtcgtctcctgtcccgcaagcgtgcagttccctgtggggcctgccttacccagctcttcttcttccatctgttcgttggagtggactgcttcctgctgaccgccatggcctatgaccgattcctggccatctgccggcccctcacctacagcacccgcatgagtcagacagtccagaggatgttggtggctgcgtcctgggcttgtgctttcaccaacgcactgacccacactgtggccatgtccacgctcaacttctgtggccccaatgtgatcaatcacttctactgtgacctcccacagctcttccagctctcctgctccagcacccaactcaatgagctgctgctttttgctgtgggttttataatggcaggtacccccatggctctcattgtcatctcctatatccacgtggcagctgcagtcctgcgaattcgctctgtagagggcaggaagaaagccttctccacatgtggctcccacctcactgtggttgccatattctatggttcaggtatctttaactatatgcgactgggttcaaccaagctttcagacaaggataaagctgttggaattttcaacactgtcatcaatcccatgctgaacccaatcatctacagcttcagaaaccctgatgtgcagagtgccatctggaggatgctcacagggaggcggtcactggcttgaggaggtctcaattgaccctttctccctgtgtcttgtactaaaggaaaagtct

SEQ ID NO: 7212 - DNA, 6000 bp, Homo sapiens
aggtggtaggattgcttgagcccaggagtttgggagcagcctatgcagcagagcaagacctagtctctacaaagaatttaaaaattagccaggtgtggtggtgcacacctgtggtcccagctactcaggaagctgagctgggtggatcacttgagcctgggagtttaaggctgcagtgagatgtgatgacaccactgcactccagcctgggtgacagagcaacaccctgtctcaaaaaaaagaaggaaaagaacaaatttgatctagggacccgccagtgctcagtgatgttctccttcattaagtaatgttcttccactttctacttcaagtatccatccctcagtggggcccgcacacaaggcacttttgtaatcctacacatcacaaccaccccaggcacacatccaacaatgaccgttcaccatttatagccggctccttgactccctccatgtgggtcttgcctctcctgtcgcggcctctctagcattctgcctttctttagttggagctctattcctaaggacatggtgatctcttttgtcccaaagtcattccaagagaagcatctgcactttataatttttctttccctcttctgcaaggtccctaacatatagggaactattgtctatacattgtcaattactgactgggcgcggtggctcatgcctgtaatcccaacagtttgggaggccgaggcgggcggatcacctgaggtcaggagttcgagaccagcctggccaacatggtgaaaccccatctttactaaaaatataaaaattagccaggcttggtggtgggtgcatgtaaccccagctactcgggaggctgaggcaggggaatcacttgaacccaggaggcggatgttgcggtgagccgagatcacacactgcactccagcctgggtggcagagtgagaaattgtcaattactgatttgcagataggcagtggcagggtgtttggccaaggggtgaggtgatcacctacgttaaggggacagttcctgcagttagaccgtgaccaacactgaaatcctggctctgctccctacctgtggaaggttggacaagtgactgaatttttttttttttttagagatggagtctctcgctgttgcccaggctggagtgtagtggcacgatctcagctcactgtgacctccgcctcctgagttctagtgattctcctgcctcagcctcccaagaagctgggactacaggtgcgtgccaccaagcccagctgatttttgtatttttagtagagacggggtttcaccgtgttggccaggctggtctcaaagtcctgacctcaggtgatccacctgcctcagcctcccacagtgctaggattacaggcatgaggccaccgcgcccggctgactgaatctttatgtgcctcggtttccagtttccttttaatggagtattgataatagtagccactccattggacttttgggaggattgtttgttaatattttttaaatatttatgccagtacctggcatataacaagaaaagtgttggataggccaggcgcggtggctcacgcctgtaatcgcaacagtttgggaggccgaggtgggcggatcacgaggtcagaagatcgagaccatcctggctaacacggtgaaaccccgtctctactaaaaaatacaaaaaaattagccgggtgtggtggtgggcgcctgtagtcccagctactcaggaggctgaggcaggagaatggtgtgaacccaggaggcagagcttgcagtgagccgagattgcgccactgcacgccagtctgggcaacagagcaagactctgtctcgaaaaaaaaaaaaagaaaagtgctggataaatggtgtcttttctcatcctcttggagtattagaaacatcattgtttggtattactgtgggaaactaaatgtgaccccatttctgtctggtttagcctttccctaagcagtgagggcaagcttggttgcacatcagagtcacctaggaagctttcaaaatttattttactattttttttttaagagacagggtctccttctgttgcccaggctggagtgcagtggcataatcatggcttgctgcagcctcaaattcctgggctcaagtgatcctctcacctcaggctcctgagtagctggaattacaggcacacaccactgtgtcaggcttgtgttttttgaaacacagattttaggccgggcgcagtggctcacacatgtaatcccagcactttgggaggctgaggcgggcggatcacttgaggtcaggagttcaagaccagcctggccaacatggtgaaaccccgtctctactaaaaatacaaaaaattagccgggcgtggtggcaggcgcctgtagtcccagctactcgggaggctgaggcaggagaatggcgtgaacctgggaggcagagcttgcagtgagccgagattgagccactgcactccagcctgggcgacacagtgagactccgtctcaaaaaaaaaaaaaaaaaaaaaaggaaggaagaaagaaagaaacagattttagggtattattggaagaaagaaagaaacagattttagggtattattggtttatttattcaacaacaatttgagcacgtcctatgtggtataatgatcactgagaatagggtaggtagtgaaatagacaaagtgcctcctccgcgcaaacgtacatcctagtgagggagatagaccagcaaacttgttctgtaaatggccagacagtaaacattttaggctttgagggccacacagtctctgtggaaaccattcagctctgcccttatagcaggaaagcaggtgtagacaataggtaaatgaatgggcttggctgtgttctgatagtattttatttatggacactgaaatttttttttgtttgggggggtggatggagtctcgctctgttgtctcgactggactgcagtggcacaagctcagctcactgcaacctccacctccctggttcaagcgattctcatatctcagcctcccgagtagctgggattacaggcgcccgccaccatacccagctaatttgtgtatttttagtagagacggggttcaccatgttggccaggctggtcttgaactcctgatctcaggtgatcagcccgcctcggcctcccaaagtgttgggattacaggcgtgagccaccacgcctggcctaccgaaatttaaatttcatatgcttttagttttcacgggttaggaaatacgattcttttgttttctttgttttttgttttgttttggttttagacagggtctcactgtcacccaagctggagtacattggcacaatcatggctcattgcagccttgacctcctgtgctcaagggatgctctcacctcagacgcctgagtagctgggactacagatattgatttttttttccaaccatttaaaaatgtaaaaacagctggacgtggtggcatgtgcttgtagtcccagctgctcaggaggctgaggtgggaggatccttgagcccaggtatttgaggctgcagtgagctgtgattgtgctactgcacttccttttgaggaagacactttctcaaaaatagtaataaaaataaataaataaatatgtgaaaacctgtcttagctagcaggccatacaaaaatgggtagtaggtcagggtaatccctgagatggtcagtgagtaaacaagtacaaaatatcattaaagggccagacatggtggctcacgcctgtaatcccagcactttgggaggctgaggcgggcggatcacctgaggtcaggagttcgagacgagcctggccaatatggtgaaaccccatctctacgaaaaatacaaaaattatccaggcgtggtggcaggcgtctgtaatcccagctactcgggagtctgaggcaggagaatggcgtgaacctggaaggtggagcttgcagtgagccgagatcgcgccactgcactccagcctgggcgacagagcgagactccgtctcaaaaaaaaaaaaaaaaaaaaaaaaaagcaaaaattagccaggtgtgcacaccacgtccagctaattttttttcaaccatttaaaagtgtaaaaacagctggccaggcacggtggctcacgcctgtaatccccaacactttgggaggccggggcaggtggatcacctgaggtcaggagttcaagaccagcctagctaacatggcgagaccctgtgcactaaaaagacaaaaattagcagggcatggtggtgggcgcctgtaattccagctactcgggaggctgaggcaggagaatggcttgaacccgggaggcagaggctcgtgccattgcactccagcctgggcaacaagagcaaaactccgtctcaaaaaaaaaaaaaaaaaaaaaaagtgtaaaaacagctgagcgtggcggtagctaggtgtggtgcgtctgtagtcccagctacttgggaggctgaggtaggaagattgcttgagcccaggagtgccaagccagcctgagcaacatagtgagaccttgtctctaccaaaaaaaaaaaaaaaaaaaaaaaaaattagctggacatggtgatgctcgcctgtggtcccagctacttgtgggggggtggggagaggctgagtgggaggatcccttgagcttgggaggttgaggctgtagtgagccgcgatcgcgcaccgctgcgctctagcctgggtgacagagtgagaccccgtctcaaaattaattaattaattaaaacaacaaacaacaaaaccccagctgtgtgggctctgggctgggccgcctccccggcggagggggctccctctcaggcagaccgccagccgctgggtccggggactgccggatccggaggtgcggggacccctgcgcacctggcggctcccgggatgcccccctgaggcaggcgggagggcagcacggagacgcccctccgggcagagcccgccccagccactcccctctccaactcgacctgcctcagcaagtcctgagtgtcgcaaaagcgctagggttgcaagtggcaccagagacgtgcccttgtcccggggtccatttgagggtgagcgtgttggtgccgagctgtttttttgttttgttttgttttgttttgtttttgagaccgaatctcgttctgtcgcccaggctggaatgcagtggtgtgatcttggctcactgcaacctccaccttccgggttcaagtgaatctcctgcctcagcctcctgagtagctgggattactggcacccaccaccacgaccagctaatttttgtatttttagtagagacgggttttcaccatgttggccaggatggtctcaatctcctgacctcaggcgatctgccttcctcagcttcccaaagtgctgggattacaggtgtgagccaccgcacccggccagtgctgagctgttttgacaacttggaccccgggtcctctgtgggtaggaaaatcagctccctctttgctcctctggggcagctgcacctcgggccagctttctgcctgtctgcctgccggcactgctgggtcgctgtacccaaacgcacagccggtgccccgtggtaagtcctggctccccaccttccccgcccgcccccggccacctctccctccagttgccctggtcttagcagtctgaccgacttgtcttctgactccggttctgtcccaccagcctattacctgccagcctgtctgtttccctccagctagaaggtcttcagtttccagaagaaccaaagcatctttggacctacctagggaaggacctgcctgtgacctttgccctgtcctggagggtccagctttgggctgaatggcagcacccacgctgggccgtctggtgctgacccacctgctggtggccctttttggcatgggctcctgggctgctgtgaacgggatctgggtggagctgcctgtggtggtaaaagaccttccagagggtgagtgggagggaggtacagggaagcgtggggcaggtatgcccagaaaggt

SEQ ID NO: 7213 - DNA, 6000 bp, Homo sapiens
tctgacccagcaagttctcgtcaggaaattatcccagttttatttgcaatgggtaccaggaagtggcgcaaacatgtttactgcagcactccttgaaatagtaaaagactgtccagagactggctgatacaattatggcatatccaaacaatggattatcatgtactgctaaaacaaatcagatatatactgatacagagtgatctccaagatacaattaagtggaaaaaacaaaaacaaacaagaaatggaggaatgtgcataatatgcatcctctgggccaaagaaaacatttgttaatatatgtctactttatatctgcagaggatccataacaaaggtaccagttattgcctgcagagggttgtggacagagatggaaagagccaggtcacaagaagatgagcaaaaaaacccccttatttttcactgtatattgttttgtaatttgaattttataccatgtgaatatactgcccattcagacttaaaattctacttttaaaatgctcattttgatgcttttaatggtaaattcaaacctttatgtagaactattatacctaagatattgttttggaagatttgcctttccctgaatgctactacatgctatgaggaataaaaataggctgagtttttactcctcaaaacagccctgcaagataggcgctgtgtgaatggcatctattttctcccctacacctgcctttctatactctccatggtcagggctggaagccaaacaactacatttcccagactcccttgtcatctgactcagccagtgggaggcactggtgggagtttggaagatatgagatggggaaagcaattctaatctctggcttctggtggcaccccaggccacagcggtggttccagttgtgtgtcagtagtaccaggcagcaagtgtggctccaggctcctgctcagcagctgaggaatcagtctctggaaacgaattttcctgttgctcctctagccttgtgggggtcaggctttgggtgcccttgttctccccttgtttctcatgcccttccaacacctttgtaaacaataccctgtattaaatggtttttcctctaattacacactggctaatacagataaaattactcatattttacaggtgagaaactgaaattcaaatagagaaagtgacttaaccaaaggcaagctaagtaccacgcttgtctcatgatgctccagccaccttggtcctaaccttattggaccaccccaggcccatctgcactgcaaagccattgcattaattcgctctgcacagaacattctgtcttcagtccttcgcatgcacactctttcaagtcccactcaaatgttaccttttgatacagtcgggttttcgtttttaagagacagggtctcactctgtccctcaggctggagtgtagtaatacaaacatagctcactgcagtctcaaactcctgggctcaagagatcctctcacctcagcctctccagtagctaggactacaggcacgtgccaccatacttagttaatgtttaaattttttgtagagtcaaggtctccccatgttgcccaggctggcctcaaactcctggactcaagctgtcctccttcctcagcctcctaaagtgctggggttacaggtgtgagccattgtgcccagccttcaaatgttacctttttagagtgacctcttaccacctgtgatctccaagtcactccattatatcatcctgttccttttcttcttggtactcctctctgaaaatatttacttaagttgtttatcccattggaatgtaaagcccgttaagacccaggaacagtgtttgtcttactaaacaccgtatctctgtgcccaagagtacctgcagagtatgccttcaacgatttaagaatgaatgaatgaaaagtgtagtaagagaagtagcagattactttgagcaccagcgaggacatgcctttccactggctgccttcatacagcaggacagagggctcacgggagtctccaccgcaggacagcccccaggaactaattcccaccactcaggctgtgccctccaaaggtgctcagctaatacatactgagtcaatcaggctgcctatgaaccttccagacaacctccgtgcattaacagtaatcaggaggaaacaccgtgaggatcttagaccaagttggcagattagaagcagacggtcattcagaagttaaggggagagtaaaaagctggagaaatgggatgttcattagggccacagttgtttcagcatttacatttactctatgcactagacctacctccagtgcttctggagaggcacaatggcagagtgtaatctctgtaactggacagtctgggctcaaatcctagcactttcctggctggcagtgtgagcaagtcactcaggtcgtctgtaagttgatttcctcatttacaaaatgagattgttgattaaaaaaaaaagtgatactattattaagacagagtcttgctctgtcatccattctggagtgcagtcgtgcgatctcagctcactgtaacctccacctcccgggttcaaatgattctcatgcctcagcctcccgagtagctgggattacaggcgtgtgccacgatgcccggctaatttttgtatttttagtacagacgaggtgtcaccatgctggccaggccggtcttgaactcctgacctcaggtgatccacccgccttggcctcccaaagtgctgggattacaggcgtgagctaacgcacctggccaacagtatcacttttatacagttgttgtgaaaatcaagatgtagatcacttaaaatataaaacagcacttggcctccatacacgtatcacctcatgaaataccgcaatcctctgaggggagatactatcatcccatgatacaaaccaggcagctgagaaacagaagttacacaagcagcccctgagccagaagtgcgttctagaatccctagtataccctctgaatcaccacactgatacaaagaaaagacagccatatccgcagtgtcataccatggaactgttaagaggtctccagcatgaactacgctgacacttggaggcagggctgtatgactcaacaggaaggccaggtactttttagagaccagacaggtacaaggtcttgaaggacaaaagttggctgggagagctgggcaccgtggctcatgcctgtaaatcccagcactttgggaggctgagggggatggatcatgaggtcaggagttggacaccagcctgaccaacatggtgaaaccccgtctctactaaaaatacaaaaattagctgggtgtggtggcaccacctgtaatcccaggtactcaggaggctgaggtaggagaattgcttgaacctgggaggcggaggttgcagtgagccaagatcgcaccactgcactcaagcctgggcgacagagcaagactctgtctcaaaaaaaaaaaaaaaagttggctgggaggtaaaagcattttaggtaaagcatagaacatctacgtatctgcaaaccctctgaatttactagcctggcaagttccagacgggaaaggtaggcagttgaatttggagagctaggcaacttccaaactaaggaggggcttcttgattgtgctaaggaatttgaatcacacactgtaggtgatgagggacggtgagaggattgcaagcagctaaaactgtggtagaatgtcagctggaaggaaatcgaaaggaatcctcaacaaggagagggtcgcctttccgtctgctggccctcctgctgtggcctgcggcggggtgggaaggggggttccactacacagaagtgtgacgcgcagggctgggcttcttctaggctgaattcgggacagattttcgcatttgttttgctcaagtatttatgggaccaattaatatgtttagcaacgttgtctgtgggagcagtagaggaactgagaagttcacaaactgtaagagatcctccaaagagtccacaggtctgaggcagcagcacctgggaatctctgggctccagttagtccttcctgactttgactcgttacagcagtgtccagacagggatatgtcgggtcctgtggcagggttcccgtcaggtgggatggtttagccccgcatctgccttcaaagatcccgagattatgccgtcgcagcggccagggcaggagtgggtgcgtggcagggactgagtctaagaggcctggaggccctgtctaaaacagagctgtcgctgggccctctcgccttcaagcagttatcatacagctattcccctttcttgttttcagaccctctcctctaacagcctgcacctgcaagcagggacctccgtggcagcagggacagcgtgtctgtctcggcctccaaagtaccccggagtctaagagaactgggggaggatggtgcgggagcagcgcccgcctccaaggagggcccgggcggcgcctcccgcccctcggtgaccttatgggccaaggctgtgaagggcaggcgtggcgacgcggaggggcccggcgctagtagcccgcagacagcgcggcggcccccagcgggagaggcagcctggcggccaggacagcgcggccgggcgcctccgcgcagtgctctgggagttgtaggcacttgcctctcctctctccttcagctactggctctcgaaactcaaggacctaccggtgggtgggcgcctgtgactcccaggctgcgaacgccgggaactcagtttcttcagaaatgctcgaaccaggacggctcctggagtcctcgcgccctcgcagaaggactacgggccccggcgaccccgggggcggggcttccggcgcgctgccttgtgggcacggtagttccgccgggtctggcttccgcctgccgagcggccccggaccgcaggccggactacacttcccgtcggcccgcctgctctcccgatgccgccttggcgcgagacgttggcaagcagagtgtctccaagatggccgcttggggaaggaggcgtcttggcccgggcagcagtggcggcagcgcccgagagaggtgagatccaagggcttgttgcccccagtgcaggcggctcagcggccggagagcccagcgcggcctccgagggctgcagcagccttccttccctggtttccccgcgctccccctaccctcgccgggcatactgggttccagttccggaggatccgggatccgggtgggagcgaggtcgaaggcctcggcggagagcttaggggaaggggcgttagccgggctgagtaaggtaggcagcggccatgcggggcggggcccgaggccgggccgtgctgaaaggaactggcgcccagcgcaggcctcagggacccgcctagctgcccgcgggccgatcggctgctgaagcacccttcccgcctgggcacgcgcgtggccatctcggccgcggccccagacgtgtagaggaaggcagggcccccggagagagaaagaaggggaagccttcacagagcaggccggccgcggcaggggtagtttgatctgcacgtttactagggagctttagctcccgccagatgtgtctcttccgagcccagagccggccacttcctcgagggaagattctgaagacttttggatggttctgtgcaagcgctcctgccgtagaagtcctttaaagtgacctttcctaatgaatggtgtgtgggcagggagctaggagcgtgtttcttccaacagggacctccatttgaataactgatttctagaagatgagattggagtagtttccgtgtttcatgttcaagttgcagtttttgcatctgggaagcagtttcagctagtggaaaccactagaagctgttcagccactagaaatttgggagaagatgtattggtggagccacctggattaactgtccgctaaagcttgattgttatagcagcggtcagcaaaaaaggaaaagtttttgttttgctggttctccccctccccgtctttttggtgaggattgt

SEQ ID NO: 7214 - DNA, 6000 bp, Homo sapiens
cacgtggccttactgaccagcagaaaccagggagcccacctggtgcgcagaacctcaagtccttccagcagccagggcccctcagcttcctctgcgcctagaaaccaggccccagcaccagagggcaggagagcgcttttcagcacctggacaaggcccttggggcctcccaagagggtctttctccactccctgttcctgagctggggctgggctctgagagatccaaggatctgcccagtttgagagctaaaagagaaagcgctcaccgttggggagagggcgctgggtggggctggggtgcctgggagtgtgacacagcctcttccccattcttgacctatggccccctccccacgcaagcctttcccacctccgcaccctcactcgggaggtgtcgccgctcaactggctggggcggactctcccaccacatggaacaccgacacagcccgcagcccctccctgcagccctcactgccccggcggaggaggggcacagaggcctctactctcatctaggtgagtccgaaacacgtgtggtcccgcccgtcccggccggaggggatcaccctttcccggtcaacaagcacaaaagccgcggccgcaaacaaagacgcgccgcaaactcgccagggaggcgggacagcccgcgccgcaccccctccccaggccggacgggcgtgcccggccgcggggtccccgcggcgccccgaaggcgctcctacctggcccgcgcggacctccttctccagctcgcggtggcggttgtgccacacgaggtagtgcagcggatacttgccctcgggccccttcctggcggaggcgttggcggggatcatcgcccgctcctcatgccggggccgcggcgcccggccggggaggagggacggcgccggagccggggcccggggccgcggggcggggggccggcgctgcctgctcgcggggctgcggctcgggcatgtgcgagcggcggcgggcgggggcggcgcgcccggcgcggtgcgggcggcgcgggcgacgggcgtcctcgcgaggcggcggcggcgggcggcgcggagaggcccccacccgccctgggagggagcgggcactcggcggcgctgcgcggactcgcgctcgcctcccacacccccgcacacaaagacgccgctcggcggagggagcaggcgcccgcagcgggcgcgggggcgcacgggacgcgggccccggggacgccgccgcagggacgcgcgcccgcagcccccgggtccccacagctgcatagcccggccctcagcccgagcggccggcgcgggatacggggatgtggggatgatggggagagaggaaggggaccaggcgccccgggtagagcttgtcagctcagccccgcggcatcatggggtttgtagtccgcctcgtgaaactgggggtggcaggtggccgaagagggtctgcactgtccccggatctcgtgggagagtgggcggggagtcaggcctggcccagacgcgggcggggccctgacgccaggtgggctgggacgcacctcccccgctggcattttgccttttgctggggaagtgggggggcacgggcctaggtcgagcgtttgggagacggggtggaggtgtggtcttcagaattgagcttgggtcccaggggccatgaagaaggatccggattcccagaagagagcgtctgattgggaactcctgagaaaggtgtggggcatcagtaccaagggtcattggagcagccaggggtctggcccctggaacatttctgaggagtcttccctgccctgttagaaaattaaactccatcttccacacatgtcattggaaacagaatgtccagtaacgcgggaaagatggtccctttccccccgcacactgtccccagcaagaaccagagtgaggttggacagaaaaagcagcaggtggcagctccgttcctccacccagctggcccttcaggaagggaagtgactgattccagagactgtctccttcctgaatgaccccagggtgaagaggtacttccagaatggtccctgcagagggtgtggtaaaagttgaattggcctctcaagcgccaattgcaaggcctggaaggaccaagaggcttggaccagtccctggagggaggggactgtgatgtcagagagaccagagttcgaatagctccaactgcctgaccttaaaagagcaaactgcttaatttttccgactttctcggtccactccccttcaaaatgagaatctagatactacctcctggggtgagctaaggataatgactgccctggaaacagcgcctccctcccccaaccaggcgggccgagacaggtggcgggaccaggcacggtgccttcttgagcccacctcagaacaaggcaggaataagggattccacaccggccctacttaaaacaacaatccaagaagtgtttgtgtgggaggtgccagcaaaagcttgcaaactctctcaggtttctttgtgtggtcttccctccttcctcctccacaccctgtggtgccaggccccagcgggaagagatgagggaggagcgggctgcctcgcccctttctcccgcctgggaggagccagctggcgtctccgggggcccgggaccgctgcccgcctgcaccaccaggggtcagcagagtgtcgtggctgcagccagtgcaggggagggggctggcgcggttgaggggcatctaggagtggccgggagcatgcctgtgcatttccttattaaattgtttttcgaaccttgtgtgtgattccactgtagcagtcctgcttcctggggtggtgacatctccacgggggaatccagaaacccttttatctccagtcccaggcccagaagtttggctgtgacggggctgggggaaacaaagtttggacgatgtgtccgcgccagggccactcccaggtagtctctgagccaaccaggagatggggagtggggtggaggggtaagcagagtgaatcatccttcttccccagcaaagcccaggagtccgaggacagggggagttcaggatggattgtggggagttgtcgattgtggggaactgtcccctgggcggccgtgttctttttttgccaggcggcggtagacactgaacccaggtcgcttgcgcttcggcccgcgctctcagctgccacgtgctcgagacgcgcccacacagcggagaaacaaagacagccaagcggcagggctgccagcagcctcctcgacatttaataaatgaaattccatagctgggggtcgatcgggggtgaacgggcggccaccgctcgtggactgagcgcctggcacgggctgcctggccactcctcccgtctcactccccccgccccttacccccttcccgctgaggccaccaagcccatggactctggtgagagagcagctcggggcggcaggtggtgctcccccctacacaccagctaggtatcgttgcttgcaaaagccccaccagctgagcggctggctgtcgagggaggggaggcctgcaagatttttttaaggtgcaattataaataaagcccatggatcgcgatttcaaacaaacttgtcaatctgggccgcagcaaaaggcgatggaggcagctttgcatgtatttcgggtggtgtgactcatgagcattacttgtctcccctagggaaggagcctgcccacccacaaatcactgccgctctggcaccgttgggataatcgaccaacttgagcacccctgccaaaggactgcccccatcttaacaagcaggagtctctgactcttggagaacccctcctcaattgtcaccactgacctggcccccaggtctggccctggggacctctaccctctccccacaagcagagtgcccgggccttttgctgctgcagggattgggggttgggtacacgcgcggcacacgcgtatgggggcgcatgctcagtgcgggggctgcgctcatgtgcggcctctacctaggctccctgccccccagcccacccacgtccctcacctgccttgcctttgcctgcctcgtcgtgtgaagtccaggaagaaaggccgtcacctgaaacggcccctctatgttatatgcaccctttctggacacacacacctctggtggcccagaaacaccgtgggtgtgtgtaaggcggatgacaagtggatgtgagtgcacacaggcacagtggtcactcctcgggaggtctttaaaaaccgcccagattctctcctctctggatggaaggatgcatggagagatagatatatttttagtccggaggcaggggaatacactgcctgacctttctggcacctgggcgtccatattgttagcagtgggcgtattcagcaagagtgtgacacatacacacacacccctggacacacagatgtggacacctacgggacagggacgcacacctcaccccaaccagagatagacgggtaccccaaggcacagcccctttgacctggagcgggacttgggcctccaagtccttcttccctaatccccaccctcgccgtccgtgggcccagcgtcccccggtccaccccacgcggaaagtgaaggggagggggctgtgagggtgactcacattgcctccgggccaggcgagcgctgcagcggaggccagggccgcaggccacgctgcccgccggggccgggcatctgccgcggcccctttaagcgcccccgccccctcctgcccgcgcccgggcttcctttctctagggggcgcggccggcagcgcgcggcggggcgggggtgcggcccctccccctgtgggcagggcctgcgccgcttcctgcagaagcggccgggagccgcgcagggggcggagagaggagccgcgagcggcggcggggcggcgcggggcggagggcgcccgagggcgagcgggcaggcgggcacggcgggttccgggccagccccggggcggacggttggccgggcgcgcggagcctcgccggggcctcgccggagccgggccgggcagcaggggccgccgccgccgcccgggcccgccgcccgcgccccccacgctggcccagagggctgcggccgcgtcgccgctgaggatgtcccgaaaggggccgcgagcggaggtgtgtgcggactgcagcgccccgggtaagcgcggcggggccgggggcgggaccgcacagccaggccgccgccgggcgggcgccggggcctggcaagagcgctgtgcggggccggagggctgggcggggcggggggctgcggcctccaggctgggcccccgcctcggccactgcggagctgcgcccttggcgggagggccggcctggggtgcccatgctccctggaggccgtggactagcgaggaaggacgttcccggcgccgcctcccgctcctcggtctgagggaggcgggcagctggctgctcctccacctccatctctgtatccgacggaagcgccagcctggggtggcaggagggccgtggcggaggccgtcagggcttgggaggtgggggcgagtgtggttttatgtcatctcagtgccacccccgcgtcttgcacctgctgctcgcgtggtcggtacgcctgccggggtggtggagggcaaggagcagagggccgggcagatgcgccagtggggcctgaataccgtctcctcaggagcagatgagcggtggctactcccaggactccctgcctcgggttcctaaggctagcgctccttgccgggcctggcgttcagggccagtctagacccgggtgtcttctcgggaggcatccccaggcctgctggtggtgactgggaacagctcggctggaccctgctgttcctgttcaccggtaaggcctgcttgggaaagtgagcttggcatcaagctatcctgggtgcgggcccctccctgtcccctagcccagtctggccagaaatgggtgggaggccgtgccgagattccccgtatcctgctggcttcctggcctgtctcctggctgtatttacatggtggttc

SEQ ID NO: 7215 - DNA, 6000 bp, Homo sapiens
gacagagtttctccatgttggtcaggctcatctcgatctcccaacctcattgatctgcctgcctcagcctcccgaagtgctgggattacaggcgtgagccacggcgcccggcctcagagtttcattcttgtttcccaggctggagtgcataggtatgatctcggctcactgcaacctctgcctcctgcgttcaagcaattctcctgcctcagcctcctgagtagctgagattaccggcgcatgccaccaggcccagctaatttttttgtttttagtagagacagggttccgccatgttggccaggctggtctcaaactcctgacctcaattgatccacctgcctcagcttcccaaagtgttgggattacaggtgtgagccactgcgccctgccaaatttatgtttattgagctgattttatgtttaaatatacctctttcactgagcactataaaagtggtcctcagccgagcgtggtggctcaagcctataatcccagcactttgggaggccaaggtaggcggatcactttagcctgggagtttgtgaccaggttgggcaacaaagagacccaatgttgtgaggatgtcgtgagacctcgtctctacaaaaaataaaaaaaaaatagttgggcgtggtggcgtgcacctgtaatcccagctactcaggaggctgaggcaggagaatcacttgagcccaggggtcagaagtggagtgagctgtgttcatgccactgcacccctgcctgggtgacagagtgagagaccctgtctcaaaaaagtaaaacagaaaataaggtgggcacagtggctcacgcctataatcacaacactttgggaggttgaagtgggcggatcacttgagcccaggagtttgagaccagccagggcagtaaggcaaaaccccatctctattcccaccgccaaaaaaaaaatatatatatatatatatatatttacctgggcatgatggcacgcacctgtagtctcagctacttgggaggctgaggtgggaggatccattaagcaagccctggcggtggaggctgcagtgagccgtgattgtgccactgcactttagtctgggtgatagacactccagcttgggtgactgagtgaaaccctgtctcaaaaaaaaaaaaaaaggtccctacagagatagagtcctagttttaaaaacttttatgaaggatgacttaaagaatttaaggtctggcacagtggctcacacctgtaatcctcgcactttgggagaccaaggtagaaggatcacttgagcccaggagtttgagaccaccctcgacaacatagtgagacctcatctccacaattttttttttgggcggggggacgttgtctctctctgttgcccagactggagtgcagtggtgcgatctcggctcactgcaacctctgcctcctgggttcaagtagttctctgcctcagcctcccgagtagctgggattacaagtgcccaacaccatgcctggctaattcttctgtattttttagtagaggccgggtttcaccatcttggccaggctgatttttttttttttttttttttgagtcagagtctcgctgtgtcgcccaggctggagtgcggtggcgcgatgtcggctcactgcaagctctgcctcccgggttcacgccattctcctgcctcagcctcctgagtcgctgggactacaggcgcctgccaccatacccggctaatttttttgtatttttagtagagatgagatttcaccgtgttagccaggatggtccccatctcctgacctcgtgatccacccacctcggcctcccaaagtgctgggattacaggcgtgagccactgcccctggccagccaggctgatcttgaactcctgacctcgtgatccacccacctcggcctcccaaagtgctgggattacaggcgtgagccaccgtgctcggccttttttttttttttttttttaattagccaggtgtggtggcacatgcctgtagtcccagctactcaggaggctgaggtgggaggctcacttgagcctgggaggccgaggctgtaggaagccatgatctcaccactgcactccaggctggtgatagagcgagaccctgcctcaaaacaaaaaaatgataaagaatctaaagaagttctgagattcatttggtcattcaacggtgggctaggtttggggatgcagtgataaatgagacagacacaatccctgtccctctggactttgtggttggtctagttagtcttaatcatgccactttctgaatatatgagcaaacgcaaataattaaacatctccgaacccgtgtttcatttgttaaaatgggtcagtaataatccccccttgacatggctattgtggggaattaaatgaaaacttacgtgtaaaggtacttaataaattctacagtgctatacaaatgttagttaatacattttttcccaagaagcttttcatggtaataacttaatacattttttcccaagaagcttttcatgataagttactattgtcttcacccagtgtgttttgttgaccctcaactaacagtaaccagtaataaataccaagaaattgaataagtcactcagaaaggccaaggaaagagctatggatgtgcaatacaggtttctgctcccagcaataccactaactggctgggtgaccttgtgaatgtcactttcctttcagtgttttagtttcctaatttgttaaaaaaaaaaaaaaaaaaaaaagtctgggctatgggccctgctagttttgccatcatagagattctcctgggggcttgtcctctagccccgctatccccacagcctgggcactcccacttaggttgcatagcacaattgttctttgcaaggccgggcacggtggctcacgcctgtaatccccgcactttgagaggtcaaggcaggcagatcacctgaggtcagggtttcaagatcagcctagccaacatggtgaaacaccatctctaccaaaaatacaaaaattagccaggcgtggtggcacacgcctgtactcccagctacttgggaggctgaggcaggagaatcacttgaacccgggaggcagaggtttcagtgagccgagattgtgccactgcactccagcctgggcaacagaacaagactctgtctaaaaaaaaagaattattgtttgcagaggtcaactggaaagcaagggacatgtttggcaaccaccacccatccctacctacatacactcaatgatcttggacatcaaaggttccagacattgggggtttggagggggtttgaagggaagaagccaagagacagcctgcgcctgcggggccagattgcctggtgaagcaggaagcccatcatcaagggaaaagtgatgggtgggcaggcaggagctttgttctgtggcttccccaagaatccatgcccttccggatccaaggaggccggctcagacagcactgactcagggccccccagttactgtgcctagcagcaggaaggaggtgaggggtaagaaaaatggggaaaagcgagagagagtagccacagttttcatgaagaaaaggagaaggggccaggtgcagtggctcacacctgtaatcccagcactttgggaggctgaggcaggtagactacttgtcaggagttcgagaccagcctggccaacatggtgaaacccccgtctctactaaaaaatttaaaaaaaaaaataaaataaaatttgccgagcatggtggcacatgcctgtagtcccagctactcaggaagctgaagcaggagaatcgcttaaacccaggaggcagaggttgcagtgagccgagatcacgctggtgcaactccagctgggtggacaaagaatctatctcaaaaaaaaaaaaaaaagaagaaggtagaacttaggatgacaaaatgaaggtgtaagaaatggaggcaaaactgtgttcactgtcttctccttgcccacctctctcccgccaccattgccactgtgcttgtcgactttggttcagaaggaggcctgggttgtagggacggacacctgggtggaggctgcggctctgtcataaacaacactgtggttctagggaagtcccttgacgcctctgctaggaggctttgttatagtccctgaggctgagtaacggtgatggtggtggtttggatgggcaatgtaggggagtcagagctctggatgtaagtctctgagtgagctgctttgtgaccttgggtgagtctcagtgtctgcatctgtgaaatggggataagaacattcaccatacatggctgtggggaagactcattcagataaggcacatgaaaagcaccttataagctgcctcagtctgtacaaagaccaattacggtactattaggctgtctttcctgccctcaacatccccattctcaaatcccagctcagcagcacagggtcaggggggtgcaggcagccagcgcagactgccaggagatgcagcttggccccttagtgtgcctgttgcaattgctgccaggagcctgagtggagcagaggggtggagagaggggcacaagctcatctgcggttgctatggtgccccatcctggatttgcccatctctcctaatggagcaaagggcaggcagagggagggagggagaaagagcacaactggtgccttcgtctccccttccctcccatctctctccctcgggagcagatgtggatgggggatggagggagcctgaatactggataggaggggaggaaagagtggggtgctgggattaagaggtttgagatagggggccgcactgagacagtagggggcagggccctcatacctacatccagaagccagctggtgacgttagagagaagaaaaaagcaggcgagctggcaccagcgtgagagggagacggagagaggaagaaggaacgccagcataggaggcgtggaggccgacagcccccagactgcagccagcctctgcctgggctctcctgagcctggaccccagggtcctgagagctgccccaaggatgggcaccaggggagcggtcatgccccctcctatgtgggggctgctgggctgctgttttgtctgtgcctgggctctggggggtccacggcccatccgctctctgccccctctgtcttcccaagtcaagccaggatctgtacccatgcaggtgcccctagagggggccgaggccgccctcgcttatctctactctggagatgcccagcagctatcacaggtgaattgcagtgagcgctatgaagcgcgtggggcaggagccatgccagggctccccccaagcctacagggggcagcgggcacccttgcccaggccgccaattttctcaacatgctgctgcaagccaacgacatccgtgagtccagtgtggaggaggatgtggaatggtaccaggcactggtccgcagcgtggccgagggggacccaagagtgtacagggctttgctgacctttaaccctccaccaggggccagccacctacagctggccctgcaggccacccggactggggaggaaaccatcctgcaggacttgtctgggaactgggtgcaggaggagaaccctcctggggacctggacacccctgccctgaagaagcgagtgttgaccaatgacctagggagcctcggcagccccaagtggccgcaggcagatggatatgtgggggacacgcagcaggtgaggctgtctcctcctttcctggaatgccaggagggacggctccgacctggatggctgatcacactctctgccaccttctatggactcaagccagacctcagcccagaagtcaggtaagtgggtttgtgcaggatttgatgcatgtgtggggatgtaggggaaggaagtacaggtcccctcagctgtgcctgggccatttggcacgaacatgtgcatgcctggggggcacacagatgtgggtatttgtactcagctgtgtgtacttacagtcggctctgggaatctgcaactatctgtt

SEQ ID NO: 7216 - DNA, 6000 bp, Homo sapiens
tcctgaatttgaatgtttgcttgtctagctaggttggggaagttctcctggaaaatatcctgaaatatgttttccaaattgtttccactctccccatctctttcagataccccaatcagtcatagattccgtctctttacataatcccatatttcttggaggttttattcattccttatcattctttttctctattcttatctgcccgtattatttcataaagacagtcttcaagctctgagattctttcagaggaagaatctttcagaggaagactaagcagaacttggcctattcttctatgaatacttctgattgcattgtgaagttcttgtagtgtgtttttcagctcgatcaggtcagttatgttcttctctataatatctattttggctgtcagctcctgcattgttttatcatgatttttagcttccttgcattgggttacaacttgcttctttagctcagcgacgttcatttttatccacattctgaagtctacttctttcattgcagtgatcttagccttaccccagttccaaacccttgctggagagatgctgcagtcatttggaaggaagaaggcactttggctttttgagtttttagtgtttttatgctgattctttctcatctttgtgggcttatctacctttgatttttgaggttgctgacctttggatggggttttggggtttcttttgtttttcttttaacaatctggccacttttccataaagctgctgtggcttgctgagggtcccctccagactctagtcactttggattttccagtacctggaggtatcaccagtgaaggctgtgaaacagcaaaaatggcaacctgccccttcccctgggagctccatcccagggaggtatgaacctattgctggcctaaacacacctgtaggagatggccggagaccccatttgggaggtctcacccagtcaggaggaacaggattggggagccactgaaagaagcaatctaaccacacttccgaagagaaactatgctatgctgggcaccacttgcatccccagttggcttgggatctccaaagcctggagactggtgtggctaagtcgccaaaacagcaaagatggcagcctgcccctcccccgaggagctctgtcccaggaagtcttcaaatctctgtcagccagagaacatcgacaggagtggctggaggccacagttgggaggtcctgcccagtgagaaggaatggattagggaccctcttaaagaagcagtctggccatattttggtaaagcagctgtgccacgttgggagatcctttcagcccccagttggtttgagctccccaaagctgaaaggctggaatggctgggatgcccaaacagcaaaggtggcagccctctccaccatccaggcaccctgtcccagggagagatcaaaattttatgggctgtagaaaatgggcagaggtggctgaaggccttgtttgggaagacccacccagtgaggaggaatggataggagtcctgcttaaaaaaacagtctggccacgttttggcagagcagctgtgctgtgctgggggatcctttccacacctggtgggtttggactctccaaagtctacaggctggaacagctgagtcgtccaaacagcaaaggtggtgcccctcacccccaccccagccacccccagaactccaccttgtctcaggtaggtgctacactgttgcccgtggctggctggaattccaagccagttggtcttatctggtgaggtgctgtggaagtgaggcccacagaccaatgctgctcagctccctggattcagcctccttcctaggggtatgtacagacctcctgccttgcctgaatggcggtcacctttgctggggttccggagcctgagtatgtaaagctcctgggtgtctgtgcatgcctgagcagctgctctgccaataatccaatgcagctctgtgtgtaagacccaaaggcctggtggagtgggttcacaggggatctcccgatccaaaggttgcaaagatcggtgggagaagcatcattccccaggtttgcacattcactcaccacttccctggtggggggaggggagggggtttcctttgggtctgtgttgctcctatgtaggccattgccctgccctgctttcctctatcctctgtgggtcgagctgattccttaatcagtcccaatgcaagtatctggatgtttcagataaaggttttgaagtacccacccctttgttcctctctgagagagccatgccccatacctgcttctagttggccatctttgaaaataaaattaagaaaacaatttcatttacaagcacatcaaaaagagtaaaatacttaagaaaaaatttaacaaagaagtgaaagacttgcagcctaaaaagtataaagaaattaaggaagacctaaataaatgaaaaaaatcccatgttcatggaccaaaagactttgttagaatggcaatactccctaaattgatttacagattcaatgaaattcctattagaatcccagctggtttcattgcagaaattgataacctaaaattcatatggaaaagagagagatgcagattagtcaaacaatgtttaaaaagacagataaagttggagcagtcacaactcccaatttcaaaatttgctataaagctacagtaatcgagacagtgtggtactgtcataggacagacacagagattgataaaatagaattgatagtctagaaataaaccattacatttatgatgaattgatttccaacagaggtgctaagacagttcaatggtggaaaaaatagtcttttcaacaaatgatgctgggaaaactagatatccatataaaaaatgaagctggatccctacctcacaccatatgcaacaattagctcaaaatggatcagatctaaatgttgcagctaaaactataaaagtcttaaaagaacatatacgaataaatctttgtatacttgaattatgcaatggtttcttagatatggcaccaaagacacaattgacaaaagaaaaataaatcaattgaacctccacatttaaaactttgcgcttcttttgccagagattcaggttttaaaaaacaaaaagcctttgtgcttcaaaggacgctatcaagaaagtgaaaagatgatccatagtaagggagaaaatatttacagatatgtatcagataagggattgtaaccagaatatataaagaagtcttacaactcaataataaaaaataaataacccaattttttaaatgggcaaaggatttgaatagaaatttctcaaaaaataatacaaatggtcaataagagcatgaaaagatgctcagcataggtagtcattaggaaaacgcatatcaaaactacaaagaggccgggcatggtggctcatgcctgcaatcccagcactttgggaggccgaggctggcagatcaccttaggttaggagtttgagaccagcttggccaacatggtgaaaccccgtttctactaaaaatacaaaaattagccaggcatggtggcacgtgcctgtagtcccagctacttgggaggctgaggcaggagaatcacttgaacccaggaggtggagactgcagtaagccaagatcgtgccactgcactccagcctgtgcaacagagtaagactccatctccaaaaaaaaaaaagaaaaaagaaaaaaaacacaatgagataccactttacagccactaggatggctagaatcaaaagaatggacaatagtaagttttgttgacaatgtggaaccctcacgcattgttgatgggaacaaaatggtgtagtcactttggaaaacagtttgatagttcgtcaaaatgttaaatatataattaccatatgactcaacaatttcacttctaggtatatacccaagagaaataaagcatatgtccacacaaacacttgcacataaatatttatagcagcatcattcataatagctaaaagggaaaacagcccaaacatccaactgatgacagacaaacaaaatgtggcatatccatacaatggaatgttattcagccataaaaaggaatggggaatggatccataccaccacataggtaaccttgaaaacactaactgaaagaagccagatgtgaaggtcacatattgatacttctatttatgtgaaatgttcagaataggaaaatctatagagccagaaagtagatttgtggttgccaggggctttcgatgacaggaggggaggggagcagtcattgctagtgattacagggttcttgagagggagtgagaaaaaatgttctaaaatgtattgtggtgatggttgcataactctgtgaacatacaaaaaccattgaattctatactttaaaaaggtaaattttatgggatgtggattatagctcaataaagctgtcattaagaaaggaaaaggaagggaggggagaagagggaaaggggagggaggggaggggaggggaaggggggagaaaaaagatacatcgtggcatatctcttcccttttacctgtcattatgtgtcagtgcctcccattggcctaaactacccagaagccagagggaaagccatttgggactatattccactgtgacactgagcagagcaagggaaggatggggacacttctctcacacatctctgactccccaacatctaacccatggcctggcatgtgatattcatgctataaatatttgttgaatcagtaaatggcccctcatctagattctgccaggcagcgcagggggctttttgaatgtaaatgacctaatgattcaggatcctatgaccagcgactgtcaccctctgtcacctttcttctgcccctttatctctgaaggcattgaaggggccctgcatgagtcagggagggctggggggaggagcaagggtgggaggggcagggaagagggtggcttctccgacaacttaaaaggggcttgaaccacttcctccccagacaggggtagtgcgaggccgggcacagccttcctgtgtggttttaccgcccagagagcgtcatggacctgggtgagtgagcctcttcatgtgagaaggaacagtaccagggtcttggacacccagactgaccctgtggaatgggggtggaggatgcgggtggagcgcataggggtgcttcctggagaaatcagttctgatttggtgggcattggaagctacttccagagaatgccccctgctgtcccaggaggggtgcacctgccctttcagacctggagaaggggtcagcctttggtgccagtggggacaagggaggggccgagatcatgtctttctaaaacagcagggacataagagagtggcggggctgggcttggtggtctggcagaacctgttctcatcatgagggtgataggttaggccctctgggacctctggggacaggtttcaacagagaaattctccctagagagcttaggaccttttacccactctctgattcccacctttctcccctgccaaatattcatatacctgtccacttggggtcatgaggagatgcaaatgaaacgtgactgggttgtgagaatggtgcggtgcattgcaaatgcaagctctggttgctttctctctgctgcacatcccacctgctttgatctggctttgctgttgcctcttgcaagttaaggaacgggcaggcaacatggaatgggatggcaaggggcactcagcttggagaaatcatagccaggccttcagcacagcccctgcccctgagcaaacctcacgcactctgccccggcagataactctactctttagaaagccctttctcaggtctaacctagaaggggtcaaggggaagcactgagggtgttctgagtggttcatccagctccagacgccccctttataaatctcagctgtggagtcagaccaggctgaggctaagaagaccaggttcctagatggcttgtctcaccagcaaacaatgcaccacggcggcctcaaag

SEQ ID NO: 7217 - DNA, 6000 bp, Homo sapiens
caattgttagtattattttgaaataaacacaatggcatttgcattctttgaatgttgcacactgtgagcacttcaaccttaaatgatgccaatgactttttaaagaaaatatttttctggctgggcacggtggttcacgcctgtaatcccagcactttgggaagccaaggtgggcggatcaccaggtcaggagtttgagaccagcctggccaacatggtcaaaccctgtttctactaaaaaacaaaaattagcctgccatggtggcggcgcctgtaatcccagctactcgggaggctgaggcagaattgcttgaacctgggaggcggactaaaaatacaaaaactagcagggcatggtggcagctcctgtgttcccagctactccagaggctgaggcaggagaattgcttaaacccgggaggcagaggttgcagtgagccgagatcacgccactgcatgctagctctagatgacagagcaagactctgtcttggaaaaaaataataataatttaaaaataaaataaaataaaaaatatatatttatattatatatattacaaatatataatatagatttttttccccaattcatttttttattgtggcaaaattcacataacataaaattaatcatgtgaccactttacagtgtagaattcagtggcatttagtacagtcacaatgttctccaaccatcatcactatctatttccaaaaacattttcgtcatcccaaaacgaaactctgtaccgttaagcagtctccccacaacttccctcaccccatctgctttctgttttatggatttgcctattctggacatttcacataagtggaaccttataatatggggccttttgtttcactttgcctagtattttcaaagttcattcatgttgcagcatgtgtcagcacctcattcctttttatggctgaataattgcaatgtatagatatgcgacatttggtttatccattcgttcatcgatggacatttggacaccttttggctattccttttttgttgttgtgggtttttttaacttttattttaggtttaggagtacatatgcaggtttgttatacaggtaaactgctcatctcgagtttggtgtacagattatttagtcactcaggtaataagtatagtatgcgatatgttttttgttttgtttcgttttgttttggtttttgagacggagtttcgctcttgctgcccaggctagagtgcaatggcgtgatctcggctcactgcaacctccgcctcccaggttcaaacaattctcctgtctcagcctcctgaggagctgggattacaggcgcgtgccaccatgcccgcctaatttttggtatttttagtagagatggggtttcatcatattggccaggctggtctcaaactcctgacctcaggtgatccgcccgcctcggcctccgaaaagtgctgggattacaggtgtgaaccactgcacccgaccaggtattttttttttaatcctctccctcctcctgccttccaccctcaagtaggtcccagtgtctgttgttcccctctttgtgtcttgttttttagagatagggtctcactctgtcacacagacttagagttcagtggcatgatcatagctcactgtagccttgagctcctgcatttaagcaatcttcctgcctcagcctcctgagtagctagaactacagctatgtgccaccacatctggctatttttttttttttttttttgagacagggtctggctctgttccccaggctgaagtgcagtggtgcaattttggctcactgcagcctccgcttcctggactcaagcgattttcccacctcagccttctgagtagctaggaccacaggtgcacaccgccttcccctactttttatatatttttttgtagacagggtttcaccatgttgcccaggctgctcttaaactcctggcttaagtgtttggattacaggcgtgaaccactgcagccggctaatctcttggctaccataaatggtgctgccatgaacgtgggtatacaagtttttgtttgaacactgttttcaattctttttagtattttggggggtatacccaggataaaattactgggtcatatggcaattctatgttcacctctttgagaaaccaccaagtctctaactcatttttatgtttacaatttacaaggtgtcttgatcaccagttagaagaagctggacagctgcagccaaacccctaggttggacccaaagaggtctctttttctttctttcattcattcattctttttctttttttttttttttgagacagagagtctcactctgtcacccatgctggagtgcagtggcctgatctcggctcactgcaacctccgcctcccacgttcaagcaattctcctgcctcagcctcccgagtagctgggactacaagcgcccaccaccactccccactaatttttgtatttttagtagagatgaagtttcgccatgttggccaggctggtctcgaactcctgggctcaagtcatctgcctgcatcagcctcccaaagtgctgggattacaggcatgagctactgtgcccggccttctttttctttctttcttccttcctccttcctccttcttcttcttcttccttcatttgactttcaggtcaaagaggtctctttttaaaaactacactgactagaacagccagacttgatgtgagccaagtttgttccaaggcaagcttacacgcagggctttaaacagctttctctgctgctctgcatgtcacgacatgaactggctgggcaggaataccttcctgcctcctaggcattcttggttttccattatattacacacacttctgaaaaaagatgttaactacctaacttacaagtttctctcctctttgttggagttcagattagcacctggggtcaatgcagaaacagtgctcggggacaggttctatgccccaatcctgggagaggcgagtccttgcatggttagagaacagggcctcccaaacactagatgagatgatggaaaaattctccatccagggcaggcttttaccatatattttgcctgacagcactgctcagtgattctgactcttatcaatccacagatattggaggtgagcctactctacttgtatattgtaggttgtccaccctctgggcttgccagagccacaggagataatcctactacaggcattgtttactgcagccaatctactgagtcgaggcttctcggtcattaacccaaccccagggagtaactgattagtaccgattttaaaatttaaacctgttcgggagtttcttggaatgctgacctcttacctccgctcccttatacatacgaagtttctgagccacaggagcccaaagctacgttgcattgcccaaaacagggacagaccaaagtggctttttccacttgaaactaaatactaagaatgaagaggtcggctctcgggggtcccggttaagcagtttctctgccaacccacagctgtcacttgtggcttgtctcctggcctcctttcaggtgtcctggcctgaatctgctgttaggacagaaaaaaagtccctggacgggtcatatcctctgtaatctggcaggaaagctaaaatttgcgtgctcccattcctcgttgtgtttgtgtatctgcttccttgttgggaagagcctacatcacagtgtccggtgtaggggattttcaccatgacctcaccctcctgctgccactcgctaattccggcgcggccaagcgtccctgaagtcacatcacagcccaggtggaatgcacgagtgagccattaaatgcccctggtagcacgtctcaagtgaacatcaactccagttctttcccctcacagagagccctggtaggggtctgaaaatgccagaaagagctggaagtgggggtggacgacgtctggttaccgttctgggattcggagactagaaggtcaagggagtcactttaagaaaacacaccaggcctgggcctggtggctctgtctggaatccccgcactgtgggaggccgaggctagaggatcgcttgagctcaggagttcgagaccagcctgggcaacataggggggagcccctgtatctaaaaataaatacaaaaaatttagccgggtatgatggcacacgcctgtactcccagctactcgggaggctgaggcggaaggatggcttgaacctgggaggcggaggttgcagtgagtcgagatcgagccaatgcactccagcctgggcgacagggtgagactccgtctcaaaagagaaaaaataaaatgaaataaagaaaatgcaccaaaggcctgccaggctcacgccggctgttctgttcgaataactttcgagtccgtggcctcgaaatgggtcgggtgggcggtgacagcgggcagcgggcgcgcaacgcgggagaaagggaggctaagtgggagcccaaagaaccgcgtccgggacctggtctccggcctcccggccttggggaaggagcccttctgcccacaagtgggctcaggccatgaaagggaaacagaaagtcgggctccccagcctggcccacgtgaccgcggttcctcagccctccccgcgcgcccggccgcggctgcgggcgcgggcacccgagcgacacatcgagctcgtgactcgccgcccagggcgggaggcggagaagcggccgcggcgtgcgagcgcgcctccgggaggcagcgggagcgcgcacgctccggggccaccgcccctccggggccgggcccgccctccttccctccctccctcccccgctgtcctggcccgccctgcccggcccgccctgcgagtcagttcgctggttccctccctccctgggcgcgctcgggccgccgccgcgctccccgccctcgagcctcggtgccggagccgcccgccgccggaggaggaggtggagggagccggaggggcccgccgaggcggcggcggcggcggcaagatggcggacttcctgccgtcgcggtccgtgctgtccgtgtgcttccccggctgcctgctgacgagtggcgaggccgagcagcaacgcaagtccaaggagatcgacaaatgcctgtctcgggaaaagacctatgtgaagcggctggtgaagatcctgctgctgggcgcgggcgagagcggcaagtccaccttcctgaagcagatgcggatcatccacgggcaggacttcgaccagcgcgcgcgcgaggagttccgccccaccatctacagcaacgtgatcaaaggtgccgggccgggaatgggggccgggggttaagggcaggggggctggggcggcggcgggtgcggggcggggcaccgccctggtccgctgtgtcgctggcgaaggaacgggcccggcgggcgggctggcgggaagggggcgcgccccggcaactggccctgcccgcccggggtgccctcgcgccccagggcgagaggatgctcggggtcgccctgctctcccgcttgtctccccggtgggcgtcacggccattcccccaccccccaccgcgtcctggtctctccccctgcgagagggaagtggggcgagctgggtgctgcctcggggtgtgggcagacctctcctgtcctccccgctgcggatgaggcaggaacaccaatagcagccctagccgcttcacccccatcccctgctcgggcgatgtgggccgaacctcgctaccctggctgggtgacccgagtcacatggggtcgcatgcgctcccaactccctgcttccttggccgtctcctaagcaagcgagttctggaaccgtcgcaataagggaactttttgcccgagacttcttgtcaagggcgtagggtgacagcctccttttgggcgagaatatgaaacttgaggagtgtcaggttgactgtactggaatcaggagagagtggacccatacagttagcatgaaaatgtagcatctgtgctttttcgccccagtgtcacggtca

SEQ ID NO: 7218 - DNA, 6000 bp, Homo sapiens
tgctggctcatacctgtagtcctaactctttgagaggctgggatgggagagtcacttgaggccaggagttcaagatcaggttggggaacatagcgagaccctgtctctacaaaaattttaaaaattatcttattagtgtataggactcctacgtattctgaatatgaattccttatcgattatgtgttctgcaaatacctctttcagttcatggctcatctttccccctccttacggtatgttttttaccaaatgttttccatttttaatgtagtcaaattttacaatattctctttcatgttttatgtggtttaagaaataaattatatcacaaatatattttctctattttcttctaaaatttggaagctttgctcttacaattaatcccttgggaattatttttctgcactttttaaataaatgggtatcccattgttccagcactcttagctaaagtcagtccatcctttctctgcctacagtattataaaccaactcatgtcatacaccaatgtctaataaattgcttggtgcaatgcttggtctgttctgagctctccagtctgttacatagatttaattttcagtccctacaccagaactactcaaatgcttcaactaccacagtaattcattttttaaggaatatgtacaccttatttttttgcatttttaactcattccctttttttaattgatatataatagtcgtatatatttgggggggtacatgtgatattttgatacctgtataccatgtgtaatgctctaattggggtaactgagatatccattgtctcaaacatttggcatttctttgtgttgggaacatcatattcttctcgtctagctattttgaaataatatattattgttaactctaatttccctactgtactatcaaatactagagcttatttctgagaacatagtaattcattttaatacctgaaaaagtaatttttttctcatgcttttcctcaaatggacttagacttcttggctctttatttgtctacgtcaattttaggatagtttggtaagttccatgtttaaaataaacctgtggtatgttgattagattgcaccaaatttatagattaacttgggaagaattgacatttttaccacattgagtttttctatcaccggtgctttcatctccacgtttttagatattctttttttcttcttaagtaaaggtttgtaatatttgataacagtcttggctttttttgttagaatcatcctagattccctaaaatttctgttgctttctgaatggggatctttttcaaattatattttctaagttatttttacctaaatacaaaaacagcattgattattttaaatgatttatatctaacaagctttctgaaatctcttagtgtatctattgattctctttgattttatttctagacaaccacattttctgtgaattttctctatttcctttccaattctcatggggcaaaagtttcttacaatgatcctttcaaatataggacagtattttaagtattttaagcagacgactcaagttaagcttcctgcttctgcagacctgtgactgcatctccagtaccaaaagggaaataatagcacagactccatccctgagagccaaattcctggttcaaaaccccaaaggaccaccacagcatcagttatagcctaaaacccctgctctgagttttctcttgggcttagctacatttacaaaaaaattttaatttatctagaatatgttttaatagaaacaggacctgtcaacatgagtttgctttgccatgttgcccagagttctcctctgtctgaaatcttacacttccgtatcataggagctaataatgtctctgagccctccaaaattactgaatcctttgaaacctgaggtattatgattctgtgtgaagatgagaaagggcatttcaagacagaaagccaagtgactttaggtgcaaagatgaaagaacacatcatgtttggggataagataattagacctgcatacccagggcttagcatgtacttcacatgtatactatatgagacaccaggaattgatgattgaattaattatagatcggattaactattcagcaaagtgttttaagaaaaaaagttaggatatattgggctacagtaacaaatacatcagaaaatgtttaggctgggcatagtggctcatacctgtaatctcagcactttgggaggtcgaggcaggtggatcacaaggtcaggagttcgagaccagccgggccaatatggtgaaaccctgtctccactaaaaatacaaaaattagatgggtgtggtggcagaggcctgtagtctcagctactcgggaggctgaggcaggagaaccacttgaacctgggaggtggaggttgcagtgagccaagatggcaccactgcactccagcctggtgacagagcaagactccatctcaaaaaaaaaaaagtgttttaaaaaaataaaagtaattgtttaaacaaataagaatttctttttctctaatggtcatagtgggccctcttggtcatgagtggctctgctggatatggagagctagggacataggctcatttcaccatgcaactccatcatcacattcagcctcttcaccatttgcattcagttgggacaaggagaaaaagggtatggaggagctcaatgagtagaactcagttggtaaaatgaagttaccttaccacacctcattgcaagggaggctgggaaatgtagtctaatagagtgtccacgaggaagacagcaacgcagatttaggtgagcagctggtagtctctacgacaattagtatgatctcaaaatgcaagatggatcaaagaagagggaactgtagtgaagcagttaagggactactacaatacttaagttgaaaatgatgatggtctaagctaaattagtaaagggtaatttagcttaggtaagtaaagagaaaagttgagttatataacaattttttcaaatgaagattcaacaaggtcagacgtacaggcagaagataaactggatgagtgtttctgtgagaatcccacatgtggggaaccatgaaataaacctgggttcaactcaataattgagtgcaaattaattggtgcacaaaatgaatgatattttacaaaaatcaatttggaagacataaacataaacaagttatgattttcctcttcaaaaacatcttgcacctgtaatcccagcactttgggaggccgaggtgggcaggtcacaaggtcaggagatcgagaccatcctggctaacacgtgaaaccccgtctctactaaaaacacaaaaaattagccaggcatggtggcgcgtgcctgtagtcccagctactcgggaggctgaggcaggagaatggcgtgaacccaggaggtggagcttgcagtgagctgagatctcgccactgcactccagcctgggcaacagagtgagactctgtctcaaaaaaaaaaaaaaaaaaagaaaagaaacatcttgcaaactacttaggttttaagtgcagagtgtggggtttggtcagacatgttagcaggatgactgaatatggaaatatgggaaaaagaaatcgagaccacagatacagacatgacagtttactaaagaatagttgaatccactgtggacttggattactacaaaaagaaataaggaagacaaggaagagaagactgctatggattgagtttgccctcaccaaaactcatgttgaaatgtgatccccagtgtgggaggtgttgggaggtaaagcctagtgggaagcgtttgagtcaagggggtggatccctcatgagtggtctggtgctgttctcatggtagtaagtgtgttctcattctctcaagactggattaatcttaagggaatgttcctacaggagtgggttgtgataaaaccagtatacttctcgggttttctctcttcccctgtatccacttccctgttgaccttctctgacaggttatgatgcagcaagaaagcccttgccagaagccagggccacgctcttgaatgtcccagcctacagatccatgagacaattcaacctcttttcttataaattccccagtctcaagtattctgttatagcaacacaaaatgaaccaagacaaaggccagtggaaaaagcactgtgattatgtatagttatgggctttgaaaagagagaaaagctgtcaaaaagatagggaatatctttgaaaatcgaacacctgtggagtaagttcactgagcttgtttttctaggacctaatgccagttgtctttctgttttagaatctgatggcagtgtagacacctctgacttcctgggctctgggctcaccccgagactggttggaggaacaactttaaattgttcactgcattcctactatgatacatcctttgcactggaggattttttgtttgtttttttcacaaggactccaagaggctatccttttcttaccatgtgtaataaaattattgtgtgagtctggctttcctattcaattataaggtccttgagaacagatgctatgtcttgtgtaacaaataagtggatgaataactgtattttcacatatttattgtttctctacaaagtaaaaaaaaatctaagacatgaaacatgaaattaggtttttgttatgtgattaaattatagatattaaggtggtggtgctacatttggaaggacaaccatctttacttcacagatcgctaacttctttgacatgagtgtccaggaggtcaatgagagttcgtcccattgaccaacagagattttacccaaaagtgctggctatatttatgattgtaaaaaccaggtatagccatggctaatgaaaagtggtggataagtttgacagcaggtgaatttgtaaaataattaaaaacgtttaagtggtagataaggcagactataacacacactaactgcgctaataattctgggttcctctcccctttcatgctgaagaagccatgaagaaagaaaatcaatcctttaacctggattttattctcctgggagttactagtcagcaagaacagaataatgtcttctttgtgatttttttgtgcatttaccccatcacactgactggaaatctgctcatcatcttggccatctgtgctgacattcgccttcacaaccccatgtattttctccttgccaacctctccttggttgacatcatcttctcatccgtaaccatccctaaggtgctggccaaccatctcttggggagcaagttcatctcctttgggggatgcctaatgcagatgtatttcatgatagccttggccaaggcagacagctataccttggctgcaatggcatacgatcgagctgtggccatcagctgcccacttcattacacaacaattatgagtccacggtcttgtatcctgcttattgctgggtcttgggtgattggaaacaccagtgctctcccccacactctgctcacagctagtttgtccttctgtggcaaccaggaagtagccaatttctactgtgacattatgcctttgctgaagttgtcctgttctgacgtccactttaatgtgaagatgatgtacctaggggtcggcgttttctctttgccattactatgcatcattgtctcctatgttcaggtcttttccacagtcttccaagttccatctaccaagagtctattcaaagccttctgcacctgtggctcccacctcacagttgtttttttatattatggtacaacgatgggcatgtatttccgccctctgaccagttacagccccaaagatgcagtgataactgtgatgtatgtggcagtgaccccagcattaaatcctttcatctatagtctgagaaattgggatatgaaggcagccctacagaaactcttcagcaagagaatctcctcatagccgctgtgagattacacgctggatactgtaatgaccaagtgggatacacttggaaatccagctccaatgt

SEQ ID NO: 7219 - DNA, 6000 bp, Homo sapiens
tttgagatgaagtcttgctttgtcacttaggctggagtgcagtggcgcaatctcgactcactgcaacctccgcttcccgggttcaagtgattctcgtgcctcagcctcccaagtagctgggatcacaggcacccaccaccacacctggctaatttttgtgtttttagtagagatggggtttcaccatgttatccaggccggtctccaactcctggcctcaggtgatctgcccgcctcagcctcccaaagtgctgggattacaggtgtgagccaccgtgcctggcctgttggtccttttcttatgagtttgtaggaaatcaattcctatcttgatagcatacacaaattttccctttattttccactaaattttttgacgttttgcttttcacagttaatcctttaggaattatttttctgtataacttctcatatatagataaccaactgtccaatgactctgggctaaatagttcatcgtctccttgcctgtttctaaaccacctcatgtcacacaccactttctaagaaatgcttaacctgtgtctggccttcctagtcgattagaccaaatattgatttctttgtcggtctctaactcactattactccgatgtttgaattatcacagtaaaccttttttgtacctaatgagacaaaaagtacctcactttctttcctcaaattgtcttatctctcctctttattctcctaaatgaattttttttttttgagtcagaattttgctccttcccccaggctggagtgcagtggtacaatctcggctcactgcaacctctgcccccgcagtttcaagcaattctcttgcctcagcctcccaagtagctgggattacaggtgtgcaccaccacgcccagctaatttttgtatttttagtagagatggggtttttccatgttggccaggctggtctcaaatgcctgacctcaggtaatccgcctgcttcggcctcccaaagtgctgggattacagatgtgagccaccgtgcccagtctcctacatgaatttttggatcagtttgtcaaactcatgtttaaaagaaacttgtatctggtttggggttgcattacatttagagagtaattggaagaggactgacattttcacaatattgaggcttccattaacaatttacctcaccaccttttaaatatttttgtgcttcactaaagtttattttttaaatcaattttggatctcttattagaattatttctagattccttaaaattttctatggccattttaaaaaataaatctttattaaaattatattttcttgcactggaaaaagggtctctgggaaaaagtaaaaatgaattccattttctaatttagtgtttaagtacaagaatagtattgatttttgaaatacttgtttataacaaacttgctgaaacatcaattcccttgggttttctttgtagacaatattttctatgaactcttatctttttgttcttttctttccaattcttttatggcaaaattctttctagtgttcttttcagaaataggacaacacttcaagggttttttaacagagtctcaaattagtctccctgcttcgtgtggatctgtggtcacactgtatcaaggggcataaagaccttatacccagccattaagaactagctaatgtctgaatggagaccccaaggggccaccacagcatcctctatggctcatgtttcttgttctgagttttattcttgtttctcacactaaggtattcctatttctttcttttaggtatggttatgtgttttgggttttttttttctttactttgatatttttctataacttcaatgtattttaacagcaatgggaactgtcaacatcaacttagtctgccatgatgccaagagctccacctctgaactcacatatccgtaccatatgagctaaccatgctctctgcctctccagatttactgaacgatttgacacctgaggtattatgattctatttgaagaagggggagggcatctcaagagagaaaatcaaacttctttaggcgcagagatgagaaagtacatcataattatgaaatggcctccttgtctggggtaatacccgaggttccttgcctcacagccaaggaaatcaaggacgtggatacacacagagtgaggataagagtggaagtttaataggtgaaagaaagaggatagctctctgctggagagagggttcttggagaaatgggctgccggatctgcagtgaaatggaggcagggggttagacgcctggtgaggaggtagagtctgatttacatggagcaggaaagactggctggaccaggtgtgtcattagcatagggtgtgaaaaactgattaggactagatgtgccatttgcatagggcatgaatttctggtagcccccaccctaatctttaattatgcaggtaggttctccgtctggcctgcaccacgttgcccattcccttattgtacacatgataacaaaaaaaggaagatggagcctccatgttggatatgtctggcccccaggtagccctttcctattggcacagctgccagccttcccctgtgcaggcttccggcttgcttgtctatgtctgcagctcaatttctcaggctgctctttgttagaaaaaaagtaatttattgggctgctttttgttaaaagggaagctctgccaaagactcttttactttcactatctgcctaaataatttctttctacctcctgtatcaatgagaaatgataaagatgattagacctacatccctcatacctagcacatgattcaaacatgtactacaagagatgctgagaagtgaggattgaattaattacagatctaatatatttttgagtcaatatctctttagaaaaattagtaaatgctagatattctgcagaactgtcacaagttgatcacaaaatgtaaaatggcttaaacaaagtaaaggtttatttctctcctacataatggttacaataaatgtttttgtttgggggaggttctcctgagtgtggagtactggggatacaggttcattccatcatgtgtctccatcatcctgttcagcctcctctccatttgcatccaactggcacaagggtaagaaggtgtggaggagcccagaactgggacacgtgtggaatggctagaactcagtcacatgagcacacctcactgcaagggagtctgggaaatgtagtctaattgaacgtccaagaagaagagaacaacacggatttgactaagcagctgatcgttgccgctgtaatttaagtcttagagtacaagacggatcaaagaggaggaaacctggagtcaagcagttgagttagcattacaatacttcagggagaaaacaatgatggagctgaagcactgggacatttagtagaaaggctgaattatgtaataattattttaaaggaagaatcaacaagattagatgtagaggtgagagagaaactgagtcattaagcttgtgagcatcccacatatggggagtacaagaaatatacctggatttgactcaaaaaatattaagagaaaacttattgatacatacaatagaaaatatttggctgggcacggtggctcacgcctgtaatcccagcactttgggaggccgacacgggcggatcacctgaggtcaggagtttgagaccagcctggccaatgtgatgaaacctccatctctactaaaaatacaaacaataacaacaacaacaacaaaaaactagccaggcgtagtggcacatgcctgtaatcccagctactcaggaggctgaggcaggagaatcacttgaacctgggaggcggaggttgcggtgagccgagatcacaccactgcactccagcctgggcaagatgcagtgagactccatctcaaaaaaaaaagaaaaaaaaaaaaaaagaaaatattccataatagtctatctgaaggaggtaaaaataaacaagatatggttttccttcccctaaaatcttgccctcatcttaggttggatgtgcagtttggtcacgttggcagtatgagtgaagtggaaatacggagggaaaagttcacacctacagatgtaaacctcacagtttactaagcaatggttgaagccactaagcagttgcttgagtcacccaaagaaataattaagaacaggaagagaaggctgagagaaaggcattgtgattgtatatacttgagggcttgccaaagagagaaaaaaaaccaacaactcttttttcctttcttttaaaggaaatggtgaaaatttactttgaaaatgagacacctggggagaaaattctccagactgttttagtaggatctaaatgcactggtccctgtgatttacaatcttccgacacagtgtagatacatgttacctcctgggctctgggatccctctgagttttttcaatggaaaaattcctaatttctgggctggccctttcaccagcagaccttttgcactggaatattttgtcaaagacttcaaaatgctgtcctctccttatcatgggtaataaaattagtgtgtgattttggcttctccactaagttgtaaggtccttgagaacagagaccacgtcttgaataaatagatgaataaactgtatttgtcacatatttataacttctccatgaggtctaacaaagtgactagaccatgggacatgacaattatttgttatatgattaatttctaggcgtttagtggtggtgcttggaacaggaaggatgggcacttctgattcagagattgctcactttttagacatgactataaaggggtgaatgacaattagtcctattgacctacagggatgtttccccaaaatactggatatctctataatttaataaactcaggtgtatacacagctgaatcacttaagtcagaagtgatggagaaggattatcactacacacagtaactatgctaatataatgatattcctctcccctttcatgttaaagaagccatgagggaaaataaccagtcctctacactggaattcatcctcctgggagttactggtcagcaggaacaggaagatttcttctacatcctcttcttgttcatttaccccatcacattgattggaaacctgctcatcgtcctagccatttgctctgatgttcgccttcacaaccccatgtattttctccttgccaacctctccttggttgacatcttcttctcatcggtaaccatccctaagatgctggccaaccatctcttgggcagcaaatccatctcttttgggggatgcctaacgcagatgtatttcatgatagccttgggtaacacagacagctatattttggctgcaatggcatatgatcgagctgtggccatcagccgcccacttcactacacaacaattatgagtccacggtcttgtatctggcttattgctgggtcttgggtgattggaaatgccaatgccctcccccacactctgctcacagctagtctgtccttctgtggcaaccaggaagtggccaacttctactgtgacattacccccttgctgaagttatcctgttctgacatccactttcatgtgaagatgatgtacctaggggttggcattttctctgtgccattactatgcatcattgtctcctatattcgagtcttctccacagtcttccaggttccttccaccaagggcgtgctcaaggccttctccacctgtggttcccacctcacggttgtctctttgtattatggtacagtcatgggcacgtatttccgccctttgaccaattatagcctaaaagacgcagtgatcactgtaatgtacacggcagtgaccccaatgttaaatcctttcatctacagtctgagaaatcgggacatgaaggctgccctgcggaaactcttcaacaagagaatctcctcgtaaccaatgtgagggcctacattggataccgtagtcaccagttacggtatattggaaatccagttctgatgtc

SEQ ID NO: 7220 - DNA, 6000 bp, Homo sapiens
aagaaaagaaaaaccaacaactgttttattgctttctaatatatggtcttttaatttcttgcattggctaaagctttcagaacaatgttaaataataattgataatgaatttacttgtctcattagtgacttgactgagaatgcttttaatgtttttctattaaacatgatgctgtctttggagtttagttcgttttattttattttttatttacttatttttaaattattattattattattattattattattattattattattatttgagacccaggctggagtgaaggggcacgatcttggctcactacaacctccacctcctaggtttaagcaattctcatgtttcagccgcataccaagtagctgggattacaggcgagcaccatcacgcctggctaatttttgtatttttgatagagatggggtttcaccatgctggccaggctgttgtcaaactcttgagctcaagtgatccacctgcctcagcctcccaacgtgctgggattacagatgtgagccactgcacctggcctacttagttttattttaacatgttaggtaagtacctaactattcctattttattataagatttcagaaatcaaaatgaacatttaatataatcaaatgcctttttagcatctatggaaaggatcacataatctccctttacatctgttaatatcataaaacatattaatacattttctcattttgaactaacctggcattcctgaccaaatcccaaatacttatggttaattattttggtaaaattactgaaataaatttgttaatcttttatgatttcatattttctttactttaacataaatttttttcttttcttttgagctagttatgcacacttcgcaaaaaaaaaatggaagctttcttcttttatattcttgaatagtttgatcgtcattacaaacttccctgtggcattttacggagatgttgcttttcattagtggcaattggaagctagctctttctctactttttctatagtagtctgtttagattttctaactgttctagaattattttaataaatcataacttcatagaaaacttttataacttggagttcagaaaaatagaattttataatttttattgaaatataatagttgtatatatttagggagtacactgtgatgtgtgtatatatatataaaacaatgtgtaaggatcaaatcagggtaatttggatatccatcacctcaaacatttgtctttgtgttggggacattccaattcttctggctattttgaaatatacaataaattattgttaactatagtctccatactctatcaaattctagaacttgttccttttatttaactgtatttttgtacccattaaccaatttatctttatcactccttcccctcacccttcccagcctccaatcaccaccattctattctctactagaatttttcaattttctattgggctatgtttattttctccctgtcaattattattttgcatgcttatacttttttgcttttactcacgattagatcacttagttaaggtttgtcaatttcattttaccacaaacaacctgttctcaatttgtattcattcttttgtttgtctattttctaattttttactatggaattcctttagattttcttaaatttcttttgttttcttattctaaattcatgattgggttaagccttttcatttcaacatttttgctgattaacatgaacatatcttttgacttacaattgtaagacaactaaggaagtcagcatacctacaccatctctacatgttctttcttctcctcttaactttattagatttctacagtgtcattgttcaaacatttatattttattctgaaaccacaatccccatatacgtcttacagtaaaaaaaattcagtgcttattaccagttattttgttttctttttccttcctcttctctttgttggctgaagtttatcctctagaagtttattctatggggctcatagaacaactattcttgagtttttgagtgtccaaaaactttaggctgttgcttgtatatttgagttacagtttgtcttaatagaaaattctttggttacattttccttctatgaagattttataggaagttttctattttcttctagtcttgaatacttctgtagagaaatttaagataagcatcttctcattctattgtaagtgacttgatttctgccaatatacccaaaggattcattattttttaattacaatgaccttactaggactatctcagaatgggacctgtttctgtctcctggtacatgttgtgacttttcagtctctagaagccggtcttcagttatttctggaaagttttattttgtctaattgtttgttcctccatgctcattttttacctgagttctgttatctcacatttcacttccatctggtatcttgaaactcttccctgaggtcttgtatctctgtcttgtgttcttgtcacatagaggtgaatggtttattacatgttttaagttcacacttgttttttgtttttcagttattcagtagctctatgccacaatttttcttctgagtgtttgtagtctagcatttgtttgtcctagtttctctcctctaccctccccatttttttcttgagtatctttaactagaccttgtgctggttcccttttgaagtctaaatgaatcgaaaggtttctcagccagtttttcatgagaggtttttgctggggacaggtgcatgtcttgattcacggttgtttttgagtaccttttgccttgacttctctaatgtcaatgctgacacacagctgaggaactgctgacaaggcagttttcttgcttttacagtctcacctaaacactacacaatcagcttgcctgggtggcttctcattcagtcctgtctcctctgcttctcagatccaaactgagaccaaagaagaccatgccaccaaccatttccacttttataaacaaaggattttaaagaatattttggtgaccatcccccaaagcagtcacatcaaccatactactacagcactctgatttctgagatatgattttcttaaccgctcctggccctgaatttcactgccccagttcaggcaatcatcatgcttccctttctgttagagttatcagactccaaccccttcccatcttctgatttcagatacaagggtatgatattgctcttaaggaagctcaagccctacttgtctctagtcaataaagacattgatatttttttgattcagagtttgacataattcagtatggctttccaagtacatgccttcttcatttgaagacatagccttagagtcattggtcaatctaccatgcctgaatgaaggacaagtagaagaccagtgtctgtgcaatgtagaaccctaactgcacctggcagcaaccaacccacaggacatgattacaactttggttttagaggggagtagctgacaatgtacacagaaaaaataattttaaattaacttgttagtcaaagtccagtgtaaggatttaagtaacaataataacactagcaattaattgaacaaggagtgttgaattgacacttcatagtgtggtccctctctttgaagaaatgtgctgggctggtctttctgacattcagaatcatgagtatcttctctctgattcctggcataccttcacttgatcttcactatttccagaagccttgaaacctaggcaacagtttcaatattttctagtttctctgaaactctcatgaatttttctattttgaagtctgcttattggtctctgattctatgacattgactttttagattccacatgtaagtgaaattgtcaaatatttatctttctgtgtctagtttatttcacttagcataatgtcatccagtttgtataaaaggatatattttaacattctcaccacaaaaatgagttgttgaagggatggctatgttaattaccttgatttaatcattttacaaagcatatgccaatcaatatcacactgtaccccataaatatacacaattattattcatcaattaaaaataaattattaaaatgtaatctgcttattagtttgggttgatccctcagagaaaaatgggaaaattctatcttttttttttttttttttttttgagacggagtctcactctgtcgcccaggctggagtgcagtggcgcgatctcggctcactgcaagctccacctcctgggttcacaccattctcccgcctcagcctcccaggttcacgccattctcctgcctcagcctcccgagtagctgggactacaggcgcctgccaccaagcccggctgattttttttgtatttttagtagagacggggtttcgctgtgttagccaggatggtctcaatctcctgacctcgtgatccgcctgccttggcctcccaaagtgctgggattacaggcatgagccactgcgcccggggaaaattctatcttaatctcactatattcaaaaaggaagtcttttgccttttttttaacaaattttattgcgtatatttaaggttcaccacatgaagttacgagatacacgtagacagtaaaatgattagtatagtgaaacaaattaacatatccatcatctcacacagttacccattttcccccttccggcaagagcaactataatctactcatttagcaaaaatcttgaatacaatacactttattaactataatcctcatgttataaattagatcttttatcttagcttattttcccaagtattctgaccttttcagctagcagaggatgagagggacaaggtggtggtggcattcggcatctcaaccaagagcaaggtaaaggcattgaggtgttggaggagtgagggatggcctggggactcgccacggggctttgaacataaatggtttaaaatgttaatgtgaactgagtgaactgatacctcccctgctgggacatgtccttacagaaactcatggagccagaagctgggaccaataggaccgctgttgctgagttcattctactgggcctagtgcaaacagaagagatgcagccagttgtctttgtgctcctcctctttgcctatctggtcacaactgggggcaacctcagcatcctggcagccgtcttggtggagcccaaactccacgcccccatgtacttcttcctggggaacctgtcagtgctggatgtcggatgtatcactgtcactgttcctgcaatgttgggtcgtctcttgtcccacaagtccacaatttcctatgacgcctgcctctcccagctcttcttcttccaccttctggctgggatggactgcttcctgctgaccgccatggcctatgaccgactcctggccatctgccagcccctcacctacagcacccgcatgagtcagacagtccagaggatgttggtggctgcgtcctgggcttgtgccttcaccaacgcactgacccacactgtggccatgtccacgctcaacttctgtggccccaatgaggtcaatcacttctactgtgacctcccacagctcttccagctctcctgctccagcacccaactcaatgagctgctgctctttgtagcagcagccttcatggctgtggcacccttggtcttcatcagtgtgtcctatgcccatgtggtagctgctgtgctgcaaatccgctctgctgagggcagaaagaaggccttctccacatgtggctcccacctcactgtggtgggcatcttctatgggacaggtgtcttcagctacatgaggctgggttcagtggaatcttcagacaaggataagggggttggggttttcatgactgtgatcaaccccatgctgaacccacttatctacagcctcagaaatactgatgttcagggcgctctgtgtcagctacttgtggggaagcgatcactgacctgagagatgacctcctttcctgccttttctggaccgaggaaaa

SEQ ID NO: 7221 - DNA, 6000 bp, Homo sapiens
aaaaactgtgcaagaaattgactgtaataagctgaggtcaggaaagaaatggggatgggaggattcctcctttttctgccttggaggttttgcgtcccaagcagaaagggaagagtactctgtccctgaacgcgggcttacagccaggctgccaaatatggaagagtcaaattcctccctcctcaattctttgagaggtaaaaacacttctgtttttaaagattcactccaagatcattccaagtgcaggataaataacagggatgcaccttcgagttgggtcgggaccacctttcattcccaaaggattttaaataccagggattcagtgacaagaacaaacgagaaactaattttaataaacacttgcaatgtgtcaggccctgttgcaagctctgtatgtgaatctggtcatttcatctttacaatcactcttggaggtaagtactgctatcattcccattttacagatgagaaaactgaggctcagagaggtgaagggacttattcaaggatacctagacaatcagtggagatgaaggattcaaacccagacagcctggctccagagcccctgcatcatcccgcacctgttacccccagaatctgcaggattcaaacccagacagcctggctccagagcccctgccccatcccgcacctgtcttccccagaatctacaggctttgctcaccttcaccgttgaggctctcctcgcaggactgccagagccccacatggaacccccgctgaatgaacttgtcatcacccagctcccaaatgtacaggacagcctggctattgttgtccatcctgccattgctgctgttgtcccgtttgaagtgaatgcagtgctgccctcccggctggtcctggcacagtggcttcaccacccgtcgggtcccctcacaccagtggctgctgaccacggcggtgagggagaaggtgagggcgaggcagacagggaggaggagcagcgcctgctgctgcttggccctgtccatggctgagtgaggtgcgtggggcaggatgagctgtggggccccctcctcctgcctcgtcacggtacctgcccctcagctctgccatctggcatcctcacacagcctcctctcacgtccccctggagaattgcacgtgctgccacaccagatccagaggcacagagccggggcacgttcctgtcaagggtgctggccctgccattctccccaggaggtaggtgtgcgggagggcattgtttttttttgtttgtttgtttgtttgtttttttgagatggagtttctctcttgttgcccaagctggagtgcagtggcatgatcttggctcacctcaacctctgcctcccgggttcaagtgattccactgcctcagcctcctaagtagctgggaccacaggtgcatgccaccatgctgggataattttttgtattttagtggagaggaggtttcaccatgatgcccaggatggtctcgatctcctgacctcgtgatccacctgtctcggcctcccaaagtgctgggattacaggcgtgagccaccgtgcccagccagagggcattgtttttaaattgtggtaaaacacacataacatgaaattaaccatctcaaccttttttttttctttttttgagacagagtttcactctgtcacccaggctggagtgcagtggcaccgtcttggctcactgcaacctccacttcctgggttcaagtgattctcctacctcagcctcccaagtagttgggattacaggtgcccgccaccatgcccggctaagttttgtatttttagtagagacggggtttcaccatgttggccaggctgttctcaaactcctgaccccaggtgatccacctgcctcggcctcccagagtgtgggattaccggcatgagccaccacacttggccatctcaatcttttttttttttttttttttttttgatatggagtctcactctgtcgcccaggctggggtgcagtggcataatcttggctcactgcaacctccgcctcccgggttcaagtgattctcctgcctcaccctctagagtagctgggattacaagcgcacgtcaccacacccggctaatttttgtatttttagtagaggcggggtttcaccatgttggtcaggctggcatctcaaccatttttaagtgcaaagtttagtggcattaactacgctcacagtgttgtgcaaccatcaccaccatccacctccagaactcttttcatctttcatcatctgtacccatcacacaactcccattgcccttcctcctctgcttggcagccaccattcttctctctgtttctatgaatttgactactctaggtgcctcctgtaagtgcactcatacagtatccgtccctttgtgacttgcttacttcgcttagcataatgtcctcaagcttcatgcatgttgtagcatgtgtcagaatgtccttcctttttcaaggcagaataatattccctgtgtttgttggatagcattttgttcatctattcagacacctgggttttttccaccttttggctgttgtggagggtgctggttttgatggaagaccaggggctgtttgggtggctgtcttggtgagacagcctcaccattgccttttgcatggagcaggtccttagtgttggattccggaatcagggaatcccaaggacttcataggcctgtttcttgtccagctctatgtagagaaggactacggaaaacagatgcttgttccagggatgctgggtgatgcgaggtacaggcaggctacctcagggccaaggtgctgtgcagaatggggagggcagcatgtatcccacttggctgcagggttctgaggccaggggcccgcagatgctagaagacagaaccctgggcaccatcgctcaggccctcactgaacggggcactggcaggagcagtgatgctgaagatttttaaggaactcctcgggcagaggacactgatgaaggtgtgagggcagaagattctgcagagcatcctgaaaacacacaggctcttgatgatgtgttagacacctcctgaataccccccagacagaatctggaatctatgtgcctgggctagacagtgatactgggttaatatcactccatctatactttgccgctggccgagtctgggcacctgtgtcctgtgctctcactggcctggtggggtgtccagtctcaagggaagaggccttactaagttccatcgctagagggcaaccagccaatgggtggggaagtcgtgtgtggcccccaactttcatcccttcagaaataaaggatgtttttgagaaaaagttgcaagagatgagatggaatattcttgcaaagcaggtattttctttaaagacagaccattttccagcatgcaacttggaagatgatctttaatgagcactcacagaacggagttgcagccacattcaatgaccaaagtccatcccttgggtactttctccctctgggtcactccatcctgctctctgccatcccagagagatgaccacgtcaattccagaggtgacaccactctgagtccatttctagggtctttgttctagttgagcttttcattgttaaggtctaaaatcttgtcacatggagtttttaagatttttagggatgtctattaagaaaagcatggctgcttttcccaactgttcagaattcattcagttgaaaagttacccaggatgagttcctatgtttgacttgaagagggaaggaaaaaataacacaaaaacaaaaccaaaaacgaagtgaaaacatgttcttcttgcctcttgctgactcactgttccaaccaatcaagacatcttccacctgggcctccaatttgggaggctgggagacattgcagggacgctgggagctggcctgggagaggtggagtaagaagttccaagcagagcctttgggaggcatggcgatgagcctgctaagaactcaccggagagggcaggggcaggacagggcaccctcccaagtacctgtgctcaagcaactctggtcagaagacctgcctatccggttctgctgtttacttgctgtgtggctttgggcaagccatccaacctctctgagcctcaatgtttctcagctgtcaaatggagaattcatcgtatcctcatggggttattgtcaggatgtgcgaaataggatggtgggttaaaagacgttgtcaatgtgagttgtggggacagcctactcctgtgctggttagtaagtgatgtatcatcaattccataaaagggtctgtcaggtgggctgagccacatgtgcttagaacaagtgggcattcaagatgagtgaatgttgcacttttcaacacactgttttgctattgtgtaggcataacctacgccgctgattgggtttttgcttcatggcctgggctgggagctgttctctcctgagctgagcaaccacctctcctgcagtctctgcataaacaggacccagaggagattttgcctttgtggttagcctcagcccagcctggacaagcttaatgccttagaaagaaataccctgcctcaaaaagacacctgcctctaaactggctcgagccccatcgccttctgccagccattcctctgtagctcgaaccccagcctgtctcagccagcttcgtgcattgagcagaaccttcagggtggagcccgctgaccgccttgttctttctcctcagcctgtcaaggaagtcccagaaagcacagctgacttagggaaggtctgggaaaaatctccctgcttttgggggggcaggggcgggggatgagccagggccgagaaggaactctgaagactccgtagattgctctagaccgcctcagacactctcggcgcagcgtggagaggatttgtgcaaacatttcctctgtggaccaagaggaatgcaagaggaggctgcctgcggtgcatcttggacggctagagagatgtacccctacttgtgaaggtgcacgaggaagatgaagctgggatcgagcagggcagggcctgggagaggaagcgcgggactcctgcctggcgtccacgagctgcccatgggcatccctgccccctgggggaccagtcctctctccttccacaggaagtgctctctctgggcccctgggaggcccttcctcactctggtcctgctggtttccatcaagcaagtaagagcagttcattattattattattatcagttgtatttcctgatttttttttaaagaagcaatttaggcctcatgtaagcaatttggaaaagagaaaacagtattaagaaaataatgagccgccataatcctagcattcaaaggtaatcactgttcatattttggcatattgtcctcaaaccttttctctatgcatttgtttttttttacaacagctgatattaggaagcataaaacatgttgtgtcctggtccccccaaccagccccgcatcatattataagcatttccccacgtcaatgtgagttctgcaaatagcatttacaattgctgcacatatccttctgtttgtcttcagtattctcccagctttgagtatttaggttgagcaaatccatttttctttttcctttcctttcctttcccttctgtttcctttttcctttcattacaaaaatgttgaacgctaattgtttttttaaaatacaattcaaagaagtgaaatgcaaactacaaatcactctacttccaacagctgcagatcatcctcattcacatttgggggcttatacttccagacatttttctaccattgtttgcatacagttttttgtttgtttgtttgtttgttttttgagatggggtctcgctctgtcgcccaggctgaagtgcagtggtgagatcttggctcactgcaacctctgcctcccgggttcaagtgattttcctgcctcagcctcctgagtagctgggattacaggtacgtgccaccacccggctaatttttgtattttagtagagatggggtttcac

SEQ ID NO: 7222 - DNA, 6000 bp, Homo sapiens
agagctgcctctgaagacttggcaagacctacccaacagtcgttcactgagcagagactgaggagcctcctgggattgggctcatcctcaggaaaagcggagccagtcccaagcttgaaccagtgacaagtccttggatgtcggagagaagtagaacgttgaggtacagtaagaaacccttgttgacttccagaagtgcttgagggattttgtggggagctgaggcctggagagagtcagctgttctgaaatgtaggctgtgactcctgatgtgtgccatctttatgtacaagccagtgaggcctagagctctcaggttagacttaaaatttccctctgacactcacacagacactgaggggcaatgtgcactgtactcttttcctctttattttatagagccccaagtttattcggagggtaacatatttgggaaaggtatgccccttcctcttccccatggaataaaccatatttggtcaaagccaggcatgatcattccatttccctgtgctcatggttggtgtagggtagcaagtgatccacgacttcacctcatgataaacggtagggaggctagccctcttctgcattgaatgaggttgcatgagcaagcaatgcttgcagctgtggcagcctttttgtaaccatgtggcaacaagcctaagaggaaagctactgaagatggcagagcagaaagagagaacctgggcctgtcatgatatttctgggaccatctgtatgtcacctggattctgctctggcagttgaggcaggatgagaggggtgagagatgagacgatgtgtactagcagtctggaagaggtccacggagggtcagtttgttcaggaagcatacccttccactttcaccagtgaaagtcccacttgagtttctagggctctagtcctaacctaaccagatgctttcatcactgcagttgttttccaggagtcaggatctagaggtagtcagatggcagatggctcctcctgcccctttttagcctgaccctgtgaagtagatattgttatcccatcttatacataagaaataggggcttagaaagattaattgacttgtccaacatcaacagcagagctgggaatcaaacctggagtctctgttgctaagacctgggctctgctccctgcacaccaattgctttcaagactaaaccagctgggtgtagtggctcacacttgtaatcccggcactttgggaggctgagatgggaggatcgcttgagcccaggggttcaagaccagcctgggcaacatagtgggacactgtctctacaaaaacattacaaattaaccaggcatggtggtgtgcacctgtagtcctagccacttgggaggctggggtgggaggatcacctgagcccaggaggttgaggctgcagtaagctatgatcccaccatggtgctacagcttcagtgacagagtgagactcttgtttcaaaaaaaaaaaaaaaaaagactaaatgccatgactctcttcggattccacccttcctcctcgtgtttcctgaataataacctgttaataataattattataatatttaataataataattggcacccccatggacccagtgagtccagctcaaatcctagcgtggatcaggggttgaaggagtcaggaaaatgtatgattcatttcacaaagactttgtgaagaggggcgggttgttgtgtgagtcagagggtaccaggtggggctggggtggggagaggacggagaagggaaagctttgctggtgagggacaccggggacctgaaactcagtggactgcaacacagacgggaacagggcacagccctgtgctggagacttcctacttgggtgctatcgtttggaaatctgtcctcccaaatctcatgctgaaatgtaatccccagtgttggaggtggggcctagtggaagcagtggagcagtttctgatgaatggtttagtgccatcctttttagtgctgtcctcatgatagtgagtgagttctcactagatccggttgttaaaaaaggtgtggcacctccccccacctcttgctcctgctttccccatgtgacatgcctgctcccacttcaccctctgccactagtaaagctccctgaggccccttggaagccaagcagatgctggcactatggtttacaggctgcagaactgtgagccaaataaacctcttttctttgtaaattacccagtctcagatatttccctatagcaatgtaagaatggcctaatacattgggtgattcagggaaggtttcctgatggaggttgggctctgaaaaggggaaatggtgattctgggcacaggaaatgctagagcagagcccaggcccagcagctgcagggcgtgcaggaaccactcatagcaaccagccagacaccgttcgcctcctctccctctgcaaaatctccactcactcctttggatattgctctgaccatccccgccccgtcctgtgacctctgcggactggcatcccagcaggatggcccagctctccagcctggcagccagagccttctccactaggcctttttctcttcactctcctgggcatggcacccctgggcaaactcctaactaccacctctgcctggtatagctggaaccaccccactgtgaagcctccctcactctgtaaaagccagtaccccaggaagcctcctctaaccctttgccctctgccactccaaggaagtgctattggaggagctgcctgatctctctggccttctgtgtggcagcagaagtttgtgtcaactgctgtgggaacgtgattggtggagcaggtgattccagaactcacgtgaccaggacacggaatgtgtgggcttgccaatattttgatatataaatcaactgttttcattatggaagtaacaaaacctcaagggaaatagaaaaaaaaattccctgtaatcatcccacccagctaggaggtctactgtgtgtgtttttgacattttgctgtcctcgttggtgcaagggcagatgtgactgtttatgcctgtggagggcagaggggtttttcttcttcttgtctttttttagagacagggtctccctcttttgcccagcctggatggaatgcagtggcatgatcccagctcactgcagcctcgaacccctggcctcaaaggatcctcctgcctcagcctcccaagtagctgggactacaggcacctgccaccgtgcctggctgatttattttttatttgtttgtttagagatggggtctccctacattggccaggctggtcttgaactcctggcctcaaatgttcctcctgtcttggcctcccaaagttttgggattataggcgtgagccatgttgtcgtcattacagctacattgagatataatttatgtgccacacaatgcatgcctttcaagtgtacagttcagtggcattgaggtatatccacagaaccgtacaaccatcaccacattgagaaaatttttatcaccctaaaaaatcctttacaaaatcctttaccctttagcagtcaccccatgttttgatttttgctttacatgattttacaagcatcttttcctgttgctggaaaatctccttacccatcctctttggtgactgtcagcaaaggctttcgggtggtgaaatagcgtggccaggagtgctctagaacaatggtgttggtgagggctgcagaagctgaggacccacaggcagagagggagggatggtagaagcaggtggtgaggagggactcggggcaggactttgggggtaaaaggaagcaagtctctggaagcagaaccagcagcactgctgatcattgggacgtggagaaaggcgaaggctcagggtgtcagcaaacttcctagggtgggtgagggttgccaggtcaataacgaacagggtcccaggaaaaggcggcagcacaggtttggggagaattagagatgagcttggttttggtcttgttggatttgggggcaccagtctctctcctggcgagagtcggcagtggggtgttaggatctggccctcaggaggctgttagggctgaagcaagagatttgggagttaagggtgtgagggccacgtgggaggcctcgggagcctgtgccgatccagggtgagtgtgaaggaaagaaaaaagagggcccggggaacactggtattttcgggcggtggacgaggatgggacggccacgagcttgtcttaaggtagaaggcagagcggggccgtaggggcagtggcgcgggcgagggtggagaacagcgctgagcctcgctgggaggcggccggagggggctgcagcccccgagggctccttgcagtccggccccgcagcctggagacagctccggtggtgctgcgctgcccgagactgctgcacgagcggggactgcggcctcggctccctgcctgcccggcagccccccatccagtcggcctgcccggggtgcgcagggttagcctggagtgagctcgccccgcccggggttgcgcggccctggggggtcctctcgcggcggctcctgggacctgctggcgccccgggcagagcccggccccatcccaggagtcgcccggactggaaggcagtgcgagcactgggacacagcctccgagctcgagcgtgacgggaagttggggcaatttgttagttatccgccgccaccaagacgcggcacggcgcctggaccggaggggccccgcgcgggcgcgaactttgggctcgggcgagtgggtggtgctccgcccagcccgagacgggcgggcgcgcgggccaatgggtgccgcctcttggccgcggggggccccgacccgtgggtcccggccaccagcgccccagccccgaggctcagaagcggcaggcggaggcgcggtccgggcgctatggccatgcccggcgggtctcacgcggctgcccctcgcccggcgcgccttcggtagggggcgcccggggcccagctggcccggccatgctgctggagacacaggacgcgctgtacgtggcgctggagctggtcatcgccgcgctttcggtggcgggcaacgtgctggtgtgcgccgcggtgggcacggcgaacactctgcagacgcccaccaactacttcctggtgtccctggctgcggccgacgtggccgtggggctcttcgccatcccctttgccatcaccatcagcctgggcttctgcactgacttctacggctgcctcttcctcgcctgcttcgtgctggtgctcacgcagagctccatcttcagccttctggccgtggcagtcgacagatacctggccatctgtgtcccgctcaggtgaggcgctcggcgtcgcccgaactcggggccccgtcggagctccgaaatgggtcgtcttctccaggccggggttcctccctcgggggccccagacgggccaggctgggggcgcgcggggcgcttggagggctggttcccagcctggccaccccgcaacgctagaccagtgcgcccgggcacccaagacatcccagatgcgcgtcgctctaaggagatctgcgtagggacagctctagggggtccggggagtgcggtccccggcgcccggggaggcgccgtggaaaccccggggaaagcgtcacccccggggaaagcgtcacccccgtgggcgggtggagcccggggcgcgggagttttggtgatcacatctccactcctgccacgaaggccgttcctaacactcgcccgcagcggcggtgcagcggcagtcccgtgagtgctgcggctcccggaggcccgggaggttcccactaagggcaaggcaactttggacgctgggcattcgcaccgtcagaatggacacgcatgagccagcttcagaacgtgtctgctgcggagaggcggcccggcccatcccaggggaaggtgtccgttaactttggggaacgctacggactcagattatatacttttaaaaggagttacaatgcttcctcgtgtctggcaaacggccttaca

SEQ ID NO: 7223 - DNA, 6000 bp, Homo sapiens
ctcctgggtggctctgcatttgtgtgtgtggtggtggtggaagttgaagattagagatgccactcttcctaagggtcaagtcacctcttgccctgctccaggcaggatgacccttggcctgtaacaagaaaggaagtggcagtaggatggtagtaggatccctgctcatgaggaattaacctacactggggccagaagtctcaggacaatgttcagctggacaagaaccagatccctctctttccaagccctaggtggtgcggggtgggggcagaggaataaggaaatgtgtaagaaatgtaaaaactagatgtatggccgggggcggtagctcacgcctgtaatcccagcactttggaggccgaggcaggtggatcacctgaggtcaggagttcgagaccagcctgaccaacatggtgaaaccctgtctctactaaaaatacaaaaattagctgggcgtggtggtgggcgcctgtagtcccagctactcgggaggctgaggcaggagaatcgcttgaacccaggagacggaggttgcagtgagtcgagatagcaccattgcactccagcttgggcaacaagagcgaaactccatctcaaaaacaaacaaacaaccaaaaaaacaaacaaactagatttccaggccaggcccggtggctcacacctgtaattccagaattttgggaggccaaggtgggcagatcacttaaggtctggagtttgagacaagcctggccaacatggtgaaaccctgtctctagtaaaaatacaaaaattagctgggccttgtagggggcatctgtaatcccagctactgggaggctaaggcaggagaattgcttgaacctgggaggcggaggttgcagtgagctaagatcacaccactgcactccagcctgggcaacagagcaagactctgtctcaaaaataaataaataaaaaacaaacaaagaaaaccccctagatttcactggacataaggaaaaaaaagactaaaggcaatactacgtacagttaaaaagaaagaggcatacatacatatgtagtatcatggaaagatatccaagacatgttactaagtgttccctcctttccttcctttttccccttccccttccccttcccttcctttctttcttctttttctatttggagacaaggtctcactctgtagcccatgctggaatgcagtggcatgatcatggctcactgcagccttaaaattctgggctcaagggatcctcctgtctcagcctgctgtggagctgggactacaggcatgtgccaccaagcctggctaatttatttttattttttgtagagacagggtcttgccatgttgcccaggctggtcttgaactcctgacttcaagtgatcctcctgccttggtcttccaaagtgttgggtttacaggtgtgaggcactgtgcctggcttctttattatcattattattattttagacagagtctcgctatatcacccaggttagtctccaattcctgggctcaagttcctgcttcaggctcccgagtaactgggattacaggcatgagctgcatacccagcaatagtatcacattttttaaaagacactgaggccaggcacagtggctcacacctgtaatcccagcattttgggaggccaaggcaggtggatcccttgaggtcaggagttcaagacaagcctggccaacctggtgaaaccctgtctctactaaaatacaaaaattagctggatgtggcggcgtacacatgtaatcccagctgctcaggaggctgaggcagtagaatcacctgaacctgggaagcggaggttgcagtgagccaagatggcgccactgcactccagcctgggcaacagagcaagactccatctcaagaaaaaaaaaagtcactgaataataggagtatcaaatcccatttatgctttcctttaaaaaaatccagaatatgtgggaaatgagatatgagtggggatacaaagttttctgggttaaatattttgcaacaagtatatacttacatattacttgcaatttaaaaactgtattttttaatagcaaaagcagaaaggggcttagaaagggaatgtgagggccctcaggagtggaaaacaggggacttcccatgacgaaactagcttctgttcctaatacggcccttcctctacccattgctacagatcatcagatcgtgggactatctcctatggctacatggaaaagaaaggtgaggtctcctgtccctattcatctccaaagacccccaaagtaaaccctcagttacccggatgctctcagaggtcgataaaaacattcaaacatccaactggcatggaaaagtggaagaggaaaatcaaaacgagagaaaattcccagattctccaattagacagtttggacacctgagctcaggaatgactacaataagttctcctttggaggtctcaacatcatgatgcaaacttaaccccaaccctaggctaaaaataaaacttcccaagggccaggtgcagtggttcatgcctggaatcccaacactttaagagactgatgcaggaagattgcttgaagccaggagttcgagaccagcctcggcaaaaaagcaagacccccatatctacaaaaaatatgcctgctgtcctagctacttgggagactgaaccaggaggatctcttgagcctagaagctcaagactgcagcatgccatgattcttccaccgcactccaatgtgggcaacagagtgagcccctgttcctaaaaagtaaagtaagataaaaataaaataggaacttcctaccaagttacctatattttcttttttgatcttaaggccattttacatatgaaaatcttgagctccagagatgtgaaataacctgctcaagttacttgcagtaagacagaggcagaacctaccttcagaatcctcatcagtttttttctttcatccgttatgattatccattatcattatgccatattgtcctttttttttttttttgagatagggcacaatcacagctctctgcagcctcaacctctggggctcaagtgatcctcctgcctcagcctcccgagtagctgggactacaggtgcacaccactatgccaggctaattttttaaaaatttttttatagttttttttttgtagagacagggtttcactatgttgcccaggctctattttaaatctaacatttgcttttgtcccctttaatcttgaccccaaccccagtcctaacccatagtgggctcatgtgcttctggccccaacccagtgaaaatggcttgttttgctttctgcacctccttgctccttcctcccatcttatcactcagaaatctcccatgcttccttcttgaaaggagcaatcctaggcaggcaggaaggactagatttggtcccagcctgaaatgtctcagagactgcatggctcttttctgcatcattgtagaaatgatccttaccaggaggactttggagttcacgtcaagcaggccattgactctctcccactggattctttgcaaaagcagcctcttgaccatagaggaggacaacaggttatccgtgcccatgatccaagagcttgagatcctgagatgaagacttcaggagagatcaggacagataatttgtggtgggcaggaatcagtaaactgggacaacagcagcagctgagtccaagggtcagtgtctgggagtaatttaggaaagtttggtgctgacagctgtgtctgggacttgaacgtcatggccaaaccagctcctgggctcctcagctgcttcagactaatgaacctctggcccaggacacaagaagcagctgtggtgtggctgaagtcaggacccccggaggcccagactcagccttgctgcttccttaacagtgtgaccttagataagtcacttaggaaaagaggaaaggaaactagcatttagcgagtgcagtgccctttcacagctgccatcatacagtgaggaggggaatgtccctatttcacatgagaagtcctgaaggtaaacgtgtcattcaaggctctatagctggggagtaagaagacagaattagaacccagagcttctgaattcaaatcccgggctgttggccctgagctttagcttctcggtctgtaaaatggtgttacactcacctggcacatgaagtcgcacactgaaggttctaaaacccctccattctttctcccaaccgtggtcctgaagagctgtggcaccttcttcctgggaacgtagtcatcgtattttgccctccccacaacaggtttgtggggtctaggccccaggaggtgtctgaagggaaggtatttggactttgctttcccctctaccccactccccagaccttctcccgactccagagggctggctcccgcttctcctccctggttttggctggcggactgacatcagctggtattcctagggataggataaggaaccctgagctgcatggctcagctccaggcgccccttcccccacaacccaggacagccccttagaagcagcggcgtcgagaggccgctggagctcccagccccctccctcttctccacgtctgggagagcagcttgccgacccctccagacccgaaagagagagggggcgactcgaattcggggagcgatcctgggagaccctggagagtcctgggcgccacgcagccgagcccccgaaatagatcccggttccggggttccgggagctgtccagcctcgcggggtgagctacgagagggtgggccaacgccggcgaggcggagggagccgcgggcgccaggcgcgggtgaggcagcgactccccctccagccgcgggccccgagcgtcgcccccgccccccacgtggccgccgccgtcccagcccctccgaggaagcggcgcggcttcctgcagcttgggctggggatataggcgcccccacacccgggcccggctcagcgccgccgccgctcctcgcctccttgctgcacgatggcctcgctccgggtggagcgcgccggcggcccgcgtctccctaggacccgagtcgggcggccggcagcgctccgcctcctcctcctgctgggcggtgagcgcggcgccccgaggcccgggcgggaggcgcgagaggccccggaggggagaggggagaggggagaggggctggatggccgaggccggaacgggccctggggtgcgggttaggaccgacgtacctagcagcactggccctcggacggtccctgaccccacctcggggcgggcgcagcatgagctgcttcccacccagggaaagctggggtgctggccccggcccctcgaagagggcttaggaggacggaagctggccagagatgagggggctttgggcctgggtgtgagtgacaaggagctggtgccagcccctccctccccggcactgaggcgtccgtgggggctagattattcctccttttcttccaaggtagcctattttcggagggtctcagtcccccaacccccctcgcaggctccactgccggggtccccgctatgttaccctcctctcccgtttcttcccacagctgtcctgaatccccacgaggccctggctcagcctcttcccaccacaggcacaccagggtcagaaggtgggtacccagggtgtggaagggtggccgagggtaaggacgagagcaagttcagtggggagggttcctttcccacgaggcctgcccaaccccagctgatgccccactacactcccctctgttctttcttggggttcctcgtggtctttctccctgtcctcctacaaagcccctgcacggctctgagctgcccacctcacaagtgggcgagaagaccccaggaaaaggtgtacgtggaagttcttatcaggctgggatggaaagtgcttagcacatggaagtcattataggattcctgagctgggactctgtcctcagccagaatgttttgctagggaaactttctgaagggttcccacgtt

SEQ ID NO: 7224 - DNA, 6000 bp, Homo sapiens
acctcacacgtgatctgtgaggccctgcaactctgatccctgctggcctctttacctcgtcctactttgctcctcactccaaccacacagcctctcttgccctccccgactcagtcagattccctccccaattatgctttcaaagaactacggatcttcccttcacagcactgaatcccatggcacttttacatccatgtcagtgactgtgcagtcaacgtgagtgtctcccactaggacatgagctccataggaacaaagggttgggtctggtattcagtgtaattttttttttttttaagagatgaggccgggcatggtggctcacacctgtaatcccagcactttgggaggtcgaggtgggcagatcatgaggtcaggagtttgagaccagctttgccaatatagtgaaactccgtctctactaaaaatacaaaaattagctgggtgtggtggtgcgcgcctgtaatcccagctactcaggaggctgaggtaggagaatcgcttgaacccaggaggtggaggttgcagtgagctgagatcgcaccactgtacttggcgacagagtgagactctgtctcaaaaaaaaaaaaaaaaaaaaaaaagaaatgagttctggctatgttgcccaggctggttccaaactcctgacctcaagtgaccctcctgcctcagcctcccaaagtggaattacaagcatgagccaccgtgcctggccataaatttgttaagtgaataagagcacacaattcttacagatattaggggctatgtgatgcaggagacagaacacagctttaagagccaaacaggcctgggttttaatctcacccctgccacatactatgtgactttgggaaagttgccagatctcacctaaggtggattcttcatctataaacaaaaaacaatacccactttgtaggcatatacatgtgcagaacttagcaggagctcaaaaaatggtagcaattggccgggcgcagtggctcacgcctgtaatcccagcactttgagaggccgaggtgggtggatcacaaggtcaggagttcgagaccagcctgaccaacatggtgaaaccctgtctctactaataatacaaaaattagccaggcatggtggtgcccggctgtaatccctgctacttgggaggctgagagaggagaattgcttgaacctgggaggtgaaggttgcagtgagccaagattgtgccactgtactccagcctgggcgacagagcgagactccgtctaaaaaaaaaagggtagccattaccctaggtctcccaggatgcctgctgaataaatatttaattcaacgtaacttcttgttttaaaaggcgctttatgattatgaaatgtatttttgtcattctgaaattattttggatgtggagtctcacatttttaaaatctgttggtttcctacttggcagatgggaaaactgaggttcaaagaagtaaagtgactgttccaaggctgtatagttagtggcagagttacaaatgggtccaagtcaatgaccaagctaatttatttatttatttagaggtctcactctgttgcctgggctggagcacagtggcatgatgacagctcactgtagcctcaacctcctgggctcaagcaattctcccacctcagcctcccaagtagctgggaccacaggcatgcaccaccatgcccagctaatgttttaaaatttttgtagagacaggggtctcacttcttgtcccagctggtctcaaatctggcttcaagcaatcctcctgccttggcctctcaaagtgctgggattaaaggcatgagccattgcatcctgcccaagctaatttttaaaaactcagaaataaatgctgtatctatcaaataacaaattacatcctttagttacagggctcctgtactcaagaggcaggttggcagaatgagaagtgctgtaggtaggcctgtaatctgaagatgcaggttctggtcctgttcacactcaggtccctcacgtgaaaggcaagagtaaacatgaaataccgtgatttctccttatttcatgtacaaatgctagacaagtgtaacatctttgtggaatcacttttcttctgggctactataaactcttttttttttttttttttgagacagagtctcgctgtgttgcccaggctggagtgcagtggcgcgacctcagctcacttcagcctccgactcccgggttcaagcctcagctcctgcctcagcctcctgagtagctgggactacaggcatgcaccaccatgcccagctaatttttgtattttttgtagagacggggtttcactatgttggccaggctggtctcaaactcctgatctcaggtgattgcccgccttggcctccaaaagtgctggattataggcatgagccactgcccccggcctactataaatttttgaagggcagatgctgtcatctttttccacattctccatagcccctattatggtggtttgaaataagaaaaaaagtgtgttgaaggaatgaaaggttgcctgagtgaatggaagaatgtcctctatttcctgtttccagctccccagctccccatctgccttggggtggctgggaggggataactgtcattcagacctggccctaggccaggaaaacgggtttgtcatggaaggaaattgaagatgctgcgtttacattggagatttgctctcaatttcctatcggactgcgagcttcctgaatggggtataggagcctgtcattcatttttgtttccactgctcagcttccatgtttggtaccggctctcaagatgctttgagatggactaggcaggagatctgaggatcaaaagctcaggctcaaatggagcagagagagcacaacattcccatccttagactgctctgagagaaaatgggcttgctggtggaatagagatgggtgggctggaaatgggatgcacaaaaaaaggcatatccccctcgacacccactcatgccccaattttgaaggaaaattttcatcctggtgtagggaaaaggcaaattccccaggatgtaataaggaacattttcaagttgtaagaaaccggaacatctttatatcattcattcgatcaggaaaaaaaaatttttttttgaatcctgtcaaacctggatccctttgtatccatctacttagaatattttttccttctccctactcctttcctctttttgttatttttcttcttctgctgttgttgtttaaaacaattcttttctatattggagcaagaaacatttcaccagactgtgaggatttggcccatactgtgaagcaaaggggctttctaaactcaattttctttcttctttttaagtcccccctttcccctgtccctcgggagagacaacagaaaataattgatccatcatccagtatcaggcccaggagatttacatgcaaattcctcctcgacccctttccaaatttaaaatcctagaagggaaaagaaaaattctaaaagtagcaggaaccctgctggccacaccccaccccttaccaggtgagagatgtggaggggataattcaccacaaccccccagtttcctcccgcgtcacacacgccacccctctctggtgtggaaccacttaagatttgggtaaaactcccctctcgccctggagacgggatctggaagcttttagggggcggaggtagaggtggggaggcagaaggaaaattccctcaaacgttcgtcaggcctaagagagtcgtcccttcactcaaaattgcccgtcaccccccgccccccaccattaactttcgattaagacctcctccttagggcaactaaactttactttgcacaattaagatttgccgcagaagaagcgggagggagaagccgcagctccgggccattctcctttccctcgctccctccaagccccccgccccaaccctccagctccgggcctccgagttcctgagttttctcactttgaggtgccaccgaacacaaagaaccataatgggctcctttgtgttggctacggggcaattacgcctcggagtcctggtccctttaagagtctcttaaagagacaggatcccatttttcagagggttttttaagggtgtgtggagggggagggcgagggatctacgtgtaaagtgaagtgaaactttcgcctgggctccagaaagagcggacagaaaaggtctttgtaaattgttagtttttttaaagtctgttttaatttttaaatttgagatttttcactcgatttgaaaaattggactaggaataggtggggttcgaggatcgggggcgggggcaagggtttaaagagtccccacccggcagagcacctcggcccgggaagaggagtgagccagggtcgagtagtgtcccccgatctcgccgcggcaactccggagaaatcccgggctgggcaaacagcccttaatataataatagcttgtctctttaaaaagcaaaagggggggaaagttttgttggcatctggtttctgatctcattatgttgtggtcgaccaatccagccctcgggcctggtcctcgggtttaaatctgattggccgagagcacattttgggttggtgcttagagctcgacggggcggtttcaaggatcccttttttggggggctgaggagagggcggggccgccagcgggggcccccttgaaaccgactaattgggatcggagaggccgaggtgagggctggaggaggcacaaagaagtcgctgggtgcagaagggaggggagagggggagctgagaggcgagaggaggaggaagaggagagagggcagcagcgcgcggtgtctccggctgctcagtccgaccgcggcaagcaagcgggcaggcgcaccgccccctcccccgcccggcctccccaactctgcggccgcgagtaaagtttgcaaagaggcgcgggaggcggcagccgcagcgaggaggcggcggggaagaagcgcagtctccgggttgggggcgggggcggggggggcgccaaggagccgggtggggggcggcggccagcatgcggccccgcagcgccctgccccgcctgctgctgccgctgctgctgctgcccgccgccgggccggcccagttccacggggagaagggcatctccatcccggaccacggcttctgccagcccatctccatcccgctgtgcacggacatcgcctacaaccagaccatcatgcccaaccttctgggccacacgaaccaggaggacgcaggcctagaggtgcaccagttctatccgctggtgaaggtgcagtgctcgcccgaactgcgcttcttcctgtgctccatgtacgcacccgtgtgcaccgtgctggaacaggccatcccgccgtgccgctctatctgtgagcgcgcgcgccagggctgcgaagccctcatgaacaagttcggttttcagtggcccgagcgcctgcgctgcgagcacttcccgcgccacggcgccgagcagatctgcgtcggccagaaccactccgaggacggagctcccgcgctactcaccaccgcgccgccgccgggactgcagccgggtgccgggggcaccccgggtggcccgggcggcggcggcgctcccccgcgctacgccacgctggagcaccccttccactgcccgcgcgtcctcaaggtgccatcctatctcagctacaagtttctgggcgagcgtgattgtgctgcgccctgcgaacctgcgcggcccgatggttccatgttcttctcacaggaggagacgcgtttcgcgcgcctctggatcctcacctggtcggtgctgtgctgcgcttccaccttcttcactgtcaccacgtacttggtagacatgcagcgcttccgctacccagagcggcctatcatttttctgtcgggctgctacaccatggtgtcggtggcctacatcgcgggcttcgtgctccaggagcgcgtggtgtgcaacgagcgcttctccgaggacggttaccgcacggtgg

SEQ ID NO: 7225 - DNA, 6000 bp, Homo sapiens
gcagtgcctggtctattgttgacctaatttcactagctcttaattatttatcaaagtggctgcttcccattccagcctgtgaacatcttgagggccaggaccctgttatatttatctttattagcctcagtgtccaacagtgactggtacctagttgctcctcattaaatgtttgttgaatgaatgcacagatgaatggagtaattaatacaatatcccccaatgttcatgggattttaaagaggccactttcctagcctcatgcttcacaaacattccagaccagtgctactccaagcatgatctacagaccggcacctgtctgcaaactgtgttgccagtttatgacctggtaagtgcagaaattgagcataagcatttagacttttttttttttttttttttttggagtgagagttttgctcttgtcacccaggctggtgtgcaatggcgtgatctcagcgcactacaacctacgcctcctgggttcaagcgattctcctgcctcagcctcccaagtagctgggattacaggcatgcgccaccatgcccagctaattttatatttttagtagagatggggtttctccatgttggtcaggctggtctcgaactcccaacctcaggtgatctgcctgcctgggcctcccaaagtgctgggattataggcgtgagccatggcacccgacccatggctcatatttaatctccacaactattgctatcatcctatttttcagggggaactgaggcttattgaagttaagcaactccccaaggtcctagagagcagtggtagggcagaggtggtgacccaagcactttgatccacagctcacgcctcagccacatcactggcagagagtcaagggactcaacagaaacattcatgctaacttctcgggttctggaaagctctatgcaggaggtgatgtttgttctgagccttgaagaaggcataatggggaggggcattccaaggcagaggcacacaagaggcaaccgcgtgaggggagtctggtgaggttgggccgggtgcggtggctggtttcaaactcctgacttcaggtgatccacccttctcagcctcccaaagtgctgggattacaggtgtgagccactgcacctagctacattttgacatttttaagccattagacagaatagttttatgtccatttgatgtgctagtgtttaaaacagggctttcattttgtctttctttctttctttctttctttctttttttcttttttttttgactgagtctcactctgttgcccaggctggagtgctgtggcaggatctgggttcactgcaacctcctcctcccaggttccagcgattctcctgcctcagcctcccaagtagctgggattacaggctcgtgccaccatgcccggctaatttttgtacttttagtagggatagggtttcaccatgttggccaggctagtctcaaactcctgacctcaagtgatccacctgccttggcctcccaaagtactgggattacaggcaatgagccaccacatctggccttttattgcatttttctaataattcattcccgcagtgttttgcaatcgcattggcctgtgacagattagaaattttaaaatacagaaccagttctttgccacagttgtctgagaagtatggttccagaccagcaacctcccggggatggttaagccagtggaaccccacaggtaggaagtgcctattcagccctgcctccctgggtctcacccatcattacatcaaatctgtctctcctactgttgggaaggacatgtgattgtcttttattcctgtttggaatcctcacatttctcctgtcttccaaatctggcagattaaatgaatgaaagctgattctgctgctggctggacaggaaggggtgagaaggcaagggagggatgggatgagaagagagtttggaaaaggccatcctgggaaaagaatgctggaatggagtaggagcctatcctgaggagggtgtgcagaggctgctctggctggggctgagggaaggaagggtgtaggagggagggacagggcagacactagcaccttcaccaagcccagcagatgagagccaggcccttgaaggtgaaaggaagtagtttcaggacaaatgaaaggggatattgaacctttttacagaaggaatgttaaacgccaaactttcctaacccccctgaggctgccaaggccaaaactataaataagtaggtcgaggaattaggcagaagcctcctcccctgacctgtccgtcagcgggatgtggtggggtggaggttaagtcagtgaaatcaacacagacaggatgaaatgagctatctgtagacgccacttcagaaagcgagaaggtctgactcctgggcaaaaaagtcaggaagagcaagacttgattgcagtccaatcaatggcattagcatatttaaagatcatgtcaaggggaggataatggggctcagagaggcaaaatttgatggtgtttattaagcagagagaaacacagaagctggagccgtctagtccttagagagtgtgctccaaggtgggaccagggagggagcaaggccttggctgggcctgggcaaagctaccagaggaccaaccggcttcctctcctctgattccacagcctactgctgctggtgaatttctgatcaagaattctgctccccacaaagaactgcctagagggtgggaccaagccacccctcacacttgagcatccagtccactccatcgtgatgatgatgatgatcatagtattggtgactacagctaaccctcattaagctctcactatgtgccaggctccgttccaagctctttacaaataccaactccttcaaactccccaaccaccctcagaagtagcgtttctaccccgattttatagatgagaaaattgaggcattgttaaataactctccaagtttatacagcttgtaagtggaaaagccaagattcaaactcaggccatctgactccagaacctgcacatcagactgccccgcacttaactgttgttggtaacagttagttgtccatctgcttagcatgtccatcccttctggggttggctggggcaagtcagggcccaactcggcacagccagctccggagcactaacctaatgggggttttgcaagactcgggactgtgtgcttcacctggaaagtgccaggtgtgtggataagccatgtgagcagctggcttcctgggcaatgcccctccccacttcagtgtcccaggcccctttagggcccagccctccaggcactgtgagctgggaatgaggtgaaggaggactaggcttaccctctgtgtgcctccattttctcaccagtaaactgtgtgtgttggatcttacgatcttctaaaataactccagctccaaatgaaggccagtggacccatgaacacgctggctcttgcccagtgtgctgagaagagggcaggagggaggagtagggtgggcacggcagggcacagggtgcagggcaggtgggttcagtttgatttcaaagccgactgcccgccgccccaggtgctctggtgtacccaataggggctgcattggccaggcggcctaggctctgcgggtggagtgaagatttctctacctcccagtttctcccttttcagctctggtaggagagaggaagagtgaagaggaagtcaaaagttctgttcatctggaagggctgggagttgcttcctgggatggggagctccgaagccaattcagaagacggccccggggtctggcggggaggcccaccgctgcccagagggctcggccggccgggagggggcgctgtgtcctccccacgccctgcccgcgggctcctagcagcgttcgccgcgctgcaacgcaatgcgcgcccggctttcccctgggcagcgttcagtgcccgcttgtcctgcagggcaccgccgtctccctttcatcctggggctcccaggtccaaagggttcccagatccagcctcttgcctgaaccaaagtggccaggcactcagtttgtaagatgaacaaatgaaggaaagaaggaacgaatgaataagggctcatcttgcagagcgttcgcgtctcagcgcgcaccaggcacatcagtgccaaaggtgctgggggtcgggcccagcgcccggcgcggctggaatgggggcggcgaggagctcctcctagccagccgcagggcgggaactgcccaaacgcaggtcgcagcctcactgggttccgcggcggctccgctcagtagggaccgccctgttccctagcccccaatagcctcgccctcataaattcacctgagcaccctggcccaagtcaccccagatccctgggacttcccaggccccgacctcggccgggcgggaggctgatcctttaccgcggcccccttcccccattcccggcttctccccgggctgcggcggccgccactgctgccagcgcgccccgaggactgccgcaaaccccgggcgcagggaaaggggatcctggcggcgggacacagagagcgggccgggggaaggggagggaacggaggaggcgaggaggagctgggagggagccgaggggcgaggcgcggaggagggaccgaaggggagcggaggggagagggagggggaggaaggggaggggacgagctgggcgagggggcggggagccgaggcgaggagcggcgcggaccgtgggggaggtggcgggggcgaggccggcaagaggcggccgcgggccgggctgcgtcgggaaacggcggccagacttccccgggaaggggcgagcgagagccgggccgggccgggccgggccgcggggccgggaagcgccgagccgggcatctcctcaccaggcagcgaccgaggagcccggccgcccaccccgtgccgcccgagcccgcagccgcccgccggtccctctgggatgtccgtaggacccgggcattcaggacggtagccgagcgagcccgaggatgggagggcacccgcagctccgtctcgtcaaggtaacagcccgccggccatccctcgagcgctggcgcccccggcccctggcggacgcgggacggggctgggctgtgggtgtgatgggggcgggggcgctgggagagccgtgcttaggtcggggaaggctgggctccggggcagcctaactctctggacctttggagccagggttgggtaggcagggggagactcaggtgagaaaagaaatcgtggcgaagccgccgggatgttggcggaggagggggtccgcccacccgggtagccggctccgcgccaagaatcgctctaggctctcgggcagacgcctaggggaggggaggttccacctcccacgcccttcctgcagacctcggccccgggactggagactctgaagcggggttcccacctcgccccagcgcccccaaacagctccccgactccgcacgcccccgccctagtcttgggagcgcgtcctgccccttcccctccgcggcgagctgcgagtccggagagatgaatgccgcccgcgcctgcgagcccttgatcaatatcgcagtctcgggggaggagacggtgcctctggcggcagttcctgttccccgaccgcggctgggagcgcgacgctcgttctccgagcctgggcacccgcgatccccgcgctgcgcggccgaccctgcgacgcggatcgggcgctggagtttaggaaagtagccagaccgcacgtccagcgtctgcccgctgaagttcgtgggcggtgggggcggcccgcgggttgtgtgagccagggaagggccgggaggccggcagtccggcccgccgctcgtgtcaggcgtcacttgcagccccaagcgctttccagagcgttttggttttgcagggtataggcgcgcccgctgcagccggccggagaggcgggtgggcctctgcgctgctgccgggacaccccgcttcgcgccagtctgggcatcgcctcacccggggctc

SEQ ID NO: 7226 - DNA, 6000 bp, Homo sapiens
ataggcatctgccaccatgcccagctaatttttgtatttttagtagagatggggttttaccatgttggccaggttggtcttgaactcctgatctcaagtgatccacctgccttggcctcccaaagtgctggtagtataacaggcatcagccactgtgcctggcctcagtttttgtttttttttggagacagggtctcactctgtcacccaggctggagtacagtagtgatcctgagctcaagtgatcctcctgcctcagcctctccagtagctgggactacaggtacgcaccaccatgcctggctaatttttaaaacgttttgtagagacaggatctgactatgttatccaggttgggtctgaaactccaggcctcaagtgacccacccgactcaaccttccaaagcactgagatgacagtgagccaagattgcaccactgcactacagcctgggcaacagagagagactccatctcaaaataaataaataaatacataagcaaacaaacaaacaaacaaataaataaataaataaataaataaataaattctggctgtgtctacctgggtatgggattgattgatccatgactgggaaattttggacaagtctgttagaaagaaggtgaggggctcttcttgaaaggctcttaagaaggtagtaggccaggtgcagtggctcgcgcctgtaatctcggcactttgggaagccgaggtgagtggatcgcttgagctcaggagttcaaacctgggtttctatcttgatgggagtgctggtaaacagggaaataagtttgccaaaactcatccaactattcttaaaattagagcatgtaattgtatgtaaactgtaccttgaatataaactttacctcaattaaaaggtttatgtccctttccatttaatccctgacccaaaccctccaaatttcttttcttttcttttctttttgagatagattctcgctctgtcgcccaggctggagtgcagtggtgtgatctcggcttaccttggcctcccgggttcaagtgattctcctgcctcattcagcctcccaagtagctgggattacaggtgcctgccaccacatccagctattttttgtatttttggtagagacaggggtttcaccatgttggccaggctggtctcaaactcctgatctcaggtgattctcccgcctcggccccccaaagtgctgggattacaagcatgagtcaccatgcccgacccctctaaacttcttgaccttgtgtccaacaaactcctagtcaccaccctcaaattatgctaatccttgcctctgcaccttttcttgtgctgttccctgtgaggaaacttagcttgcccctacacctggttaacttcctatcttcttttaagactcctcttccaggaagccttcctgatcttctcttccattcaggatgggtgaggtgcctttccacaaaatcctgtattgcattgactacatcttcatcacacatagattttattttataacatttttgtctaaatattctttttccactttaaactctgagctctttgagacaggaactgggtcatattctttttttcttttttatatttgtatttttctggtcttattctcatagaaaggactgagtcatattctgctttgaattccagactctagcaaaatggctggcaaacaatatgtttgttgattaaataaatcgatgaattaaatcaattttttcccctaggacactggcatgaaactttgaataccatattatatgacaggctctttcagttgcaagaaacaaagactcagatatgtgggaggattccagaagatacccttgcccttggtaaggcactgacccaacttagtccgaggggcttgtctgtgtcatggcccctctgctgctctctgttcagcttgttgcttccctttttttcttttcttttatatgtatattttttgagacagagtctcgctctattgcccaggctggagtgcaaatctcagctcaatgcaacctctgcctcccaggttcaagcgattctcctgcctcagcttctcgagtagctgggattacaggcatgcgccagcatgcccggctaatttttttgtatttttagtagagatggggtttcgccatgttgaccatgctggtctcgaactcctgacctcaggtgatccgcccgcttcggccccccaaagtgctgggattacaggcgtgagcctccgcgcccagcctgtttgcctcccttttctgatcagcttcctctgctcacctttcatttctccttcctcataacttcagcttgcatttggtctcagcttcctgtggccctgactttatctgactcaagttggcatttgtgaaggtaataatctaacaagctcctctccgtttttcagatccacatcatggtcctatcatgtggggaactggcctctggtccaatgagcaaagatgggtcccacaaaatgtagttgcttggagagcagggcctgacagaaggggtggggaggagagtggcaggcactgaggcctctcctattctattaatgagcaaagtgccttttatttttgcctctctttgctcctgaataatttttctcatccttcattttaggaaagccacttatcttcttgatgcttagggtttctagagacaagggatgttgaagctggaaggaacttcatagctcatcttggtcagatcccagcatgtgctctgtataacactaggctcaaaagatgcttcatgagaaaaaaaatcaagatattccagcattttctttggatttaaactcacaccaggctcaaaagatgcttcatgagaaaaaaaatcaagatattccagcattttctttggatctcagctcacaccaggagcatacttctcagtggttcaatttgcttggcaggatctctggtcttctgcttggatggatctctgcagggtccagcgtcctctaaattggaggctctgaatcagggattcctgaaaaggcacaagagaggcccaagcatgaacctcttgaaattgtttgcaaacttcagtcagtgttgtgtacatgtgcatgtgtgtgtgttcctgagtgtccatagctttcatcagattcttacaggtaaatatcacccgagagaatggataagaaccactgcttttttttttttttgagacagagtctcactctgtcacccaggctggaatgcagtggctcagtcttggctcactgcagcctctgggttcaagtgattcttgtgcctcagcctcctgagtagctgggattacaggttgctccaccatgctgattgatttctgtatttttaatagagatagggttttgccatgttggccaggctggtcttgaactcctgacttcaagtgattcacccgcttgggcctcccaaagtgctggaattataggcgtgagccatcacacccagccaagaaccactgctttaaagggacattggttgactgtgccttcctaaggtaaaggccttcttgttttcttccaacttaaacattttatctgctacactcaataaccatcgagtatgtttaagagaaagtgctttatataacaaagcagaaaggctcttgataataacttagaggcttcatccttgcatttttctcaagatgaaaacgctaacataatgagctgtcaaggtaggttcatcaattgtaacaaatgggccactccagtggaggatgttgatcatgggggacgctgtgcgtgcgtggggagaggggatatatgacgtgtccctataccttccgctcaattgtgctgtgaacctaaaactgctctaagaaataaagtctattaaaacaagcaaaccagccagctgcagtggctcactcctgtaattccagcactttgggaggccgaggtgggtagatcgattgagcccaggagtttgtgaaactccctctccacaaacaatttttgtaaaaattagcggggtgtggtggcacgtgcctgtagccccagctactggggaggctgaggtgggaggattgtttgagcctgggaggttgtagctgcaatgagccatgattacgccactgcactccagcctgggtgacagagcaagaccctgtctcaaaaaaaaagttaaacaacaacaaacccaacaaccaactaaccgaaacactaagaatcagagaagtaaaatataattcgcttcatccagacagctagcccggtgaggactacaaccttcctctcttccttcttcacttctttgctctctctttttaaacccacatcttagcaattcctctgctattgggtcattaaatcgccacctctaatttttttttctaagcatttattgagggccaagcactgtgttacacatctcctcattaaaatggtatagcaaccttttctggtcgatattatgatcccatttttcaatttttacttttgagtgaaggacattgattcttagagattgtaaggaacttgcccaaggctgccggctggttagtggcagagctgggatgggaaagtccgtattttccaccgcgctgtattagtgagggctctttgtgtcacttctgtgcataactccgccccaagttaaaaggctcgctgctctcgacaggtcctcctcctcctcccgctaggtcctcctcctcctcccgccaggtcctcctcctccttctcctcccggggccctgccctgcgggtctcacctgctgctccgcggggtcccggcgggggccggatagcgccccctggcggcaggtgggcgcccgcgcagcgcatgctaatgagcccgcggcgccgctcgcggattggctggcgcggattccagctgctttccaagtcagcggcgcctagtgagagtcaggggggcccggcccgcgccctccccgcccagccgcctccccgtcgacgcccagggctggggcgagccaggctgcctttcgaacttggggggcttctcctcttgtctcccactggtgctctggctgtgaatccatccaggggccaggatgacaatccgacaccaaggccagcagtacaggccgaggatggcatttctccaaaaggtaaccctggcccctcacctggaccctgggaggagggcgggggaccgcatctgcgaagcgtccgaggacaagaggggcaggagtggagagcacccctttgggtcgatttgtgctgctcgattttattaagtgacttctttgctgtgtgtgtcgatattgatggctataataattaggttttcgtgtgccctgcctgtagtggagaatctgaagccagcgctgatggtctgcgggaggtgaaaacaacctgttactcgggagaggcaggttcagttcaggctgtggcagatttgagacagcctgctgatattgttgtaagacgaccagatgtgacattgccatttttgccttttttttctgatcccaaactgcactattttaaagtgtgtgtgtgtgtacacatagaccatgaaaacggggtgatttgtaggataaagggccaccccatttacaatgccctgagagccctcatttgagtgtgtctatctgtgcatctcctgctgtctgcgctggcggcagaagtcccaaccttttcgcttcccttgcgaatgctttcccagacaaagtgaccgggcacagggtgtgcacacaggatggacatgtgggaggtggaatgcacctgtggggtgatgtgtttggggacaaagtggttcatttagttctgagcttctggtataatcactgtccgatgagatctacagaggattaggtcccgggtcacatctttgtccttcctcccacccgtagccacttttcacagcgtagtgtccatcttcttaggcttatcttgttgagtagaattagttgaatgttttgtgacaagctgagctctccctgagcccctggagctcagcaaatttgtatagtcagtgaccgctgtcctgatttgcccaggactttcaatgctaaaacctggacagtcctggggaccccgagacgg

SEQ ID NO: 7227 - DNA, 6000 bp, Homo sapiens
gactgtgactgtcgcctcccccaggggcaagctgagccaggtggcagggctgggcatagagcagatgcaccctgccccgtgcaccactgcatgggtgacccctgcccagagcggggctggccaccttctagctctgcgctccagccagcccaaggctggggactgtctgccctgctatttcctgacttgaattctccttccccaagtggcctcaggtctctgggttcacctccttggaaggcttgttttaccagcttctgtcttatttcccactgtaatttttccttttccaggctaaggaggcatgctgcagacctggtgtttcactcccaatgtaaggaaactgaggcagggagctaggttgcagtctcagttgggttagtgcagaggagtgctcttctaaaaacaaaggcaacagagagaggaaagtgagtctggagctcagcaaaagcgcgcgcgcatgtgtgtgtgtgtgtgtgtgtgtagggtggcatgctgtgagtcctcacctttgcagggagccagcagggtctgccccagttcttcgtgggagggactcctttgagcttggctaaccgaagtgggtgactcccaagggatctgactccgaggcagggctctaggttggggatgaattaaatcttcctctccctggctctctggatcccaggggccagctcgatgcattgatttctgcctctggctggcacagagacccagcagctccaccccctctctggagccgcagagagagcaagaactgggtctggcacctgcctcgtccgggttggcagagttggagctctccagcccagcggaaacccctccagctgccctgagtttcatgcctggctcccctcgtccaaatccactatcccttgcccactggctgcccgcctgcccttcccatgggctgtaccatgtcctggctcaacccagcaagtccaagtctccatgcagcagggcagccctggtccctgagggcatcccagcttccaagcacagtgctttcgataggaatgttattgatgataagagaacccgctactcagaaaactgtcgtttgatatttgtgcctctcaactccagcctccttcagcctctgcatcagtcattctttgttttgttttgcttttctagaggcagaatctctcagtcaccaaggctggagtgcagtgacacaatcatagctcactgcagcctcaaactcctaggcccaagcgatcctcctgcctcagcctcccaagtagctgggacaaaggcagtgccaccacgcctagctaattttgtgtcagtcattcttgaagggtagccacctgcattagaatctcccatgctccaccttggaaccaggattttcaggggcagggtctggctgtctgtattttctaagtactcccagacaattgttatacgcaccccaagacaagcgctacctactagagctagattggtggcatttcaagtgtgaaggaagctgggaggccctggatcatcaagaagacccggaagagtcacctctgactccccatctctgacaggccccacctcccattatttctaatctcccttatccctggccctcttcgaatgatttagaaactagctttccacatagaggcattctctgttctcattttctttttttctttttttttgagacggagtcctgcaccattgcccaggctggagtgcagtggcacaatcttggctcactgcaagctctgcctcctgggttcacaccattctcctgcctcagcctcccgagtagctgggactacaggcgcccaccaccacgctcagctaattttttgtactttcagtagagacggggttttaccgtgttagccgggatggtctcaatctcctgacctcgtgatccgaccgcctcggcctcccaaagtgctgggattacaggcgtgagccaccgtgcccggcctctcattttcgtaacagagcattgctggagtgtgtgtgtgtgtgtgtgtgtgtgtgtgtatggtatgcatgtgcacatgtgtgtatgcagtgcgtgtgtgtgcatgtgcctatttatatgtgtgtgcgtattgtgtgtgtccatgcatgtgcgtggtgtgtgtgcatgcatatttgtggatatgtgtgtgtggtatgtgtacatgcatatgtatgtgtgggggagtgtcctggggcgggagagaggaagccaggtatttgccctgagccctttttttttttcttttgagatgaagcctcgctctgtcgcccaggctggagtgcggtggcgccatctcagctcactgcaacctccaccttctgggttcaaacaattctcctgcctcagcctcctgtgtagctgggattacaggtgtgcactactatgtgcagctaatttttgtatttttagtagagatgaggtttcaccatgttggccaggctggtctcgatctcctcacctcaggtgatcctcccgccttggcctcccaaagtgctgggattacaggcgtgggccacggtgcttggccaagtctttgagaggaagaatctgcagcactgcatatatatatatatatatatacacacacacacacacacacacacacacacacacacacacacacacacacatatattggccccatggatctgggagcgccataattccttgaaggcaagtctgatgaattcacaagccagcaccatcctagagaggagtgttacttcccgccccagacgggagtgtttatagcccaagccatgtgtctgaggtcttatgaccaggaacctcagaggcaggatttatttttcgagttctgagttgtgcttgacttttcttttttctgatttttgttgttgttgttgttagatatggggtctcactctttcacccaggctggagtgtggtggcactgtcatagctcactgcagcctcaaattcctgggctcaagcaatcctccagcctcagccttccaagtagctgggaccacaggtatgaaccactgcacctggctacttgacttttctttccacaaccccatgttgtgtttttgttttgttttgttttgttttgttttgtttgagatggagtctcactctgtcgccaggctggagtacagtggtgcgatctcagctcactgcaacctctgcctcctgggtgcaggcgattctcctgcctttgcctccggagtagctgggactacaggtacccactacctgtagtggctggctaattgttgtatttttagtagagacggggtttcaccatgttggccaggatggtctcgatctcctgacctcgtgatctgcccgcctcggcctccccaaagtgctgggattacagatgtgagccaccatgtccagcccatgctgtctttttggggaagtttttccaattgtgataagtgatccctttggacaaggaatctctagtactgtaaaagcaacggaaaactcttgcaagcttgggaccagataaagagtttctgaatctgcaaagggggtgatcagacactggactgtggtaacacctcagaggggtgggctccagacgcagcctggccctacctggcaccctcccttgcatctgtagtgcctcctgtcctgacttagggttccctgagtcactgggccacttggactggggacaggagatcatgggtttaagttccaggccccgtgtacacaggggagcacataaaggtaaatatgaggccgggcatgatgtctcacacctttaattccagcactttgggaggctgaggcgggtggatcacttgaggtcaggagttcaagcccagcccgggcaacatggtaaaaccccgtctctactaaaactacaaatattagccaagcttggtggctggtgactgtaatcccagctacttgggaggctgaggcaggaaaatcgcttgaacccgggaagcagaggttgcagtgagctgagattgcacccctgcactccagcctgggcaacagggtgagactctgtctcaaacaaacaaaaacttaaataagaaggaatccttggccaggtgtggtggctcacatctgtaatcccagcactctgggaggccgaggcaggtggattgcatgagcccaggagctcgagaccagcctaggcaacatggcgaaacaccgtctctacaaaaaatacgaaaattagctgggcgtgttggtgcttgcctgtaatgccagctatttgggaggctgagatgggaggatcacttgagcctgggagttcgaggctgcagtgagctatgatcacaccactgtaccacagcctgggtgacagagtgagaccctgtcttgaggggtagggaggcagaaggaaaaaaaagagagagagagaccctggtgctcaggcctggtggctctggctggactgatcagggctgaagacttcagagaccaaaaaggtcaaggtgtggccgggtgcggtggctcacacctgtgatcccagcatttttgggagacccaggtgggcatatcacctgaggccaggagctcaggaccagcctggctaacacggtgaaaccccgtctctactaaaaatacaaaaattagccaggcatggtggcaggcacctgtaatcccagctacttgggaggctgaggcaggagaatcactggaacccaggaggcagaggttgcagtgagccgagatagcaccattgcactccagcctgggtgacagagcgagactctgtctcaaaaagaaaagaaaaaaaaagtcaaggtgtgcggctgggtcttcataacatctttcaccttgcccaggctggctcagaggtgactgccttagtggataggatcccttccaccgtgggctagcagcctaccctggtcactgacaccacaccatgtaggaaagaatcgccaccaccaagaaggggcctctcacctctgtataggctgtgtgctggctgatgacgtggttgccctgtcctgtctgctgctgccactgagctggacatctccaggctccatctcttgaaccatggatcccagcgttgttagcaatgagtattatgatgttgcccatggagcaaaagatccagtgggtccccacttccctgcaggacatcactgctgtcctgggtacagaagcatatactgaggaagacaaatcaatggtgtcccatgcacagaaaagccagcattcttgtctcagccattccaggtggctgaggtctccacaggtcacagggggaagctgggacctccgaataaggccatccaaggactccagcagtttccgccaggtgaatccagctgcctcccagaacaggccttctatggggtgggatggtaagttgctggaaggacgtgcatggggcatcattgtagcaaactcagtccccctcctccatctctccctctcctcgctctgaatccagggagctctagttttctgtgtagcctgtgtgacagccttggttgaaacccttgtgttccgtctgaagaatatttaaggtttccagtcaagtgtacatccctcaaagaaacaaagtgggcttggcatggtgactcacacctgtaatcccagctctttgagaggccaaggcagaaggaccacttgaagcctggagttccagaccagcctcggcaacacagcgaggccccaaactctctctatatctatacataaaatttaaaaaacaaagtgtagggacagggtgggcactcggtaaatgttggcagggaccctccttgcccctcacccatggcagctccttgaagagagggtcagcctcctctcacccctagcctcctgctgcaaggaggtggtggcctggggcgtcatctgtgctacttgcactttctggggctggggtcccagcactccaccagaggacctgccctgagcgggcagctccgtctccagtcccactgtgccacccagggtgcctagccaaaccatgggactttcaggcttgcagggtcaggatgtggccaccagggggcagcagggcctgcgctgtgagtatccgagggggggttgggatggggagttccagg

SEQ ID NO: 7228 - DNA, 6000 bp, Homo sapiens
atgggcagccagttgtggtgaatgagggtttcactcgcctgctccctggccctggcttcctccttcttaaggggccacgatgggacccgagtcctttcaaaaaactaggcagttcccgctgctccaagcagaaagtcctatgagcctaagagaaaaagagatttggccagacactgcagccagggcaggaaccagttaatatgagcctgggagcaaggagaggtgaaatgctgtttaccagcagccggctgtgggttgcagggcacccagccacctagcacaggattccaggccccaacttgtcaggaagcaggagccccaccctcagctcagtgagggactattcctccccatctggggcctggctgcaagacctagggctctccactccccaggtagagggagcaggccttctactctgtggaggaggaaatggctcctgttggagattctgcagggtgagactgcaatccagaactcctgctgcccaggcaaactgggaagtccctctaaacaacacaactgacctctggctctccctgggtaggcctctccatgcccaaagccggggtgccagggcctcctgccctcatctctgatgcagggcattgcagccccatggcaggtgacttctccagtaggcactggggcttgcctgcttctcagaaagtggggtacgggaggcagggcaggggtggtgctgtttgcaaggctgctggtgtgagggggaagatcggccgtggccagccacagaataacggatattccacaagcatttactgaaaacatttacccacacccgtctgagtgccagatgccagggaaaacaagatgagtgagacatgtccctggctctctagaagggcacagtgtaattggagaaaaaacaatttagaaggctaattatgatacactaggataaatgataaataaatgaatgtgtaacaggctgtgggtaaatagggcaactcacaatgggtctttcgtgggaaggtgaggatcgcttcacagaggaaggaacattggagctgagctttggggcagggcagattttttaaaactttttggtcacaaagaaaaaggatggtaagaggcataaaatgttcgaggtggaaggaacatcacacagagcatggcatggcaaagctattccaatcatggtgaaacagaactgaaagaatgccagcttctgcaagagtttgggttaaaaaccattaggccaagcacggtggctcatgcctgtaatcccagcactttgggaggacaaggagggaggattgcttgagcctaggagttccagaccagcctgggcaacatagtgagaccccatctctacaaaaaaatgcaaaaattagccatgcatgatgatgcactcctatagtcccagctactcgagaggctgaggcaggagggttgcttgagcctgggaagttgaggctgcactgagccgagatcgcagcaccgcactccagctggggtgacagagtgagatcctgtttcaaaaataattgattaatttaaatttaaattataaataaaaactgtcagacctgtcaaggcttagagggaatgacaatcatgccaggaaaggggaggctgatcgctggctccctgtaagcaccaggcttgtgtgaggaacattccagacacagcttcattctgggggtgatgttatcatccagttttacagttgaggaaagcagggctcagagagatgaagcaactcatccaagtcacacagccggcaggtggcacaggtgttcccacctttgggccttgtcaagacctcagacatctctgaaggaggctttccaacgaacaaagggtttctcactctgccagtaggaatccaactcaggtgggggtggaggtagttgggtggtggacacagacatgcttctccgcaatccagaatctttttttttcctttttatttcatatattaaaaaaaataaaataaataggctgagcgcagtggttcatacctggaatcccagcactttgggaggccgaggcggaaagatcgctggagctcaagagttcaagaccagccagagcaacacagtgagaccccatatctattttctttttcgtttgtttcaatagagatgaagtctatgttgcccaggctggtctccaactcctgggctcatgcgatcctcccacctaggactcccaaaatgctgggattataggcgtgagtcactgtgctgggcctcaagatctctttgaacagtagcactctttgaacacttctcagagtgtagttttttggtgaaaacagagtttgcaatgggttctacgcctactggggtattaaatcaaagtgaaggacatttgggggcacagaggaccctgtggctggagtctcggaaagcagcgccacctcccacagaacttcccttccagcatcacaggctcgctgggtccagcagcccccaccagggtctgactcatggtggaggggtctcatgccttctccaactcttgcctccccactctggaccagcacaggcccccgggactagagcagagaccaacagggaccctgaaggctgaagcccatgtcatcggccccaaaggacttgctttgtcctttaaaggcaaatcctgcccaggaagtgagacggagtgaacacaaaaagagcaaacagctctcaggaaacctccctacatatccgccgccatctaccatgcagggctggcagtgggcagggctccgctgctccgtccaggcctcagatgccccagcctttcccccgcctgggtcgggagggagtggtaaagagttgcctttttggagaatctaggtagggaaaagagattcccaaagcttgaaaataaattgaaacagatctgccagatccacaattcatctttggcttcttaaggtcacaagcagtctcggggactatttccattccaccttcctctagctcttagctggcttttcacatatgctaatgagcggcccctcccagcacactgtgttcagcaccagttgcctgcttcacgagaactagtcccagcccacagtcacggatgcccctcgcctaggtctgacccgccgtttgcctttctagcgttggcactcaactgcttggaccctacaagcgtttgcctccctggcatgggggcctctgaatcttagggtgggaggtggagctacggaagggagcccaggagtgagcaacagatcagcagcagcactgcgcccctcttcttaatattgaagagacttgaaacaattcagtcttcgccaccccagaccagcccgtgagggcaaggccaggaagggatacagggttctagagaaccagggcctcaccgccagctccggccgctaagcaaacattccctccaggagtccgagaagccggtgtgcgaggggaggaaccagcctgaggtttatcgctccagcaactccgggtgattcatagagtttagactcccggttgtcgtagaccgcggcaggcacgcaaacaagcagcccgggagataccctcccctttcccagcccccgctcctccaccttgctaccccctagcccgtgaccagctgcctcccctccccctcgcgggcgctcagggttgagcaaacactccgggccgcccgccccgccaccagctggctccgaccggcgcaccgctggcgatcccccaggcaattcggcgtcatgagaaccggcaccccgagactcggcgccctgccctccctccgcgtctccagggccctggccaggcccaacaacctctccctcctctgtgcgcctcagcccctacgggcctctggcgcgggctaactaggcctcgctgcgggcccccaggactgcgcaccccaccccccgcgaggccagcagccccgggggaaggcggccggaaaatctcttgtttatcgggctggataagtaccagcctggattcgcttcccaatttctgcggtccagcttcagcagattcctggggccggaggggaaagggtggcaacccacagatccaccccggaacagggagtggggggtggggctggtgggaacctgacctcctggaaaggacggactcggagtcagagccaacgtgtcccggagcgcagaggcccagggggtcgcgctaaacactgtacctcggggaacaaaaccgtgaaggctaattaggacaagtcggagcagggaacggggacgccgggaggggagagcgcgctccgagttgggcagaacctggaacggtcacaggaaacccgggcgcggggtagtcgggccgagggggacctttgcccacggtccagagtggtctggactcggcccacgcgtgagaggagcgcttggtgacgatcccacgtacgcttggtgactggtggaggtcccagagaaggaccgtgcgtgcaaaaggcgaacctcggtgtgcggtgtgtccacgtgtgcaagctggggaggggagggggcgcagaaggcgtgacaaagacggactctgtcttgagtgtgcgcctcgctccggcccgctcccagcgaactgtgcctgaagtgtgtctcacgggagggccaggacgaaggtgacaaaggctaggtgtcccccacggagacgcgccaaggtagccccgcgcgtgtccgtaggcgcgctctctggaagacgcggtggggggtgcgcagggctgcaccctcacaccaattgccccggcgaaggccgagcccagaaagtgagtgcgcgtgagtgtgcgcgcgcccgcatgcgggggcgtggcagtcaacagcaacaacccacacgccggcagggccagaaactcccatctccctcaccagccggaaagtacgagtcggctcagcctggaggtgagtcggggcggggagggccgggcaggctttgttcctgtgtaaacggagcgcacgtacctggagcgcggcgggcgcccgattagcgccctgaatggaggtgatgtaacggtgatgcaggctccagcccaccctcgccgaaagcaaggagccctgcctggggacaggcccgcgcgagagcgagcaacccagcgcgcctggctcagcctcggtcccagggagaggcaggccctgcgtcccggcccgggccccgccatcccagccaggaccgggcctggcccagcgccccgcgccgcgtccctcccacccccgcccgccccccgcctggggctggagttggccccaaacgctgcgctggagcggggccggcggcgagtcccaggtaagggctgctgccttcccgctccgccgcccggaagagtcgggtcgggacggcggggagtgggcgagggcagaggcggggggactggacatcctgcgggctggggacgccgcgccaactccgctcggtcgctgaaagttttcaaacccgagccggctggggactgggggggtgggggagcccggcgctgcggctcgggctggagggaggggaaaccactccataatcggggtctccaagaggagcccctccaccgcctgcctctcggtgggagtccgcggtcactctctctcgtgggtggcgtcctctctgccgcctgctactgtggatgtggagggcaggtttctgtggccctaaaaatgggagagagtgactggttcccttgctccccattccagccacccagggagcgcaggtgtagaccccagtaccgtcgacccaagtagggacgagagggttcagaatccccctgagggaagtttggaaattcagactatcaaagcgcctccccttctggtagcctggcccctagatcccgaacccccactcccggctggcttttccagcgtcctttgcacctccatccccaggcccgcagtgttacacgctggaagacccaatcacttacaaactccacgatcaagatcctaaagcccgggagaggagactgttggaagtagggttttgtgctcctggagcttcctctccccgccggccccccacccctgtgccttcaactggactgggggagggagtgcattggggggtggggcgcattccagagtgacattcc

SEQ ID NO: 7229 - DNA, 6000 bp, Homo sapiens
gatcacctgaggtcaggagtttgagaccagcctggccaacatggcgaaaccccatctctactaaaaatacaaaaattagccaggcatggtggcacatgcctataatcccaggtactctggaggcagaagcaggagaatcacctgaacccgggaggcatgggctgcagtgagccaggattgcgccactacactccagcctgggtgacagagtgagactccatctcaaaaaacaaacaaacaaacaaacaaaaaaaacagctactcaggaggctgaggcaggagaatcgctggaacccaggaggtggaggttgcagtgagccaacattgcgccactgcactccagcctggcgacagagcgagactccatctcaaaaaaaaaaaaaaaaacaaagcaaacaaacaaacaaaaaaaacaatgctctagactttctagcatatttgctgatatagcagagtaaacaggatattaacaaaagcaaagcaagtcccacaatgatttccaaacatcttgtatgtgatactaacctgtacctctgaaaatctccatgccgtaaaccatgctgctgctgggattccttaataatctgaagaactagagtcgagattaaggaaaatcttaccatagcaagaatccaaacaaatcaaaacctgtaccatcagtctatatctgtgtcaaaccacaacacattaaacatttgtgaaatatagccaggtacggtggctcatgcctgtaatcccagcactgtgggaggccgaggcgggtgtatcacctgaggtcaggagttcaagaccagcctggccagcatggtgaaaccccgtctctactaaaaacacaaaaaattagccgggcgcaatggctagcacctgtaatcccagctactcgggaggctgaggcaggagaatcgcttgaacttggaaggcagaggttgcaatgagccaagacagcgccactgcactccagcctaggtgagagtgagattcagtcacacatgcacatgcacacacacacacacacacacacacacacaaatttgtgaaatatttagtacactggtgagatcttttgtaaccattttcaatatctatcttgtcacaggacagggctaacctacaggaaaactgattgcctgaactgttactacttgcaaactgaaaaaggagggcactactggccactggaaactgccaaaacccagtttaaattaagctgatggattctaaatgctgactataattggggtgcttcacaccaattaacacctagaccccacattttattcattcagattcaggttataaatgacatgtactaagcctccatttgcataatctccaacacctgccaaatctaactttccttaacagctgtgatgcttagagagtctatgattagcacatgtcaaccaagctaggctacagtttgcataaaagtattaaggtttttctttcaaaagaagaatggccagattctccttttaataatcttaaaatatttaagattatgtactaatctttagaaagtccaatgaccttcatctatataggtatagttttaatgtttcctcaacacttctctagagacatattttaaaatagtgaacgctaaaaggactctttaaattactaaaacgggacaaagagatataaaggtctcagtaaaatcagggctcgctagcgtctacttggaactattaccagtaattcaaaatatttaactccaagcgcctgagaactttaagcacattaagatgtcaagttgaatgtgttatttcagaaactcgcctacgttttctccatttgttattcatttcaaaaggtcacaaactagtaccacaagcacttggttgagatacacactgatggaaactagaaaccgattcctccagcttatatgaatgactgtcagcaagataaaatgcctacagaccgatcagaaaaaaatgacacaatcgatattaactacggtaacttacaatcaaaatgggcaacaagcttttcctgagtcaatctttacctccactttcaaagtatcgagctgtaggttttactactcagtctatgacgactgtcagacaagagtattaagccaaatgtcaagactgcagtttcctctccccagttcagtggctcaaggtgccaaagcaaggtgctcaaggtgtcacttggtcacaagccctccaactggacaactgcggggcaccaggggaaacctgcctgatatcccagtgccactggaagaaacggacctagccaggacggcgagggggacacgaggaaagactagtcgagagacagaccccccccggaattctgagcaccaaaaggtaagggcgagagaaactgcaaccctcggcctctcctgccaggacttgtcgggacccgccgcctctcccgcccccagccctccagttcgacacgtaatcattgcgagttaggcccgattactctaggatactctccaaactcaggctatccccaaattctttgtttgccttcgatccggccgaagggcgttcgttttctttattttcttcccctccggcaccacgtccaccgccgctaccgccgccgccactgccaccgccgccgccactgccgccgccgccgccgccgcctgggacctgcttctcagcagccatcttgcccctgcgccgcagagcaagacgggataggggaggcgggacgacctgggcgggtgagagctggacctgcctggccgggctgatgggatagcggcggactccgccgccgtcggcccttgctgcagcagggcgccatgtgctggagcgcgcctgcgcgagggatcctgtcatcccgggtccggaattgtggctggctaggtggggacttgaggccgcagtgagaccgtggctgctgagatctcagggggcagtcccacctcccacccactaagggcggagaaccggaggtggaccccaggtcctgcatcctggactggggatctggttcacgtcctgcccagcagaaagcaggagaccaaagatactggatttcggggtgtctgcatccccagggactcaagagatggggtcctccctaccggaacgggacaccccgtccgtaagggacccgcctctgcctgccctttcctctgaggctggccgtaagaacgccaagccggaggaagcgctgcgcagtcagcagacggtgtcctaacggggtgactttctcagaccgcttggggccgtggaccactgcactttggggccgtcagtccaaagagggagaagtgttgagacatgggaaaatatgaatttttgctttgcaccttctagagtctgagacctgggattccaatccccgctccgtcattagcggcagggacatgttgggcacgtaacttaatctccctgtaaatctgttccttcatctatgaaatggggataaccaatttaagtggttgttaggaagattaaatgacggattttttttttttttttagatagagtttcgctcttgttgcccaggctggagtgcaatggtgtgatctcggctcactgcaacctctgcctcctgggttcaagccattctcctgcctcagcctcccgagtagctgggattacaggcgcctgccaccacgtcccgctaatttttgtatttttagtggagacggggtttcaccatgttggtcaggatggtctcgatctcctgacctcgtgatccgcccgcctcggcctcccaaagtgctgggattacaggcgtgaaccaccgcgcccggccctgaactctattttgaatttcctcaaggtatacggaataaggtcaggagaaaaagaataaggatctgatgcattcagatttaactaactctcccatacatctcattcctttctcagcagatccctcttagaaggaagtgttaccatttccttgttacagctgaggaaactgaggcatggagccaaagacagagcctgacacaatagatgctcagtatattggattgaattggagggaaaacgttcaatgggtaagagaagggaaaaaggtggccgggctcggtggcttacgcctgtaatcccagcactttgggaggccgaggtgggcggatcacttgaggtcaggagtttgagaccagcttggccaacatggtgaaaccccatttctactaaaaatacgaaaataagccaggcgtggtggcaggcgcccgtcatcccagctactcgggaggctgaggcaggaggatcgcttgaacccgggaggcggaggttgcagtgagccgatatcatgccactacactccagcctgggcgacagagtgagactctgtctcaacaaatacaaatacaaaaaactagccagacgttgtggcggacgcctgtagtcccagcccctcagaaggccgaggcaggagaaccgtttgaacccgggagacggaggttgcagtgagccgagatcgcgccactgcactctagcctgggcgaaagagccagactccggggcccctcatccgcctccgccccgcgtttcctccccccgatctcccaggggtcctcttttgagggcaccccagcccctcgacggtcccgggatatcctgcacccctgccaggctgcagggaagcgccgaggcgcgcggagtgcgaggtccgtgctccctgcggcgcggcgcacacgcagggtccggggtcgacccctccaccgctccggcgtctgccggggaagtcagtccgcctggtcagcccagaacccccgactgcgggggctggagctcggaagcaggtacaagcgccactctccgcctgcgccgtggaatgcgcgccgggaccactccgcagcccttcccccagcgccgccggccgctgctggggacaacctcgccctcctgtctcttgctcctcctcctgaccccagcgcacccccatccccgccccagatgaggcaaggctccctccgccttcagcccggcagagtcgcactaggagttgcagcggccgcagccccgggagcttcccgctcgcggagacccagacggctgcaggagcccgggcagcctcggggtcagcggcaccatgaacgtctcgggctgcccaggggccgggaacgcgagccaggcgggcggcgggggaggctggcaccccgaggcggtcatcgtgcccctgctcttcgcgctcatcttcctcgtgggcaccgtgggcaacacgctggtgctggcggtgctgctgcgcggcggccaggcggtcagcactaccaacctgttcatccttaacctgggcgtggccgacctgtgtttcatcctgtgctgcgtgcccttccaggccaccatctacaccctggacggctgggtgttcggctcgctgctgtgcaaggcggtgcacttcctcatcttcctcaccatgcacgccagcagcttcacgctggccgccgtctccctggacaggtgagccagcgccttggcctccctgggagatgggcatccacgcgggggatggagcgggaggcgggactggggaccaagaagggacgcgcagagtgggacaggacactaagaaggcagtggaagacaagcgggcgcggaggaggaaaaagaggaataagaatgggggaccgtggtgtccctcggttagatgcgtcctggggcctggaagcctggagaatgtggctctccagcgccgcccgtgcctgacaacgcgcagcgtttcccagtacgacgcgtttgtgcgcgttcatctcgcttgagcttaatgccctccgtgagggtgggataggacaaagtgcccaatatacagaagagttgagttcctaagtaactcgctcagagtcgccagccagggatcgggtgcgtgaagtgaccgtctgtctcctgcagccaacttcaggcgcctccactgcgctcgcctccaagccacggtttggttggttggtgcagctggctcaggtccaggctgtggatcttgggtcctttgcaaggatccactccggagtcccagcgagcgtgcctaaaggtccctagctcagtcccagcccactctgcctctcgc

SEQ ID NO: 7230 - DNA, 6000 bp, Homo sapiens
tctgcatgctcagagcactacaggcacgcgccaccttgcctgactaatttttgtatttttttgtagagaccgggtttcaccatgttgcccaggctggtacagactgtagttaagagtatatatatccgtaggctgggagccgcggctcacgcctgtaaccccaacactttgggaagccaaggcaggtggatcacttgagctcaggagtttgagaccagcgtgggtaacatggcaaaactccatctctactaaaaatacaaaaattagccgggcatggtggtacccacctgtaatcccagctactcagaaggctgaggcacgagaattgcttgaactcgggaggcagaggttgcagtgacccgagatcatgccactgcactccagcctcggagacagagtgaggctaaaaaaaaaagtatatatatattaaatattatatttgttatgtatatataacaaatttgtgaacctgaacaagaaactgacagcagtaaaagaaacacagaccaggctgggcgcagtggctcacgcctgtaatcccagcacttttggatgccgagggggacagatcacctgaggtcaggagttaaagatcagcctgaccaacatggagaaatcccatctctactaaaaatacaaaattagccgggcgtggtggtgcatgcctgtaatcccagctactcgggaggctgaggcaggagaatcacttgaacccgggaggcagaggttgtggtgagccaagatcacaccattgcactccagcctggtcaacaagagcaaaactccaaaaaaagaaagaaagaggccaagtgcggtggctcacacctataatcccagcactttgggaggccgaggcaggcggatcacgaggtcaggagatcaagaccatcccggctaacacggtgaaaccccgtctatactaaaaatgcaaaaaaattagccaggcatggtggcgggtgcctgtagtcccagctactcaggaggctgaggcaggagaatcacttgaacccggaagcagaggttgcagtgagccgggatcgtgccattgcattccagcctgggtgacaaaagcgaaactctgtctcaaaaattaaaaaaaaaaaaaaaaaaaaaaaaaggaaaagaaaagaaatgaaaaagaaagtgaaggggagaaaagcatctgtaaaagcccaagggtggtaggatgagagctcgtttccctgtgcacctggggatgcacactcccctggaggaccagggaggcgccctcgtcctcttagggccactctaggtgaggagaaggaaccgtctattgtcctagaaaggccgatcctctctaggcttccaaatcgatggtgagctggaagagtggtgatgcggctcatcttcagagcgctttcttgtgctgtcgttgtcctccagagaagaggttgggggctgtgcaagatgggacaatgaccacccagggtaggcccatgtcatagtatggcagtgccgaggccttaaaaatctatggttttttgtttttttttttgaggtggagtttcgctcttgttgcccaggctggagtgcagtggcgcgatcttggctcaccgcaacctccacttcccgggggttctagcaattctcctgcctcagcctcctgagtagctgggattacaggcatgcaccaccatgcccggctaattttgtatttttagtagagacggggtttcttcatgttggtcaagctgttctcgaactcccgacctcaggtgatctgcccgcctcggcctcccaaagtgctgggattacaggcgtgagccaccacacccagccaaatgctgagttcttatcatgagtgatgatgatgagttatggctatttcgagctgctagaggcctgccttttttttttttttttttttttttttttattgtaatgcaggacgggaaatgcaacaaacagcctccatgttcttgctgtctggggatggtatgagacgtattccttcctcagggcctttgcatatcctattctctcttcctagaatgctcttcctccagagcccttatgtctctttcacctcttttatactctacccaaaagtctgccatcctatctaatagttcagtgtcctacctccctccagtcacacactttatagccccctttctcactttatattttctaaacagttgtctttgttttgttttgtttttgtttttgttgtttttgtttgagacggagtctcgctctgtcacccgcacgggagtggctgctcctgcatcctccacctcctggattcaagcgattcttctgcctcagcctctcaagtagctgggaatacaggtatgtgccaccacatccagctaatttttgtatttttagtagagacagagttttgccatgttggccacgctggtttcgaactcctgacctcaggtgatccacctgcctcagcctcccaaagtgctgggattaagacataagccaccacgcccggcccgtactacatattttatttactttttaaattattgttttgttttctcctctgattgtataattcacgagggcagggattattgttaggttttttttttcactgctctgtccccagagcctagacccacactatctaggtacatacaaatatagagaatgagggcctacagtggaacacaggactgtgaagtaggtcctgggaaagatacaaagaggtgtgagatgttacccttgcctaagaggagttacagatgaggtgaagtcagtacacttaggggcacccacctcaaatgaaaagtgaaatctggccgggtgcagcagctcatacctgtaatcccagaactttgggaggccaaggcagatggatcacctgaggtcaggagttcgagaccagcctgagcaacatggtgaagccccgtctctactaaaaaaaaaaaaaaaaaaaaaaaaaaaaaattagccaggtgtggtggtgcatgcctataatcccagctacttgggaggctgaggcatgagaattgcttgaacaggaggcggaggttgcagtaagccaagatcgtgccactgcactccagcctgggcaagagggagactgtctcaaacaaaaaaaaaaaaaagaaaagaaaagtattctcaggtgccaagccgagtgtaccaaatgcaaatgctgtaagaggaaagaaatcagtgtgggctgagcaaatgggagctccagaatatctgttgaatgaacaagctgttaggacttgctggctgtaactataatcaaataaaagaagcaaggagtcaaaaaggacacggtttgagccgggatgactggaaagtcagggtactactggcaggtgagaaagttgggttgggcagggcatattaggtttcaggcatattaacataacttctgctgggcgtggtggctcacgcctgtaatcccagcactttgggaggccaaggcaggcagatcacctgaggttgggagttccagaccagcctgaccaaaaatggagaaacctcgtctctactaaaaatacaaaattagccgggcatggtggcaggcgcctgtaatcccagctactcgggaggctgaggcaggagaatcacttgaacctaggaggcagaggttgtggtgagccgagatcacgccattgcactccagcctgggcaacaagagtgaaactccatctcaaaaaacaaacaaacaaacaaacaaaaacatagcttctgtgtctctggctcttggccccactcatcagtgtagacccacaaatccagacaaagtactcaccagctatttgtgcaaacccctaaaggatgtcttacatgtcccagtgaacgagtctggtcatctgtggactgacaccagccattttctgcacttctttattctcaggactccttccgctgagtatcagtttgtcctagctcctggcaacaaataaatgtcaggtattcttcctctgttccaaacctttcaaagctgtagagaagctgttattatagagttataaaatattaatgccacaagaaacttaaaaatcagccagtccaagcccctcatttagcagttgcccaaaatgaggcacaaaaatccggagacctcctcgtggcttggtgtagtgtccaagctgagatctgaccagcactttgggaggtcatggcaggaggatcacttgagccaggagttccagatcagtctgtgcaacatggcaaaaccctgtctctacaaaaattagctggttggctgggtgcagtggctcacacctgtaatcccagcactttgggaggctgaggtgggcggatcacctgaggtcagaagtttgagatcagcctggccaacatggtgaaaccccatctctactaaaaatacaaaaactagccaggcatggtggcacatgcctatagtcccagctactcgggaggctgaggcaggagaatcccttgaacctgggaggaagaggttgcagtgagttgagatcgtaccattggattccagcctgggcaacagagtgagatccttctaaacaaaaaaatagctagatatggtaatgcaacgcctgtagtcccagctacttgggaggctgaggtgggaggattgcctgagcctgggaggtcgaggctgtgttgactaatgatcacgccaccgtactccaacctgggcaacaagagcgagactcagtctcaaaaaaaaaaaaaaaaaaaaaaaaaatctgtagtcctgttgccctttattcacttggcttataggtgttattttgtctttcattttcttttctttttttctttttttttttttttttttttgagacggagtctcgctcttgttgcccaggccagagtgcagtggcgtgatctcagctcactgcagcttctgcctccctgattcaagcgattctcctgcctcagcctcccgagtagctggggttacaggcgcccaccaccacgcccggctaatttttgtatttttagtagagacagggtttcaccatgttggccaggatggtcccgaagtcctgacctcaggtaagcgacccgcctcggcctcccaaagtgctgggattacaggcctgagccacggtgcctggcctatctttcattttcaaagcttgtttttgagtggtggcatggggcacacccctgtactgctaatgcaaaggaatattagaatcaccatttgtgaaagaaacttggcagtctgttacaagagcctcagctatgtcatacagtttcacccaataattctatttcaagagacttatccaggaaaaaaaaaaaaaaaaagaccaaaataagaaaagctttgtaatgagcccttgttgcttttacctacccagtgcctctgttcctcttctggtaactgaattcctccttcatctaccaatttatagcagcagggtttgagattctttcactgaattccaaccaatcaaattatctgaaaagtattatttttcttttttcagacagggtctcgctctttcacccaggctggagcacggtggtgtgaccccagttcactgaagcctcaacctcctgggctcaagggatcctcccacctcagcctcctgagtagctgggactataggtgcacatcagcatgcccaactaaattttattttttgtagagatggggtttcgccatgttgcttgggctggtctcgaactcctgggctcctgcgatccgcccatctcagcctcccagagtgctgggactacaggcatgggccattgcacctggcctttaaaatattcttttcttttcaagtgagaaatggtatcctactgatgtcttaatttgcctttctttgatatatacagtcagggagagcatcttttccacatgtctattggccatgtgtatttcccatgaaatatttcataccacccccctcaccattttacaatatgatctttatcaatgtcacagtgataggatatgtctctaacctgtatcttttattttctttctttccttttttttttttttgatacggagttttcctcttgtcgtccagtctggaatgcaatgacatgatc

SEQ ID NO: 7231 - DNA, 6000 bp, Homo sapiens
ggaaaaaacaaaaacaaacaagaaatggaggaatgtgcataatatgcatcctctgggccaaagaaaacatttgttaatatatgtctactttatatctgcagaggatccataacaaaggtaccagttattgcctgcagagggttgtggacagagatggaaagagccaggtcacaagaagatgagcaaaaaaacccccttatttttcactgtatattgttttgtaatttgaattttataccatgtgaatatactgcccattcagacttaaaattctacttttaaaatgctcattttgatgcttttaatggtaaattcaaacctttatgtagaactattatacctaagatattgttttggaagatttgcctttccctgaatgctactacatgctatgaggaataaaaataggctgagtttttactcctcaaaacagccctgcaagataggcgctgtgtgaatggcatctattttctcccctacacctgcctttctatactctccatggtcagggctggaagccaaacaactacatttcccagactcccttgtcatctgactcagccagtgggaggcactggtgggagtttggaagatatgagatggggaaagcaattctaatctctggcttctggtggcaccccaggccacagcggtggttccagttgtgtgtcagtagtaccaggcagcaagtgtggctccaggctcctgctcagcagctgaggaatcagtctctggaaacgaattttcctgttgctcctctagccttgtgggggtcaggctttgggtgcccttgttctccccttgtttctcatgcccttccaacacctttgtaaacaataccctgtattaaatggtttttcctctaattacacactggctaatacagataaaattactcatattttacaggtgagaaactgaaattcaaatagagaaagtgacttaaccaaaggcaagctaagtaccacgcttgtctcatgatgctccagccaccttggtcctaaccttattggaccaccccaggcccatctgcactgcaaagccattgcattaattcgctctgcacagaacattctgtcttcagtccttcgcatgcacactctttcaagtcccactcaaatgttaccttttgatacagtcgggttttcgtttttaagagacagggtctcactctgtccctcaggctggagtgtagtaatacaaacatagctcactgcagtctcaaactcctgggctcaagagatcctctcacctcagcctctccagtagctaggactacaggcacgtgccaccatacttagttaatgtttaaattttttgtagagtcaaggtctccccatgttgcccaggctggcctcaaactcctggactcaagctgtcctccttcctcagcctcctaaagtgctggggttacaggtgtgagccattgtgcccagccttcaaatgttacctttttagagtgacctcttaccacctgtgatctccaagtcactccattatatcatcctgttccttttcttcttggtactcctctctgaaaatatttacttaagttgtttatcccattggaatgtaaagcccgttaagacccaggaacagtgtttgtcttactaaacaccgtatctctgtgcccaagagtacctgcagagtatgccttcaacgatttaagaatgaatgaatgaaaagtgtagtaagagaagtagcagattactttgagcaccagcgaggacatgcctttccactggctgccttcatacagcaggacagagggctcacgggagtctccaccgcaggacagcccccaggaactaattcccaccactcaggctgtgccctccaaaggtgctcagctaatacatactgagtcaatcaggctgcctatgaaccttccagacaacctccgtgcattaacagtaatcaggaggaaacaccgtgaggatcttagaccaagttggcagattagaagcagacggtcattcagaagttaaggggagagtaaaaagctggagaaatgggatgttcattagggccacagttgtttcagcatttacatttactctatgcactagacctacctccagtgcttctggagaggcacaatggcagagtgtaatctctgtaactggacagtctgggctcaaatcctagcactttcctggctggcagtgtgagcaagtcactcaggtcgtctgtaagttgatttcctcatttacaaaatgagattgttgattaaaaaaaaaagtgatactattattaagacagagtcttgctctgtcatccattctggagtgcagtcgtgcgatctcagctcactgtaacctccacctcccgggttcaaatgattctcatgcctcagcctcccgagtagctgggattacaggcgtgtgccacgatgcccggctaatttttgtatttttagtacagacgaggtgtcaccatgctggccaggccggtcttgaactcctgacctcaggtgatccacccgccttggcctcccaaagtgctgggattacaggcgtgagctaacgcacctggccaacagtatcacttttatacagttgttgtgaaaatcaagatgtagatcacttaaaatataaaacagcacttggcctccatacacgtatcacctcatgaaataccgcaatcctctgaggggagatactatcatcccatgatacaaaccaggcagctgagaaacagaagttacacaagcagcccctgagccagaagtgcgttctagaatccctagtataccctctgaatcaccacactgatacaaagaaaagacagccatatccgcagtgtcataccatggaactgttaagaggtctccagcatgaactacgctgacacttggaggcagggctgtatgactcaacaggaaggccaggtactttttagagaccagacaggtacaaggtcttgaaggacaaaagttggctgggagagctgggcaccgtggctcatgcctgtaaatcccagcactttgggaggctgagggggatggatcatgaggtcaggagttggacaccagcctgaccaacatggtgaaaccccgtctctactaaaaatacaaaaattagctgggtgtggtggcaccacctgtaatcccaggtactcaggaggctgaggtaggagaattgcttgaacctgggaggcggaggttgcagtgagccaagatcgcaccactgcactcaagcctgggcgacagagcaagactctgtctcaaaaaaaaaaaaaaaagttggctgggaggtaaaagcattttaggtaaagcatagaacatctacgtatctgcaaaccctctgaatttactagcctggcaagttccagacgggaaaggtaggcagttgaatttggagagctaggcaacttccaaactaaggaggggcttcttgattgtgctaaggaatttgaatcacacactgtaggtgatgagggacggtgagaggattgcaagcagctaaaactgtggtagaatgtcagctggaaggaaatcgaaaggaatcctcaacaaggagagggtcgcctttccgtctgctggccctcctgctgtggcctgcggcggggtgggaaggggggttccactacacagaagtgtgacgcgcagggctgggcttcttctaggctgaattcgggacagattttcgcatttgttttgctcaagtatttatgggaccaattaatatgtttagcaacgttgtctgtgggagcagtagaggaactgagaagttcacaaactgtaagagatcctccaaagagtccacaggtctgaggcagcagcacctgggaatctctgggctccagttagtccttcctgactttgactcgttacagcagtgtccagacagggatatgtcgggtcctgtggcagggttcccgtcaggtgggatggtttagccccgcatctgccttcaaagatcccgagattatgccgtcgcagcggccagggcaggagtgggtgcgtggcagggactgagtctaagaggcctggaggccctgtctaaaacagagctgtcgctgggccctctcgccttcaagcagttatcatacagctattcccctttcttgttttcagaccctctcctctaacagcctgcacctgcaagcagggacctccgtggcagcagggacagcgtgtctgtctcggcctccaaagtaccccggagtctaagagaactgggggaggatggtgcgggagcagcgcccgcctccaaggagggcccgggcggcgcctcccgcccctcggtgaccttatgggccaaggctgtgaagggcaggcgtggcgacgcggaggggcccggcgctagtagcccgcagacagcgcggcggcccccagcgggagaggcagcctggcggccaggacagcgcggccgggcgcctccgcgcagtgctctgggagttgtaggcacttgcctctcctctctccttcagctactggctctcgaaactcaaggacctaccggtgggtgggcgcctgtgactcccaggctgcgaacgccgggaactcagtttcttcagaaatgctcgaaccaggacggctcctggagtcctcgcgccctcgcagaaggactacgggccccggcgaccccgggggcggggcttccggcgcgctgccttgtgggcacggtagttccgccgggtctggcttccgcctgccgagcggccccggaccgcaggccggactacacttcccgtcggcccgcctgctctcccgatgccgccttggcgcgagacgttggcaagcagagtgtctccaagatggccgcttggggaaggaggcgtcttggcccgggcagcagtggcggcagcgcccgagagaggtgagatccaagggcttgttgcccccagtgcaggcggctcagcggccggagagcccagcgcggcctccgagggctgcagcagccttccttccctggtttccccgcgctccccctaccctcgccgggcatactgggttccagttccggaggatccgggatccgggtgggagcgaggtcgaaggcctcggcggagagcttaggggaaggggcgttagccgggctgagtaaggtaggcagcggccatgcggggcggggcccgaggccgggccgtgctgaaaggaactggcgcccagcgcaggcctcagggacccgcctagctgcccgcgggccgatcggctgctgaagcacccttcccgcctgggcacgcgcgtggccatctcggccgcggccccagacgtgtagaggaaggcagggcccccggagagagaaagaaggggaagccttcacagagcaggccggccgcggcaggggtagtttgatctgcacgtttactagggagctttagctcccgccagatgtgtctcttccgagcccagagccggccacttcctcgagggaagattctgaagacttttggatggttctgtgcaagcgctcctgccgtagaagtcctttaaagtgacctttcctaatgaatggtgtgtgggcagggagctaggagcgtgtttcttccaacagggacctccatttgaataactgatttctagaagatgagattggagtagtttccgtgtttcatgttcaagttgcagtttttgcatctgggaagcagtttcagctagtggaaaccactagaagctgttcagccactagaaatttgggagaagatgtattggtggagccacctggattaactgtccgctaaagcttgattgttatagcagcggtcagcaaaaaaggaaaagtttttgttttgctggttctccccctccccgtctttttggtgaggattgtctaacagaaaagttatcttcctctcaactactctgcattattccttttctgtgactgattccatcccgtgttcattgctattgcttgcagatggctttcccagctgggaagattcttcctgtttggcagttgtgatagaatcctttagcttgcttgcactttattctttagcccagttatccagcgttgcccattctgcatttcctcttccttggaaaagcag

SEQ ID NO: 7232 - DNA, 6000 bp, Homo sapiens
tgtgcatcttcccctttccttaggcttggcccacctcgccacacgatctcagtcaagggcctctcctcaccccatgggcttctatctcagccttttccactttggcaaccctgggggtgagagtgaaggcctcaagatgcctgtcctgtaggtatctctggtgagcaaggccggggacatgttacgggacaagctacaggctgatttgtctcttcatagtgtagattgcagagtgggacaaatgttgggctcctcttcctcccttatggaggtagaatttgtgtgtgtcaatgcctgcacctgagtgttcatcctgatgggcttttacatgtgtgtatacccatgtaactactgctctgatcatgttatagaataagggtatccaatctttttgcttccctgggccacattggaagaagaattttcttgggccacacctaaaatacgctaacactaatgatagctggtgagctaaataaaacaagcaaaaataaaaataaaaaataaagtcacaaaaaagtctcataatgttttaagaaagtttatgaatttgtgttgggccacattcaaagctgcctgggccgcatatggactgcaggttagacaagcatgttatagaacatttccatcaccttagggggcttccaagtaccccctcccagtccgtgcaccccagaggtaaccaccattctgactctaccccaaggactactctcgcctgccttcatgatgtgggcttttcccttagtctagtggagatctggcccttagctcaggggagggaggcctgaggctagcctgtatgtgcaaacctactggccctggaggccactgatggcttcaggtggtggcaggaattcaccgtagtagaggcctccatggggttggcactggttaacgtgatcccaggatcacgcctgctacctctccacacatacagacccataccctgccggtggagccagaagcgcagggggagggctgacgagttcccttacagttcctgtcctttccgtcccaggtttggtccaaggagcttcttgacgcaaggatcccttcaccttaaactacaatctgggtagtcccaagggcacttgcacagagggaggagacagaatggttagggtgggcgtcccatctgtgtcatccagaaatgagctgacaccaatagcggctgcccagaccaggacagtgtcctttgcctaccattcttctcaggtcacctggaggagaaggagaacccctcccccaggctgggggaaagtgccaggcaaacccttggaccacactcctgcatcctggtcttggttactgccatagccagggtcactcaccacatctggtctgcccatggcttagggctctggagccattggccgtggatatatagtcagccttccatgcctggcttctccggtaggaccacagacctcagatcagcccatttatgatcctgccctgggcggctccccacttacaggaaaccccaccaagaggaatttgggctgcatcatttccggcttcctgcctgggctgctggaggtggctggctggcagccccctgacccagtggtgtttggagtggggagagggaggtctccacacctggggtgcctcactatttgggtaaagccagcccagaagtgcatgctagggctccccctcttggcgaagaaggctggtcccttcctcctgagccctggagtcagccccccaggaaggtgttggcggtcaccttgggcatccctctgttgccctgattgggagggggtcccttaaaaagcctaaacccgctgcactccagcctgggcgacagagcgggactccgtctcaaaaaaaaaaaaaaaaaaaaagcctaaacccaaagacaggcctctctcctttacttcctgttttcatgcctcagtgggggtcacttgctgtgggcagagctcaggctgggcccctgactcagagtctcctcaattttcctgggaactttggtggaagtccttagaggggaaaggcctgagaattgccttctagttgggagagattcttatccccctaagcctgtccctcccctgatggggatacttctgaacaccctgagcgctacagggcaaggcagagagccagtcccccacccccaccccaggacagggtttcctgagacagggtgggggccgctgggcagagcaaagtgtcctgggagagaggcgccctgcccccactctcaggcggcacacaatggctgctttctcccccgtgacctttccgcagcctgagtcgtatgcagctgtctcccaaggggcctaggatgggtggcatctcctccacccttgagaagaaccccggaactcccacccagtcctggccctgcttcttctcccaagttcacttttcccaaaagagtggagagcaggctatagaggcagagggacagcagcaagtgtggacatggcatggtctcaggcatgaaagtgccacatcctggcaattctactcattagcctcgcatccttgaataagccctttaacctctctgagccactgtttcttcatcacagaggtagcatgtcctaccttgcctgacagttgcaagcagcatcacacataatgtacccagctggtacctagtgggtgcccagtcaagcccagctcctttgctctgtccatcttccttaagagggctccagcttacaccctcagtgatgatggcaggaggctccagcatgaaaggacctcacctgctggcaggaggccagaggcaggacctgtggacgggtgtgatctgtcaggcatgtttcaacagcatctggcatgcagcagcatctgggttgcatccccttggggatcccttcctcccttcgggacgggctggggcagagacctcgtttcctgggaaaaggctgagagactggtagcagtggctgcagggcaggaaactgtgcctgctgaatgggccctggggactgcatatcccagaggggtaaggatgtaggaaagggcatggctctgtcagcccccagctgtgagctcttggggagatccctcactggtaacctggccgtagtgatggtcccagctcctaggctgttggagactgagtgagtgaatgtgtggagagtactaggcttggcacgggccagagcaggtgctcaggaggtctggcccatcatctggctccggctgacccttgccctcaccctggcagaccctggctgggcatccatcagcaggggtgtgctggtgtgtgacgagtgctgcagcgtgcaccggagcctgggacgccacatctccattgtcaagcaccttcgccacagcgcctggcctcccacgctgctgcaggtacagggctcagtcgggtggttcttccttcccctcaggcagagtgtgctgagcatgagggcgtttccccctcacccacatacacccccatctggaatctgcagcttccaaggggcagcacccccctagggcagaggctaatcctgaccctttcctcccatctactcacttcatgcagaagagtagctcacacccctgctctgccacttatcaacgtggtcgtgtagcattgagcaagttgcttcacctctctgagccttggcacactcatgggatctgtgtctttgggcagctggactagatggaggtgtggtggtgcgggcacacagtaggcccccttggtaccgtttccagctacgccagccacagcaggcgctcaggaagtgtttcccccattgcttagcacgcagtgggcactctctcacttggcatctcttccctgcagatggtgcacacgcttgccagcaacggggccaactccatctgggagcactccctgctggaccccgcacaagtgcagagcggccggcgtaaagccaacccccaagacaaagtccagtgagtggggctggaggggtggtgggcagagactgcgcagtccgggacagggccctgggaggtggcaaggtgaccaccctctcccaccatgctccccattcctcctgtgtgccccatgcagccccatcaagtcagagttcatcagggccaagtaccagatgctggcatttgtgcacaagcttccctgccgggacgatgatggagtcaccgccaaagacctcagcaaggtttgaggggccctacaacagatgggtggccccctcctcttcttcccatccacgactctctgaaggcctctcctttgtccccactgagccctgggccccaaaggcagccaggtcagggtaacagtagacagggtggagagagcagattgttgggtcaggccgtgtgtggctgaggctccccagcaaccaagtagacacacaaggctagaagcccacagctgccactcagaagctgggaaaacctgggggtagttgcttagccactcatagcctcagtttactcatctgtaaaatgggaaagaaataacagcatctacttcataaatagtatctaagcagggcacacagcacacgtggtagatggtgactgacggcagcgtttattaattggcattaacccctagcgggaagcctctgtcctcccgacatagtctggtttgggcaggcctccttggagctgctaggtgtcccaggggcagccagggtgcagcttgtgggtggggaggtgcgcctcacgcacatgcgtattcactgcacactctgctcctcttagcaactacactcgagcgtgcggacaggcaacctggagacatgtctgcgcctgctctccctgggtgcccaggccaacttcttccacccagagaagggcaccacacctctgcacgtggctgccaaggcaggacagacactgcaggccgagctgcttgtagtgtatggggctgaccctggctcccctgatgttaatggccgcacacccattgactatgccaggtgagggtcggctgaagggtgcagtgtgggtgggtgggggtgtgggtgagggctgctgctgcaggtctgagccataccccctcctcacaggcaggcggggcaccatgagctggcggaaaggctggttgagtgccaatatgagctcactgaccggctggccttctacctctgtggacgcaagccgggtgagcagagcttggggggcgcctggctgtgacaggcctggctggggctgggcaggtgggacctggacgcacccggcagcaggtgccatggtgacagagcggctggggagcaatgttgctaggcaactggctcctgtgaaattactgcaggctctgggccatagcatcgctggggctagggagtgggggtgggcatcctgcatcctcccacgagctcccagcattcttgggggtggcctgccctccccactttcccctgacacttctgggtgccagccctgctcatggcagtgaggtgggctcccagctgctgaggccacccagcactagtgagtgacttggcatttttatttttgttcagatcacaagaatgggcattacatcatcccacagatggctgacaggtgagtgcccacctgatgcccctttccagaggctgttggatgccatgtgggtggctgacccccagagctcccagcccaggtttcagaggcctaggaccctgctccctccccccagagactagaggcacagcttagtcctcagtccctaatgctgggccccaaggcaggtaaaaaatgtcagctccatatgtggcccgcatagcctgagccccgtgactgtcaagtacatggagggcttgggtgtgagaagctacctgtgggccgggcgcggtggctcacgcctgtaatcccagcactttgggaggccgaggcgggcggatcacctgaggtcgggagttcaagactagcctggccaacatggagaaaccccgtctctaccaaaaatacaaaattagccaggcgtggtggcgcatgcctgtatctcagctactcgggaggctgagacaggagaatcgcttgaacacaggaggtagaggttgcggtgagccgagagcacgccattgcactccagcctgagcaacaaga

SEQ ID NO: 7233 - DNA, 6000 bp, Homo sapiens
tctgctgcttaggaaaattttgaaagccattgccttagagtcatctgttactctctaaatgtagcacagcttcatttgcctcctcataaggcaggtttcttcttcttcacacagctagtatgtgtgtgtcctcatcaacatactctgctctgccagactatttagcactcgattgcatgaagttctgtgcttcatgtgaagcagcctttagattgctaactagattattagctttaatagagacaaagacaataatagagaactttttatttttatggaattacattttttaaaagctcagggcccggcgtgtttctgaaggagctggcataggtgtatgttgtaaattggtattgccttctagaaagcagtcgggtgttaagtatccagagtcattaaaatgtttgtaacctttaacgtcataatcgtacccctgattattttaatcttaggaaatagtccaaaggaaaaaaaaaatgtgcatgagaattttaattgcagtatttctgttaattatggctaaaaattggaaacaaccttaatgaccactagtaggggaatgttaatgtaaagtacagcacgttaatgcatttggtgtattttcttgtcttttaaaatgaggtatgattgtatcagcatatggaacagttcacaaaatattaagcaaaaatgcagaggtaggctgaacgctgtgtgcatatgctgattataaataaagcaggcgtgtatctgaacaaagctagaagaaaacatggaaaagctaacacttgagtcctagagttatttaatgaatggctgttggttgccagtaactaagaacccacctacttttaaaaaactctgaattctggccgggtgcagtggctcacgcctataatccgagcacattgggaggctgaggcgggaggatcacttgaggtcaggagttcgagaccagcctggccaaaatggtgaaaccccgtctttactagaaatacaaagaagtagccggccgtggtggtgcacacctgtaatcccagctattcgggaggctgaggagcagaatcgcttgaacctgggaggcgcaggttgcagtgagccgagattccgccactgcactccaatctgggcaacagagcaagactccatctcaaaaaaatatgtatatatatatattcttaattccattgcaccattttgagacaatgagtattcttgtaatgaaatttcaaaatcatatgacactattcagaaaggcataaagtgcagcattgtgaataacagcattgttttaaatcctgccttgatttttaaaatattttgaccttgatgataaatattagctgtcccgttcatgtattaccagaaagttgtgttgtagttttggaaaaatgctagactgacaaggaagaaccagttacattgcataaggaagtgtgccatcacagagtagccagagacttgtgtgaccagcagcttctgtttgttcagggtcttagagttcactgaccaagagtgcagagaagagctcatttgatccttgcaacaaccctccctcccaggtatatagaccaagtgtgatcacctccatttcacagacagaggtgctgacactcagagtaagtgactagtttgagttcttgggtcaataagtaagaaattaattatagtagagaaaggatttttcacacatgtaatatagcagcaatgaaaacatagaagttttaagtcatgagtggggttgcacagtaaaagaacttttagaataggttagagagaggtgggcagaacttggaactgggaagtgatccttgtgaattggcactggaatcagatcccattgccttttttttttttttttttttttttaagacaaagtcttgctctgtcacccaggctggagtgcagtggcatgatctcagctcactgcaagctccacctcctgggttcacaccactctcctgcctcagcctcccaagtagctgggactacaggcgcccgccaccacacctggctaatttttttgtatttttagtagagatggggtttcactgtgttagccaggatggtctcaatctcctgacctcgtgatctgcccgtctcggcctcccaaagtgctggaattacaagcgtgagccatcgcgcccagcccccattgcttttaatagaggagcaaggagcagtgtggagaaggtagatacgcagacaggaagatcactctggctagaaccaagagtggctgatagtggggagtaagattgcaggtggatatatagcagtgagggtgggtaagaacaattgataagacttcagcttaaattttgagtagtattgcagggatgaaaacaagtagattctggccatttgtagtaaattttgaacccgtcctgctaacattttaatgtatcttggcttttgttgtggggagcacaagtgggtcttgctatattgcccaggatattctcaaactcctggcttcgcaagcgatcctcctgcctcagcctcccaaagtgctgggattataggcatgacccaccatgtctgaccagtcttggcattttataataagcataatctatctgaaaatgtcacttaaaagatcattttgtttgcatatctattcactagtccagttagtagtccattaaaaattcgcattacttcgggattaataggtataaaacaagttttttcttttccaggattatattccatcacaacaagatattctgcttgccagaagacccaccaaaggcatccatgaatacgactttgaaataaaaaatgttcctttcaaaatggttgatgtaggtggtcagagatcagaaaggaaacgttggtttgaatgtttcgacagtgtgacatcaatacttttccttgtttcctcaagtgaatttgaccaggtgcttatggaagatcgactgaccaatcgccttacagagtctctgaacatttttgaaacaatcgtcaataaccgggttttcagcaatgtctccataattctgttcttaaacaagacagacttgcttgaggagaaggtgcaaattgtgagcatcaaagactatttcctagaatttgaaggggatccccactgcttaagagacgtccaaaaattcctggtggaatgtttccggaacaaacgccgggaccagcaacagaagcccttataccaccacttcaccactgctatcaacacggagaacatccgccttgttttccgtgacgtgaaggatactattctgcatgacaacctcaagcagcttatgctacagtgatgtacaaaagacttgctgttttaatatctttttgtgtttttgatgttttctgtttgttttgttttttaaaatagcagtttacaaccagaattagaacaatcttaattctacgtttaacttcttgaaaatcttagtactttttctgcggcctttggtttgtggctgaaagctgttgagtgactcatcgccaagatttgctgtaatgcaggctttgatctgtttcaccatggcttctattcaagtccagttaaaacctcccagctgacctcagactaggcatatttcaggctttaaattattctactttccaaactgaattctcctgcagtgccaagtatcaaaggtgtccttaaatacttgtagggatgaggttaggaatattcagttccaaaacaagatatcttctgtccgccttacatatagcagtgacacttgttgcctaactttatggtgacctcctattttgtaagggctgttagaagttctatctaagaaatggcattctgtaggtttatagaaggtttagccttcatattttaattgcttgtatacacaacagctgttttgcttttagatttctgtgtttctgaaggtaatgttcttcctgttttcaagtttacataaggatctttggtctgatgctgatgaagagttcacaggtggtatgggagagcaaaaggcaagctaatgctgtttaccgtgttttggtcaaacgtaacgagtgaaatagaatttgcctttctcatatttaattatcatgtagtttaatgtaccatatgtgaaacattctggccatagcagcaactaaaaactgcaagcaacttggtaacagaactttctaaataaacttaacctgttccagaatgtcatgtatttgacttttaagccctatctcagttggtcagtaaagaccaatccttactgtaggaaatcattgttgtatcatcacaaacatctatcttttgctgtcctgtccagtcccatcaactccacactgtgccatttgtggcatcgttttgtttatttggagtttgctaagggcagtatttttctgtcaagactattcaagaaggcattatttgagattcctgttcattcttggtgtgtctctaacagatacagtatgtatacatttgtataattgttgttgttgaaagtccagcttttttgaggtatattttaaatgttttaaggatgcttctaaggatcagtagtaatttttttagttcgcacctaaagatgattacattgacctcccccgactgcttaccaaattaaaatgtgtccacgaagtagctttgtgatcgcagatacattcatagtgaactcatcagaatggctggtttgcagtactgaaatactatcttctaggctgtatgtagtgctacaattagagaaacagaagtccaaggctggcgacagcttgaaaagtctgacagcttttctacttttcctgaaaattttaagactgtgatatctgtcattttactgtatagctgactgtgtactcaggtattttattggtccttgaaagattggtcgttatggatcacccagcctttccaagtcagtggctgttgttctgtcttgctgtctgatacgagagtggggcttttcagtgaactaaccagggattgttcttgacatacctgacttttctcacatttgaacttccactatcattgtatccatataacttctagcattttcatgccatggtaatccatgagctacacatacgtagcccggcaccgtgatgcaagttcatggtatcgtgcatgttcgtggtatcatggtatcattcatgcgtgtttgaatagttctacatctagtgcttcttgccaaaaagaatacattgtttaaattcacaaaattagcataattgcagtgctaatgaatatcggaatatgtgcacagtaacatttggactattcattggagagtttacccatacatttagcaaattgaatggccaaaacatttgactccagtgagggctcaagttagatccctatagaaagaggacacttcatcttacttaagtcatagttaagatctgtgatacgaaccatagatattgcctgacaaagcagaaatcaccaagtttcccccttttgaattaccaccaagaagtgttgaaacaccaaatagatatcatgttattttgggcatttgcagttttcttccctgctgcatgtaatgtctcagaatcaacattcttttaaaatctagactatattttgaggcaatgaattacttatattcaacttaggcttgttttgacattcagtagaactttaagttcaatctaaaggcttcagtccacatttttttatacgttgtattttaaaaacgtttgaaaggagtcttacacctgtatcatgaaaactgaatccttttgaaataccactatatgaagagagagatgaaatttagtgaacagaattgaaaaggtgctcataatttcactatgcaaacttaccccagtctctaaaaaagtaatttagatttaaagttctttgatgtatttgattttctaaatctttatggttatgatttggaataaaatgtgcctaatcctgtgttacattctgttcttaaatctgaatgccttctcatttaattctgaggaaatatcacacaagtgtcttcattgaccttgaagaaatgtatatacagttgccttataaaacaacataaatttagaccataacttttatagagaaagggttttgtcaaatgtttt

SEQ ID NO: 7234 - DNA, 6000 bp, Homo sapiens
ggaggtgccaataggttagtgtttttaactcccatgggacttggatggagaatttaaccacttagcttgctctgatgctgtttcaaggaagtaaacattacttagatacccaggataatatcccatccctaccagccccagaagcccaacctcttggttattttattctgaaagaggagagaggtgattactggttagattcctgttgccttttaccacagaccaccagcaaatacaaggacaactaaaactgttctcaggaaagataagtggttacaagctccaggcaaaacaaggtgagaaccagcttctgagagggtaagatgatagccttttgtatttaatttcagcccgataaatcatcccattgtgcaactttagtttcaatgttttgcgcctctagagcagagagagagagagtgtttagaaggaagatacatttctgggtgggagagttagtgacctattttatggaagtgttctctgatgaaatccagttggaatcatcccaagaagcatgagaatgtgagattttagggagggtggaagagataactcgctggatcggaggactctgaatgactcaggcacagtacccctgggagcagctcagtgagggaaaagagcactgggtgtggagtcaggagccccgaggtcagacccagtccctctgttttacactttggagactttgggcaaattcccacagccccctgagcttccacttcctcatctatgaagggaaggagagttgctaattctgaaggtcactccgaggagtcaatgagaaggcactcacagggtgcgtcgcacagctgccgcttggtccgcgggagctgaagctgaatccagggaggagccccttggattccttcaagtctagaggccccaaacacctggacttctcagtagcatgtggagccgatccctacttctctgctcactgtctacctgtccctctctgctcactgtctacctgtccctttccaagagctaaaaacacagatccattccactgtaagagaaaatgaagtgttcaaaaagccacatttacaaagaagttaaattaaagcctctttaaaaaaaaaataggttttgggcttctggaatgtgaagggagtgtgatttgcaagaggtgggaagttactcttccacccgccattctgtgcattaaatctttagaatccaaatggatccctgcagtgaagagaatgtggagaccgtggaagggcgcagaggagaacatgtgcaaatgcacagagtggaggagagtccctgtgagatgggagagaggaaggagcttggtaatatcagaagagggagcgcctggcgcctgtagtcccagctactccggaggctgaggcaggagaatggcgtgaacccgggaggcggagcctgcagtgagcccacattgcaccactgagcgcctgatggcaaacagaagctgtaactgacgactgaggctgggggctgatgacgaaggaagctgggtgttagtcactagggtttcaagctttcttctgtagaggaagattatgtggagtcccagaaggtgttaaggcataaaaatggagcacaagttgtagtctgggagaatgacattgagagcatgcagctattggacacaggaatggaggaaccaaggaggagagtggggaaactactgcagtgtcccagaaaacagcatgctaagggtctggattctggcaagggcaagagggcagagagaaggagaaagattaaagtgttggaggcagaatgctcaagacttgtcatcaattggagtagaaactgagggacagggaggagtagaaaatggaggagaggaaaacaaactcctcttccttctcctcctcctccttctccgcctctcttccccatctaaggaatggtctcagggtccacctggccccacccaagcccacatctcaaccagtgggtagccaggtcttccatctcctcctcccctccatccctcactgctgtgggctcaccagcaccctctgctgcttctccatggcctcctctccagtccctgcctcagatctggccccctccaggcacctttggaaaagctttctaaaatatcattcacattctgtctccccagcatcacgactcctacaaatggcatgcaagacctcctgctgcctggccctgctgacctcgttagcactctcccccacgttcagggttccctgcactccagcccaatgagcaactcccaggctctgcacctggtccagctcttgccactcagtaccttggctcgcacacctgcccaggaggcctcctcacaggctctggccatgctcctctgcctataaagccccttgtaattctcagctcaatcctttcctccttctagaagatttctcagacctctcccctcaactacagacctctcccctctgcctttctgaagcctctttttttttttttttggagacagagtcttgctctgttgcccaggctggagtgtgccgatcttggctcactgcaacctctgcctcctgggctcaaacaattctcctgcctcagcctcccaagtagctgggattacaggcacacatcaccataccaagctaatttgtgtatttttaatagagacagggtttcactatgttggccaggctggtctcgaacttctgacctcgtgaacctcccgccttggcctcccaaaatgctgggattacaggcgtgagccaccgcacccggcctctgaggcctcttctatacctgtgcagtcttctgtcttagcatttataatcgtttacggcgatttttctttgcactcccccagccagagctgagccctatttgtatctttgcattcccagcacaaagcattatggctagtacagacaatgcaagtgtcaagtgacattcttaccattcactcattcaactaatatttatgaagcacctgttgtatgccatgcattatttttaagtgcttgggatatattagtgacaaaaaccgagtaagatctctctcctcgtggggcttacattcttgcaggagagacagacaattatcaataagcatcataaataagtgcagactatgtttgaatgtgatctatgttaaacaagatggggaagggaagggatgggatggttggagtggggtgatgtgttgcacctgtaaactgggtagttaaggaagtcttcgatggcaaggtgacattttggtgaagatgtagaaaaggtaaaggttttagagggagggtgttcaggagggaaggagacagcaggtcaatggcgctctatgcggggaccatgcctggcctgttccatgaagagaagtaggcagatgtggctgtggtgaagaggggagagaagcaacaggttacaacagagagttacgggccagatcttagggggcttcgtgaaaggccagaagactttttctcagaaagcccttggaagatttggagagaagcatgacatggtgtggctaattttttttttttttttgagacagagtctccctctgtcacccaggctagaatgcaatggcgtgatctcagctcactgcaacctctgcctcccaggttcaagcaattctcctgcctcagcctccctagtagctgggactacaggagctcgctaccatgcctagctaattttttttttttttttgtatttttagtagagacagggtttcaccatgttggccaggctggtctcgaactcctgacctcaggtgatccacccacctcgacctcccaaagtgctggggttacaggcgtgagccaccacgcctggcctgtgtggctgatattttattcagcttgctctgactgctgggttgcccacagatgtgaggggcaggactgtcagaggagtcccatctcccggtgggaggtgatggttccacaggatggaagcaggaggtgaaagtggcagtcagattctgggtacagatgaaggcagggatgacagattagctagaggacctgaggaaggctatgagagacagaaggggagggtgactctgaagtttagggccgggggattggaaggacgggtttgccatccactgaggtggtaaaataggtgggtggagcagattttgaaaagaagaaaaagggtgtggtttggagtgtgttgtttgagatgtcaattagacaccctacctagcaaagctgtcaggggagtagggggctataccctttggttgtccattcattgaattcagcatatagttactgttggcccatgatatgcagggccaggactaggaaggaccaacagatttcgacttctcgtttgcaagctcagcctctaatcctccaggtggaggaccttctgggagagtctcctgggatagatgtgactgagtcacaatggcagtctgtatgcgcagagggatttttctcatcattttcacatacactttcatttaatcctttcccaaatcatggagagttggtaccaattattatccccagttcctgatgaaaacagaggaaggcttagaggttaggagagctaggcccaggacacactcatgcatggatggcgcatccggcttcagccccagtctgtcagccacgtgcccaccactttctcttctgcatggcatgagcctcaggaagagatgccccacctagcaagcatcaggagcccagattggcatctcccagctgggctgaaccttggagggcttataacatcactgagtcaccagaggctgttctaactccagagactttgggtaaacacagcagacattagcagaccatggtgtgttacaaaattgagaagcttccatgttttcctttccatcccaaataaacagtgaggatgttaatgagcccccaaaaggggaaatgaaaatcccttctccctgggattttccacagctctgtggcatgctcaggggaacgggctgtgtgttctgacctttcctccagagctttgtttactttcagagagctcaggaagggcctacagacactgcttggctcaggggacttggcagacgatagagaacgccacggatatttggcaggatgactccgaatgctccgagaaccacagcttcaagcaaaacgtgagtttgctcagctcagtgaggaggcatccagggtccaaaccaccctccttcgggacaccccagtggcctgctggctccaggggccacacaaagaggcttctccagcgcctctccccggggaagctaaggaaggtcccgcaaagcagcaacccttgtggcggccatggaatttcttccactactaggctgacatgcaaaatcctaagagaagtcagtcttccaggattgatcctggcatttgtgcttgctgttccccgtgcctggagcacctgtcccagctcccctgtggctggctccttctcaccatccagggttcagtccaaatatctccttcaaagagagatcttccagggtcacctaatccagagagtgccctctatggttgccacatccccccgacccaccacccaccaccccccacttcgactcctttatggcacctgcccctccctgaaattctcactgttgcttatttgttatctagccctctcatcagaatgtagatccactggtgacaggggacttgtgtgcctcgagggagtggcatagcacagggtctagggtcaggcagccctatttccattccaaatagtaagaatgttaataagcccccaaaaggggaaacgaaacgtcccttatccttgggattttccacagctctgtggcatgctcagaggaacagtctgtgtattcatatccagactctgctcttcccggctgtgaacctggtgcaagttacctcatcttcttgggcctctgcttcctcattcatgccacagggatcatatttgctacatgtgacgttgtgaggatttagtcatcagacatcagtttcttaggagaaaacctggtacacggtcagcatggtctatgcaggcactcctgccctatccccagggtctaccacagtaactggtccgcaagtccccatggct

SEQ ID NO: 7235 - DNA, 6000 bp, Homo sapiens
ctcttgtggggatcgcccctgttttccaaaggtcagcgctgtattctcctgggtgccctgtgctcattactcgtgattctcacaatacccttgcaagacactatcacgcctcctataactaaggcccctggggctcagggaggttagggaacttgccccattggcagctggtaaggggtgaagctggaatttgcatccacgtctgtctggcactttcttctgccattaaacttcaggttagtctgtttgagcctactgtaataccatgaagcagggcaggaatcatcagagccccagctgtgtggataagaaccttgagtcgagaggttctgaggcctaccccgggccctccagccaggaggcaggggacccagagtttcagatgcacaggcacaggctcaacttgcatcctggatttgtaggtggagtggggcaggacggggttgacccagggtccgtcggatacttgatcctcatgtaaacacctggctccccggaggcccgaaacccccagagccgggctttgcagctccctgctattccgcctgccactctcagaattaatttgctctcccctgtcaatgagtcaggtccctgcttatcaagagagcaacagctgtgggccaggagccctaacctacctgaggggaggctgggggcctgatccctgcaattggggcctcctgtgtgcacccttgggtccttgtggtcttgaactcagagtcccaagagggcacaggggtgaccccagacaccatgtagtttactccaagactcactgtgtgacctcccagcacattgttgcccctcatctggccctcagcccctcatctgaggatggagagggctggatggcttggcttctaagatgtcttccagctcaaaactcccagattccttctcctgcccctctttcctctaccagatggatttggggtgttaaggttgggggctacagcagaggagtaggaagacccagccagaaagtgactccccagggagtgacttgggaggccagggcagggcaggaggctggggcagccagatctagcagcctcgtgtgtctgtaccatgtcctggccatgggagggactcgggagagggagaagacacactgggaggggcttgggggccaaggggaggaagtgcagaaaggaagaagggcctcttggccaggtcagtccaaggggtgcacagttggccagcccccaatatagtcaggcccattttgtaataaggaaattgaggcacagagaggctaataacctatcggaggtcgcagagcctggaggcagggtcacagcccagggacgataactctcacgatgctgggggctgagtccttctggagcccctaggaaggaggcagcatctgcacatcagaggagcttccaggaggaggcaccagttcctgtcatgtccacttccagagtgatcctcgtgtctgggcctacctgcccccactccccagcgccaccgcccagcctcaggtttcagatctgagttggtcactccttcacttggaatccactcttgtgtggcctccgtgttcaggctgctgggtggggccggccaggctgtctgtggtcatggccctgtcaccttttgcagccagccctggccaccccccatgagttccctctgctcccgttgcaaagggttacttgacatgctccagataaacattttcagccctcagtgcctgggcacacacttcacttgctggccctgcctgaagtggcagtcaggagtcctaagttctcattccagctgcatctgcagctggttaagtagcccttggcacagaccttctgtgggcctcagtttctacacctgcagaatgggtgggaggattgagtgtggtgctctctaggctcccccgcgcttccctctgtgatcccaggaaaggagctggggtgatggcctctcgacatggggtcagtctgtgagggcagggctggaagacccctttccaggtgcctccagcgccagatgaggtggagcacgcccgtgcagtcagtcacaagtgggtacccagagctgcacctcatcattaagcactaattaatccatttactgatgagttgctgccaggacttctaggccttctccctaatgccctccctcctgctgcatctgatcttcaaagggatgggaagcatttccaaaaatatctattttcccgtgattctttgggaggactgctcagctcagcaattaaagacaaggaggtcgcatcctccctggcaacggctccctgcttgttgggcctgctttctttcggatcacctcctttctccccatcaaagcctgctccctctgggtgacccagcctctgatgggactcctgactctcccccacatgtcaaggggggcaagggtgttgagcaaaggggctcctcccacaatatccaccggtaccctttgatggggacaagggacacgctctgagtctcacgtaaggttatataaatacagctccaagacaataataataaaaataacagccaacatcacatcccaggtacagttccaagcaccttgtgcatgttaactaaaaatattcaactcttgatgtaggagctgctattcagatgctctcacttacagaggaggaagctgacaggtttcgggatttgcccaaggtcacacagctagtggaaggtagtgccaggatttgatgctaggctgtctgggtccaggggccacgctcttagcactactccatgctgcctcttaactcaagaaccaccccaccccatcccaccacccccgggccccttccagccggatctctgtcccaaagcccctatccctggaggtatttcagagcagcctctggtcccgggacttcccagccatggcagagacactgggttctcctggttcctcgtctcaccctcccctcagacctccatgaaaacccactgggtgagcctcagccctccggtaactcatccctcatttggcaattggagagaatcagcagcctcttcaccaactctgcccaagggcctgaggctccctgagactgcggtccactgacatggaagagctttaaaaatccatttagccggatctcccactggccagctgtagctgagcagctcctcagcagggggaccagggaggggaatggaggggagtagtgcgagagaggagaggccacatctacttttcagccctggaggccaggacgggctccctatcatcaccttcttgtcctgatgctgccagcagaggcagctcccaggctggatggtcccttggggatcagccagtccagcccctccttttataaatgagaaggggtccccagaggtcagtcatgcagcacggcagcagctcagctggtcccagggccccagcctctagatcctcacagggttctgccccatggggctccagactcaaggactgggactccagcagctttcccagccctgttccagccccaagggccactgggagccacaggaaggcctacagtgagggaggctccaggtgagatactcagggcttcatttctctgccaggcagttctgcctgaagtcagagccagaattaactcaaggaagcatgtttagagctactgatgccagagccgggtacagggtggggtggggcaacctctgccagcagagaagatgagatggaatttagaactcatgctgtcccttcccagctaggttttaggaccctggagctcaagcctggtaggcatgaaggagggtaaggggaacacgttgggcagctctgcccatcccagggccctaaagccaggcatcaattcagctcacagggcccctccccatctccttagaaggtgacaggttctgggccacagtccaggccggtggctgcacaaacctccatatgtccctgggccactctcctgccttcctccttgagtgacatgggccaggctaggagcagctgtgacagacctgagtgatgacatctccccacacacgcctgtcacctgtcattttctgtccaagagacctccatcatggatgttccccccacccacagaccacgaccttccaacacaggcccgctatggggaagtgccaccatgggaccttccccaagatctgccccatgaactctgagcccccatgtgcagcacagccagtgaggacctcccacggcagcctctgtgagatggctctaccacaagaagccctgtcatgccacctgccacgcgagctgtcaccgcatacccttccaccgtgtcatgcccagcctcgtgaaaattgactcatgaggtctcaccatttttttgctgtcttgcaagacccctgaaaaggaggtttctcagaagagcacctacctgtcatctgccaccacataatgacttgcaaaggaacagcccagggagctggtcaagcctgtccacgggccagtcctgtgggcatgatcatgccagcttgagtgggcagagccgggggagccaccaacccctgctggaggccaatgggcagaaagaggcaggaagatgggggtggtaaggaagcccctctccccagcttcactacacaacccccagccagcaggtgcctgtactggccatctacagatccatctacgcatccatctgggccaggatggtcaggcaggggccggggctgccccgccatcactgcctctctcttccttttccagacaatggctaccgggagtgcctggccaatggcagctgggccgcccgcgtgaattactccgagtgccaggagatcctcaatgaggaggtgaggctgagccgaacaaggctgcccatatggaggggagtccagggtccccagcagagttttgtgcctgctacttggagtcagggagccagaggctaatgtcaaggccctgctctagtgaagctgactggggagctggagctgtcaacttggaaaaggcccatgagcaggcgccctcgagggcaggctggaccaatggggcactgggcaggctctgatggtgatgagatgggtccttgttccttccttccttctccctgtgctcatcgggcagccgcttgcactgggcatgggactgtcctgggggtgcaaagggagaccagactcggtcacaggagtcccacccttttccacaacacatgcctgagagatacatccagttccagccacagggctgtatgggaaccagggacgggatggaggtagcaatgcagtttgaaaaagcccttggaaagccttttaaaatgttaaatgtttttgagcagatattgcttacacagaactcagaaggtacaaatgggaatacaatgtcccctcccaccccgtccccagccactggattccctcccagaggcaaccattttgccaatttcacaagtgtccttccagagacattctccgcatacacgagtaattttgtatacgtattcttttttgtttttacctgaatgttgcatgttatacacactgtctacaccttgcttttttcatataatcatctatcttagagatggttccatatcagtacataaagagcatcttcattctttttgcatttgcataatatcacaaaatgtaccataacttatttaaaccagtctttattctcagtctttagttattacaaatgctgctgcaatgaataatctttgaagggtgatatttggcagaggcacaaatatatctatcctggagctgctactgccctcggtctctcccaccctgtctcctttcccacccgacgctttctcccttggtgctgaggaagacgggggtcaaagggcagaaggggggacaccccaggctgtccgagggccagggattctgattgtggaagagagagactgacctaagcagtcccaagaatcccgtcgcctaaagatcagagctggaagggaccgtggagactctccttcccatcttgaggttcccagacttgcctggttataagaatcgtccagaggcagatctcctgaggtcaggagttcaagaccagcctgtccaacatggtgaaaccccatctcta

SEQ ID NO: 7236 - DNA, 6000 bp, Homo sapiens
ttaaagggggatggaatcaagaggtcgagaggaggagagaggcatcctggattgagaatacgggacatgtgagcgaactcacaggaaggcaagtgcgggggcgaggcagactcagagcaggcttctcaggctggagtgaccatttcctgtgggggaacaggaaggagaagaggctggagtcaaggctaggtacaggttgcagaggccttgaatgccaggcaagggagcctggactttcacataaaggcaccaggagccagtgaaggtgttaggaatgaaaggtgttggggtgaagtcagtgaaggtcctgccccggatgggggtttgcagggtgactggagaagactgccaccaggggccatcactctgggggctggtgtagccactgcagcaaggtagaaggaatgctccccccgaaatgctcacagattggggtgagacgcttcctgaaggtaggggaacaaattgcagtgagggctacacgtttccattttgattttgatagaggcaggctgactgagtggcctggatccctggacccttggccttgatgtctggttctcaggatttgcgcagtctgtggatggaggctgaccagatcagagcagctcaggggaccccgttctctccttccacagggagttggttagcggccactgagccctgggcagggagggggatgagggaggagcagattttgcagccatgggggagggttcagcatcaggtgacattccagtggactctgcccaaggcctgcttccgggtacacttccagagcgatcacccatgggcagccagttgtggtgaatgagggtttcactcgcctgctccctggccctggcttcctccttcttaaggggccacgatgggacccgagtcctttcaaaaaactaggcagttcccgctgctccaagcagaaagtcctatgagcctaagagaaaaagagatttggccagacactgcagccagggcaggaaccagttaatatgagcctgggagcaaggagaggtgaaatgctgtttaccagcagccggctgtgggttgcagggcacccagccacctagcacaggattccaggccccaacttgtcaggaagcaggagccccaccctcagctcagtgagggactattcctccccatctggggcctggctgcaagacctagggctctccactccccaggtagagggagcaggccttctactctgtggaggaggaaatggctcctgttggagattctgcagggtgagactgcaatccagaactcctgctgcccaggcaaactgggaagtccctctaaacaacacaactgacctctggctctccctgggtaggcctctccatgcccaaagccggggtgccagggcctcctgccctcatctctgatgcagggcattgcagccccatggcaggtgacttctccagtaggcactggggcttgcctgcttctcagaaagtggggtacgggaggcagggcaggggtggtgctgtttgcaaggctgctggtgtgagggggaagatcggccgtggccagccacagaataacggatattccacaagcatttactgaaaacatttacccacacccgtctgagtgccagatgccagggaaaacaagatgagtgagacatgtccctggctctctagaagggcacagtgtaattggagaaaaaacaatttagaaggctaattatgatacactaggataaatgataaataaatgaatgtgtaacaggctgtgggtaaatagggcaactcacaatgggtctttcgtgggaaggtgaggatcgcttcacagaggaaggaacattggagctgagctttggggcagggcagattttttaaaactttttggtcacaaagaaaaaggatggtaagaggcataaaatgttcgaggtggaaggaacatcacacagagcatggcatggcaaagctattccaatcatggtgaaacagaactgaaagaatgccagcttctgcaagagtttgggttaaaaaccattaggccaagcacggtggctcatgcctgtaatcccagcactttgggaggacaaggagggaggattgcttgagcctaggagttccagaccagcctgggcaacatagtgagaccccatctctacaaaaaaatgcaaaaattagccatgcatgatgatgcactcctatagtcccagctactcgagaggctgaggcaggagggttgcttgagcctgggaagttgaggctgcactgagccgagatcgcagcaccgcactccagctggggtgacagagtgagatcctgtttcaaaaataattgattaatttaaatttaaattataaataaaaactgtcagacctgtcaaggcttagagggaatgacaatcatgccaggaaaggggaggctgatcgctggctccctgtaagcaccaggcttgtgtgaggaacattccagacacagcttcattctgggggtgatgttatcatccagttttacagttgaggaaagcagggctcagagagatgaagcaactcatccaagtcacacagccggcaggtggcacaggtgttcccacctttgggccttgtcaagacctcagacatctctgaaggaggctttccaacgaacaaagggtttctcactctgccagtaggaatccaactcaggtgggggtggaggtagttgggtggtggacacagacatgcttctccgcaatccagaatctttttttttcctttttatttcatatattaaaaaaaataaaataaataggctgagcgcagtggttcatacctggaatcccagcactttgggaggccgaggcggaaagatcgctggagctcaagagttcaagaccagccagagcaacacagtgagaccccatatctattttctttttcgtttgtttcaatagagatgaagtctatgttgcccaggctggtctccaactcctgggctcatgcgatcctcccacctaggactcccaaaatgctgggattataggcgtgagtcactgtgctgggcctcaagatctctttgaacagtagcactctttgaacacttctcagagtgtagttttttggtgaaaacagagtttgcaatgggttctacgcctactggggtattaaatcaaagtgaaggacatttgggggcacagaggaccctgtggctggagtctcggaaagcagcgccacctcccacagaacttcccttccagcatcacaggctcgctgggtccagcagcccccaccagggtctgactcatggtggaggggtctcatgccttctccaactcttgcctccccactctggaccagcacaggcccccgggactagagcagagaccaacagggaccctgaaggctgaagcccatgtcatcggccccaaaggacttgctttgtcctttaaaggcaaatcctgcccaggaagtgagacggagtgaacacaaaaagagcaaacagctctcaggaaacctccctacatatccgccgccatctaccatgcagggctggcagtgggcagggctccgctgctccgtccaggcctcagatgccccagcctttcccccgcctgggtcgggagggagtggtaaagagttgcctttttggagaatctaggtagggaaaagagattcccaaagcttgaaaataaattgaaacagatctgccagatccacaattcatctttggcttcttaaggtcacaagcagtctcggggactatttccattccaccttcctctagctcttagctggcttttcacatatgctaatgagcggcccctcccagcacactgtgttcagcaccagttgcctgcttcacgagaactagtcccagcccacagtcacggatgcccctcgcctaggtctgacccgccgtttgcctttctagcgttggcactcaactgcttggaccctacaagcgtttgcctccctggcatgggggcctctgaatcttagggtgggaggtggagctacggaagggagcccaggagtgagcaacagatcagcagcagcactgcgcccctcttcttaatattgaagagacttgaaacaattcagtcttcgccaccccagaccagcccgtgagggcaaggccaggaagggatacagggttctagagaaccagggcctcaccgccagctccggccgctaagcaaacattccctccaggagtccgagaagccggtgtgcgaggggaggaaccagcctgaggtttatcgctccagcaactccgggtgattcatagagtttagactcccggttgtcgtagaccgcggcaggcacgcaaacaagcagcccgggagataccctcccctttcccagcccccgctcctccaccttgctaccccctagcccgtgaccagctgcctcccctccccctcgcgggcgctcagggttgagcaaacactccgggccgcccgccccgccaccagctggctccgaccggcgcaccgctggcgatcccccaggcaattcggcgtcatgagaaccggcaccccgagactcggcgccctgccctccctccgcgtctccagggccctggccaggcccaacaacctctccctcctctgtgcgcctcagcccctacgggcctctggcgcgggctaactaggcctcgctgcgggcccccaggactgcgcaccccaccccccgcgaggccagcagccccgggggaaggcggccggaaaatctcttgtttatcgggctggataagtaccagcctggattcgcttcccaatttctgcggtccagcttcagcagattcctggggccggaggggaaagggtggcaacccacagatccaccccggaacagggagtggggggtggggctggtgggaacctgacctcctggaaaggacggactcggagtcagagccaacgtgtcccggagcgcagaggcccagggggtcgcgctaaacactgtacctcggggaacaaaaccgtgaaggctaattaggacaagtcggagcagggaacggggacgccgggaggggagagcgcgctccgagttgggcagaacctggaacggtcacaggaaacccgggcgcggggtagtcgggccgagggggacctttgcccacggtccagagtggtctggactcggcccacgcgtgagaggagcgcttggtgacgatcccacgtacgcttggtgactggtggaggtcccagagaaggaccgtgcgtgcaaaaggcgaacctcggtgtgcggtgtgtccacgtgtgcaagctggggaggggagggggcgcagaaggcgtgacaaagacggactctgtcttgagtgtgcgcctcgctccggcccgctcccagcgaactgtgcctgaagtgtgtctcacgggagggccaggacgaaggtgacaaaggctaggtgtcccccacggagacgcgccaaggtagccccgcgcgtgtccgtaggcgcgctctctggaagacgcggtggggggtgcgcagggctgcaccctcacaccaattgccccggcgaaggccgagcccagaaagtgagtgcgcgtgagtgtgcgcgcgcccgcatgcgggggcgtggcagtcaacagcaacaacccacacgccggcagggccagaaactcccatctccctcaccagccggaaagtacgagtcggctcagcctggaggtgagtcggggcggggagggccgggcaggctttgttcctgtgtaaacggagcgcacgtacctggagcgcggcgggcgcccgattagcgccctgaatggaggtgatgtaacggtgatgcaggctccagcccaccctcgccgaaagcaaggagccctgcctggggacaggcccgcgcgagagcgagcaacccagcgcgcctggctcagcctcggtcccagggagaggcaggccctgcgtcccggcccgggccccgccatcccagccaggaccgggcctggcccagcgccccgcgccgcgtccctcccacccccgcccgccccccgcctggggctggagttggccccaaacgctgcgctggagcggggccggcggcgagtcccaggtaa

SEQ ID NO: 7237 - DNA, 6000 bp, Homo sapiens
ctctgaagataactatcgtcactattaagctagaaaatgtagacaaaaagactgtcacttaaattttatatgtagatttatgttttatctcaaaagcagttttcatcttctaattatatgtcttcactgtggatacgtagttatagcaaaaagcatgcgtgtaatcctgtccaagcagatgatcacttgggatattgattctattaagcatttgtgaaatcagcctgcctttgcagatttagcagtctgtgacagagcagacgttttatatgtttttaggaaggttagctgtctgaaattggtgactaaacaaagtctgtttgggttaagtgtacaaccagacagtatgatgtaaactgttgtaacaagatcttccatttctaagccctaataactatttgttttcttcttgtttttagggtgaatctgtaaaatatttcctggataacttggataaacttggagaaccagtaagtgtttaaaccaaatgtttatgtttagtgccatttgaaagcagaagtcaggatatcgatgttaggaaatttagaaaaattatgtattaagctatttgcttctttctctctttttttttttttttttttttttttttttttttttttttttttttttagtggtggcgttctgattcttctctgctttatttagagtgattggtagctcagaatattgaatgatttttattttttcaaaatgaaagtatttttattgtttaatcacgacacttcttttttctccctctaactgtccaggtctctaccattttcttgaggaatgctttgtctgctatttcttggaagtaaaactgtttagagaaagaagtttgtgtttgaagatgatattgtgcattatctgttatactttagtatctttagaggtttttgtttgtaaacagaaatagaacacagtgggttgactgatttccaaatcttttgacaaatgacattttcgaattcatgccccctttgtgtcgagtcacggagtaggagggctagatttaaaaggctgaagagactccacgaggtagggggagtcgcccttgaaaagagagtctatcattttcctgtaggtattcctcggagccagcagctctaagctggcgctgtggccagcggggcccactgcaggcagagcatctcgcttgtttgacctctgtattgggcgtacacagaagagttcagtgggagaaaggtttctgctgcttaggaaaattttgaaagccattgccttagagtcatctgttactctctaaatgtagcacagcttcatttgcctcctcataaggcaggtttcttcttcttcacacagctagtatgtgtgtgtcctcatcaacatactctgctctgccagactatttagcactcgattgcatgaagttctgtgcttcatgtgaagcagcctttagattgctaactagattattagctttaatagagacaaagacaataatagagaactttttatttttatggaattacattttttaaaagctcagggcccggcgtgtttctgaaggagctggcataggtgtatgttgtaaattggtattgccttctagaaagcagtcgggtgttaagtatccagagtcattaaaatgtttgtaacctttaacgtcataatcgtacccctgattattttaatcttaggaaatagtccaaaggaaaaaaaaaatgtgcatgagaattttaattgcagtatttctgttaattatggctaaaaattggaaacaaccttaatgaccactagtaggggaatgttaatgtaaagtacagcacgttaatgcatttggtgtattttcttgtcttttaaaatgaggtatgattgtatcagcatatggaacagttcacaaaatattaagcaaaaatgcagaggtaggctgaacgctgtgtgcatatgctgattataaataaagcaggcgtgtatctgaacaaagctagaagaaaacatggaaaagctaacacttgagtcctagagttatttaatgaatggctgttggttgccagtaactaagaacccacctacttttaaaaaactctgaattctggccgggtgcagtggctcacgcctataatccgagcacattgggaggctgaggcgggaggatcacttgaggtcaggagttcgagaccagcctggccaaaatggtgaaaccccgtctttactagaaatacaaagaagtagccggccgtggtggtgcacacctgtaatcccagctattcgggaggctgaggagcagaatcgcttgaacctgggaggcgcaggttgcagtgagccgagattccgccactgcactccaatctgggcaacagagcaagactccatctcaaaaaaatatgtatatatatatattcttaattccattgcaccattttgagacaatgagtattcttgtaatgaaatttcaaaatcatatgacactattcagaaaggcataaagtgcagcattgtgaataacagcattgttttaaatcctgccttgatttttaaaatattttgaccttgatgataaatattagctgtcccgttcatgtattaccagaaagttgtgttgtagttttggaaaaatgctagactgacaaggaagaaccagttacattgcataaggaagtgtgccatcacagagtagccagagacttgtgtgaccagcagcttctgtttgttcagggtcttagagttcactgaccaagagtgcagagaagagctcatttgatccttgcaacaaccctccctcccaggtatatagaccaagtgtgatcacctccatttcacagacagaggtgctgacactcagagtaagtgactagtttgagttcttgggtcaataagtaagaaattaattatagtagagaaaggatttttcacacatgtaatatagcagcaatgaaaacatagaagttttaagtcatgagtggggttgcacagtaaaagaacttttagaataggttagagagaggtgggcagaacttggaactgggaagtgatccttgtgaattggcactggaatcagatcccattgccttttttttttttttttttttttttaagacaaagtcttgctctgtcacccaggctggagtgcagtggcatgatctcagctcactgcaagctccacctcctgggttcacaccactctcctgcctcagcctcccaagtagctgggactacaggcgcccgccaccacacctggctaatttttttgtatttttagtagagatggggtttcactgtgttagccaggatggtctcaatctcctgacctcgtgatctgcccgtctcggcctcccaaagtgctggaattacaagcgtgagccatcgcgcccagcccccattgcttttaatagaggagcaaggagcagtgtggagaaggtagatacgcagacaggaagatcactctggctagaaccaagagtggctgatagtggggagtaagattgcaggtggatatatagcagtgagggtgggtaagaacaattgataagacttcagcttaaattttgagtagtattgcagggatgaaaacaagtagattctggccatttgtagtaaattttgaacccgtcctgctaacattttaatgtatcttggcttttgttgtggggagcacaagtgggtcttgctatattgcccaggatattctcaaactcctggcttcgcaagcgatcctcctgcctcagcctcccaaagtgctgggattataggcatgacccaccatgtctgaccagtcttggcattttataataagcataatctatctgaaaatgtcacttaaaagatcattttgtttgcatatctattcactagtccagttagtagtccattaaaaattcgcattacttcgggattaataggtataaaacaagttttttcttttccaggattatattccatcacaacaagatattctgcttgccagaagacccaccaaaggcatccatgaatacgactttgaaataaaaaatgttcctttcaaaatggttgatgtaggtggtcagagatcagaaaggaaacgttggtttgaatgtttcgacagtgtgacatcaatacttttccttgtttcctcaagtgaatttgaccaggtgcttatggaagatcgactgaccaatcgccttacagagtctctgaacatttttgaaacaatcgtcaataaccgggttttcagcaatgtctccataattctgttcttaaacaagacagacttgcttgaggagaaggtgcaaattgtgagcatcaaagactatttcctagaatttgaaggggatccccactgcttaagagacgtccaaaaattcctggtggaatgtttccggaacaaacgccgggaccagcaacagaagcccttataccaccacttcaccactgctatcaacacggagaacatccgccttgttttccgtgacgtgaaggatactattctgcatgacaacctcaagcagcttatgctacagtgatgtacaaaagacttgctgttttaatatctttttgtgtttttgatgttttctgtttgttttgttttttaaaatagcagtttacaaccagaattagaacaatcttaattctacgtttaacttcttgaaaatcttagtactttttctgcggcctttggtttgtggctgaaagctgttgagtgactcatcgccaagatttgctgtaatgcaggctttgatctgtttcaccatggcttctattcaagtccagttaaaacctcccagctgacctcagactaggcatatttcaggctttaaattattctactttccaaactgaattctcctgcagtgccaagtatcaaaggtgtccttaaatacttgtagggatgaggttaggaatattcagttccaaaacaagatatcttctgtccgccttacatatagcagtgacacttgttgcctaactttatggtgacctcctattttgtaagggctgttagaagttctatctaagaaatggcattctgtaggtttatagaaggtttagccttcatattttaattgcttgtatacacaacagctgttttgcttttagatttctgtgtttctgaaggtaatgttcttcctgttttcaagtttacataaggatctttggtctgatgctgatgaagagttcacaggtggtatgggagagcaaaaggcaagctaatgctgtttaccgtgttttggtcaaacgtaacgagtgaaatagaatttgcctttctcatatttaattatcatgtagtttaatgtaccatatgtgaaacattctggccatagcagcaactaaaaactgcaagcaacttggtaacagaactttctaaataaacttaacctgttccagaatgtcatgtatttgacttttaagccctatctcagttggtcagtaaagaccaatccttactgtaggaaatcattgttgtatcatcacaaacatctatcttttgctgtcctgtccagtcccatcaactccacactgtgccatttgtggcatcgttttgtttatttggagtttgctaagggcagtatttttctgtcaagactattcaagaaggcattatttgagattcctgttcattcttggtgtgtctctaacagatacagtatgtatacatttgtataattgttgttgttgaaagtccagcttttttgaggtatattttaaatgttttaaggatgcttctaaggatcagtagtaatttttttagttcgcacctaaagatgattacattgacctcccccgactgcttaccaaattaaaatgtgtccacgaagtagctttgtgatcgcagatacattcatagtgaactcatcagaatggctggtttgcagtactgaaatactatcttctaggctgtatgtagtgctacaattagagaaacagaagtccaaggctggcgacagcttgaaaagtctgacagcttttctacttttcctgaaaattttaagactgtgatatctgtcattttactgtatagctgactgtgtactcaggtattttattggtccttgaaag

SEQ ID NO: 7238 - DNA, 6000 bp, Homo sapiens
gtcccagctactcgagaggctgaggcaggagggttgcttgagcctgggaagttgaggctgcactgagccgagatcgcagcaccgcactccagctggggtgacagagtgagatcctgtttcaaaaataattgattaatttaaatttaaattataaataaaaactgtcagacctgtcaaggcttagagggaatgacaatcatgccaggaaaggggaggctgatcgctggctccctgtaagcaccaggcttgtgtgaggaacattccagacacagcttcattctgggggtgatgttatcatccagttttacagttgaggaaagcagggctcagagagatgaagcaactcatccaagtcacacagccggcaggtggcacaggtgttcccacctttgggccttgtcaagacctcagacatctctgaaggaggctttccaacgaacaaagggtttctcactctgccagtaggaatccaactcaggtgggggtggaggtagttgggtggtggacacagacatgcttctccgcaatccagaatctttttttttcctttttatttcatatattaaaaaaaataaaataaataggctgagcgcagtggttcatacctggaatcccagcactttgggaggccgaggcggaaagatcgctggagctcaagagttcaagaccagccagagcaacacagtgagaccccatatctattttctttttcgtttgtttcaatagagatgaagtctatgttgcccaggctggtctccaactcctgggctcatgcgatcctcccacctaggactcccaaaatgctgggattataggcgtgagtcactgtgctgggcctcaagatctctttgaacagtagcactctttgaacacttctcagagtgtagttttttggtgaaaacagagtttgcaatgggttctacgcctactggggtattaaatcaaagtgaaggacatttgggggcacagaggaccctgtggctggagtctcggaaagcagcgccacctcccacagaacttcccttccagcatcacaggctcgctgggtccagcagcccccaccagggtctgactcatggtggaggggtctcatgccttctccaactcttgcctccccactctggaccagcacaggcccccgggactagagcagagaccaacagggaccctgaaggctgaagcccatgtcatcggccccaaaggacttgctttgtcctttaaaggcaaatcctgcccaggaagtgagacggagtgaacacaaaaagagcaaacagctctcaggaaacctccctacatatccgccgccatctaccatgcagggctggcagtgggcagggctccgctgctccgtccaggcctcagatgccccagcctttcccccgcctgggtcgggagggagtggtaaagagttgcctttttggagaatctaggtagggaaaagagattcccaaagcttgaaaataaattgaaacagatctgccagatccacaattcatctttggcttcttaaggtcacaagcagtctcggggactatttccattccaccttcctctagctcttagctggcttttcacatatgctaatgagcggcccctcccagcacactgtgttcagcaccagttgcctgcttcacgagaactagtcccagcccacagtcacggatgcccctcgcctaggtctgacccgccgtttgcctttctagcgttggcactcaactgcttggaccctacaagcgtttgcctccctggcatgggggcctctgaatcttagggtgggaggtggagctacggaagggagcccaggagtgagcaacagatcagcagcagcactgcgcccctcttcttaatattgaagagacttgaaacaattcagtcttcgccaccccagaccagcccgtgagggcaaggccaggaagggatacagggttctagagaaccagggcctcaccgccagctccggccgctaagcaaacattccctccaggagtccgagaagccggtgtgcgaggggaggaaccagcctgaggtttatcgctccagcaactccgggtgattcatagagtttagactcccggttgtcgtagaccgcggcaggcacgcaaacaagcagcccgggagataccctcccctttcccagcccccgctcctccaccttgctaccccctagcccgtgaccagctgcctcccctccccctcgcgggcgctcagggttgagcaaacactccgggccgcccgccccgccaccagctggctccgaccggcgcaccgctggcgatcccccaggcaattcggcgtcatgagaaccggcaccccgagactcggcgccctgccctccctccgcgtctccagggccctggccaggcccaacaacctctccctcctctgtgcgcctcagcccctacgggcctctggcgcgggctaactaggcctcgctgcgggcccccaggactgcgcaccccaccccccgcgaggccagcagccccgggggaaggcggccggaaaatctcttgtttatcgggctggataagtaccagcctggattcgcttcccaatttctgcggtccagcttcagcagattcctggggccggaggggaaagggtggcaacccacagatccaccccggaacagggagtggggggtggggctggtgggaacctgacctcctggaaaggacggactcggagtcagagccaacgtgtcccggagcgcagaggcccagggggtcgcgctaaacactgtacctcggggaacaaaaccgtgaaggctaattaggacaagtcggagcagggaacggggacgccgggaggggagagcgcgctccgagttgggcagaacctggaacggtcacaggaaacccgggcgcggggtagtcgggccgagggggacctttgcccacggtccagagtggtctggactcggcccacgcgtgagaggagcgcttggtgacgatcccacgtacgcttggtgactggtggaggtcccagagaaggaccgtgcgtgcaaaaggcgaacctcggtgtgcggtgtgtccacgtgtgcaagctggggaggggagggggcgcagaaggcgtgacaaagacggactctgtcttgagtgtgcgcctcgctccggcccgctcccagcgaactgtgcctgaagtgtgtctcacgggagggccaggacgaaggtgacaaaggctaggtgtcccccacggagacgcgccaaggtagccccgcgcgtgtccgtaggcgcgctctctggaagacgcggtggggggtgcgcagggctgcaccctcacaccaattgccccggcgaaggccgagcccagaaagtgagtgcgcgtgagtgtgcgcgcgcccgcatgcgggggcgtggcagtcaacagcaacaacccacacgccggcagggccagaaactcccatctccctcaccagccggaaagtacgagtcggctcagcctggaggtgagtcggggcggggagggccgggcaggctttgttcctgtgtaaacggagcgcacgtacctggagcgcggcgggcgcccgattagcgccctgaatggaggtgatgtaacggtgatgcaggctccagcccaccctcgccgaaagcaaggagccctgcctggggacaggcccgcgcgagagcgagcaacccagcgcgcctggctcagcctcggtcccagggagaggcaggccctgcgtcccggcccgggccccgccatcccagccaggaccgggcctggcccagcgccccgcgccgcgtccctcccacccccgcccgccccccgcctggggctggagttggccccaaacgctgcgctggagcggggccggcggcgagtcccaggtaagggctgctgccttcccgctccgccgcccggaagagtcgggtcgggacggcggggagtgggcgagggcagaggcggggggactggacatcctgcgggctggggacgccgcgccaactccgctcggtcgctgaaagttttcaaacccgagccggctggggactgggggggtgggggagcccggcgctgcggctcgggctggagggaggggaaaccactccataatcggggtctccaagaggagcccctccaccgcctgcctctcggtgggagtccgcggtcactctctctcgtgggtggcgtcctctctgccgcctgctactgtggatgtggagggcaggtttctgtggccctaaaaatgggagagagtgactggttcccttgctccccattccagccacccagggagcgcaggtgtagaccccagtaccgtcgacccaagtagggacgagagggttcagaatccccctgagggaagtttggaaattcagactatcaaagcgcctccccttctggtagcctggcccctagatcccgaacccccactcccggctggcttttccagcgtcctttgcacctccatccccaggcccgcagtgttacacgctggaagacccaatcacttacaaactccacgatcaagatcctaaagcccgggagaggagactgttggaagtagggttttgtgctcctggagcttcctctccccgccggccccccacccctgtgccttcaactggactgggggagggagtgcattggggggtggggcgcattccagagtgacattccagagcagacccttgaagatttccaagtctcagagagctcagggcattttggcccaaatgcctggtcttggtgcggggcaggggcagggggataggggtggggtgtctaggctgaggttcgaggaaccccaacccaccccccaccaacctacacactgaggccgctccttccaggcacaggcgtctcctgtgcgccttcttatcgatggggtaaacgcctgagcgccctgcacagaggggtgagacagtgggacctaaccagggactgggagagaccgataggagtggaggcaggaaggctgtcagtcgggccatcgtctttccctataggctcttgagtgtgtgggatgggaggaaggcaagtgctctgtggtatccctgggggaacctccctgaagagtgccctggtcacagcacccttgaagacagccattggccatgggtcagtgttgagtttggttggccctgtgacgcgctggagctctctttccagtgcggtatccttggccctggtgggtggagggggtctcaggcttgtgtgtggatgatgctggagcgaggaagggagttttgctctggagaagtgagaaggcctggctgtctccccggttgctggatgaagccacttgttgctgggggaaaccagtcagggctgcttgggcctctgggcctctgagcctctgagcccaccaggcctctgcgccccctggagagagaaggagggaggagggaggttcagcaactggactgcactgactcacaggagagctgggggcagggtggctgagcctggggaaaggccgatttcggaggcgattaaaaatatttgtacaactgattccagggaagtgaagcaaaaggcccttttgtccagaaaataatctgaggctggagctgggcttcagctgtggggtgggggagactcagggcggaaggaggttcccctcctacccccctccttgaaccctctgagaatctttaagcagaagatgcaactccaacatggaggggacaaccctgggtgtggagaaatgcacctgggaccatccagaggtgacttccaaatgcccactgtgttcaggcacagcaccagctgtggcagtggattctagaagtcttgttcaccagcttcaaagaccttacagccctggaggggagacacggacatgatttgaacgttcagggatcagaaggctcagtcttagtgcagggtctggggacccacaggaggcagaagtttcctccagggtcctgaggaaaagcctctgaccagagctgagtccatcttgtcagtcccttagccaccatcttaaaaggtggcattgggccgggaacggtggctcacacttgtaatcccagcactttgagaggctgaggtagg

SEQ ID NO: 7239 - DNA, 6000 bp, Homo sapiens
agtgcagtggtgcaatcgcagctcactgcagcctcgatcccctgggctcagatgatcctctaacctcagcctcccaagtagctcagactacaggtgcatgccaccacactctctgctaattcatatatatatatatatatatatatatatatatatatatatatatatttgttgttgttgttgttgtttgttttcatacagagtctcactctattgatcaggttggagtgcagtggcgcagtcttggctcactgcaacttccacctcccgggctcaagcaattctcctgcctcagcctcctgaatagctggtattataggcgtgcacctccacgcccggctaatttttgtatttttagtagagacggggtttcaccattttggccgggctggtctcgaactcctgacctcaagtgatccaccagtcttggcctcccaaagtgctgggattacaggcgtgagccactgcacccagctgctaatttttgtgttttttatagagacggggtttcaccatgttgcccaggctggtctcaaactcctggactctagcaatctgttcaccttgacctcccaaagtgctgggattataggcatgaaccaccgtgcccagcagcatttaaattttcagtgttaggtttcctccaagtacatttaaaacttttgattggaaaaaaactcattgatttggtctttaatatttcttaacctgttaaatccattacctccacttcacgtgggaaaatccaattggtattgggagcaggagtttggttttcttctctggcacagatctgtggcatttggtagagcggcagtcagtagatggagtgaaaattaccttgctggtgttaataaaagctaattttcttgccttctagctacaacgtcttaaagtcttctattaaagattaattcctttgggttttgcattgcccttgcctggttcttacttttaaaatgttaatgctccgaaggaaaatttttgcattaagtcattaactccttagctggggacttcgtttatttcacccttgacttccgcttccgagctaggcaaaaaatggaggattctgaactggagacttggcactaaaagtgggaaaatgactgtctcttcatttttcctggctgttggttatgcctgctgcagctgcttgttaagtctattgaatgaatgaatgaacacatagctgactggctgtggatttaggcctcacaggaatggagtttaggggcatagcagctgacctcctgaagcctgaaagtcccagggcagagaggaggtactgggtgggtggtatgcttggtcttgacttgttcacaagccccttcatcctccaccgtggccgccagagctcagggaatatctgaacccaggttatgtttggtggaagggagggaactgaaaattcaatgacaggtttttcttttgccatggctaggaatagggctgacaaatgggcttcatctcatttgcctctgtggccagttgaaatgcctctcaggggttctatgttaagaaggattctgaggtccagagagcctcacggtcagcagctagcactatctgcctgggtttaggttgggggaagcagcaccatgtatattggagtctgatcttggaggactaattttgtcccttttccttctgtctctagggacccaaccagagcctggcctgggagccaggatggccatccacaaagccttggtgatgtgcctgggactgcctctcttcctgttcccaggggcctgggcccagggccatgtcccacccggctgcagccaaggcctcaaccccctgtactacaacctgtgtgaccgctctggggcgtggggcatcgtcctggaggccgtggctggggcgggcattgtcaccacgtttgtgctcaccatcatcctggtggccagcctcccctttgtgcaggacaccaagaaacggagcctgctggggacccaggtattcttccttctggggaccctgggcctcttctgcctcgtgtttgcctgtgtggtgaagcccgacttctccacctgtgcctctcggcgcttcctctttggggttctgttcgccatctgcttctcttgtctggcggctcacgtctttgccctcaacttcctggcccggaagaaccacgggccccggggctgggtgatcttcactgtggctctgctgctgaccctggtagaggtcatcatcaatacagagtggctgatcatcaccctggttcggggcagtggcgagggcggccctcagggcaacagcagcgcaggctgggccgtggcctccccctgtgccatcgccaacatggactttgtcatggcactcatctacgtcatgctgctgctgctgggtgccttcctgggggcctggcccgccctgtgtggccgctacaagcgctggcgtaagcatggggtctttgtgctcctcaccacagccacctccgttgccatatgggtggtgtggatcgtcatgtatacttacggcaacaagcagcacaacagtcccacctgggatgaccccacgctggccatcgccctcgccgccaatgcctgggccttcgtcctcttctacgtcatccccgaggtctcccaggtgaccaagtccagcccagagcaaagctaccagggggacatgtaccccacccggggcgtgggctatgagaccatcctgaaagagcagaagggtcagagcatgttcgtggagaacaaggccttttccatggatgagccggttgcaggtgggtctctgtggatgcccccagtggcccctttctccatcccatgtcttttactgcaggacagggagccagtctcttgagcaaaatggaaagtttttgaggttttctgtagttttctgcctaagtgtctctaaattccatttaatttaaagatttttttttttcagttgggcatggtagatcatgcctgtaatcctagcactttgggaggccaaggcgggtggatcacttgagacgaggagttcgagaccagcctgatccacatggtgaaaccccgtctctactagaaatccaaaaaaattagctgggtgtgctggctcatgcctgtgatctcagctactcgggaggctgaggcgggagaatcacttgaacctgggaggcggaggttgcagtgagccaaaatcgagccactacactccagcctgggtgacagagcaagactccatctcaaaataaataaataaataagattttttttctatattcatataattcatgcatacattctcactgtaaaatttcaaacattacagataaaatgaaattttccccagctgcctccccagtcctacccgtcccatcctgttccatccccagaagtgaccactattgactgatataatatctatgtgcctttgtttctccatttgtaaaatggggataatgtcagtacctatttcatagggttcttgtgaggattgaattaattagtgccggctgggcgccatggctcacacctgtaatcccagcactttgggaggctgaggtgagtggagcttgagcctaggagtttgagaccggcctggacaacatagtgaggccccgtctctacaaataatttcaaaaattagccaggtgtggtagtgcatgcctatggtcccagctcctcaggaggctgaggcaggaggattgcctgagcccaggaggttgaggcttcagtgagccgtgattgcaccaccacattccagcctggatgatctcaaaaaaaaaaaaaattacttagtgcccggcccatgaaaagcactcttgaagaattagctatttgctgtgtgtgcgtgtctattattttacatattttactaatactatccttccagaacttgtttttctattatgtatgtatccataatcaccttagttttctttaaaaggaagtatttttcaggtaatttttttctctttttttattttttgagacggagtctcgctctgtcacccaggctggagtacagtggtgtgatcttggctcactgcaacctccgcctcccgggctcaagagattctcctgcctcagcctcccaagtagctgggattacaggcacgtgccaccacacctggctaatttttgtatttttaatagagacgggatttcactatgttggccaggctggtctcgaactgctaacctcaagtgatccgcctgcctcggcatcccaaagtgctgggattacaggtgtgagccactgcacctggcctttttctctttttaataaaagtatttggggtgccgtgtagtggtctcagcagcgcccttgttagctgtacagcccactagcatttcctcagcacctgctctgtgccagcccctgtgctaatccccttaccgatgtggcccattgcacgcatcccacctgctcttcctcagcctgctggctgcagcccctcatctgacatgacctggaaatttgggggtgccatctcaaagtcctgaccctgcccccagactgtgctgatctggaggcctgggggcttcagactttcttaactgcccggttaacaagcaccggctctggggtctctgctgggaggtcagagtcaggcagtggaagttccagaatcagagacattcctttctcttctacacactgtgaaatcctcataatccctgctttggagaaagagatgacccttgtcctgccgggcacttgatctttgatctgcccacctgggctgaggtgctggcctcacccctgggtggcccctgtcacacgcacggtgtgcatggcgggggtggaattggcaaaacccaccagagaggtggggcttacagacaagtgctgggaggagcctcaggccccgcccccacactgaatgccggtcggggccaaatggttctcaaccttggggctgagtttttacttcctttttttttttctaaatggaaaaatcaatagagtgagcccagccccagcacttaggaaactctatataggttgcggtccctcagaactgcagggccgtcagccttgccggagccagacgtccgctgtgccgtcctcacagcaaggcctgctccgaggccccggggtgcgtcagcagccctcctcaaacaccctgggagtgcccagcagggcggaacacaccgggaaaccaacaccccaaaggcacaaggaagtatccctggagctaaaaatagttctggaaacttgccagggggccacaggctgggacgtgcgttaaggctccctggccaggctctgggttggtgtagtggggaaggggcgcccaggtcggccctgggaggacatgaacaggcttaggccgagggctctcagatgtatttacctctgtgcctggcagctggcccgtggtgacaggcagagctggaggctggccatcttggaaggcggccgaaggcccatgtgtcctcttggcctctggccccggagggcggatggggatgtggaagttgctgacagagcattttctgagctgttgggtcaggggctggggtgtctacagtgcagggaagctcagcagtgttgttcactcccatgcatctgtacaaaggggtgctaggcttgggagggggcccccgtgttcacaacctcacccccaagttggccactcctgggttagagactatgccagggttggcctgccccctttacctcttccctgcccccagagagccttgcttggtttgtgggaggtggggaagggagctgagagccctgggatcttcaaactgttcctgcttttccttgtagctaagaggccggtgtcaccatacagcgggtacaatgggcagctgctgaccagtgtgtaccagcccactgagatggccctgatgcacaaagttccggtaagtgggttccccaggtccccgtgacacgtctgggctacagagaccagcctcagcaggccagtgggagaaggccatgtggccagagctgggttgggtggaggtggtaaggggaaggcaagcttctccatctggtgcttttacctggggaatccagagccccagttcttaa

SEQ ID NO: 7240 - DNA, 6000 bp, Homo sapiens
gcccattttttggatgtataaagcactgtgctagggaccatgggcgtggagaggcatgaaatccagagtccattccctacagacctatcatgagccagggaggcaagatctctgtttataagatacacctggccgggcacggtggctcatgcctataatcccagcactttgggaggccaacatgggcggatcagcagaggtgaggagtttgagacgagcctggccaacatagtgaaaccctgtctctactaaaaatacaaaaaaaaaaaaactagctgggtgtggtggtgggcgcctgtaatcccagttacttgggaggctgaggcaggagaatcgcttgaacccaggaggcagaggttgcagtgagccaagattgcaccactgtgctccagcctgggcaacagagtaagaatccgtctcaaaaaaaaacgaaaaagatacatctaaggcagagccatgtaagagtagcaaatgcatgccagaggtgggatcccaggagagcagagggaggaagaggactacagggtggggggtaccagcaaaagcctctgggaggagccaagggctttaaagggggatggaatcaagaggtcgagaggaggagagaggcatcctggattgagaatacgggacatgtgagcgaactcacaggaaggcaagtgcgggggcgaggcagactcagagcaggcttctcaggctggagtgaccatttcctgtgggggaacaggaaggagaagaggctggagtcaaggctaggtacaggttgcagaggccttgaatgccaggcaagggagcctggactttcacataaaggcaccaggagccagtgaaggtgttaggaatgaaaggtgttggggtgaagtcagtgaaggtcctgccccggatgggggtttgcagggtgactggagaagactgccaccaggggccatcactctgggggctggtgtagccactgcagcaaggtagaaggaatgctccccccgaaatgctcacagattggggtgagacgcttcctgaaggtaggggaacaaattgcagtgagggctacacgtttccattttgattttgatagaggcaggctgactgagtggcctggatccctggacccttggccttgatgtctggttctcaggatttgcgcagtctgtggatggaggctgaccagatcagagcagctcaggggaccccgttctctccttccacagggagttggttagcggccactgagccctgggcagggagggggatgagggaggagcagattttgcagccatgggggagggttcagcatcaggtgacattccagtggactctgcccaaggcctgcttccgggtacacttccagagcgatcacccatgggcagccagttgtggtgaatgagggtttcactcgcctgctccctggccctggcttcctccttcttaaggggccacgatgggacccgagtcctttcaaaaaactaggcagttcccgctgctccaagcagaaagtcctatgagcctaagagaaaaagagatttggccagacactgcagccagggcaggaaccagttaatatgagcctgggagcaaggagaggtgaaatgctgtttaccagcagccggctgtgggttgcagggcacccagccacctagcacaggattccaggccccaacttgtcaggaagcaggagccccaccctcagctcagtgagggactattcctccccatctggggcctggctgcaagacctagggctctccactccccaggtagagggagcaggccttctactctgtggaggaggaaatggctcctgttggagattctgcagggtgagactgcaatccagaactcctgctgcccaggcaaactgggaagtccctctaaacaacacaactgacctctggctctccctgggtaggcctctccatgcccaaagccggggtgccagggcctcctgccctcatctctgatgcagggcattgcagccccatggcaggtgacttctccagtaggcactggggcttgcctgcttctcagaaagtggggtacgggaggcagggcaggggtggtgctgtttgcaaggctgctggtgtgagggggaagatcggccgtggccagccacagaataacggatattccacaagcatttactgaaaacatttacccacacccgtctgagtgccagatgccagggaaaacaagatgagtgagacatgtccctggctctctagaagggcacagtgtaattggagaaaaaacaatttagaaggctaattatgatacactaggataaatgataaataaatgaatgtgtaacaggctgtgggtaaatagggcaactcacaatgggtctttcgtgggaaggtgaggatcgcttcacagaggaaggaacattggagctgagctttggggcagggcagattttttaaaactttttggtcacaaagaaaaaggatggtaagaggcataaaatgttcgaggtggaaggaacatcacacagagcatggcatggcaaagctattccaatcatggtgaaacagaactgaaagaatgccagcttctgcaagagtttgggttaaaaaccattaggccaagcacggtggctcatgcctgtaatcccagcactttgggaggacaaggagggaggattgcttgagcctaggagttccagaccagcctgggcaacatagtgagaccccatctctacaaaaaaatgcaaaaattagccatgcatgatgatgcactcctatagtcccagctactcgagaggctgaggcaggagggttgcttgagcctgggaagttgaggctgcactgagccgagatcgcagcaccgcactccagctggggtgacagagtgagatcctgtttcaaaaataattgattaatttaaatttaaattataaataaaaactgtcagacctgtcaaggcttagagggaatgacaatcatgccaggaaaggggaggctgatcgctggctccctgtaagcaccaggcttgtgtgaggaacattccagacacagcttcattctgggggtgatgttatcatccagttttacagttgaggaaagcagggctcagagagatgaagcaactcatccaagtcacacagccggcaggtggcacaggtgttcccacctttgggccttgtcaagacctcagacatctctgaaggaggctttccaacgaacaaagggtttctcactctgccagtaggaatccaactcaggtgggggtggaggtagttgggtggtggacacagacatgcttctccgcaatccagaatctttttttttcctttttatttcatatattaaaaaaaataaaataaataggctgagcgcagtggttcatacctggaatcccagcactttgggaggccgaggcggaaagatcgctggagctcaagagttcaagaccagccagagcaacacagtgagaccccatatctattttctttttcgtttgtttcaatagagatgaagtctatgttgcccaggctggtctccaactcctgggctcatgcgatcctcccacctaggactcccaaaatgctgggattataggcgtgagtcactgtgctgggcctcaagatctctttgaacagtagcactctttgaacacttctcagagtgtagttttttggtgaaaacagagtttgcaatgggttctacgcctactggggtattaaatcaaagtgaaggacatttgggggcacagaggaccctgtggctggagtctcggaaagcagcgccacctcccacagaacttcccttccagcatcacaggctcgctgggtccagcagcccccaccagggtctgactcatggtggaggggtctcatgccttctccaactcttgcctccccactctggaccagcacaggcccccgggactagagcagagaccaacagggaccctgaaggctgaagcccatgtcatcggccccaaaggacttgctttgtcctttaaaggcaaatcctgcccaggaagtgagacggagtgaacacaaaaagagcaaacagctctcaggaaacctccctacatatccgccgccatctaccatgcagggctggcagtgggcagggctccgctgctccgtccaggcctcagatgccccagcctttcccccgcctgggtcgggagggagtggtaaagagttgcctttttggagaatctaggtagggaaaagagattcccaaagcttgaaaataaattgaaacagatctgccagatccacaattcatctttggcttcttaaggtcacaagcagtctcggggactatttccattccaccttcctctagctcttagctggcttttcacatatgctaatgagcggcccctcccagcacactgtgttcagcaccagttgcctgcttcacgagaactagtcccagcccacagtcacggatgcccctcgcctaggtctgacccgccgtttgcctttctagcgttggcactcaactgcttggaccctacaagcgtttgcctccctggcatgggggcctctgaatcttagggtgggaggtggagctacggaagggagcccaggagtgagcaacagatcagcagcagcactgcgcccctcttcttaatattgaagagacttgaaacaattcagtcttcgccaccccagaccagcccgtgagggcaaggccaggaagggatacagggttctagagaaccagggcctcaccgccagctccggccgctaagcaaacattccctccaggagtccgagaagccggtgtgcgaggggaggaaccagcctgaggtttatcgctccagcaactccgggtgattcatagagtttagactcccggttgtcgtagaccgcggcaggcacgcaaacaagcagcccgggagataccctcccctttcccagcccccgctcctccaccttgctaccccctagcccgtgaccagctgcctcccctccccctcgcgggcgctcagggttgagcaaacactccgggccgcccgccccgccaccagctggctccgaccggcgcaccgctggcgatcccccaggcaattcggcgtcatgagaaccggcaccccgagactcggcgccctgccctccctccgcgtctccagggccctggccaggcccaacaacctctccctcctctgtgcgcctcagcccctacgggcctctggcgcgggctaactaggcctcgctgcgggcccccaggactgcgcaccccaccccccgcgaggccagcagccccgggggaaggcggccggaaaatctcttgtttatcgggctggataagtaccagcctggattcgcttcccaatttctgcggtccagcttcagcagattcctggggccggaggggaaagggtggcaacccacagatccaccccggaacagggagtggggggtggggctggtgggaacctgacctcctggaaaggacggactcggagtcagagccaacgtgtcccggagcgcagaggcccagggggtcgcgctaaacactgtacctcggggaacaaaaccgtgaaggctaattaggacaagtcggagcagggaacggggacgccgggaggggagagcgcgctccgagttgggcagaacctggaacggtcacaggaaacccgggcgcggggtagtcgggccgagggggacctttgcccacggtccagagtggtctggactcggcccacgcgtgagaggagcgcttggtgacgatcccacgtacgcttggtgactggtggaggtcccagagaaggaccgtgcgtgcaaaaggcgaacctcggtgtgcggtgtgtccacgtgtgcaagctggggaggggagggggcgcagaaggcgtgacaaagacggactctgtcttgagtgtgcgcctcgctccggcccgctcccagcgaactgtgcctgaagtgtgtctcacgggagggccaggacgaaggtgacaaaggctaggtgtcccccacggagacgcgccaaggtagccccgcgcgtgtccgtaggcgcgctctctggaagacgcggtggggggtgcgca

SEQ ID NO: 7241 - DNA, 6000 bp, Homo sapiens
agaaactgtttctgaaaagatcaataaaattgataaaattgatagaaaaaaagtgtgaagacataaattgccagtgttggccaggtacagtgctcattcctgtaatctcagcactttgggaggccaaggtgggcagatcacttaaagctgagagtttgagaccagcctggccaacgtagtaaaaccccatttctactaaaaatacgaaaattggccgggtgtggtggctcacgcctgtaatcccagcactttgggaggccgaagcaggcggatcccgtggtcaggagatcgagaccatcctggctaacacggtgaaactccgtctctactaaaaatacaaaatggtggcgggcgcctgtagtcccagctactcgggaggctgaggcaggagaatggcgtgaacccgggaggcggagcttgcagtgagccgagatcgtgccactgcactccagcctgggcaatgagcgagactctgtctcaaaaaacaaacaaacaaacaaaacgaaaattagctgggcatggtggcgcacgcctgtaatcccagctacttggaaggctgaggcgcaagaatctcttgaatctggtaggcagaggctgcatgaaccgagatcatgccactgcactccagcctgggcaacagagtgagactctgtctcaaaaacaaacaaacaaacccccaaattgccagtgttaagaatgaaagaaaatataaggccgggcgcagtggctcacgcctgtaatcccagcactttggggggccgaagcgggcagatcacaaggtcaggagatcgagaccatcctggctaacatggtgaaaccctgtctctactaaaaatacaaaaaaaaaaaattagccaggcgtggcggcgggcgcctatagtcccagctactcgggaggctgaggcaggagaatggcgtgaacccgggaggcagagcttgcagtgagccgagatggcgccactgcattccagcctgggcgacaagtgagactccatctcaaaaaaaaaaaaaagaaagaaaatataaatacagctcctacatacatcaaaaggataatatgaacaactttttgccaataaatttgcccataaatagaataaaatggaaaaattacttgaaagatacacattaccaaaactaaaaacgcaataggaaatctgaacagactttcctgaattcaaataaattcacaatttaaaatctttcaacaaagaaaatatccagtttcagatgacgtctctgatgaattctatcaactatataggtagaaataattaaatggagaaaagtattttcaataaatggtgctggaacaactgtatatatatgaaaaaatctaattcataatgatcatagacacacatcaaagctgaaactataaaaattatcgaagagaacacaggctgggcatgatggctcacacctgtaatcccagcaccttgggaggctgaggtgggaggattgcttgaggccaggagtttgagactaggctggggaacaatagtgagatctgttctctacacagtaaaatgtttaactagtgtggtggtgcatgcctgtagtcctagctattcaggaggctgaggcgggaggatcacttgagcccaggaggggctgtttctcttggatttttaaagtagacaatcatgtcatttaccaataatgacagttctctttccctttcaaccttcatatgttccaatcacttgtctttctgtatggtctggaagaatctcatggagaactggtggcacgagcgtgctttctcttgttcctagcttaaaaaaaaaaaaaaaaagtcctgaccagtagcggttctaggagagggtaagaatttgcggaaaatgtggcggaagagggaaacgatcattgtcaacagtgaaaggggtctcagggacagaagcatttaggaaagaaaagaagattgcttgccaagacctggcaaataaatcaggctttagaaggacaggcttgccaaactaaaaccacaacaagtattgaaagggaaattctccaagattaccattgtgagcacgtttttatcagtctactcatgatggcaaaacccagcgcttttctcacatgattttcatatgcacgaaaggtcatgacctacccaggcgtcagcattgcaaacatcagggttagagttgtttttctagggagtcagcaatttatagaaaatgctcaatgtttagtttattttggggactagaagaactatttttttcatgaaacccgcaagcaatttatcagcgaaattctgtctgctctaccttcacaatatatccagaatcacaacacttctgaccacctcatttctcacctggatatgacagcagcttcttacctagactctctgtttccagcttgtttcatcaaattcacaacacaaaagccacaccgttacagttaacatatgtcaggttatgtcattcctctgctccaaccccttcaaagtctgcatctctgactcagagtaaaaacaagtccttaataacagccaacaaggctcacattttcccccatcgctcatctactcttctcctccctgactcacttctctataaaatctctggcaagtctgtcaaatggatgatcctcatacacaccagacgttctcccacctcagggcctttgcacttgctctgcccgctccctgcatcactcttcctgccagagccccttgtgacttgcttccttacctccttcaaactttgctcagatatcaccttcccagtgaggcctttcttgacactctggtatggtttggatctgtgtccccgcccaaatctcatcttgaattgtaatccccgatgttggaggtggggcctggtaggaggtgattggattatgggatggatttctcatgaatggttagcaccatctccttggtgctgttctcatgatagtgagggagttctcgtgagatctggtctttttttttttttttttttttttgatggagtcttgctctgttgcccaggctggagtgcagtggcgcgatctcggctcactgcaagctccgccttctgggttcatgccattctcctgcctcagcctccccagtagctgggactacaggtgcccgctaccccgcctggctaattttttgtatttttagtagagacagggtttcactgtgttagccaggatggtctcgatctcctgacctcatgatccgcccgccttggccatccaaagtgctgggattacaggcgtgagccactgcgcacagccgtgagatctggtcatttaaaatctgatcccctgtcttttctcttgctcctgttcttaccatgtgaggcacctgctcccccttcatcttccaccatgatcataagtttcctgaggcctccccagaaactgagcagaggccggcaccatgcttcctgcacagcctgcagaactacgaagcaattaaacccctttccttgataaattaccgagtctcaggtatttatttagagcaatgtgagaatggactaatacatgccctattcttgagggacattaaaaatcaaccctatctcatatccctgctctttttccgcaaagcactattgccatgtggcttatgtatattttactcatttattttgtttattggtgacccactagaaggtaagctctatgaaggcaggacttttttgtctgtttacttttgaactcctgaactctgcctcttgggaaggaaagtgcttggcatgccgtagactcaataagtactcaaatggatgaataaatgtgtataagagtgattggacgtatgtttattgcagaactatttacaataggaaagacttggaaccaacccaaatgcccatcaatgatagactggataaggaaattgtggcacatatacaccatggaatactatgcagccataaaaaagaatgagttcatgtcctttgcagggacatagatgaagctggaaaccatcattctcagcaaagtaacacaggaacagaacaccaaacaccgcatgttctcactcataaccgggagctgaacaatgagaacacatggatacagggaggggaacatcacacaccagggtctgtcagggggtgggcggcaaggggagggagagcattaggacaaatacctaatgtatgcgggccttaaaacctaggtgatgggttgataggtgcagcaaaccaccatggcacacgtatacctacgtaacaaacctgcacattctgcacatgtatcccagaactaaaaaaaaaaaaagaagcttcaaacccactgaaccagactgaaaaaaaaaagttagtgaatggagaaatatcatgttcttttcatggaagattcaacaatgtcaaaatgttgattatctccaaattaatatgtgaatacactgcaagactgtggtagacacacagagagctacccaggtcccccttctaggaaggatgtggtgacccactgtggggagtgtaacctgcagacagctgcttcctgaggtcacacccatgtcagggctgactgccagtgaccgaaggagctggtgctctacaggaccctgtggcagtccaatgctggacagctcccgggggtggcattgtttgaacccagagctccctgttggtttggttgaagctctccaaagtgctgggcttctccctctgcccagcaccatttcatccactttccttttcgaagtgctaatccctaataaatagcttgtaccccaaattcagcctcaaccttggcttccaaaaaccgaacctgcgacatatactaatcaaaataccgaataccaaataaaaacaaaactggcaacgacctggccgggtgcggtggctcgcgcctgtaatccctgcactttgggaggctgaggcgggcagatcatgtgaggtcaggaggtcaagaccagcctggccaatatggtgaaacccctctctactaaaaatacaagaattagctgggtgtggtggcgggacctgtaatctcggctactcgggaggctgaggcaggagaatcgcttaaacccaggagatgcagtagccgagattgtgtcactgcactccagcctgggcaacagagtgagactctgtctcaaaaaaataaataaataaataaaataaaaaagaaaagaaaaagaaacaacttaaatttctgatttatttctgtcaatagagaaatgctaaataaataaattacggtgcctatgatgaaatgaggtgcaggtagatcaagtacattttataaactgatgtggagaaatgttcctgatagcttgttaactccaaaaaaaaaaaaaaaaagcacatagcagaacacaaccccatgtacatacaaaatataacctaaaatgtatttcttctccttctccaccttgtaagatactcagtttccttcctactgaaagggatgtgcgcgtggattcagggcagctcccttaggggttgagcagggatcatgggatgaaatggaatcctgttcatgaagacagcgcctgtgctgagagccagagcagggtgccaaactgtctccttacaagctgtgagtgatcttgggctctgagcctttagtccgtcatccaaaatgcctccccaggtgcttggggggaatggttgtggaaggtaaatgtctggcataatcctatcacagattactcaataaaatttgctcttttccttggcttctcccgtcctattagggccaagaagttctattctctggcacccccttccctccttccgagtggagtgaggcgagcgaggccacagctgagcagccgaatgactgggacccagaggatgctgatgccagggactcaggccaggattgagcaagagaacagactgggcttctctaggatcagaggtgcgatgatggagacccaacaattctgggaaatgtagaggcaggaagtgaaaggaagtgtagggtagaggagcaacagcagattgtacctctgatccagccctgctcccagatggtaaaaatgaggaagctccgagaagaggaaaggaagtaggcatggcctgg

SEQ ID NO: 7242 - DNA, 6000 bp, Homo sapiens
tcgtagggctgtgtgagtcagtgggaggagtttagattttattccagttaccactggagggattttagaagagcgacaggataggatttaccttttagctgagatttaccttttggctgctaagtggagaatgaagtcttggtggaaacactgaaatagttcacgagagaggggatgttgatgtcttggccctgggtagtggtgtgaaagtggtggattttgcatactataagggaggagcaggcagtgttaactgacaaactgctttggggtagggggagtgagggaaagaggaaaatcggaaagaattcctaaacctttgttttgatcaattggagggacggtggtgccacttactaaaacagaaaggctatgagaagggttgatgtttggtgtgagcaggactgagaattctgctttgaacatgccaaggtgagatgcctgtgtgccatccaagtgaactctcaggtctgaagttttgaggagagaaaggactaaatgtgtacgtgtgagagaaatcgtcacatacatggtgctcaaagccatggagagatgtgtgggtagggaagaaatgagggcccatctggttcactgctgcccagtgttccccagtgtttccccctctggtgtctccttcctcactggtgccttcctgatcccctgcttagaaaaatccctgttgtaaacacttataaccattgtgtaccctccttcacaactctcaacacagttgaaatctccatgtatttgcgtaatcagtaatgcaatgataatgtgactaggtgatagatccgtgagcgtagagactctgcttttgttcatcatgtgaagaaagatcacccaaaacttagaaataaggaaagaaggatgactgcgtgttctgtccatgtcatagagcattgggtaataagcctgtccatgggtcaactggttttcatttgatgtactttttaccttaataaagggccagactctgtaaagttaaggttgaacttgtaggaaactgataatatgtaaatgatttttgtctagtagacagaattattacccccaaagttatgattttactatactgtagaaattgactgttttttaatccaatttagaaatcttattccagcacttttttggttaaactgactctcttcttctatctctctctccttttctacatgtacatatgtattcatatatgtatatatagcatatattttttttaccccatatctttctttgaatcggcttgattatcttgatgaatccctcatgaatgactcaaatacaactttgacatttgctctctgtgtttttcatgagaattatgtttttaacattttgaaaattgtacactgacaggtattctcatggtctcccagcattttacacagtaaagcccctgatgcagagtctatactcaatacctatttcctaaatgaaagaataaactggcctaggacctaatgaatataactaaggtttatgaggccaactcttatctctactaagtgtttggaaaaatacatggtaataaggctctgagaaagggcccatgcaggtcacccatcaagtacctctgcaatgtctaactcctccaagagtgattatccttgtcaaggcaacaatcttcagagggcactgcttagcttagcaacagaatcttcaatataattttttataatgcctattgcaaacaagtgacccaggtatggatttgatctgggactccttaaagaccacaaaattattagttaagaatgacttaatccacaatatgggagaaacaacattcactttactaagttgttaacctaagcataaatctatacatatgatataaaagaaatatatagtgttccagtattaaatttcatttcctcgtttttaagaaattagtgaattcttattcaggtgtagctcagggcaaaacgtctgtcttggtatgtcctagagtctcttttttctctcctctttccttttccctctcatctctctcaccttgttcatgttttgaatattctcccctctttcctttcccctctcatctctctcaccttgttcatgtttttaatagtccattgatcccattctttgttttaattattgatccatatattacttgttgtcttaatatatacggatccatatattacttattgttttaatatatggatccatatattactattgcttttttttctttttttgagagtgagtctcgctctgtcgcccaggccggagcacgatctcggctcactgcaacctccgcctcccgggttcaagcaattctctgcctcagcctcctgagtagctgggattacaagcacccaccaccacacctggctaatttttgtattttgagtagagatggggttacaccatcctggtcaagctggtcttgaactcctgacctcgtgatccacccacctcagcttcctaaagtgctgggattaaaggcgtgagccactgtgcctggccactattactttattctatcagtggctttatataaaatgcagaaaattctttatctatttgcaactgctgaaagtactgaatttaagtgtatcaacatcatttctgtagtttcaaccgctaagctgttgctaaaagtctgaaattctaaaggaagagttcaccttcaaatagcagaacacaagctgcagctgttgcttatttctctctctttttaaacaactggaagaactacctcctctaattttcattttgtattcactacttctacttgtcattcgtaaatcacttcagaaacaacgtgtcctagtgttgcctctctgctacacctgctcctcctcttgcccttctctgttctgtactgtagaaagaagaggttgttggttacctccatggcttttgttgacagagagtgacattcaggtgagttcagcttgaaaatgcatctctcattgcttaaagatgtgaactcttacagaaaattcattttctataccttctagtgatagcggttcagggacttggtatttaatcatctatgctcatgtgagatgcccttagtcatggtcattcatttgattgtgtgggagcctttttcatttatctcagaatctttggctgttttatcagctcatttacctctgtgcagctgaagcagtatgttatatatttctggatgatacggcataagggcatggacaagaggaaagttgcctagagaggataagttaataaactgggttgtaaatgaagatggtataagaaggaatgttggtgcagaagaataaggagcatttaaaaaaattatagtctaggcaaagatgcaaggacaacatgtctattcttcattggttcaacacatatggattgaccacttcctacaagtttggcatctgttcaaggtaatggggaataaagatcaataatgtaccattctaggcaaattcataaggatagaaagtagattagagattaccagggtgttggggaagaggggaatagggaattattgcttaatggttacagagtttttgtttggggtcatgaaaaagtttggaaatagatagagaaggtggttgcacaacattgtaaatggaattaatgtcacggaattgtacacttaaaatgaacaaacgacaaattttattatatataatcacaatttataaaaagtaataatgttatatgcacaaaaccactgaattatacaaatgagtgctttatagggtatgtgaattttacctcaattaaagttgttaaaaaattaagacactatttttgctttacaagagttcatgtctaatggagaaaatcaatctatacacaaattataggtattactaaaggacaagctatcaaaagttgatggttaagagaacatatagagagtcatattgtttcagttgaatcccttctctgtgtcactaaccctataaccttgaacaattccctttttatctttgagcctcgccttgcttaccaacaaaatgggtccagtattagtgtatacttcatagagctattgttataattccatgatgtaatctgcatatgtatattaaacatagtagaaatgtagtatattttagataaaattttgataaacgcagttatagcgaatatgcatttcaaagctaaaagcattgcgtagatagactcatacatgttatgcatatgcactgtgcatttggaggggagagcttcgaagtgattattgttcaaatgacagtcattagtatgtagtgccagtcagtatatcatcgatgagtaattttgatatagaaaaattaaaataatattgtcatcacaaaattcagtaacaaatagtctcccataaagaggggaaaaaagtttcacagacactagtgtaaatcactagtgtaaaaaactagtgttgatttacagtattttatttttatcataaggttacttaaatatctacaaatataaaataagcataaactctttatacttatacaacaatataacgtacaccaatttataaaataaatatgtcaaactctactcagctaataaagttcaaatcagaggcattactttaatgtgatggataatattgttttgctgatattaaactactaatctttttttttttttcttttttttgagacagagtctcactctgtcacccaggctggagtgcagtggcgtgatcttggctgattgcaagctccgcctcccgggttcatgccatcctcctgcctcagcctcccaagtagctgggactacaggtgaacacagccacgcccggctaattttttgtattttcagtagagacggggtttccccgtgttagccaggatggtctggatctcctgaccttgtgatctgccccccttaggctcccaaagtgctgggtaaactactaatcttaaagttaagagtggaaaaataaattttgagttttatattttaattgtggcattggttctcttatatttgagcataatgggccataggattaatcatcattacatcattcaccgcctttctgtttcaaaaatatactagcttttctcttctggacattggcgtaggcaaagaatttatgactaagacctcaaaagcaaatgcaacaaaatcaaaagtaaataaatgggacctaattaaactaaaaatcttctgcacagcaaaagaaataatcaaaagagtaaacagacaactcatggagagggagaaaatacaaactatgtatctgacaaaggtctaatatccagcttctacaaggaactcaaacaaatcagccagaaaaaaaaataataatcccatcaaaaagtgggcaaatggcatgaatagacacttctcaaaagaagatacatacaaatgacaaagaaacatgaaaaaaaatgctcatcagggaaatgcaaattaaaaccacaagataccaccaccttatcccagccagaatggccattattaaaaagtcaaaaaacaagagatcttggcatggatatggtgaaaagggaatgcttatgcactgctggtgggaatgtaaattactgttacgagatctttggggtgtcacttttctggctagaaacctgtggccagtgacgcctttgcccgagttttactcaggcccgctgggcttgttcctctgttttggcctggcaggctgcactcagctcatgctaccagcctggatcccatgtctccaagggagactgagagtcaggcatggagcagcgaggggtgtgtgagtgagcgaggggtgtgtgagggagcatggggtccagtcactgtgtagtcagacacgcctgctgctgccacagggtaggcagctccaggtgccagcatgggcaccagctgtctgtgaggctgtggctgaccaggcacactggaagcagcttctccagctggcaccagggaatgcagtggtgcctggaagcttggagatgccaggaactgcagggccccaaagagggagtcatagccctgactcagggagctcccaggtctgggctccctgaagggctgcagcttttctctccttctcttcacccacaa

SEQ ID NO: 7243 - DNA, 6000 bp, Homo sapiens
ttttagggaaactggatcacagcgcaagctaagctggtcaaagctgccaggagggatcagggaatagtctagaagttgcagagcagggaactgagtggagccaagtactagggagaagacaccagctaccagagggtgggtgatggctccaggctcagaggagagaggcctgggaacgggagaatgggggagctggctagacaggaagtgaaagtggagtaacaacctgtcacagctggatgaatgggacacaccggaccaagctgagggaaggtactaagtctgggctatgggtttgaactgtgcaggtcaaaagaaaaaaaaaaaacaacattaagtctgggttggcacctcccctgcctggaccccagggttttctggggtctccttcaggaggttttagtggttttacatgaagcaatgccccagaggcctgaggaggaatgtctggggaacccagggcctgtctttgaaaagaaacttagaaatcccactgtccctcactggctcgggcaccacagattccagagcagagactcagcaaagggagaggggacattttcagggaggacaaaggtaggggtgtgggctccaggctgtggacacaagtaccacctggcagggctgtgaggtcctgttctcagctccagggcacgactgtcagccactctgggtccacagaatcagggtcaggtcacctttggggtaaccagggtggaggcaggacctccctcccgttgccaggtcagagctctcctgaggctgaggactcaaggtcagctaggcaggcggggacagcacgggtaccaaggacttcaaatctgtgactcagcagctgcctctcagcctggaaagaggaacgcacagggcctgccacgcctggtccaaggtaggggaggaatgtgggccgaaagagggagtgccagtgcttaataattaatggctttttctttctttttttctttttttgagacagagtctcactctgtcgcccaggctggagtgcagtggcgcgatcttggctcactgcaagctctgcctcccgggttcacaccattctcctgcatcagcctcccgagtagctgggactacaggcgcccgccaccgcgcccggctaattttttgtatttttagtagagacggggtttcactgtgttagccaggatggtttcgatctcctgatgttgtgatccatccgcctcggcctcccaaagtgctgggattacaggcgtgagccaccgtgcccggctctttctaggctttttttttttttttttttaaagacagagtttgctcttgttgcccaggctggagtgcaatggcgctagctatctcagctcactgcaacctctgcctcctgggttcaagagattctcctggctcagcctcctgagtagctgggattacaggcatgtgccaccacgcctggctaattttgtatttttagtagagacggggtttctccatgttggtcaggctagtctcgaactcccgacctcaggtgatccgcccgccttggcctcccaaagtgctgggattacaggtgtgagctgctgtgcccagctggctttttctatttttataaatgctcgtggcagtgggcagagggaacacagcgagaatctaggacctcacttgtcccacggctgctttccaccaggacagagcatcaaagccaaacaggatctctacagtcaagcttctggaaagtggaatcagggcctgccctttgggcaggaggaaacagacaggagggaagaccaggtggctggctgagaaaaccatttctgggccactcacaggcaaccagggagcagctgggtggaagagaatttgtgggttgggagatgcaacaggcctttgacacccaatatggctggcctttggcccgtgctccgtcccaccatccagctctccatgcctggcccctggggcacagggcgggcagggcccacgggaatgccccacagaacccgtgtctgatgcttccttcagcccctccctccctattttccagccttctcatgtcgctccatgacttggtacaagcatcgcttccccctggaatgccttcttccctccctctcctggggagcctccagctcaaaagggccttggcataaacctttctaagtctctgctgtccccgttgctgggcctacagctgcagaacccctcactctgacgccattgtgagtttggtcctatttctgtcttctctaatgtaacgtggagtcctctgagggcagagattatgtcctcaggctcagcacagtacctggcccacagtaagcagacatccagcttttggcaggaagctccagtttattctgtctcatttctgctttccctcctggttcctggcctttggctaccattggagctgccaggccaggccaacagctgcagaccagcagggccagagaagcagaggcctgccgggcccatccctcccggcagcccagagcacggccacccagcgcagctggagtctcagatccttctctctctcaagaagctgcacatctctgcgcatctcccacctctatgccctggctcctttcccatttctgggccaggaacagtgccaaagccttcattaggggtgcaggaattaagtgagacagcaacaatattggcatcggcctccctgaaaaccatcttctcaagaactcagtttctgatctttctttctaagcctggctcttccaggaagccctccccactgcccataatactgtgccaccagccgggcgtggtggctcacgcctgtaatcccagcacttcgggaggccaaggcgggtggatcatctgaggtcaggagtttgagagcagcctggccaacatggtgaaaccctgtctctactaaaaatacaaaaattagccaggtgtggtcccagctactcaggaggctgaggcaggagaatcacttgaacccgggagatggaggttgcagtgagctgagatcgcaccattacactccaacctgggtgacagagggagactctgtctgaaaataaataaataaataaataaaaagaaaaaagaaaaaaatactgtgccacctacacttagttacaagcctgcctccttcacctgccagggtataccttcagggtcagggctgtgactattcctagctcccaggatggtgtctggtacttaaggggagcctaataggtgttcatggaaaaatttactgcccaggatgggagagggggttgtcacaatgtgtggatgtgtgtgtgtgtgtgtgtgtgtgtgtgtgtgtgtgtttgagaggagctgtatctcatttcagccaaggaggctgaggccagagtccagggcacagaccatggcagggcctagtccagcatccccagtcccaccctggtccccctgaggctatgattaacccttgtcctcagcacaaggacagagcctcatctgccagccagtcttggccatgtggggaagtaggtcaggggcttcagaatccggatagctgctgcacatcagggcaaagccagccctctggagccttgtggatggagaccagggtgtgggcacaccacagcaggccacaatggcacaaactgcagcagacttatgtccacaccccccagcttgctggaggccatgggaaggtcacttctccctggacatgtttcctcgccccttccagctctcaccatccaagaaggaggcatcttaggggaggagaggatagaactgactccactccagcaggcctcctcttcctttctgtcccaacagccccaccccccactcccagtgatgtcatttcggccacctcatcaccagcttctaacccccttccagtcgccctttctgtcctcagatggcaactgggggcagcggagatgtatccctctttattcggtctctcgcctggcacactggccgggattcccgaacctgaccccctccaaaccatgagccatttgcaaggggaccgggcaggggagggctaagcgactcctgactctcgaaggcagatgggagacttgactttctgcttcttcaccagcaaagacgcggtaccacttctccctgagtaggaagcgagttagggaaactttctaggagtcttagagctcataattcctgtcagggacgggtgctgctggatttggcgtgagataacttccctctacacacaagccaccctcccagcaaaacatgacgaaggagccgcctcccggcctcagaagactcctagctagcgctcaggccccgtaacaataccaggggcggccgagcagttgctgcctccaggacggggtgggcgagctggatgacggatgcccggtcgtctgggaaaataggaagaccgccccccgccccccacttttgcaggtctccgcccgtccggtccgcgtcttctccggcagcgccccctctctccacgtcccggttctccagacgcgtccctcctccgagtcgggcgcgcccggtccagcccagcccctcccggggtgatagcgcccaacaatggagaagcggacaggggtcaccgggcgctccccgccttcctgtcccggtcgcccccgcgctcaccctgctccaggtcctgctggtcgtaccaggactcctcttcctccgcggagaagtcctccatcccggcggctctccgcatggccccgcgggcggcgggcgggtgctgcggcggcgcagctcagggccggtgcgcgcggcccgggacaatgcggctgaggcgggccgggcctccagcgtcgggaactcgggctacagagcccgcgccgcgccccctcgccatcaaccgctcgccgggagcccacgcggggcctggcgctttgccagggtccggcccggccggggtcccgcagagccgggggcaccgggctgcggcgacacaaagggtggagtggcagggacggcgggtgggacagtggcaaggaggatccgggcccgcaggcgggtctggggcgctaggagcgcgcgggtgccgtggcgggcgccccctgcccggctcgggtccgcgctgctcctggcccgcccggcgacaaccggagccgccgctgcatcttggcggagcccgcctgcagcttgcggagctcggctccgcggggtggggcctgccgccgccgaccaatcaggagatgtatgcaaagctggaggcggggccgagggcgggaccctcctggtgtcttggtctgggaattgcttgatcaaccctttcgtcctacttccccctacgacctattcagtttatgtctcatgtctaaaattatgctattttagaagttgtcgtctctcctagatctcctggaagcaagaatattgtttctctttcacagctggctactcacttcctagaacaggctgctcaccagtcgggcgcgatgcctgactcctgtaattccagcaccttgggaggccaaggcgggcagatcgcctgaggtcaggggtttcgagaccagcctggccaacatggcgaaaccccgtctccattaaaaatacaaaaattagctgggcatggtggcgcatgcctactcgggaggctgaggcaggagaatcgcttgaaccctggaggcagaggttgcagtgagccaagatagcgccactgcactccagcctgggcgacagagggagactctgcctcaaaaaacaaacaaacaaaaaacaaacaacatgctggtcattgataccttccatcgacattctttgaatgaatgaatactaatttacagttgcctttgggaactgcgtgtttaagtgcttgtggctagaaaccacaggctgaaagtggcaaagtttgagggtgtgttacctgcattcaaggttctgttttcctttccttgggacccatatcctatatccaattatacccattaaaactatacacacttgcatctgtccaagcattctttccttagaagagtgttcggactcaagcattcacgtaactcatttttattgggaccctaatgtgctggtgccgttgagaatctctgaataatgttgtgatatacc

SEQ ID NO: 7244 - DNA, 6000 bp, Homo sapiens
gagccaatgaagcatgtatatccagggagatggcataatttgaggtacactcgtagatcacaatatttcttcattttaaagatgagtcagaggccaggcacagtggctcatgtctgtaatcccagcactttgggaggccgaggcgggcggatcacctgaggtcgcgagtttgagattagcctgaccagcatgaagaaaccctgtctctactaaaaatacaaaatttgccgggcatggtggcgcatgcctgtaattccagctacttgggaggctgattcaggaaaattgctcgaacccaggaggcggacattgtagtgagccgagatcgcaccattgcactccagcctgggcaaccagcgaaactctgactcaaaaaaaaaaaaaaaaaaaaaaaagatgagtcaggaaccagacatgtgttcctccaaactcagcctcccgagtagctgggcctgcaggctacaggcacaagccactacacctggctatttttttttttttttttttttgagacggagtctggctctgtcgcccaggctggagtgcagtggcgccatcgcggctcactgcaagctccgcctcccgggttcacgccattctcctgcctcagcctcccgagtagctgggaccacaggttcccaccaccatgcccggctaatttttttgtatttttagtagagacaggggtttcactgtgttagccaggatggtctcgatctcctgacctcgtgatccacccgcctcagcctcccaaagtgctgggattacaggcatgagccaccgcacctggccatggctatttatttttatttttatttttatttattcatttatttattttttgagacggagtctcgctctgtcgcccaggctggagtgcagtggcactatctcggctcactgcaagctccgcctcctgggttcatgccattctcctgcctcagcctcatgccattctcctgcctcagcctcccgagtagctgggactacaggcgcccggcaccacgcccagctaatttttttttgtattttcaggagagacggggtttcaccgtgttagccaggatagtgtcgatctcctgaccttgtgatccgcccacctcggcctcccaaagtgctaggattacaggcgtgagccaccacgcctcgctatttttttatttttgtaaagacaggggtctccctgtgttatccaggctggtctcgaactcctgggctcgagcaatgttcccacgtccgccttccaaaatgttgggatcacaggcttgagccatcgcacagggtcctctctgttcctttcctttcagcatgcagcacaatttgtaatgatacatgttttgcaaattttataaatgtttagttatttcaggtccatttccactactagatgggaaactccttgagggaggggatatctgtctccctcagggttgatcttccttgtaacgtgtctgacgcatgatcaacactggtttaataaatactgtgcctgccaggagcagtggctcacacctgtaatgccagcactttggaaggctgaggcaggtggatcacttgaggtcgggagtttgagaccagcctggccaacatggcaaaaccccgtctctactaaaaatacaaaaattagccgggcgcggttgcgggcgcctgtaatcccagctactcgggaggctgaggcaggagaatcacttgaacccgggaggcggaggttgcagtgagctgagatcgtgccactgcactcctgcctgggtaacagggcaagactgcgtcacaataaataaatactgtccccactaaatatcttccagttctctacatgctgtgactgccactccagcctgtcctgccaccttttctcactcctttcctacctaactcaaactcagcccacattgaagactcctgcttctccaaacccctcccctctccatcttgttctttgttcattgtttcttccatacaatagagctcctttaaggatcatctcaagcattgtgacacattttctgatccccaatacatgatctgtccctgctttgaaccccaaagtattttgtaactaatgacactcctatcctgccttgccttaatcctcacttctagagtaagtgggtgctgataacaacagggctgaaaaccatgaccctatagtaattttttaaaatcccagtactttgggaggctgaggcgggtgaattgcttgaggtcaggagttcaagaccagcttcgccaatatggtgaaaccccatctctactaaaaatacaaaaattagccaggcatggtggcatgcacctataatctcagctacttgggaggctgaggcaggagaatcacttgaactcaggaggtggaggttgcagtgaaccaaaatcgcaccactgcactccagcctgggcaacagagtgaaactctgtctcaaaaaaataaaaataaaaataaaaacaggccgggcgtggtggctcatacctgtaatcacagcactttgggaggccaaggcaggcggatcacctgaggtcgggagttcaaaaccagccttgccaacatggcacaaccccgtgtctactaaaaatacaaaaaattagttgggcatggtggcaggcgcctgtaatcccagctattcaggaggccgaggcaggagaatcgcttgaacctgggaggcagaggttgcagtgagccgaggtcgcgccactgtattccagcctgggcgacagagcaagactccatctcaaaataataataataataataataaaattaaaaacctagtatgcatcagaaccacaagatgagcttattaaaatacagattctcaggcccgaaagagtgcttcagtaggaatctgtgttatttcaagcattctttatgactttgatgcccaccagggtaagaacattataataagttaacttaaagtgaccagaatccccagacctaaggctcactgattaagtcttaggaaatggagggagttcagaggttgaatccccacccttcgtcctccaagaggttagatgaacaaagactccaaagtttatttgcctttcctttttaatcctcttcttactccaactctttaaaaaaaaaactgcccagaaaacccagtaattaagcaaaagggagctcaaagagccaaggcaagccagcccaagagtagcagggtccctcccgcaggggccaaagtctggatgctggggtctccactcagagcctggtagtaaaagctggtgcagaataaggtcgttccggaagctagcaataacccagcctgaaggagacacagcacagaaaacaggattgttaagaacagggcaggctgagagggagtgtgtggggcttggtcagggttaggcgcagggaaagattacccagagtggctttctgcaatggggcacccctaacagggccaggctgtgtaagaagtggtgtttgttggccttgtcaaacagctgtaagaaaaacagaaacgaagggatgtcgtaggcaatacaggtactgagatcccctgatgacacaagggaccaaagttccttcccccaccccacccttgaagtcccagcttgatcccaggcctttggcttacagagcctttggcctttgctgctccagagatccgcggctcgccccaccctctccccgcccacttcccccagggaccccagactttgtgccttcgtagacccacgagtcagggagccccagcgcagttacttcacctccttcccgtaggcatctgggaattgggcgcctgtggagaaaagaagcaaaggttagcggtcctagtgccagccctgaccgcccccaatccggggggacccaggtggacattggcgagaaagggcacccccccccccgccccaggaagcttccgattggtgggaacacgctcgggcagtactgggaaccaattggacccagctgggggactttaaaaggtttagggctccgcggactgtctgataaacgagaggccgggcacctcccataggttacgcccttgcagcagaccccagaggacgccccaagtacagtcccatcttcgtccccagccccctgaccgtgcgccccgtaggaagcgaagcctaaggccgcagctccggacaaggcgcccaagcggcggaaagctgcagctggcccggccatagctgtagaacaggacgcaccggaccaacgccgcccaggccacccaagaggccagccaatcccgaccgcccatgcaaataaggttcacaggcgcccaatccgggccgtgttcatttcagcattgcgctcttcacccgcctttgtaaaaccgctgcagagtggcgaagacgtctggcgggcggagaaaccagcaccaattaggaacagaggagctaagcagtgggggggcggggttgagggcgggactagggggatttgcgtcaaggattggcccactttccaagttgatcgcctcttcgaaccccccacccccatgctccggccaatttccaaagatcccggtcttctctcaaagttccgcccctttttccacaggctcctcctgttcagcttcaaatcaaacccactaccaaaaagaggcggcccgaaagatagcaaagccccacctattgccagtaaaccccgcccactgcacaaatggcccctcccccatgtctgaaggctccgccttctttgtatgatgccccgccccctgtagttaagatattctcccccccgccagccctccgagaccgcgagagccccgagggtgggagatccgggggaatgtctccaccctgccctggcccgctacgtccatctgtccgtctgtccgctcccgcctcttcccaccatctccaatccccccattctccggagggcgggcgggcaggcgggtgcgagcggggggtgcgagcggggggtgtgcgccgctctctcggcagggggcgggggaggcggccgcgcggtgacgcgcggggctgctgcggctgctccgccggcggatcatcactctcgggctgggatggacgcggggcgggccggccctggcgcgcggagccaggagtccgggcctcccggctgctgagcgtccctcgaagcctcccctcacccccgccttccctcctaggatccgcgctgacccccgccccggggctctggactcggctcccgccctcctctgactccccggacctccccctcacgcccgccctcgggatcgactagatccctccccctccccgaggattccggctggatccctgcccctgcaccgcggatcctgcgctcccgggccccgggcccctggggattaacgtggactcctcctccagcacccgatccttaggatcctccgcctggaccgccttctggtccctcgaagccggcccacggaaccagcggatcctcaatctagtcctgtcccgttgccccctcctttctctatcgtccctactgcggggttccctgttctcgggctccccctgatcccatcccctagctctccttttcccggggatcgactggatcccggccccgccccccggggctggggcgatccccctcccccgccgggtgaggcgctgcgggcgggggctgggcctgcggggccgcgggggctcagaggccgccgccccctcccgaaggcctttcgccccccactcggagccctggatggaggcaccacggccccagggctgagccaggtaggacctaagccgggtcggtggagggggctgcgtggcggtccactggggtctccctctccccatctccctccctgcgcctggtttcccccagcctgctctgtctgcgtgtctccgcctagggatgctctcgccgtgtctctgcgtcttggtctctttgtctctgcctctctccagtccatgaatgatcctttgaatgggcccacagaccccgtgtgttcccatctccccctccccctccttctccccttcccagccaagccattttcaccactgcaggaagggggggcctgcggcctgagcccccgtccctcaactctccccggctggggg

SEQ ID NO: 7245 - DNA, 6000 bp, Homo sapiens
acctctgcctcccgagttcaggtgattctcctgcctcagcctcccgagtagctgggattacaggcgtgcgtcaccacgcctggctaatttttgtatttttagtagagacggggtttcaccacgttggccagactggtctcgaactcctgacctcaggtgatttgcccgcctcggcctcccgaagtgctgggattccaggtgtgagccactgtgcctggcctcacatgcgtatttctcaaatccttcctgtggctgggctttcagtgctgcatgtgtctagctcattcattttagtgatttcatagcatttcattgtattcagtgcagtttatttaagcctctaataatggtcatttagattctgttgtagtgaccatcctccgtatgtgctgtggtgcacacagaatgaatttctagatgggggaatttggattttgttagatattgccaaagtgtccaccgcaaagtgttttttttcctttctttttttttgagacggagttttgctcttgttgcccaggctggagtgcagtggcgcgatcttggctcaccacaacctctgcctcccgtgttcaagcaattctcctgcctcagcctcccgagtagctgggactacaggcatgacccaccacacccggctaatattttgtatttttagtagagacgaggtttcaccatgttagccaggatggttttggcctcccaaagtgctgggattacaggcgtgagccaccacgcccggcctaattttttgtatttttagtagagacggggtttcactatgttggccaggctggtctcgaactcctgacctcaggcgatccactggccttggcctcccaaagtgctggggttccaggtgtgagccactgtgcccggcccacaaagttttatattagctttttattccctcttagagtacatggtgttttaaagagctgtcatggtatatttaatgctcgcatgacactccacattttatgtcagagatagagggtagcggaagtgttcttttgctgttgatcactgagacagtgtccgtgtgtttgctgctgtcctgagtactctgtggtgaatgtcttgtgccccctcagtgcggacgctgctgggagacagtcacagcctgtacccaggcctgtgtctgatgccaacggcctacggttggcactagagctgtttcttctcatagtagcctattgtattctgtctttcacacatttttttaaactgcttttgtatttgaacagtttcctgccagtctgtctcttggcttcataagttttctcaatttatcattgacagtagaaacggtgcttctctattagttgtgaatttaggaccctgtagtggccagggatacctctcattatatgtcaggcactggtaaggtcctgagactttacagacatgcctactcagtaactaagtaataatctagatggtgacctgacgtacatacactcatgccaggaggccatcaaattaaaataatcactatcattcatgaagtgtttgttcagcactgttctgagtactttttatgtggctgccttatttaaactcctcatttctttttttttctttttcaactcagaccttaacccaaaggataaaatcctcatttcaacctataagattgattcttttgttattcccattttacaaatgatgaaactaagcctaatcaggttaaataatttgccccaaatcactcagccagtgagtggtaaagctgatagtctggaaggagagaccaccagttagcctctggggcttcttggaggtggtgacaactgagctagatcttgacagataaggagataaaagagtatcttccaggccaggtgtggtggctggcttatgcctctagtcccagcactttgggaggcccaagcaggtggattgcttgaggccaagagttcgaaatcagcctgaccaacatggtgaaaccccatctctgctaaaaatacaaaactaagctgagcgtggtggtgcatgcctataaccccagctactcaggaggctgaggcacaaaaatcgcttgaacccaggaggcagaggttgccagcgagctgggattgtgccactgcactccagcctgggcaacagagtgagaccctgtctcttaaaaaaaagtatcttcttcaggcatagatcagctgattgtcaacaacagaaaccctagagccatcataaaggacaaaataaagattcttccaaggatggaaaggtatctctgagaaccgataggcaggaaatagagtcacaggaaccagaaaaagcctgcaggagccaggcccgccactttctctggacctgctgcttctcttgctttgagtgccctctgcgtgcctccttcccttttctcacctttacctccgcatggaagtgatttctctgcatggcccctccactcaagagcccagcagagattgacaagttttccagtttcaaacctaaaagatgcctggaagagaaaagctggccagcttaggtccagcgtgtgtgtaccactggtttgttcatctgtgcccaggggcgtaggttacatgccccactcatcaagagcagtagaacaaggacattgactggtgactgacatttcctctgatgagacaggcagcatttctactaagagtagcaaatgtgaaggcacagataggaatcatgaaacggggcgaggaaagagaaggcagccagctatgggggaccatggagtgtctaaagaagagtggtgaggccgggcgcggtggctcacgcctgtaatcccagcactttgggaggccaaggcgggcagatcacttgaggtcaggagttcaagaccagcctgaccaaaatggtgaaaccccgtttctactaaaaatacaaaaattagccaggcgtggtggcaggcgcctgtaatcccagctacttgggaggctagggcaggagaatagcttgaacctgggaggtggaggttgcaatgagctgagattgcgccattgcactccagcctgggtgacagagggagactcagcctcaaaaaaaaaaaaagaaagaaagaaaaagagcggtgagaggaaagacaggcgagcagctcagggtggctccttcgtggcttcaccacgggaagtttgcattgttttgcaaggagcagtagagacattgttgaaggtatttgagtggatgaagagtgattcgagttgtgctttaggtagattagcttggcagcagcaggtgggtgaatcggagtgaggagatggtgagatggtcaaagcgagagggaagggcctttcctttccgggccgtcctgatggaatttaggtgaggggtgggtcacccaacctgcctgtggtctggtggctaatgtgagcacctccctcccagccctaccttcacaggcggtagtttccctgtttctggtccgtgctcctccagctgggccttcttcccctgaccttgctgatccttggtgaccacctccgaatgtcagaatccacatcgttaggctcacaatgtgggctgcttttgccccagtgggtccagttgccccaacacgctgtgtagtgctgaccagtgtttacgtgtggggtcggctccattcctcgctttctcccgaaacagatgtcaatgccaatcgcatcatcccgaggagacgtggagagtgtccgccgctgcctggctcacagcctcttcatgagcaccgccgagcttcagccagatggcacctatgccaccacggacacccaccagccagtggccatccacccgtcgtctgtcctcttccactgcaagccggcctgcgtcgtgtacactgagctgctctacaccaacaagtgctacatgcgggacctctgcgtcatagatgcacagtggctgtacgaggctgcccctgagtactttaggaggaagctgagaaccgccagaaactgagccgccccaggatgccgccagaatcactggtccctgggagcttggactacagttgtccttacagcaggcttccaggttggcgcttagagaagccttggaatcagctgaaggtgcctgacttccaggagcgtgaaagcatctttgctcaactcctgggactgaaccatatagacatggacatatcatttgtacctggaaacctcaaaattatgcttttggttcttactgggtgactttgacttaatttaacacctgagcctcagttttctcatctgccaaatgggagtaataataataatccttataaaattgggttcataaagtttagagaaaaggaatggaaagtacccagaactatgcctggagcacgcacgacacacgtacagtgagttgggagccgttaggctgaatgttactgcttgccatatgatgtgaagtacagcaatatcccaagttcttgtgactgagggagattttctggaagggccacaggaggttgcggagcttggatgttgcccttagttcttgtttaatgtctctctgaatgcagttttaaaatagaaaacaaaactgacttctgtagaagtttccagagggaggtgctgttatctcgtacctcctgggatggcgatccctactgaacgcttgtgtctcagggtggaccactctgtgtctgtctccaagcagagaccagtaaaggagcctcctggtcctcagtgcgtgaccctgtcagtgctttcaggagacatgtaagcttcctgggtgaaggttgatttgtaccttctgaatcctgtcacgtgtagacatgggaaactgacctatcagtgttttgtgtgtgtaggtgactcccacatacacagttgccatttttctctctaactgggcaccagtgaacatgcgggcatgaggagtgactgtgtaccatttcagctgtttcttttcgggcagtcccctggtcagagggggtgggggtgggggaggggagaggggtacctagaacccagagaacattggcttatgccagataccacaccacatctgggcttacattcttgtatcttttttggtgtgtgggcggggggggtggggggcagttcagtgaagtctagaagacctgctggacaaattctaaaagagctagagctgtaacacttattcttgcatcttattaattttctatgatattttttccttcttcgtagggacttgggacaatctggctttgctgctttctaactgctaggcacctctctctaaccctcattgtcagagggaattggaggatatccacagtctgttcctgttctgatattctgagcagagaaaaggcactaacggttcctcttagctatttaattatcagaagcaagtaatctttccccagataatattttgccctagaagaagccgtgatttagctcttttattgtgcttacttggtccaaatacatctgtggggtgttttgtcatttcttaatgaatgaatcatagttataaccaggggccaagctgcccaagaggctcttcagagatcatggatgctctctttctggaagctgtggcctgatggagcagccccattccagggtcccatctgtccggagttgtgtatgtcaagtccggctcagtctttatttccaacactagccgtggtcctgtgcagtcaagctctcagctagtgtttagggctgtctgtcagaaatggttatacgtgggcaaaagaagatctgacagctcctatataccttatcttactgaattcttaaactttgaaccagttcttccacttactgacttgttaccactgctgactttctgaaaagttttccagtttttgttttttgttttttgttttccagtaggggattagaatgtttagtcctacttagtaagaaaaatattgtatttttaatcattcatagtgctggtaaaaaaaaaaaaaaaaaaaaaaaaattggggggtggccgggcgcagtggctcacacctgtaatcccagcactttgggaggccaaggcgggcggatcacctcatgcctgtaatcccagcattgggatgggaggctgaggtgggtggattgcttgagaagt

SEQ ID NO: 7246 - DNA, 6000 bp, Homo sapiens; identical to SEQ ID NO: 1953

SEQ ID NO: 7247 - DNA, 6000 bp, Homo sapiens
tacaggagaacaaaaaatttctttacacaacataatggagacaaaggacgatgtaaggaaccttcaaagaggctacaacctaagtggagacattaaaccaccacacctggatccactgcaaatactactggacagggctgaacgaaataattctagagatgaaatcagaataatgagaccaaaaaatggtttcttgtgggaacaaagaaaatttagggaaagtcaacatataaacaaaacatattttcctatgttgtcactgacactggaaaaaataatgtgttacagtcacccccaaaataatcacgtttcgtgagtttagcgatgtgaaggtcagaaaatattcaaggtggagttgggggaacagtacgcttttcccctttcccagacaagaaactcttcactgccctgcctccagggatgttctgagtttccccatccacggagctgactgagtatacaggattttaaggaaatgcaggtgctggaaggtcagtggaattggagaaggctgagacctggcccatgccatgaatcatgagggagagtttacagctacagaggataaggagaggtctctcctggcacggaggcgccaccaccaccaccaaactgacttcgtctgcattcactacgtaccaggcactgctctaggagctttatactgcccgcttcccaatccgttcatcacgtttaacaaatgaagaaaacgaggcacagcaaaatgaagtcactcgcccaagtcccacaggtactaactgtcagggtttggattcaaattcaactctacctctaaaatctgtggggttttttttgttttgttttgaggtaggggggtcaccctgtcacctaggctagagtgcagtggtgcaatcttggttcactgcaatctccacctcctgcattcaagtgatcctcctgcctcagcctcccgagtagctgggactacaggcaggtgccaccatgcctggctaatttttgtactttttgcagagacagggtctcaccatgtcgcccaggctggtctcaaactcctgggcgggcagattgtttgaatccaggctggactcaaacgatctgctcgcctcagcctcccaaagtgctgggatgacgatgttagccactgtgcccgcctcagcctcccaaagtgctgggaagacaggtgtgagccactgtgcctggccctgacagctgtgctcctcctaaccactgttctctacctcctccatggtgaagcttcagaagaaagaggcagcagcaccttctctctcctagaacaacagagaggtcacccaacgcaacctcaactggagtagggggtacaggttgcagggtagtgggaaatgagtttggctgggagggtcctgatcccctgactttgaagaatgacactacagggcagtggacggttcccttgtcactgtgcagatgagtattcaaatggactgctttggcttctctcctcatgctaccacaggtaataagatgggactttaggatggaaaacaatgctgttcctggggatctgaggccaggcctgcaccctttaagttggcctgactcactcacctcttccaggaaggggagcaaaaagtctcgagtggcattatttgaagtgaagaagccctgcacagccttatacagaacatagtggttgaggcggcgtgatgtggaaggcagcatccgcagggcccgcagcacgaatctcggctccttgcctgaaaccgctttctctagctgtttcacgtgctccttgatgtctgaagaagagcagagaagaaaatgatgtcactttcactcctagtcccccaccactccaggcaaggagttctttttttttttttttttttttttgagacggagtctcactctgtcgcccaggccggagtgcagtggtgtgatctcggctcactgcaagctctgcctgctgggttcacaccattctcctgcctcagcctcccgagtagctgggactacaggcacccgccaccacgcctggctaaattttttgtatttttagtagagacggggtttcaccgtgttagccaggatggtctcgatctcctgacctcgtgatctgcccgccttggcctcccaaagtgctgggattataggcgtgagccaccgtgccggccaggcaaggagttctaaggagcctctcacagaggggcaaaatgcgaccactcaccttttctgccctaatggggtccataatatttacagattccacacactgattttaagacataaccaagtggcaagaaaaacatacagtgggggtgcaggatggggtagaggatgacagaggaagaaaagaaaaaccaattaactacagaaacctggagtccagatttatcagatcttaatggaaaagactttctaaatgtgaacaatgggagaaatcacatacgcacaaaagattaatgggcttgacttcatttaaaaaaacccttttagataactgtgtatacaaaagaaaaatattttcaacaaatgtgatcaaagattcatatttttattctataaagagcttgtataaatggttaagagatataatggtataatgattatattgccacaatttcaaaacaaaaatggagacgaactaacatacaaagaggaaaaatagctaacagacaaaaattatattccattagtatttgagtaattgcaaatggaaacatttttaaactaccaaatttgtaacattaaaaaaattataggtggggcacagtggctcacgcctgtaatcccagtactttgggaggctgaggagggcggatcattaagggtagcagttggagaccagcctggccaacatggtgaaacccagtctctactaaaaataaaaaaattagccgggcgtggtggtgggtgaccgtaatcccagctactcgggaagctgaggcaggagaatcgcttgaacttgggaggcagaggttgcagtgagccgagatcgcgccattgcactccagcctgggcaacagagcgagactccgtctcaaaaaaaaaaaaaaattatagagtacagtgaaaactacatttctcctggtataatgtaaatcagcacagtttttctggacaataactatcaaaaacctttaaaatgttcagccttttaaactcaggcatataggttttggtgggaatctgtactgaagaaataattagaaaagtagattttttaagttgggcacaaagatgattgcttcaaagctatttatgatagcaagaaactagaaacagtttaaatgcaaagcaataagggaatgcaatcaatgagtagtttcttaggcacttctgtatattcaccgattagcacagggtatctgggccacactaatgatataaataataacagctgatatttatgtgctaggcacagttttaagcattttaatgttcacaacaacccaataaagtactgtactattacttgtatttatacagatgagggaactaattccagaacttgtactcttaaccattatattgggtattcaataaatgtttctggaataaattgaatgctgattatgtttacgaatgttaatgaaaacacataaaattcaaaatttatatttagttatgccttgatacaaactgtatacataacttgctctcaattataggagaacagctcaaaaattcacaagaaaaaatgttaaccatgttttttatcccctgcttttaacttctcatacattccacaatttctgcaatgaatatgaattactttacaagaagaaaatgaagtgcctgtaataaacacacccagtaggcaatgctgagtggcacctttgacattgctgccactactttaggtaaaaggatctctattaaatatcgatcctgttgctcaactttacagtaagagctgatgtagtcaacaccatcacatcctcaaaagcaccacctaggaggataactttgcttatctcaatgtttttgagctagtttctcacgcattttagtgaaaagaaaacctagtaagtagtctggtcccacttgatccagaaccaggaaaatggcaccaggatcacagtgggaagctctcactttgcccacttcaaatggaaacaggacgctgtaagtgggaaaagtaaaacatgaacttggaggaacaagaggactacagacactcgaaacaggaacctcggagaaaagaaataggagacaccggtatataggagtttaggccaaaggttgagtattacaaaaccaaacaaagatgacacccgaaaagttttaagtgtgtatgtacttaaaccctttagaaacagaggggcagtaaggacctgaagggaggagacagcaaggggactgttgggacacttcagttagagaagtaggaaacaagatactaggtcgaaatggttcattcgggggagtgtgctaaaggcagctaggacaacaaaaatctgctgtacagttttaaaactcaggagtcaatattctaggtcatcctggccctgtttacacacagacacaaacactggtttccagcgggaacaatcagtcatatattggaggcgctaaaatcagtcgggtgggatataaacggaataggtcagaggggaggacttaaaagagggagtccccaggcccactgggacctagatatagatgcaaccccagatatggggatggaggggatgggaggggagtggttcccagcctggagagaaggttcagtcattgggcctggagtcgggagtgtcggggcagtgggagcaggtatctgggggtgatcccaaagaactgagggtggtggaggctgctgtggcttcccagcaagaagccaaatcacaggggtcgctgtcacccgcgatcgcggcacgttcccggcctgggctgccgtaccctccaaggtgactgtgtccagctctcgctgggagtgctcagccgctgccgccgccgtcttgccgtctgcctcccccgtcgacccgccacccgtcgctgcctcctctttcatctccacatcctggggggccggcggcggtgggggttcttgttctcctccgccgggcggcggtttcgccttgtccgcgccgcggcgccgcgccgagccctcctgcttcatggcacccggggtcacggcctagtccggggaccgaggccggggcctcgcgttaaccctcgcaccggggaccaggagccgagccgggcctgcacacgagcgcgagatagcgtcgggccgcacgatgacggagcagctgcaaaccccttcccggcgctgggccttctgggaaacgccaggcccggcaggccgatggccgagtcaacaaaggggaaataaatccacagccgaggtgcaggatgaaggaggagcttcgaggaaggagcggggaggagcctttatgggttcgtggggctttctttcgagcgcttaagtgtgatgcttttatgttcctctcgagtgcatttctgtgggcgtccacgagaggtcccctcaggctccaatctgggttacaaaggactttaagagcgcctcaaccagcgtggagtgggtacagcctatccgagcgcgggacgagatgacgtcacgagttgccgggcgggttttgcgcccaagttcgctcaattttccccggtcgcggcggggtctccttccagatccgctgggcttgtgctcaacggctgccgggcgcatccggcaggagggaaggaaagaaggctgtgaaggagggacgtgaagctagggctgttggccttaaaataaaccgaactggagagtaggaagaaccctatgggatccggacttccttggttagatttgagtttagtgctgaacataaggcatacaatttctgcaggctgggagtgccgataggtaggagcgtgcatttgcgtagaatcactccagtttaacaaaatataggggtccaccctatgtacggcccacggttagcaaataggggggtgaaaaacagctcaagaatgtagtatacgggggagtcagatggttagataagcagacactgtgctctgggctgcggt

SEQ ID NO: 7248 - DNA, 6000 bp, Homo sapiens
agtagagacagggtttgtccatgttggtcaggctggtctcgaactccccacctcaggtgatccacccacctcggcctcccagagtgctgggattacaggcgtgagccaccgtgcccagcctggaagttgttttttttgagcccagctcatttgtgaaaatatcacgtgctccttattttcatacccaaatttctcatatccataaacttccacattttatttctgtcagaagtatacaatctctttctagatttccacctcctgtcaaaggtatttccttcttttgtttgacataaatgaatcaatctagtctgttattacttaaagaagttttttaaaacccagtgtgtcaacctatctctctgctcttttaacttcctttacttctttgtactgcataactctcctaaactcaaacttatattattagtagcttatctgcaaagagggagaaggggtatcatggagttgggagctccagaggaggcaaaggttttgggtcacgggagagtgccattgagaacggacaatggatgctgagaaggacaatgagaatcagtggaaataaggcaacaggaatttgtgctgaacatggtcaccctggtttcatgattctccacaacaatatgggaagctcagaggcaaagaaaaaaacaaaaaacaaaaaacagagagaccagggctgatggcaggcatggtaaacctggtcatgcccctcctctgcttacagtccgtcagaggcttcccattccttcaagaagaccttccagatccttcaccgtccggcagtgcccatttctccagcttcctcgtgtatcactctcccttgggctttcaaacttccatcaccctggccgactcttttcatactcatggcttttgcacattctgttccttttatctatgtgttatcttcacttccaacccttggcttcagcttaaaaatcacttcctcagaaaagcctttcctggccgggcttgatggctcacacccgtaatcccagcagttagggaggtcaaggcaggcggatcacctgaggtcaggagttcaagaccagcatggccaacatggagaaaccccgtctctactaaaaatacaaaaattagccgggtgtggtggcgtatgcctgtaatcccagctactcaggaggctgaggcaggcgaatcacttgaatccaggaggcggaggttgcggtgagccgaggtcgcgccattgcactccagcctgggcaacaagagagaaactctgtctcaaaaaaaaaaaaaaaaaagaaaaaaagaaaaagaaaaagaaagaaaaggctttcctgacccctaatccaatcagaactctaaccatatagtctctcaacatgtgctttacttctcttttatcggatctatcacaattatatgtttatttgtacaaatgcccttttcatacatagaaatagctctgtagaggcaagcatggggtctattttgttcactgctgaattcccggcacctagcttgagtacctgtcgctaacaggaacaggtgttcaataaatgtattgactagcttaatgaacggcaggaagacttaggtatacggccttaggcaaatttttattttgttgcttgttttaactagatcttcatctcctatctgttagatgggtatagtaataaaaactaacaacctcagaattgctgtgtgaattaaaagagacaatgcatgtaacatgcttcgaatggtacctgtcatatagtaagggctaggaaattttccttcttattatcatcattaaaaataagctctctgagcaaacagaactctcatacattgctggtagcaatgtgaaagtgatacagccactttggaaaacagtttaccagtttcttagaaagttaaacacagacatatcatataacacagcaatcccacatctacatatttacccaagtgacatgaaaacttatgttcacacaaaaatctgtacatgaatgtttatagcagctttattcataattgccaaaaactggaaaaacccatatgtccttcaaccagggactagataaacaaatagtggtgtattcatctagtggaataccagcaagaagacatgaaccacagatacatgcaacaacatggatgaattttagatactttatgacagatgaaagaagccagactgaaaaggtgtcatactgtatgattccatctatatgatattctggaaatatcaaaactatagggacaggccaggcgtggtggctcatgcctgtaaccccagcactttgggagcctgatgctggcagatcacctgaggtcaggagtttgagaccatcctgggcaacatgatgaaaccctgtctctactaaaaatacaaaaattagccaggtgtggtggcacgtgcctgtcatcccagctactcaggaggctgaggcaggagaatcgcttgaacccgggaggcggaggttgcagtgagctgagattgcaccactgcactccagcctgggtgatagagcgagactccgtctcaaaaaaacaaaaacaaaaacaaaaactatagggacagaaatcaagtcagtggttgccagtggatggggtgaggcaagagggaatttgggggaatgaaattgtcctataactagattgtggtagtagttacatggttatatacatttatttattttgttttattattgttttcttattatttgtttgtttgttttgagatggagtcttgctctgtcacccaggctggagtgcaatggtgcaatcttggctcactgcaacctccacctctcgggttcaagtgattctgtgcaccaccacggccagctacgttttgtatttttagtagatagagacgggttttaccatgttggccaggctggtctcgaacccctgacctcaagtgatctggcagcctcggcctccccacgtgctgggattataggcgtgagtcaccatgcccagtcgtttatacacatttatcaaaactcactgcatcataaattgcaagagtaaattttactgtatgtaaatatcttaattttttaaaggaaaaaaaaagtccaaaataagtagctataattaccttttccttttagaaaaaggcattcatattttctgagcatgagagaactacaggctcattgtagacatttgggaaaatgtacaaaggatgtacattcatcacgtgcagaaaagtaatatttccttgctgtgagctttattggcacagaatacacacaaagctgggaccatgctatgcattttttaaatgaaattatacattttgctttctgaaatatattgtgcatatttttcatgtcattaattttcaaaatcatgattttatgaatcaataatattctatgtttacttaagagacagagtctccctttgtggcccaggctggagtgcagtggcgcaaaggaatcattcctcactgcagcctcaaactcctgggctcaagcgatcctcagtggtgggatgagatctagacccctgatattcaatctcagaaagtcaataattccctgcctcagcctcctgagtagctggggctgcaggcctgtgccactgcaccaggttcaatgtatattttattttgtcttttttttctttttttaatgtatattttttagcattcctttgttgttagaaattacattgtttatataattattatttgtcaattaaaaataaaagaaaaaatcatactgctcctattttttactttgagcaactctgataacaacaacaaaaaaaagttcagtggggccaacgcgtttccctcctggagtttcccggttcacctggtggagcgggtcctccttgggctgcaattccctccttcttttcagtgtctgcaggaaaggtggtttcacagggtgatcggtgatctggcttatttgttcctttgtgggggtaagggctgggcacctcactatttcctgtattaccagcttgaatttacatcgcgctgttaatgtttaatcctctccacatcgacgcggggtagtaatttgttccaagtcacacaacttatcaatggtggactattcaggacttagatcccggatattcaacctcagtaaacgtctccccagctccagggcgctgcgtcatctggctttaaaaaaacgtttctggccgggcgcagtagctcacgcctgtcatcccagcactttgggaggccgaggcgggcggatcacgaggtcaagagttcgagaccagcctggccaacatggtgaaacctcgtctccactaaaaatacaaaaattagctgggcgtggtggcgggcgcctgtaatcccagctactcgggaggctgagacaggagaatcgcttgaacccagcaggcggggttgcagtgagccgagatcgcgccgttgcactccagcctgggcaacaagtaagactccgtctcaaaaaaaaaaaaaaaaaaaaaaaagacgtttctccccataaggaggctgcagtcacctcgaaaagcttctgcgcagagcccggcgcacggggaatttctatcgagtgggcactgtcccgtcctacgaatgtccttggcgacatcgccactcgccagctgggatcacgtcgcccccgtggccggggacacccgctgccactgaccgagggggccccgggagctgagaggtcgccgctgcgctgcccgcggaggctgtgggctgcggttggcgacgccgcagggctgactttcatccgggcgtcctgctggaggccagaccctaccccaacctcggggtcctcagtgcggggcgcgccttggggagggaagaggccccgcccatcctaaggacgcgctgaggccacgcggggccgccgggatactgcgttgcccgggagacacctgacgtgacaggaacgccgccagtctcagtccgccgtgatcccacagttccccggtcccggaagtgccctggcctgccggaagtgccggagcggctgacagagcggctgacggagccgggctcaccaggtcgctgccgcgagggagttgctgtgctggggcctgggtggcggctggaggcctgagttgggctcgcggcgggggtcggcagggggccgggtggcggaatgatggaggaggaggaactggagttcgtggaggagctggaagccgtgctgcagctcacgcccgaggtgcagctggccatcgagcaggtaagcgttccgcccctcaggaggggaaacgggagtgcgggaggggagacggcagctccgggcgctggggaggccgcggcgggtggacggagggccgggggctcgcggcagaagggaaagtggaggtggggaggtggtgcgggtgagaagcggtttctgaatcagaaggaaaggaaagagaaccctttctaggctttgattgtctttggcgagggctgggggttctggtggttttggggaaaggaattgtgcgcttagagaggacgacgctaggagaatgcaggccttgggtgccatcctcagattctggggactgtgggggcttcatgcatttaccagactcgtgccaacgccccggttttgcaagctggcacctcgtgagtggcttggaactgggggaagggaatgactttaatttctgaagcggacggcagagaagagagaaagtgttgaaaaatgacatcgttaccattcttaaaaggttgagaattcctaccgttgaatagtttgggtgaggttggagaatactcccaaggggcctcttttcccttcaggaacttttttttttttttttttttgagacggattctcgctctgtcgcccgggctggagtgcaacggcacgatctcggctcactgcgacctccgcctcccgagttcaagcgattctcctgtctcagcctcctgagtagctgtgattacaggcgcacgccaccacacccggctaatttttttttttttttggggtaaagacgggggtttcaccgttttggccaggatggtctcgaactcctgagctcaagtaacccgcccgccttggcctcccaaagtgctgggattac

SEQ ID NO: 7249 - DNA, 6000 bp, Homo sapiens
cctctttccctctgtctgtgcttgtgttgttgacctcctgatggcttgtcatcctgaataaaatataataataaattttgtataaataggagttcaggggctggtttgttttttttttcccccccaaactcaaattctggatttaggtctaacaggaggctggactggagcggttcacagcaagatgctgggctcggctgtgaaggggggagtatgaggcccccttcctattcagggctttggggtagatagcccctggactcagtggagacctgaggcagggctgggctttcacactccgctgccttgaccacatttgctgctttttccacaaaactacttggaagctctcgcctcctttccacagttttgggagcagttgccctttcccgggtctaggaactctgtggcttgtgctgagcggctgcggtgtccagcccagccctttaagctttctgtgtcagtcctggtcaggaaaacaagcacacaggcaggcagtttgtgtacagccgggcggaggccagagaccggctgcctacctgtcacctctcgcctggagcgggccactgccaagttggccccatgactccaaacgggcggagcctggattgggcctgtggggagggctccactcaagtgaccacttgcagccctgaacctcagctcttggacgcctggctggaagttggctgtcttgtttcctgtgaccttgggggtggaaaggacagagcccaggcgacctagggcactatctccctaccccacgccttctcccttcctcgttcctccctacccttatcgcttctaccccgcccacaccgccctaaacggcttcctggggcggaactgtttcgcttttccccgtcccagtggagggtggggtgggggggtcgcagccctaagcctctgggagacatggagcccaggagggcggcgcccggggtgcctggctgggggtctcgggaggccgcggggtcggcatcggccgcggagcttgtgtaccatctagccggggccctgggcactgagctgcaggatctggcgcgccgtttcgggccggaggcggcggccgggctggtgccgctagtggtgcgggcgctggagctcttggaacaggctgccgtggggcccgccccggactcggtgagtcatggccctcccttcgccacccacggggccggcagggccgaagcctgagacccgggtctccccagctgcaggtgtcggcgcagccggcggagcaggagctgcggcggctgcgggaggagaacgagcgcctccgcagggagctgcgcgcggggccacagggtaagcgcagccccggccagggcagggcgggtgacgacctgctcgggtcctcccctccctcccgcgggccgcgcgccgccgccgctaagaacgccccttcctcagaggagcgcgcgctgctgcggcagctcaaggaggtcacggaccgacagcgggacgaactccgggcgcacaaccgcgacctgcggcagcgcggccaggagaccgaggcggtgagggcggggcggggctctggggcggggcgggggcggagcgtggcaggcgctgggcggggctccgggggcgggggcggagcgaggcaggcgctgggcggggctccggggggccctcggtgccccgcccaccccaccctttgctccgctcccagttgcaggagcagctgcagcgcctcctgctggtgaacgctgagctgcggcacaagctggcggccatgcagacccagctgcgcgccgcgcaggaccgcgagagggagcgccagcagcctggcgaagccgcgactccgcaggctaaagagcgagcgcgggggcaggccgggcggcccgggcaccagcacggacaggagcccgaatgggcgaccgccggcgcaggcgccccagggaaccctgaggacccggtgagtgccgtatgagggcaaggacccagcccaggacgcagcgtccagccctcggtgggcactcaagcaaggtttgcatgctgcacagcaggtcggccaggaagcggggaggtggcagacagatctgcgcccccggccggcctcggcccccgctctcagctggagcactgctctgttatctgttagggcacccttgtcccccaagtctcccggcccgtcacttcctctagcattcccatgatggccctggggcgggggaacgccagccgaggcgaccctctgactgtgcctgtccttccaaaggcggaggccgcgcagcagctcgggcgcccctcggaggcagggcagtgccgcttcagtcgggaggagtttgagcagatccttcaggagcggaatgaactcaaagccaaagtgttcctgctcaaggaggaactggcctacttccagcggtgaggacgctgggaagccggggggcctccgatcaccccacctcattctccagtcattgacatgtccacagtgacatgtgccaggcctgcgctgggaactgggaggacatgaattgtacagcccttgccctcctgcaatgtcatccagacaggggagagggacagtacaaagggttgcagctgcagcagccagggaatctctcctaggagggggccacggggccacctaatttaaggtctgagggtgtcagcaaggcagagcgcttcccgtgttcagggaagagctgcgtgcacaggtaccaggagtgaggactgcggctggcatctccactgctggcatccccatggctggcatcaccagggctttctccctccctgccccttttctttagggagctgctcacagaccaccgggtccccggccttctgctcgaggccatgaaggtggctgtccggaagcagcggaagaagatcaaggccaagatgttagggacaccagaggaagcagagagcaggtaggtccctgcctgcattcccacggagccaggcctccctccctcattctgctgagcctgatgacccagcctggtcaccctctgagcccattgtctcagactgaggctgtcaccccaacccggtcaccccttgagcctccctagcctggccgcttctagggcctgctgacctgctctggctgtgtcccatggccgctgtccagcctgcgcccttctccctggatctcaccactccccttgccttgcctgccatccattctgcctgacaacactgcctctccacattcattcttcaagttcctgtcttggctgggtctgtttattcttacgggggtgaaactgtagccgcggctgtgtcagggcctgctgtgtgtcaagctataaaataaacccttggcagggcgcggtggctcacgcctgtaatcccagcactttgagaggctaaggtgggtagatcacctgaggtcaggagttcgagaccagcgtggccaacatggtgaaactccgtctctactaaaaatacaaaaattagccgggcatggtggcatgtgcctataatcccagctactcaggaggctgcggcaggagaatcgcttgaacttgggaggcggaggttgcagtgagctgagatcgcaccactgcactccagcctgggcgacagagtgagaccctgtctcaaaaaaaaaaaaattaaaaattaaaggctcgacatcctgcatctccccagggttgccttctctccagccccgggggccctgcagtccctccatcccccctgctggattcctgttgtccctcagggccttgatcaatggccctcacttctcctctctcctctgtctcagtgaggatgaggctggcccatggatcctgctctccgatgacaagggagaccatcccccacccccggagtccaaaatacagagtttgtatgttggggaaaggggaaaggcaagagtgtggggagggaggaagggccctggctggtccttctcaggatcccctttcccgcttctctgcccgtcaccctgctgtgcttggctctaagcacaccgtcccctcctgcttctctggccctggcccccatcaccttcacactccctcaggctgccctttcttccccctctccccttttctcaccatcccctgccctcacccatatccttgacctctctggcttcctggctcaaagtgcctctggctgtctctctccagctttggcctatggtatcggggtaaagctgaatcctctgaggatgagaccagcagccctgcacccagcaagctagggggagaagaggaggcccaaccacagtctccagctcctgatccgccctgttctgccctccacgaacacctttgtctgggggcctcagccgccccagaggcctgacttaggggtctggctgtggaaggatgtgtggcctcaaatgaggacagggctcccgccttcacagccctcgccaggggtctgccccaatcctggcctgcatcagggcaggacggggtctcagcccgcctccctctctacgtctctgtaccgagcctctggggccagatataagagtgcctctctgagtctcagtttccccatccatgaaatgagagctgactgcctagctcccagggctttgtgcagacggcctgagctcatgtaataaagaactgcccgtaatacacagaaactgttcctcgcctgtctgtccatgtctgtgccacctcccaaccctgccaggagcagaggcaggctgaggggtcctcgctggtctccttgctcagtcactgggtggggtggcttcttgcagctcaggccttgctttgggagtgtggcctgatggaaagccgtggctcccagcctcagtccacccccttccctggccccggcacccagggacctgcaacttcattcttctggcccttccaggcccaggccagtcagccctgccattgcctttctttccctttctttttttgagtgtcagtctttccagccaccccctccctctcagggaggtgcctcgtggcagcccgcccctccggcctggtttcctcaggaaaagccctgagaggaagcagggagggggttgggagctgtgggggccagacgaacccgagcgctcccaccgagctgcctgccatggggctggggctgctgctcccgctgctgctgctctggactcgggggactcaggggtccgagctggaccccaaagggcagcacgtctgtgtggccagcaggtgggtctcgtgggagtctgatgcgtgtggccagcaggtgggtctcgtgggagtctgatgcgggtggctgaaccggtgttgaggccgttaggggaaggaggagactaggaagggggcttaggctgaaaggaagggactgctgatggcggtctggcaggtagtggccagccagggcagatggtggaagggtcagggaaggagaggggaggggctggggaccctagctgtaaagatccattaggcctccccagggggctaaggcagcctcccccactgcagccagagacagtgatccaccttcctcagggccaggctgcaccccccaccatgtccggctgacccctttttgccccacagcccctctgctgagctgcagtgctgcgcaggctggaggcagaaggatcaagaatgcaccatccgtgagtagccaggacagaccctcagccaaggagaagggaggccgtagcccagtgacaacccttccttcctaccccatggggcctgcccctcctgataccaggagtcagggtttctcctgtgacgcacccccaggcctgaaggggcacctcttgaggaggcatggcccctggagccagtgagagggcaggggtgtcccctggtcctgctcccgtctttccaacctgggtggggtgtctttcagccatctgtgaggggccggacgcctgccagaaagacgaggtgtgtgtgaagccgggcctctgtcgatgcaagcctggattctttggggcccactgcagctcccgtgagtctcaagggccagatgaagttgctgggcagagctgggtacgggggcagtggtgtgggagcaggcgaggcaggtagccatgcagcctcaggacagcagggccagaatccc

SEQ ID NO: 7250 - DNA, 6000 bp, Homo sapiens
tctcctatgtgcgaactccctgcacgaactctgcaggccgagtcttgtgaaggggacacccaccagatgttccttgagccccccctgccagtctcccctcctggtaagcagtggtcggtcacccggccgccgtgtggggccacgttccctacctagggggactctactgtccggcaggacagaactcagggaccaccagcccagctccaagttgagagtcttggtgcaggtttgtggatcgcccttatcagctttttaaattattttttttgagacagggtcttggtctgtcgcccaggctggagtgcagtggtgcgatcatggttcacagcagtctcaaccttctgggctcaattcatcttcctgcctcagccccctgagtacccgggaccacaggcgtacgttcagctaatttttttttttttttttttttttttttttagtagagataaggtttcactattttgctcaggctggtcttgaacctctggactcaagcaatcctcccactttggcctcccaaagtgctgggattacaggcgcgagccactgcacccagcctttatcacctttagaatccactgcgtagaccctgtagaaactgcccctctggggaaggcccacagcctgagggtgctttcctgggaaggtgggcagtggaggactgtgatgtctaacccttctggaccctggccaacctttgccctgcccctcagggctggtctttctcctgatcactggccagagccccagagaccccaaagagaagacagccagtgagacggctttgacctgtggaagagcaaagtacctgcaggactggccctcagcagtctgtcccgtggaacaatggtcttccaggtctgacggtctacccagccccctggcatcctcctcctctctctgcggtggtgctgtgatcacagctggccctttaagtcagctctgtgtcctcgggctcccccagaggccctccctgcttggaaacccctaattaaggtgcagggagaagtaaaaacaagcagccagagacaggccctgcctgggaggctgcccagagaggaggaatggctggacaggcagggagtgagcagctgagggaccatcaccaagggtcagtgctgtgccccccaggccaccggcactcttaggacaggtagctctagacagaaaagtgaccaatgtgggtcccaggaacactcccctcaactcgataagcgtccggactagaccttcccatctccccccagcttctctggatccccagggtgcaagatctgaattctgggagctcagcccctcctctctcaggacactgctgcccagcctgtggacagccttagctgtgactgcagcatggagtttcaaggggaaaggactggctccaactgagcaatggcttctccctagcaggcgccatatcccttgggacctttccctcatcagaggtggggcctgtttgatggcaaaagtcccatccctctagtaacattgccccgcacccgctgtgcctaatgagctgctctggcccccattaggaagccggatgatgcctaggagaactggacatgaagaacagatgtgagaatgcttccccaagactccgtggtgcaggacattgggggctgccattcagcttgggctgagggcacctccatctgtctgtgggggtctccctgcctgagttactcagcagtctgagtaattactgcctgacaagaaggcgggcacagtgcacccccacagtacaccacaacacccgccttcactcgcccccactccctggctggactccaaggcagcacccaaccctcctgaggcctgaaataactctgcttctcacactcacgcccagccccagccaacttttcctaagacgctagagtttgtgggctagggggtcatggggaggcggcttggagaggtggaaggaggattatcccacattcaggccctgagtcaggcccacactttatcgctgatctgtgatgtgacgttgagcaagttgttcatcctctctgggcctcggtgtacttacagaggacctctcaggctcccagtgtcagggctaaggcaggcagtggggtgagcactgccttgtagctggtggctaagagaaggaatacctcaccttctgttctacgccaagagggaccaatctttttttgttcgtgtttaactgctcctgtggccatgggcagtgtgcccagagtagcagccatccatctttttttatctttaaacatttttttgaaatagagatggagtctcacactgttgcccaggctggtctcaaactcctggcctcaagcaatcctcccaccccagccttccaaagtggtgagattataggtgtgagcccatggtcctcaggaaggaccaatcttatctatcttcagaacaaggttacttctcaccttcaagcatctacgtggaatgcccttcccccttcttagtgtggtgaactcagccttcaagacctaactccaagggcacctcttctgtgactgtttcctgattatctggtagcccctggcagagctagcagagccctttcgcagtctttgtgacttctgtcagtcacactctaagatggtttgcgggtctttcttttcccacgacacctgaagcttctggaagtccaagcccagagccttagctcaaatctgaagcttcagtgccaccaaatgcaggtgtgagtgaatacgtcagactggccttctttttttttgtttgttttgtttttttgagacagtctcgctctgtcacccaggcaggagtgcagtggtgtgatctcggctcattgcaatctccatctcctgtgttcaagagattctcccgtagcctcccaagtagctgggattacaggcgcacaccaccacgctcggctaatttttgtatttttaatagagacggggtttcaccttggccaggctggtctcgaactcctgacctcaagtgatctgctcagcctcccaaagtgctgggattacaggtgtgagccaccgcgcccagcctggccctttttttttttttttttttgagacagagtctcactctgtcacccaggctggagtgcagtggcgcgatctcggctcactgcaacctccgcctcccgggttcaagcgagtctcctgcctcagcctcccgagtacctgggattacaggcgcctgccaccatgcccggctaatttttgtatttttattagagaccgggtttcaccatgcgggccagggtggtctcgaactcctgacctcgtgatctgcctgcctccgcctcccaaagtgctaggattacaggcgtgagccaccgcgcccggccctgaccttctttttgaccttcctatcatgtcaccttttcctacaaggagggattcagttggatttctgcttggatgtcacctgctcagagcagctttccttgactgccacctctacccccgtgtcagctccagaacaatactctgcttgtttttcttcgaagcacaatcttcccatcttctctggactttcctcatttggcccctattaaaatggaaactccttgaggacagggcaaagacaagtctttttcgtctgctgaattttcaggaacagtagtgccccacacatgctgagccttcggtgaatgtgtgttgaatgacagccttggtccatccgctttttcttctctccgaatccctctgatcccaggccagcagggggtgccgcctccacccaggatctcgcctggcccgaaccttctcttccctcagctcaacaggcccctgcgggacccgctttccaagcggcgcctcctccattttccgcgaaccccccggcggggtctgtgtggaccaagggagatcagagaccccccgccgccaccccacccaggcggagacggcccacccgaacccgcacgggtccttccttctccctggaatttgcagctggccctttccgaatgcttgctcccctcctctccccacgaaagaacagtgtcctgggactcggggtgcggggcagccgggttcgctggagctgttcagtgcggggaagagccgtcgagactgggagaaggggcgctggccagggaggagacggggcagggagcggactcgcgatccgtactctgggcggcggtcctcgcgtcccagccgcgtctcccgatgacctccagccgcgaagggcgagcgggcgggggctgggctgcgggttcgggctccaggaggcctgcggggccggggaggggcgtggagtggtccgaggaccggcttggggactgggggcaggtgcctggacggacgcgggccgagcatcttccccgggggcgggcgcagtgaaaacaccttgggaggcggcgccgcgcggctgagcgctgctgccttgggaataggacggcgctcggcactgcgagctgagagcactttcataaattttgtatgggaggcgctccgtgagcgggggcggggagcggagcgagagggagggagctagagagcaagggagggagggaggaggagaggagggggaagccggggggaggaagggaggcgccccgctccgccgatcgctcggtcctgcaaacgcgcgccgggcgctttccccggagctcggcggtgcgtgcgagcgcccttttgctgcagccgcggcggcggtggtccgagggggcggagaggagggggctgcggccggccggccagggggcggcgtcccccctcaaaaccgcctgcgaagtgctccgggtggcagaagcaggccgccggctccgcggagcaagccgctcgccccggggctgagcaagcgcgcggggctgccgggcagcaccacggttgcttgcgggcgccggtgccctcggcgcggggctggagctcaccatgcccctgcggggccgggccaccgggcacgagcggatccccggcttgcccccgcctcgacgcgctcggattagctgcagctggcgcccagggatttgaatctggaccccgggagggagtgcgcctaggccgacctcggagcggcggccccgtggccaacatgcttcgcaaaggtgagttggagccgcaggggcaagttgaagttgaatgcgctccggaaagagccgcgagcccgggcgccgcccggcgccggggctcccggtctgggaagtagcccccggcgggctggtgggttttgccgggcgcacccgccgaggggctgctgctggggctcagctcccgtcagcggccagttgtgagacacggggttttctccatggatcgagtggccaggcctagagatccggcccggaggggtcagtcggagaccagagtgagcggccggtggtggaaggggagccggcctcctgggacctttgctttgctgggataaagttttgcacttgcagcctccattccctgcgcgggcacacgcccttgcttctgccgctttgtggaggccgagtccgcacggcgcccccgtgcagccagcggtcagtgaccgcgcggcccgggcgctccccgcgcgccctagctccccagacggggcccggacgcggacgtcttctctgcagttctgctctgatcgctagggatgggctctgggcacccagcggctgagggtggggagcggccagcgcctgatgtccagttcctcaaactttcattatgctgggagcggagggacgcgaaagccgtgccgccagtgtgcgcgaccggtgcacagctcaacttgaggacagctggcttcgcgaccaccgtagctagacgccccagcagcccggcccggtacggagcgcggcaaagttggtgcgggcaccggggaagtcccgccgcgcccccacgtggttgccacgcggggcgccgtcccccgggccctgggagggcaggtgatcacgccgggagcccacgggccccgccaccagctgttccagcctctgcgtctgcctctcccctcccaggcccgagcaggctgtggcgccccgccgggatcccccccgcgcctggcccggccaggaggctgagaagccgcggcgcctgc

SEQ ID NO: 7251 - DNA, 6000 bp, Homo sapiens; identical to SEQ ID NO: 1910

SEQ ID NO: 7252 - DNA, 6000 bp, Homo sapiens
aaaagaaaaggaactgtgggttgccttatcttttcctttccttctgtgtcatcatgttgaatgcgagtggttgttgaacgcagggaagtaatgtgagtaagaaatgatatgatagggaccccgacctttcgtgtttctcagaacactactgtcttctttctgcatgaagcaaattcgggttcaaatggaaagcagggcctctcggctgtcagcaccccacttactcagtcgcagacataacacattcaccctagacttgattcgagtccactcaactcccacccaccatgagtccaccagaattgtgtgctcacgagcacagtgagcactttacgggagagagatggcgtattaaacgggcctctttggctcacagcatgccccgttttcccaacgggcttcacttacaaagcacaagttcaaagagaaaattactatattaagaatttcaaagggccaggcacggtggctcactcctgtaatcccagcactttgggaggccgaggcgggcagatcacctgaggttgggggtttgaaaccaggctcaccgacatggagaaaccccgtctctactaaaaatacaaaaattagcccggtgtggtggcgggcacctgtaatcctagctactcgggaggctgagggaggagaatcgcttgaacccaggaggcggagcttgcagtgagccgagatcacggccactgcactccagcctgggtgacagagcgagactctgtctcaaaaaaaaaaaaaaaaaaagaatttcaagatggcggttggagagcattaaaccaagtgggaggccgggcatggtggtgcgttcccatggtcccagccactcaggaggcagaggcaagaggagcacttgagtccaggagttggaatccagcctgggcaacatagcgagacccccatctctaaaaacagccacaacaaaaatcaagcagacggtccttctgacaactggtgacctgcgcaggttgcatgcccatgaagccagctctgaatggggataataaaatcctcctccagggttactgtgagggttaaatgggagtaacttgtgaaacaagcttagcatatggtgaatgttcaagtcagtggctctaatcacagatatttccctacacagcttagaggcccctcccctggggaggcctgaaggaaatcagggtgctggggcatgaccctgactaccgctccatggtcctttcagccatggctctcccttttaatctcttctccataccagcttctatgggggacttttctagcaggcaaacctggccccatctctccattgcttaaaacccttcagtacaaaacccaggacataacatagacaatcgaggttctcagtgtcctagccctgtctctctaatctgccctcctggtccttgcactcctgctccttacgatccagccacactaagggatcaaatcactatccctgacatatggctgagatttctcaccttcaactcaggctgttgttttctgcgggcagcaccctcttctccatgtgtctgaatatttccagaaaagctgggtgtggtggcttacacctgtaatcccagcactttgggaggctgaggcagctggatgagtagagaaggactgaaaataaaaggaactgtgggttgccttatcttcaccatgcctggccaacacggtgaaaccccatctgtactaaaaatacaaaaattagtgagaccagcctggccaacatggtgaaaccccgtctctactaaaaatacaaaaattagctgggcatggtggcaggtgcctgtaatcccaactacttgggaggctgaggcaggagaatcacttgaaccccgaaggcagaggttgcagtgaaccaagattgtgccactgcactccagcctgggcgacagagcaagactcagtctcaaaaaaaaataaaaaataaaaataataaataaataaataataattccagggaagacctctgtttcctcatgcccacccgggccccctcaggtgaggcgggtagatatacttctgctagataggtggtatgttctgccaccttctgtctggtggaggaggtggcaaaagccgtgtctaggtgccaggcatggagttcttggttcctggcagctgggaggtggagaatgtggacctgccctttggacagcctgcctgtgaccatgtcgccctggccaccagctgtgtgtctgtccaggtacaaaaagagagcatggcggggagggacgtgagcccggggcaggcagctggagtgtgaaatgactgcatgtgattctgtgggagctgggggggcacccagaagttgtgacaggggcagccgagcaggcgggcatgctgacaggtgtgtgagcctgccaggtgagggccccggttgctggcaactgtttgtcctgccatggcggtttgaaggtagggtggggtgggctggagaaatggaacataggcctggctgccagagcaaacagtcaggccttctggccctaccttctagcaaataccaactcacagctgagggtgcggtggagcgggagaggctggggttaaggtccctagggccagcagagaagaagtcagacctcaagatgtgtgtgtagggtggagcaggggtttcccagcggcttgaacgcctagggctcccgatctctgggaaatagggctctagcggggagctgtgaggctctgtccccagtcaagtcctggctaacatttttcctggcaacttagggatacagttgggattttgtggactatagcagtgggggagaaaggaatagggtggaaatatctggggatatcagacttgagatataaaatgtcaggctgagcgggatgcagtggcttatacctgtaatcccaacattttgggaggccgaagtgggtcgatcgcttgagtccaggagtttcagaccagcctgagcaacattgggaaaccctgtctctacaaaaaaaaaaaaaaaaaaaaaaaaaaaaaaaaaaaaaaaaaaacctgggcgtggtggctcacgcctataatcccagctacttgggaggctgaggtgggaggatcgcctgagcccgggaggcagaggttgcagtgagccgcgatcatgccactgcactccagcctagatgacagagccagatcctgtctcaaaaaaataataatggggctgggcacggtggctcatgcctgtaataccagcactttgggaggctgaggtgggtggatcacctgaggtcaggagttcaagaccagcctggccaacatggcgaaaccctgtctctacaaaaaaaaaaaaaaaatacaaaaaatagctggatgtggtggcgggcgcctgtaatcccagctactcgggatgctaaggcaggagaatctcttggacctgagaggtggaggttgcagtgagttgagatgtcgcctcgccactgcactccgcctgggcgacagagtgacactacgactcaaagaaattaaaaaaaaaaaaaaggaaaataataataataataataataataataaaatcaataaataaaataccaggccggaggagccacaaccagaaaaccagcattcctctagctccacagcaccaggctgagacgcagctgatatcagggaatccatctggatcacccatcaaaagccccaaagcacctttcggtccagccagtcctcagggagtgtctttgctcagggaggcaccgagaggcggagaggaggaggggcccagtcctgtcccaggaggaagagcacagaatctgggggtgtgcatgatctggataggggtcagcagctccagaccaggctggaagttgaggctctcaggagcgggtgaggggctgtgttgttggggcagggcgcagctgcagctatctgggaaagcttcctggctgcagaggcacagaaggggtttggggtttgaacagccagctgtgcgggctcaatcctggcatctctgaccctgtgcagccttggtggatggcagagactgaggctctagaaggcagagcccagctcgtggtgggaggcagataagggctggggtgaggctgtctgggtctctcaagctggagggagcggcaatcaggctgttctcttagctcctccttttggcggggcgagtggtttctgccttcctgcgacttcctcctctgacccgctgccacttctcctggccctcctggggcgggtggagctcgggagcgctgaggcggaggctcatccatctctcccctccctgggccagggtcagtcccctgggagccctgggcagagacccccccaccccaccctctcgggcccctctggggagccccacctttgctccctggttacatttcctgctggggtgacggtgtgagtctagggtaacgagcctggttttctgaactttcttatgcaccggctctttgttaaaggttctggttatgtgaggaataacccctcgccggtgggcattggaaaagaataaagaaagcagaaacaccaaataaggagaacatccagcactttcctctagagaagacccgcttattcagaggctttcgggttccctctggagtcacttcgcagaattcgagctgggaagcaggacgccccgggcccaggagagcccagaggaggcgacgcgcagcccagagccgggtgctccgcagaccgccccagctctcggccagatcccacccctagcagctccgcggaccgggaccgaggacccccgggccacgcgcccccggctcccgacaggcccagcacgcgccccgcgggcggtctcagtttcccctctgcagaatgggcgggggacccaggcggtgcgccccggggcgcggagggcggccggaaggggtgtgatggggggcgggccccgcgccgccccgccccggggagggagtcccgggcgcagcatcctggcgcgggccggggccgccgccgccactgccgtcgggtaaggtcccagcacggacatggcctcgcgcggcgcccgcccgggcccgagtcccccgcgccccgctttgtagccccccggcggagaggcggcctcgacggtgcggacggcgcagacggccgggcgggcggcatggaggcggcgcatctgctcccggccgccgacgtgctgcgccacttctcggtgacagccgagggcggcctgagcccggcgcaggtgaccggcgcgcgggagcgctacggccccaacggtgagcgcgcgggccgggccgggccggggagcgggggccgcgcgcgccgcagtctcagtttcccctcctgcctccccacccggctctgggcgggcaggaagcgagggctccggaaacctcttcggatgctcctggggcacccggcggggctgcgcggccaccttcgccggcgccggggctgggggctgggggctgggagcgggttccagctggggagaccggacgcctggcaccctctgcgcggtcctcccggacttcccacctccactccggccccgtccaccctggaagcgttattccaccccatcctggaccgtattccaccccaacgccgcgccgctcccgctggcatcctgcaggtgcagcgcagacaccggcgggcgagggacggccggagactcaggctcggcctcccagctggccccagggtctcccctgagggctccagaaaacgcccaggaaggtgccgcttatcagctagcagccttggggcccccacccccaccccaggtcttcctctttctgcaacccgaagcggatgtggctggcggagtcggtgggggctttgaactgctgaggcgggagacccaccttcctggggtggcggagtcaaggcctcagggaactgccagggaggcctttcccatctctggggagggagggaggcttcactatcatttcatcctcacctccttcaaaggagtgtgggattcttgctcttgccaaaaggcacattgagtgccaccgggtactgtccagatgtggcctggcaccttggaggtcccatgagggtggaaaatacagaggtgccctccccac

SEQ ID NO: 7253 - DNA, 6000 bp, Homo sapiens
aacccagactcaaatgtgaactggaagagactgcaggcaccatctcagtcaccacctctgtcctctaaacagacgggaaaatgcgccaatacctgcccaggggtcatttagtaagttactgacaaaagaggcaagactgagtagagaaccttctttacaagatacacaagatatcaacatccagctttttatcctgaatccttacaaatagttcatacggagttagtgttagatgttgaaagcttgtttgtccttgatataaatcactagcgactattaagggctcttccttacaaactcggagaaaggaacatggagtcagacctcttattcagctaaattatgaacaagaaaatcccccgagaggagttttgggaagatgagggattatttctagagtgcaaatacccgataaatatatttggaatgaactgttgtggaagggtctagacaatatatatccccaaacttacatcagttttagacataatcagctactcaaggtatagagccaaaacgttttatttgcatgctgcttccagtgcagatgaacaggttttcgatggtgtgtgcaaggcacgaggctcccaggaaagatgtggatctcccgctccctctcatgggacagggctaataaccgcctttcaaattgaaccctttctgccttgaggaggcccggaaccctcacaggattcagttcacagatcaaatgattttctgggtatggtatttctggtggttcaatttcagatgtgtgtaatctggctgccaacgtaggattaggctttttggcttgtggagttgacactcctcactgagctttagcgaaatgatgaaagaattttgaattctgttcacacaggtaaataaactgaaggaaaagcctttcacaaaagggagccaaacacatcttctaagacataggagctgcacagaaagtcctaggcaagaaacttgatttttttcctcttctcggcagtatgcaatattcacagtgacttccatttattcccaacaagagcgctggaaatcaagtttttctatttgttgagcctctcttctgtggcaagcttgtgctatgtgtttttcctaaaggttctagtcacattgttagaagcagcttccaaggtaatcatttctcatgaggaaacaggctcaggttaacttgccatcgttgcacagcacacaagttgcatggctgggattcggttccaccgcctgccttgcatactgggtgttattagcccttcttcacaggtgaggaaaccagagctcacagagcgtggatgtgttgagaccggtgcttgacccaattcatcggactagcactggaggtgtcctcctcttcctgccctgccatgataccgcactgcctcctgagtctgttcccctgtgctcttgaagctacggtagacagcatttattcccttcctgttcttcatgttccttgtctgagacagcaccacactaagtccctctgaatctgactgcaaaacctgaagtgggtctaaaatggaccatgctccagtgctcagctttttcaagacgtctgtatttctggttatagctaatgttatagctccatccaaacctggtgggtgctgtagtttactgagtactatgagtgctttatttcataggctttactaccttctctctaactcaggggttacaggtcagtaagagtcccctcaaaagacaagggctggccgggcgtggtggctcacgcctgtaatcccagcactttgggaggccgaagtgggtgggtcacgaggtcaggagttcgagaccagcctggccaatatggtgaaacccccgtctctactaagaataaacaattagctgggcgtggtggcgtgtgcctgtaatcccagctactcgggaggctgaggcaggagaatcgcttgggcccgggaggcggaggttgcagtggaccaagatcgcaccactgcactccagcctgggcaacagagcaagactccatctcaaaaaaaaaaaccaaaaaaaaaaacaacaaaaaaaaccagacaagggcccagggataccgttaagtcatttctaagatgggtactttatcctctggtagagggctccttagagcgaggttgtgatgaggaggcagtcaagcccccgagttgatcaatcccttcaggcgagttgttctttgatcatggccatccagtccaagcacactgaaacggcacacatttgtgtgctactcaaacggagagggtctctggttttcatcaaattctcaaagggggtcatggccctccaaatctttaggaaccatggattctagtccaagttcttcgtcaaataggtagaatctgagatgcagcataaggcttgcaaggacttgcccatcatcaacacagcaagtagctgcagagccaaacttgaactcaggtctcttaattcccagaatagcacacagtggaaacacctcatcaaacattttgagtgcctgctatattccagaccctaggctggtgctgctgaggtaacgatagtcatcatgcaaaatcgggagtcagctgtgacagtactttacaacaactttcatgttgcttttacgttatggcccaggcaatattcgcagggtactccaccataaaaagatgaggctgcttgcatccagaggagcctggcctgcctggccactctgaaggccccaaagactcaccattgggcacccctataaaccattctcaacagacagggacgctttaagcgatggccttcccatggtagggaaagttctcccctaccatcttcgtgcctttcgtctcctgccacaacaaaaaggcttacacgtttcaacaccgtctctcatctcccaggtacctggcagccagaattcctactcttcctcaaaaattcagtgcttgactctatgttcccacgatctaagctccaaattcctcctccactccacctcactacccactaatgcttatccttaacagcacctaaagcttctccaactttaaatcctccttttcgtttctgacactcttattctgttctcagattcttctttttaaatttcttttctttttcttatttaattttagagacagagtcttgctctgtcacccaggctgcagtgcagcggcaggatagagctcactgcagtcccaaactcctggactcaagcaattctccagcctcagcctcagcctcccaagtagcgacaactaaaagcctgcaccaccaggtatagctaattcagatccttccttccaaccttttgtctcttactcctggctgtcctccaaggccaccactttccctgcaatcctgaactattgatgcattcttttgattctcccttgagtaaaagtcttttttgaaaggtctcatgctgggccgggcatggtggctcatgcttgtaatttcagtactttgcgaggttggggtgggaggactgcttgagactaggagttcaagaccaacctggccaacagagactccatctctgaaaaaaaaaaaaaacaaaaaacaagaaaggtctcatgctattcagctatgttactgtttagccctccattttgcaattgtcttaactaatcgtatagtcctccccacattcaccaaagattttagctcctgatgctcctttcctttcctacctctaaatcccaacatctaattttcctgccttctcacttccacttcagccactctattccgtggctctgtcctggactttttttttttttttttgagacagagtctcactctgttgcccaggctggagtgcagtggcacaatcttggctcactgcaacctctgcctcccgggttcaagcgattctactgccccagcctcccgagtagctgggattacaggcatgcaccaccacgcccggctaatttctgtatttttagtagagacggggtttcaccatgttggccaggctggtcttgagctctagacttcaggtgattcaccctcctcggcctcccaaagtgctgggattacaggcgtgagccaccacgcccggcctgtcctggacttttctcatctcctagtgctacttcactatgaacctgtttgccactttaaccaccaagctctcacaacattgcctgcactgcactggccttcaattatcagagacctgcagtttcgtggctcctccatcagtccctagccagtctgtatcccacgtttgatggcctgggctgtcgtctcatagcaccctcaatttattttgggcaatgcaatcccaagccctggataaatgctataattcaaaatatctgctactgcagcctggtggctgagttctagaaaaaagtgatccatcaacacatacatgaggcacatgaaaccaggccttccaacttcagcgtcctcttccaaagtttctttgctcttcttggtctccttccttgtctcataacttcacccataaaatcgatgtcatcaaacgatctccctgattttcttcccccctatatatctgcacgcatgttcttgtttcctaccgttttagtggaataacaggtgacctgcctctagtctaaatttaatccgttttcctgagttctgcatcgcatgcagagcatcctacctccccagggacctctccactgactcctttctcccagcctctcctttctttacaaacctaaggaccaacaaaccccctctctcgaccctctcattgccaagcttctccagagtagtctgcattcgttgtgtcatccttttcggtgccctgccaaggacgtggaatatgacagggctcagtcagtgcttaataaatctcgagcctcaaaaatacccggtaaaaagaaacccggctctccgcttcccccagagtccagcaaccccctccgctttcattcacccactttcctaccctcggctccgccttttgccgcgcctcccgcgattctcgcgagacttggtgattccgttccgcaccgccccggttgagccgcgcacttctcgcgaggttgcaggcagtgccgggccagacatggcggaaggtagggtttttttgtggagccgcgcgggaagacacggagctgtgggggcgctgctggccgtgcgaagctgccgtgggaggggaaggccgggcgtggttgcatgggggctccgcgggtctcgcgagccttcctgtctagcctctccggagcttctcgggccggggtccggagcgcggttcctatgacaacgtccctcccgcgatgccgaccccgcgggactgcggccggctgcggagccgggctggcaggtcccgcgccggtgctgcgtgcagccgcggggccccgagggcagcacgggaggctcttgattgccggcggtgccgggacgccgggggaagtaagccttctccttaggaaatcgaaactgctgtcctggcacgttctgcatccggaaggggtccatccctcgcttgcggaagagcgtgggtctcctcgggctgggttggggtgaggtggggtggggtgggggcgaggcagcagcgagctggcccacgcttcaggcgggcgcactggcggctccggctctgctgcaaccccagccttcaggccaggcgtacagatgaagacgggaggaaggggtttgcgggaagggagttggccaaggtcacactgctcacaagagggctgctcaaaccagacctctgtgcctttgcctccccgtccagtgcctaccctctggtctcgtgcacttttcatgacattgcagcttaaggcactctggtctctcagagtctgcctgtcttaatgtagcagtaattagaagccttcattgtcaaagccttattgtacacgtagggggaaagaaggcccagagacggggagttacctgtcaggaatcgtgcagggacattgttggatctgggcagcctggttctcctcttcaccccattattggagaacagtattccttatttgacctttgtttattgagtgactgcagtgtgcttggccacgacctttcctgttggttttgagctttgactgaacccatcacttg

SEQ ID NO: 7254 - DNA, 6000 bp, Homo sapiens
gcagtggctcacgcctgtaatcccagcactttgggaggccgaggcgggccgatcacctgagctcaggagtttgacaccagcctgggcaacacagtgaaaccctgtctctatcaaaaatacaaaaaatcatccaggcatagcggcaagcgcctgttttcccagctactcgggagactgaggcaggagaattgcttgaacctgggaggtggaggttgcagtgagccgaaatcgcaccattgcactccagcctgggtgacagagcgagactctgggtcaaaaacaaacaaacaaacaaacacaaaaaaacaaaagccacaaaaaaaaaaaaggaggaagaggtgagtgaactaattttgaaagtggtcagttcattgaatattttttggctttacataagcttgggagtttgaggattcagaaaataagcatgcagaccgtattagttatctatttctgctttacaacgacctcaaaactcagtggtgtgatggcacatgcctgtggtcccagctacttgggaagctgaggtgggaagatcacttgagcctgggaggtggaggctacagtcagctgtgaccatgccactgcactccagcttgagtgacagagcaagaccctgtctcaaaaacaaaacaaaacaaaaaacacccattaccttacacagttttgggagtcagttggttctagttcaagagtcttatgaggtttcagtcaagagattggctgtagtcatctgaagtcttaaccggggcaggaggatctgtttccaagatggctgccccacgtggttggtagttggagggttcagttcctcactggctcgtagcaggagggctcagttccttgccacgtggacctctccatagagtttcttgagtgacctcatgacatagtagttaatttctctcagagaaagcagaacaagaaagagggagagtggggagggaggagacggaaagccctaatgtcttttaggacctagctttggaagtcacacacatcatttcatactgcattggctttgcagaccaacccagacacaatgtaggagactatggaaaggcatgcatatcaggaggtcggaatcactgggggatgttttaaagaatggccaccacgagcatgccctctgaattctggtgatttacattccttccacatgcaaaatacactcgctccctctcaagctaccccaaagtcgaatcccattatagcatcagctcaaagtctagaatttcatcatctaaatcaggtccatgtatagatgagatttctcaactgtattaccttaagtatacttccagaatacaattcctcctcttctttttttttttcttttttaaagaagtttcactctgttgcccaggctggagtgcagtggcacgatctcaggtcactgcaatctctgcctctggggttcaagcgattctcctgcctcagcctcctgagtagctgggattacaggtgtccaccaccatgcctggctactttttgtatttttagtagagatgaggtttcaccatgttggtcaggctggtcttgaactcctgaactcagctgattctcccacctcgacctcccaaagtgctgggattacaggcatgagccaccgtgcctgggctcctcttcttctgaagacctgtaaactaaagagaaagtcatctgaccccacccccaacatacaatgttggaacaggcataggctaaccaccatagatatccctatccaagacgggaagaaatggcctgggtctttcctctcccatcacaactgcatcataatctaacctcactcagtctacccacaagttactgtgaattacttttggaagccttcccaactcttcaatcacacttttaatctgcaagaaaattactgggtttgtgccatttctatggaagatgaattttacccaccacattttgatttttctgaatttcacttataaaaaaaaccttttggttgggcacggtggctcacacctgtaatcccagcactttgggaggctgaggcaggctgatcacatgaggccaggagttcgagactagcctggccaacatagcgaaaacccatctctactaaaaatacaaaaaattagccgggcatggtggcaggcgactgtaattccagctactcgagagactaaggcaggagaattgcttgagcccgggaggcagaggttttagtgagccaagatcgcgccactgcactccagcctgggcgacaagagcaaaactccttctcaaaaaaagaaaaaaaaaaaaagctcaactttactcataataagggtaatgcaaattaaaattaaaactagggtaccatttttcacctatccgattggctaaggtaaggttatgaacacaccattggcaagagtgaggaagaatgggcattctcatacacagtccactggtgggagtctaaatcagtacaactttctacagagggcaattgagcagtttctgcctaaattcgatatgcttttggtccagaaattctatctccagggttttgttctacagagatactttcatacgagaaatgctgtatatgcgaggtttatttctttcagcactttttcatagctacaaaagattactaataacctgtgtccactacaagagactagtagaatttatggcgttacagcaaatggcagccttagcaaagaacaaggaagctctttatgcatggatatggaatgacctcctgttgcactatggaaaaacgagatgcagaataaggcatgctacaatgtgcagaaaaagacaaagataggcgtgtatttgctcagtaatattagtgcacagaagagactggtaactgtgattgctgggagtggagcaactgggtggcttggggccaagaggagggagaaactagtgaatatcactttgtaccttttgaattttgaatcacatgaatgtacttcccagtaaacaattaagcagggccggacatgatggctcatggctgtaatcccagcacttggggaggccgaggcaggtggatcacttgaggtcaggagttcaagaccagcctggccaacatggtgaaaccccatctcgactgaaaatacaaaaagtagccgggcatgttggtgggtgcctgtaatcccagctactctggaggctgaggcaggagaatcgcttgaacccggcaggtggaggttgcagtgagccgagatcacaccactgtactctagcccgggcaacagagcaagactccatctcattaaaaaaaaaaacaccaaaaacaaaaaacaagcaaaccagaaaatatgcatcacagacatattttcgtggacttcatttgtgttaccaggctgattgtaatccatgccatgaagtttatgttagtattccccttttgtttacattgcctgataatttgtttccctttgtctcccccaagggaagcattcatttataatgaatttttcagctcagtgtgtttcagcaaacacttattgacacccacaaaccctgacactgtgccgtctccaggggaaacaaaagtgagagtcctgctgggtgtgtagtccctgcctaggacgggctcacattagtgggggatacacacatacaaatgctcacactgcagtattaactgtgcaacagtagaagtgtgcgcaaggagaaaagtgttagaaaggaaagctgggccgggcgccgtggctcacacctgtaattccagcactttgggagactgaggtgggtggatcacaaggtcaggagttcaagaccagcgtggccaacatggagaaaccccgtctctactaaaaatacaaaaattatccaggcatggtggcaggcgcctgtaatcccagctactcggaaggctgaggcagagaattgcttgagcccgggaggcagaggttgccgtgagccgagatcgtgccattgcactccaccctgcattccagggtgacagagtgagactctatatctcaaaaaaaaaaaaaaaaggaaagctaattcactctggtggggtggtggggggtgaaagtaccgggtaagactttcctgagaaaccggaggtgaactagggtttagaagcatgaatagatgaatagactaatccaggagcaagttcttttgagagaacagcaggtggggttctggggaacacatggctccagcccaaaaagaaactggagacgaattagggtttagaagcatgaccagactaacccagaagtgagttctttgagagaacagcaggggcggcggggggagggggggttccggggaacacatggctccagcacaggagatgccagggtgcagtgggatgagaggtgaggagagcaggtcaggttagcaagggcattgaatgccagaaacatttggacttttattctgcaggcaacagggaggcagcggcttttatgctcaaaaggaatgagtcccagtggctggcacagagaaggcaagtgtgcaaagctggtcgaatgaattccgtggcctgaatgtaccttcctcaaatgccactgcaaactgggtctcctcgcccacttcaccctctcctgcaatccaacttgtgaggcttgtgtgtgcgcgcgcgtgtccttgcgtgtgtgtgtgtgtgcacgcgtgcgtttagatggaggttggcttcccagccacccaggcttggcccaaagtccgtggtacacacgtgcataactcctacccccacctcgcctgcctgctgtaccaggcgttgattccctcttcctgcgtgttttcggtccaaatccttttctttttctccctcccgtcaagatagtggtttccactccctgctctcgccaggacaccgccttttggactggggctgaattctgccccttgaagctctgctccttggagctgggggccccagcggtaggcggagttgattggagacctgccacccacattccgaccccaagcgacctccgagagggcggggtctcaggctgggttatttagctcgtccacccttctccaccagaaggagcgaaacatctttgagcaagatgggtctctaccgcatccgcgtgtccactggggcctcgctctatgccggttccaacaaccaggtgcagctgtggctggtcggccagcacggggaggcggcgctcgggaagcgactgtggcccgcacggggcaaggtgagctccccagagccgggcggggtgggctgcgcccctggctccgagtcagtcaaataccggggaggacatgcgcccccgttggcctctggccgattctctttgccaagggcccgcgcattgggctcaaagcgcgcggaggccacgggggtggggggctttagggcagtcggtggcacacagtaagcgctcaataaatgttgccgctacccgatctccttggaattgagggcatgctcctgtgcgcccctcattgcacaaagctcccttgtctggaaactcagcagtcactggagccgccgtcggtcctctcgctttctctattttaaaaaccgtttcaaccgctagcgctgttggatctctacctttcaggctttatcacctggggtggagtgggtggtgagagggaagggatggggagtcaagacaggagaacgctctcgatttcccgacccacctcccgtcatatctcatgtcacatctaccgggtgttctacccggtcctgttaactttttttcttccgcgaaagcccaaattcccatcactgctctagctctctcccagatccccaaatccggatgtctgtctcagggaacgtcaaagcaacatgcccggatgaggtcctcccctctccccacctcccagccctctcctcctgcctcccccggtgtcacccgcgcctccttcctctcttcacctccctctaaacaagaatccggcgcagtcagttctagaccctgagcatctcccgcgtccctgcccaatatccgtcccgcccccgaccgcccgcgtcctcttgaacctgcggagccctgctccccgcactccacgcccttgctccgagcttccgagaaagcgggg

SEQ ID NO: 7255 - DNA, 6000 bp, Homo sapiens
ctagaacccaaaagtggggtcctttctgaggcagggtggtcccttggctccccttcatcaccctcctcttgcccttgagtttcttcctcttggtcttcgtccccaggaccccgatgaacaggctgcttgcaaatggggcaggtcttccgggtctgagtgagccaggggtccacgcagcggctgtggtaggctgcagagaggaacaaggtgaagcacctggtggctgctggtggcagaggggcatgggcaggcagtgagggcctcaccatgagcacaggggagtacccgcagcttgtccccatcctcatattcatccaggcaaatggcacagacatcatactggtctcctgggacagaaagaaaataatctagtccttcactgagccacaatgacccagggctaaggcttttaaagccttgcaaaaatttcccctcacctacaaagccagtggaagagataagacaggtaggcaggataaggtcagggcagaacatggaagaatttagggctagaagggacaagcaaagagaagcagaggtaagaagggaagtgggtttttggggaggtgtgagggtggagatagggagtggaaggaacggaaatgggcagggcttctgccacagccttatacgggcactggaggccccagggcctaaagccccagccccttggtaccggtttcttccttctctaactgaatcctccccattcctcccatttttctgctctgtccacatcccctataagcaaagtctgtccctctattgtttcccacaattatttcacttaatcatctttgctttccatctcctctcccgtcttcgttgtatttatgcataaaagcagaagaaaagacagcatctcaagctgaaaccttcctactgccatctttatttttattattatttttttgagaaagggactccctctgtcgcccaggctggagcacagtggtgcaatctcagcccccgacaacctccgccttcctggttcaagtgattctcctgtctcagtctcccaattagctgggactacaagtgcacaccaccatgcccagctaattttatttttttatagagatggggtctcaccacattgcccaggctggcctgaactcccggggtcaagggatccacttgcctcagcctcctaaagtgctgggacttttctgttttatcatgtcacccaggctggtctcaaactcctgggctcaagtgacctgcccaccttggcctcccaaagtactgggattagaggcacttgggattacgtgagccactgtgcccggccactgccatctttgtataccctatcttctgggctcaaagtccttcagaaccaggtaaactgtgggaaaagccctcttctcccctaaccccctcacccttctgatagtcatgtgtaggaatctgtttcagttgctctttggtaagtcgattccgctggagccgtttccggtgctggatacaacgagctatctgggggaagcgggggtggatggacaaggcttaggaacaaaactagacaatctaggacaagccactcccatctcccaactccagatccagtctggcctcacaggcctcagtgcttcccatcatgttccctcagctactcaccattactgctcccatggccaaaaccagcagtcccacaatccctgtgaaagggatgaggtaatagcccaaggggaaggtattgtctggaaccagaagcacccgagccctgggaaaaggatgaccagtctcagcagggcgagaaaggcaaagggagaaaaaaagagggacaaagtaactggctctggacaaagcccataggtggggacaggaatgggaagaaagtcaaagaggcagggaaggaaggacaggaggctgaatggttcgggtaatgaggaggcctgggctccaggttggcatggaactgcttgctgaaggaagaatgggaaggaggcacatgtcctaccccttctcgtagacaaagagggcacgcaggtactcggagcttctctccccaataaatacagacgggatccagatctgctgctggatttcctctgcagggatcaaggtgttactctggggactcacaaccttctactcaaatcctctgggaaccctggcatcttgcactttggccccaccccacctaaaggattggcttcttttcctgaggccttcagccttcccaccatctctgggtcctactgaaagcccagctgtatagattcccccagccttaccactattccacaccatgttcagaagttcattggaattcacattgtgtactacagcggcaccatatccagccttctgggcatttaggacctagggagacaaggcagaggacaaggagccatcatgggccttacctgtcttcattcctggtgccttttttttaccctcagctgcccagctccccttcctcatttagcaaccttgaggtcaaagttgcagtcgaatcttcgaagcagcgcaataaagactgacccattgaccggggctgggggtggtggggcaatggggctgcaggcattgtctgggtgagcctccacaaggaacccctgaaggatggaagcaaacaacagtgagatttctcctttctagattctgctctctacaggggccaccaaacacaccagcccacatgctgcacatcctctatcctcacttcctcctccttcctggggtctgagtgagcatcccaccatcacaaccttctcttagcctcttgaaaaggcaatgacataaaacatcccttcaccaaactctcccatcatccctctcgctgtcccagatgggctaatctgtaccctatactgcaagctaatgcaattatttttgccttctaatattccaattgtaattcaattctcaaaccacccatgtcactttctctcaagttctgtttcacagtcccctctccagcacatactcatacagacacactcccctcccttcagttttctttttgtttttcttttttttgagatggagtctcgttttgtcacccaggctggagtgcagtggcgcgatctcggctcactgcaacctccaccttccggtttcaagtgattctcctgcctcagcctcccaagtagttgggactacatgcgtgcaccatcacgcccagctaatttttgccattttagtagagatagggtttctccatgttggccaggctggtcttgaactgggattacagatgtgagccaccgcgcccggcctcttcaattttctaattacccatctcacaaacaactcgactgctactaaggcccaactgagttcttgctatgtggcagtctttgggatgaagtactaccaaaattgcgtatctactttgatcttcacaataaccctaggaaaacttctaatatcccattttacagtaaaacaaactaaggctcagagagattaacttgcccaaagtcatataagcaataactagcacctgagaccttcctgataaggaccgttgatcctgccttctgtcttcgtccactttcagtctccctgataacctcggagttccaggggtggacactctgtcttctccctctagattctgggttctacactagacgtgctcagttcctaacttcattttcctacctccagtttcacccaggacaaacctccccaaccccagcctaggatggaggatcttgcgaaatactaaaaaaagaaaaaagacagaaaaggaaggaagggagggaaggaggaaaagaaaagaaagaaaatcacctggaggccctcctggctcaaggtagccccaaacagagctggaaggtctgcaaagtccatgctggcattgtggtccgaggtctgcggacaaaaaaggcgatgttccccttcagcctgcaacccttcctttcagcgccctttccccatccgtccctcagactcaccgctcgaatgagcccccgggtcggggccgctccccacagcacagcggccacaaccacaggaagcgggaaggctgcagggtgcatggcagcgggaggaaagaggctgaggaggccgcgcgtcctggtagcaaggagcagaagcggagttctgcgccctccctgcccctcctttaggatcccaggggtccaaccacccccaggtcccacttcccagctacatgggggcgccggggaaggaacaccaactcaaagaatgagatatccaacccgtttagtggagctgggtgggaggcactaaatgtatccttttctggtacggggataaaacgcggaaaggggacggagcctaacacaggtgacagaaaaacttcgggaagggtggcggagctcaaggaggtgggacttcctgctaggtgggccgtgttcccagcctctggaaaagggcttccggtagagaaaatcaggccgctttcagcattggatgcttgagatgaaggacttccggtcctaaaaggccggttaaaaaaaggttagcgatggagggactgcctgtggagatggaaggggcactggtggcccagaagacgacctaataaaagtgcccggaaacccggagcctcctagtttacaaacctctcctccctctggcctccgccgctccttcaaatctcgcgagagtgctcaccacctctcccgtcccctcgcagctgaatagttgctgtgtctatcgcgagagcgctccaacttggcgagccgtactcactcgatctcgcgagaccttcaaacaaactcttctctattttcccgcgattctaattcggtgaaaacagcgcctttcctctggtttccaaatcagttacgccccttctcgcacgcttccatcaagctcctccttcagctccgccttactcccggccgcctttgcgctgcgcgcctgcgcccgcgccggcttccagcgggtgtcggacctgagagctggaggggcgtgcgcgcgccctcgctctgttgcgcgcgcggtgtcaccttgggcgcgagcggggccgcgcgcgcacgggacccggagccgagggccattgagtggcgatggcggcgacggcgagtgccggggccggcgggatagacgggaagccccgtacctcccctaagtccgtcaagttcctgtttgggggcctggccgggtaagctcaggccccagggatgggaaaagaggaggaagggaagggcaaaaggaaccgggcccggttcatctctgggtctgttgcagtgaactgtgccggcacggggtcagcgcgatctccagcgtattgcgagttccccgatgggctgctagggccccattgcaggacccttatggactgcatgcagggtcgttgcacaacccccgccgggccagctgagtttcccagcgcattgctaagctcggccgggcggcagggggttccaggccattaaatggctcctgcaggactacctggagtcctaaatcttggatgccccttcctcccctccctgtgtcggactgcgtgcagccccaggtcactgcttgactgtcatgaagctgcttggagcactttcattgcatggcccctactggacaactagacttttcagacccgttgcacttggtgtacatatagactcttatacacatgctcaccagcatcctgattcttgaatcgcatggcaggccctgacctttgtaacctcttgctgccaggctccagtgggcactggtagatctggaatgcctggcccttcactccacctctgtcttcccccaggatgggagctacagtttttgtccagcccctggacctggtgaagaaccggatgcagttgagcggggaaggggccaagactcgagagtacaaaaccagcttccatgccctcaccagtatcctgaaggcagaaggcctgaggggcatttacactgggtattggggcctcaggatggagggtagactgtgggttggcagctctagaccttggcctgatatgctgacccctctgctcctcaggctgtcggctggcctgctgcgtcaggccacctacaccactacccgccttggcatctataccgtgctgtttg

SEQ ID NO: 7256 - DNA, 6000 bp, Homo sapiens
tctttgctcaactcctgggactgaaccatatagacatggacatatcatttgtacctggaaacctcaaaattatgcttttggttcttactgggtgactttgacttaatttaacacctgagcctcagttttctcatctgccaaatgggagtaataataataatccttataaaattgggttcataaagtttagagaaaaggaatggaaagtacccagaactatgcctggagcacgcacgacacacgtacagtgagttgggagccgttaggctgaatgttactgcttgccatatgatgtgaagtacagcaatatcccaagttcttgtgactgagggagattttctggaagggccacaggaggttgcggagcttggatgttgcccttagttcttgtttaatgtctctctgaatgcagttttaaaatagaaaacaaaactgacttctgtagaagtttccagagggaggtgctgttatctcgtacctcctgggatggcgatccctactgaacgcttgtgtctcagggtggaccactctgtgtctgtctccaagcagagaccagtaaaggagcctcctggtcctcagtgcgtgaccctgtcagtgctttcaggagacatgtaagcttcctgggtgaaggttgatttgtaccttctgaatcctgtcacgtgtagacatgggaaactgacctatcagtgttttgtgtgtgtaggtgactcccacatacacagttgccatttttctctctaactgggcaccagtgaacatgcgggcatgaggagtgactgtgtaccatttcagctgtttcttttcgggcagtcccctggtcagagggggtgggggtgggggaggggagaggggtacctagaacccagagaacattggcttatgccagataccacaccacatctgggcttacattcttgtatcttttttggtgtgtgggcggggggggtggggggcagttcagtgaagtctagaagacctgctggacaaattctaaaagagctagagctgtaacacttattcttgcatcttattaattttctatgatattttttccttcttcgtagggacttgggacaatctggctttgctgctttctaactgctaggcacctctctctaaccctcattgtcagagggaattggaggatatccacagtctgttcctgttctgatattctgagcagagaaaaggcactaacggttcctcttagctatttaattatcagaagcaagtaatctttccccagataatattttgccctagaagaagccgtgatttagctcttttattgtgcttacttggtccaaatacatctgtggggtgttttgtcatttcttaatgaatgaatcatagttataaccaggggccaagctgcccaagaggctcttcagagatcatggatgctctctttctggaagctgtggcctgatggagcagccccattccagggtcccatctgtccggagttgtgtatgtcaagtccggctcagtctttatttccaacactagccgtggtcctgtgcagtcaagctctcagctagtgtttagggctgtctgtcagaaatggttatacgtgggcaaaagaagatctgacagctcctatataccttatcttactgaattcttaaactttgaaccagttcttccacttactgacttgttaccactgctgactttctgaaaagttttccagtttttgttttttgttttttgttttccagtaggggattagaatgtttagtcctacttagtaagaaaaatattgtatttttaatcattcatagtgctggtaaaaaaaaaaaaaaaaaaaaaaaaattggggggtggccgggcgcagtggctcacacctgtaatcccagcactttgggaggccaaggcgggcggatcacctcatgcctgtaatcccagcattgggatgggaggctgaggtgggtggattgcttgagaagttcaagaccagcctggccaacatggcaaaaccccgtctctactaaaaatagaaaacttagctgggcatggtggcacacgcctgtaatcccagctaccggggaggctgaggcacaagaattgcttgaacttgggaggcagagtttgtagtgagccaagatcacgccactgcattccagcctggccgacagtgtgagacggtctcagaaaaaaaaagaaagaaagaaagaaaaagaaaaaacttggggtaatttatgtccagcttaagtacctgaacagtttccggaaatgtatattttttttctgagaggcaaaggatgtaaacagcttctaagtagctttaatgtttctgtacagaaataagtttatccctgtaacattgtggtagagttttaatacagtatttagttttttattgggcttttttaaaaagttaacttttaacatagctgctcagggattaaatcagattggaaaacccattctgactccacatactgctacaaagaaatacatcgttgtttatattgagctgcaggagatagtacactttaaacttaagaaagttaaatgtttcacaataacattgcaatataatcttcagctactctctttccattggtaaaatctctgatggtgtgataactctttgccaacctacgaaacccatatctggaagaatcaccagctcccgtgagcagcttcatgtaaatagatgcactccaagcagattgcatgcctcaggtgtttgtcttctagtaatcatggagtgtgcaacacccagagtaacactacaaggggcaggactgcaaacagcaggtcctggctaaaaacccttaatgctgcattgctgccagttgtaaagagatgcctgaatggaggcaagttctgccctgtgggtgaaactgatgatgtactgtactgtcatatataaatccactaaatccagctaccaggaactgcctggaactgtggccatgcatttttttttttctttaaagaccagtgtgatagtaggccatgcatctgagatacgatattccttggtaactagagggagaaaaaaaaatcaagtaggttcaggcttatgttgtattttgagagtctggttttatttgaacagaaataactctacagaaagctcttgtaaataatgctcaaatttgcacccgacgatcaaatccattaaaaatgaatcttgtatatgatgtgtgtggcttgtttcttgcatctcttttccattattcatagaaaattatttagaaaatattaagtgttagtcttaccatgagttagtaagacataccttcttagtagcttatatgtcctgtatatcctgggaaggtaggattgttgatttttaataaatctgaaccctgtctttgggttatattaatttactggagaaactcacagaactcagggaaacacatttaccggtttcatacaaaagatatgaccaaggatacagataaggagatgagcagggtggggaatggggaagaagctcccagcctccatgccgtccctggaccaccaccctccaggaacctccatgtatttagctatcagaggctctccaaaccctgtcctcgggtttttatggaagcctctggacttatctaaatgatataagctggcttcttgtccccagaaaaatgatgttccattagaacttggatgcaaggttggaggtgcagagagggaaggtcacaaaaattaatcatggatcctgcccttgaggatgtcacagtctggttgggtttaacctggttaaagcagcaacgctaggaggttcctgttgaaaagagaatgaagcatatgggctgggtgcgcacaagcatgagttccgagccggtggaaaaaaaggttctagaaggcctctttcaggaaaaccctcagactttcctttgctctcacaacacaacaatcaacacagaagacttatgtggccaaaggtttgggtttttcccctccacactaagcagcagacaccagctgggtgtcctccaattcaatcccaacagtatctacctggagatagtgtcagatcccataggttgagggctcagtccccaagaccgcccccaccttcagacagcaatggcaagtctgggcctctgaaacttccgaccaacccgcttcaagttggggttcccacgacccccctctttggattatgttaactcactggagcagttcacagaactcagggaaacacattcaccggtttcatataaaggatatgaccaaggatacagatgagatgagcagggtggggaatggggaagaagctccgaggttccttgcctaccctgggccaccaccctccaggaacctctacgtattcagctgtcagaggctctgcaaaccctctcctcttgggtttttatggaagcttctggacatcagcatcccttcccccagggtatatggtgggaccttctctgggaagggacttaagacccataatcagaaatgtggaaggagattagagtcctgctttggggcaggtaaaaggagggcaggagaaggggagagtctgtttcctgaggcctaacacacccaacattatcacagaacattgtaacaagggctataggagttacgacccaggaactgtggatgaaaaccaatacatatatatatcataacaccacagcctcctagaggaaagtgaccgtggaagggtctggtgagagctggcgggagacaagagtgcattccacgcagcccaaaagccttgcgtgctttgagaacagcaggtggaaagtgggtaagcggccactagagggaattaaacagcttcggacagcggactcggcagcgcagcaagaaagctccggaatccggattcgaggcttcccgggctgcaccggagtctccagcagagggcgcgattccgcccgctggccttaggtcgtcagagcgccggcgcgggaagcgcttccgggcaggggcggggcttccggcggcgcctcaggtcgcggggcgcctaggcctgggttgtcctttgcatctgcacgtgttcgcagtcgtttccgcgatgctgcctctgctgcgctgcgtgccccgtgtgctgggctcctccgtcgccggcctccgcgctgccgcgcccgcctcgcctttccggcagctcctgcagccggcaccccggctgtgcacccggcccttcgggctgctcagcgtgcgcgcaggttccgagcggcggccgggcctcctgcggcctcgcggaccctgcgcctgtggctgtggctgcggctcgctgcacaccgacggtgaggtttagcgggccgggggtgtggtttgcgttcaacagagggaaaacgtagaccaggaatagggcctgcaaccgacctctgaggtctgggacatttttccattgattggcaaccagcgggctaaacccacgtatgatcatatttcccccacctcccctatccagcagtttcgttttcttttggtagggggtgaataaaattaaatactagggtacctttttccttagtcttattctatcgaaagtggacctttgggaaggcccatggtcgtggttgaaaatagcatagttatatcgtttggcaagtggaagaggattggaaattctcctggtttatagcggaaagtggtaatgcgttcattgttggaaatcacttttccagaatcaggctcagcttcctactactattatggtatttttaccgataaggaaacaggcttctagagtaaccgtaatagcagagagattagaaacagtccaggtttctggctgcaataacctgggtaatagttttatgttttagactaactggctttcctttttatgtatctggatttcttttctaggagacaaagcttttgttgatttcctgagtgatgaaattaaggaggaaagaaaaattcagaagcataaaaccctccctaagatgtctggaggttgggagctggaactgaatgggacagaagcgaaattagtgcggaaagttgccggggaaaagtaagtactggtctggggatcccagggcagcaactcccttaaccttgcaggaccca

SEQ ID NO: 7257 - DNA, 6000 bp, Homo sapiens; identical to SEQ ID NO: 1912

SEQ ID NO: 7258 - DNA, 6000 bp, Homo sapiens
cacattaccaaaactaaaaacgcaataggaaatctgaacagactttcctgaattcaaataaattcacaatttaaaatctttcaacaaagaaaatatccagtttcagatgacgtctctgatgaattctatcaactatataggtagaaataattaaatggagaaaagtattttcaataaatggtgctggaacaactgtatatatatgaaaaaatctaattcataatgatcatagacacacatcaaagctgaaactataaaaattatcgaagagaacacaggctgggcatgatggctcacacctgtaatcccagcaccttgggaggctgaggtgggaggattgcttgaggccaggagtttgagactaggctggggaacaatagtgagatctgttctctacacagtaaaatgtttaactagtgtggtggtgcatgcctgtagtcctagctattcaggaggctgaggcgggaggatcacttgagcccaggaggggctgtttctcttggatttttaaagtagacaatcatgtcatttaccaataatgacagttctctttccctttcaaccttcatatgttccaatcacttgtctttctgtatggtctggaagaatctcatggagaactggtggcacgagcgtgctttctcttgttcctagcttaaaaaaaaaaaaaaaaagtcctgaccagtagcggttctaggagagggtaagaatttgcggaaaatgtggcggaagagggaaacgatcattgtcaacagtgaaaggggtctcagggacagaagcatttaggaaagaaaagaagattgcttgccaagacctggcaaataaatcaggctttagaaggacaggcttgccaaactaaaaccacaacaagtattgaaagggaaattctccaagattaccattgtgagcacgtttttatcagtctactcatgatggcaaaacccagcgcttttctcacatgattttcatatgcacgaaaggtcatgacctacccaggcgtcagcattgcaaacatcagggttagagttgtttttctagggagtcagcaatttatagaaaatgctcaatgtttagtttattttggggactagaagaactatttttttcatgaaacccgcaagcaatttatcagcgaaattctgtctgctctaccttcacaatatatccagaatcacaacacttctgaccacctcatttctcacctggatatgacagcagcttcttacctagactctctgtttccagcttgtttcatcaaattcacaacacaaaagccacaccgttacagttaacatatgtcaggttatgtcattcctctgctccaaccccttcaaagtctgcatctctgactcagagtaaaaacaagtccttaataacagccaacaaggctcacattttcccccatcgctcatctactcttctcctccctgactcacttctctataaaatctctggcaagtctgtcaaatggatgatcctcatacacaccagacgttctcccacctcagggcctttgcacttgctctgcccgctccctgcatcactcttcctgccagagccccttgtgacttgcttccttacctccttcaaactttgctcagatatcaccttcccagtgaggcctttcttgacactctggtatggtttggatctgtgtccccgcccaaatctcatcttgaattgtaatccccgatgttggaggtggggcctggtaggaggtgattggattatgggatggatttctcatgaatggttagcaccatctccttggtgctgttctcatgatagtgagggagttctcgtgagatctggtctttttttttttttttttttttttgatggagtcttgctctgttgcccaggctggagtgcagtggcgcgatctcggctcactgcaagctccgccttctgggttcatgccattctcctgcctcagcctccccagtagctgggactacaggtgcccgctaccccgcctggctaattttttgtatttttagtagagacagggtttcactgtgttagccaggatggtctcgatctcctgacctcatgatccgcccgccttggccatccaaagtgctgggattacaggcgtgagccactgcgcacagccgtgagatctggtcatttaaaatctgatcccctgtcttttctcttgctcctgttcttaccatgtgaggcacctgctcccccttcatcttccaccatgatcataagtttcctgaggcctccccagaaactgagcagaggccggcaccatgcttcctgcacagcctgcagaactacgaagcaattaaacccctttccttgataaattaccgagtctcaggtatttatttagagcaatgtgagaatggactaatacatgccctattcttgagggacattaaaaatcaaccctatctcatatccctgctctttttccgcaaagcactattgccatgtggcttatgtatattttactcatttattttgtttattggtgacccactagaaggtaagctctatgaaggcaggacttttttgtctgtttacttttgaactcctgaactctgcctcttgggaaggaaagtgcttggcatgccgtagactcaataagtactcaaatggatgaataaatgtgtataagagtgattggacgtatgtttattgcagaactatttacaataggaaagacttggaaccaacccaaatgcccatcaatgatagactggataaggaaattgtggcacatatacaccatggaatactatgcagccataaaaaagaatgagttcatgtcctttgcagggacatagatgaagctggaaaccatcattctcagcaaagtaacacaggaacagaacaccaaacaccgcatgttctcactcataaccgggagctgaacaatgagaacacatggatacagggaggggaacatcacacaccagggtctgtcagggggtgggcggcaaggggagggagagcattaggacaaatacctaatgtatgcgggccttaaaacctaggtgatgggttgataggtgcagcaaaccaccatggcacacgtatacctacgtaacaaacctgcacattctgcacatgtatcccagaactaaaaaaaaaaaaagaagcttcaaacccactgaaccagactgaaaaaaaaaagttagtgaatggagaaatatcatgttcttttcatggaagattcaacaatgtcaaaatgttgattatctccaaattaatatgtgaatacactgcaagactgtggtagacacacagagagctacccaggtcccccttctaggaaggatgtggtgacccactgtggggagtgtaacctgcagacagctgcttcctgaggtcacacccatgtcagggctgactgccagtgaccgaaggagctggtgctctacaggaccctgtggcagtccaatgctggacagctcccgggggtggcattgtttgaacccagagctccctgttggtttggttgaagctctccaaagtgctgggcttctccctctgcccagcaccatttcatccactttccttttcgaagtgctaatccctaataaatagcttgtaccccaaattcagcctcaaccttggcttccaaaaaccgaacctgcgacatatactaatcaaaataccgaataccaaataaaaacaaaactggcaacgacctggccgggtgcggtggctcgcgcctgtaatccctgcactttgggaggctgaggcgggcagatcatgtgaggtcaggaggtcaagaccagcctggccaatatggtgaaacccctctctactaaaaatacaagaattagctgggtgtggtggcgggacctgtaatctcggctactcgggaggctgaggcaggagaatcgcttaaacccaggagatgcagtagccgagattgtgtcactgcactccagcctgggcaacagagtgagactctgtctcaaaaaaataaataaataaataaaataaaaaagaaaagaaaaagaaacaacttaaatttctgatttatttctgtcaatagagaaatgctaaataaataaattacggtgcctatgatgaaatgaggtgcaggtagatcaagtacattttataaactgatgtggagaaatgttcctgatagcttgttaactccaaaaaaaaaaaaaaaaagcacatagcagaacacaaccccatgtacatacaaaatataacctaaaatgtatttcttctccttctccaccttgtaagatactcagtttccttcctactgaaagggatgtgcgcgtggattcagggcagctcccttaggggttgagcagggatcatgggatgaaatggaatcctgttcatgaagacagcgcctgtgctgagagccagagcagggtgccaaactgtctccttacaagctgtgagtgatcttgggctctgagcctttagtccgtcatccaaaatgcctccccaggtgcttggggggaatggttgtggaaggtaaatgtctggcataatcctatcacagattactcaataaaatttgctcttttccttggcttctcccgtcctattagggccaagaagttctattctctggcacccccttccctccttccgagtggagtgaggcgagcgaggccacagctgagcagccgaatgactgggacccagaggatgctgatgccagggactcaggccaggattgagcaagagaacagactgggcttctctaggatcagaggtgcgatgatggagacccaacaattctgggaaatgtagaggcaggaagtgaaaggaagtgtagggtagaggagcaacagcagattgtacctctgatccagccctgctcccagatggtaaaaatgaggaagctccgagaagaggaaaggaagtaggcatggcctggaggaggagaacagagctggcctcaaacccaactctccccacccacacatggtctctgtgtgttctaatccctgttcattctcatttactgtctaaagttgaggagatgggatgtcccagatgatagggctcctgggatttcagacccaagaccagcaggactccagtcacctctaccccagctctccaggacacagcgctcccaactctgagtgacgtcccacctctggtccttgcagcacaaccaacgtgggaatcacaccctccagacctcccacaggtaatggtgctgccggtgccggtgagacccaggggacaggggatgtcagaggaagcagggagagggggactttgggtcttgggtgggactaaatgaaaataaatataaggcggcagtgtggggtttaattactacgtggagatttgagactctgttcccttcactggattctagattgggttacggcagccacaatcccctgtcataaactaagactccgggagctgaggcaggagaatcttgtgaacccaggaggcagaggttgcagtgagccgagacggcctcgttgcacaacagcctgggcgacaagaacgaaattccatctcaaaaaataaataaataaaaataaaaataaactaagactcagactcagcctcattggtggcccatttccagccttatcttcatctcagcccagccatgccctaatcccaatactaaccccagcttctacattttctttttttttgagactgagtctcactgtgtcgtccaggctggagtgcaacggcacaacctcggctcactgccacctctgcctcctgggttcaagtgattctcctgcctcagcctcccaagtagctgggattacaggcgcacaccaccacacccagctaatttttgtatttttagtagagatggggtttcaccatgttggccaggccggtctcaaactcctgacctaaagtgatctgtctgcttcggtctcccaaagtgctgggatttataggcgtgagccaccgcacctgtcgccccccacccagctcctacttcaaccccaaccccagaatcaacttgaattttaacaccagcccaaagccaaaattgaacctcgactctattct

SEQ ID NO: 7259 - DNA, 6000 bp, Homo sapiens
tcccagcgctttgggaggccgaagcgtgcggatcacttgaggtcaggagttcgagacgagcctggccaacatggtgaaaccccatctctgctaaaaatacaaaaattagctgggtgtggtggtgagtgcctgtaatcccagctactcaggcggctgaggcagaagaatcacttgaacccgggaggcggaggttgcagtgagccgagatcgcggccaccgcactctagcctgggcaacaagaaggaaactctgtctcaaaaaaaaaaagaaagaaagaaaaaaaagagagaaagggagtctggagattgtctagtttccctagtgggaaatatattcagtagcatgagaccagagaaaaaataatttctcccaatttaacttttatcatttaaaaaaaaaaaacctatgtcttttttttttcctggaagattttctaaattttatgtttcagagcttctattaatttttctggagttaacaacatgtatatattttttaactttcaaaaggtctcgttttctgaacaagtagaacatacaggaaattctggcttatcaacaaagtgaattcaggaaagccaatagaaaaactggtaaaggatatgaaaaggcaattcatgcaggaggaaacccaaatgattaataaatcgatgaagaaatgttcaaacccactgttagccagaaatgcaaaataaaagaacaaggatatggcatcagcttggcaacaattgcgatgttaataatatcaagcgacaaagccaaaaagagaaccctcgtatactgctggtgggagtgtgaactggcagagccattctggaaaacagtctggcagtcctgagtggaattaggtatggcaatactctgcgaatgagcaataccattcggggatatagtttccttccttccttccttccttccttccttccttccttccttccttccttccttccttccttcctccctcctttccttcgtttctcttttcttttctttcattccttttttttttttttttttttttttgagaaagggtcttgctgttgcccaggctggaatgctgtggtgcgatcatagttcactgcagccttgaactcctggcctcaagtgatcctcccaactccagcttcccaaggtgttgggattacaggcctgagccaccatacctggcctggatacagtttcaagagaaattctcacctaggtccacatgggaacacgatgaggacatcagtcgtcatgttaattgtgatagttgttggcaacaacctgagttcattattaggggaaataaactgtgatggatacacaccattgaatactgtgcagcagttcatagcaacaaaccagataaacaaatagcaatgtaacaatccattgtaacaaatagcaatacaaatagctctaaaaaatttcttgttgagtgaaaaagatcagaaacaaatgagatatatgaaagttctgtgtatgtaaatacagaacagatagacatgcaaaccccatcacatattttataagggtacctacatatttagtaatatatattgtttcagctatctaccgatgcataataaaccaccccaaagctccagtggcttaaaccaactgttttttcttaagattctctgggtcagaaatttgggcagggctaggctgggcggtccacggggtattggttggagtgaaacacttggatacaatcagctggtgactgggctgccctggaaactcccagaagactttgctcacatgtctggggcctcagtgcacctctgtgtggcctctttctctctccatgtgctgtcttatcccccaggactctctctggcaggatagttggacttcctcatagcatggtgactgacttccaagattgaaaactgaagctaccaggtttcttgaggtccaggcccagaactggcagagtgtcatttctagtgctttctgttggtcaaggcaagtcacagggccagcccagactcaaggggaggggaaacagactctacccctggctgagtggtgtgacttgcacatgtggtgaggggagaaattgatgggcaccatctgtggggactgtcagggcactcagacttctggctgcctatagagagtagagagtatagaattagtgaggggaaacaggatgggagctagggaagaacgaaacaggacaaaggtttagctcagacctctgaggaagacctagtgtcatgaagtaaggaatatgaccaatctaacctttgtgtctgaggtacaaataaaccccaaatcaaaatcaaccaaataaggccgggcgcgatggctcacgcctataatcccagcactttgggagtttgagatgggcggatcacctgaggtcaggagttcaagaccagcctggccaacatggtgaaaatacaaataattagccgggcgtggtggtgcatgcctgtaatcccagctactcaggaggctgaggcaggagaatcacttgaacccgggaggtggaggttgcagtgagctgagatcgcgccattgcattccagcctgggtgacaagagtgaaactctgtctcaaaaaaaaaaaaaaaaaaaatcaatcaaagaaaataggattccataacccaaaacagaaaacctccaacaatatggaaacttcagaaatagtccaagtacatgttaacttctaagttaaaatgattttcaaatagggagaaagagaaggacgcagatgagtctggctttctctgtcccttctctccctgtagtgccgtgagtgggggtgtaagtgacaagccctgaaacgtggaattggttcagtcaaaggggtggccaatgaggatggccccatccctggttggcagttggcaaagcttgacatgcagtagacaatccatctgtgaagctcttacctgtatctcaggactaaatccacatgccccttaagatgggggcttcacagcagtgttgttcagactttgagttgtgacccattaatggactgggaaactcaacagaaggcacgtagtaaggtgagcattgtcccatcaaactttagtgtcaaccgtgtatttccaaacgcattattctattcactcactcactcagtagatacttgttgagcagctactgtgtggcaggcactggggatccaggagaaagtaacacatacaaatgcacctgtgtgtgcgggtgcttgtgtgtatgttctggatcacagcatgaaattcgtctctcgctgtgggctgcagtcagagagcccagcggctgctgctgcctggtggctgggtgggaatgtcagggtactgggggggtggctacttcccatgtgggtcagcaagttacaagaacagaaaaggcctctgtttgaattccttttcggcacccggggaaacgagcagctttataagaaaccctgcccgtagccatccgcccaagtttggtgagggtcagaaaatcatgcacaaaaactgtgttttctttcccgagctattgttagcgcaagtgtagacagtcagccacgttccttgcttcatggaagccagtcttcctcgtaggaccatgaagaccttttcttttctttttctttctttcttttttttttctttgagatggagtttctctcttgttgcccaggctggagtgcaatggcgcaatcttggctaatgcaacctccgcctcccaggttcaatcgattctcctgcctcagcgtcctgagtagctgggattacaggcccctgccaccacgcccggctaatttttgtattttagtagagacagagtttcaccatgttggccaggctggtctcgaactcctgacctcaggtgatccacccacgtcggcttcccaaaatgctgggattacaggcgtgagccaccgtgcccggccagaccttttgttatgatgttattttcccctctttactccattttgctttgccagtttctctactcacctgggccaccacctagagcaagttgcctcatctctccgaggctccgcttccgaaccctgtgaaatgggagtaacagaagtcctgcctcgtgggggtgttgtgctgtgataaatgaagaaacaccttggagaatttagggcagtggctgggcctgaggacagtgtttgtgttgcctgggctggggcagggtctgggccggacggggctctctgaggttggattcctcctgcgaggagagctgtttttctgcaaagccccttcctcctcctgctgaagcttctggatttgagaggctttactctccaggagagtgaagcgagttgggccagagctgagagtctggtggccgagcccacaggaagctggggtctgtggttcagatgccggattgggcaagagtagagaactggtcgctgtgatcctggtcagggatatttggagacacccacagttctggtaaattcggaggcaggaagtgagagggggagggagagagggaaacggcaaactgcaccccagcccctcctggcctggcaccccttccaaatggtgcaatgagtggggtgagtggcgtgtggagttgagcgcagcccaggggacccccctctctgggaataagaacagagatagccccgtcccctgcccccaccccacaaatgagttacagctctgtttcctcttctgtttactgtccaaagtcccaggccaggaggtgccaggttagagcttggacactcagaccctccagtgcaggccttgcccggaccagcccctcctccactctcctctcccctgtgagctccacctgccccagttctcctggctttaacccctccttggccaaggccagggttgcctgcgggagccaggtgtccgctctccacacctttcacaggtaactgaggctggggaggcaactgggacgaggatgcttgggaacaaggaggccttggttcagggatggggaggaccccatgggaagctgtgggtggtcgggtccatgagcgtggggaggggtctcctggccaggtcaaggcccaagcggtctcctgagaagggaaaggacccagcgggatttcaaacctcatcccaaacgccctgccaacctcagatcctacccaggccaccaccccgaacccctccgaccctgcgttccatcccaccatcaacctccacgtgaatctgcacctctgccccagccccagccctcagagcaacctcagcccagcccagcccagctccagctccagctccagcccgggccccatcatggccaaggactttcaagatatccagcagctgagctcggaggaaaatgaccatcctttccatcaaggtgaggggccaggcactcgcaggctgaatcccaggagaggaaatccatttttgaaaggcaagtgtgcagtttctgcggctttgctccccctctgtctcagctcatgattgctctgtccctttgaggtctctgccgcacccactctgtgaacagggactgaggagggcccgacacccccgcttgttccctcacctcaccttcctgtctaccccaggaccccaggaaaggcatgtgccagaggtgtggggagatctggaagataactgcctgcccttctcctcccaacccaagaacacatgtgcctcgtatgtgcgtgtgcacgtatgtgcatatgaggaatgcagattcagctgggactctgtgtgtgtgtgtgagtgaatgttgtgtgtgtgtatatgtgcgcgagagcgtgcatatgttgtgtgtgtgtatgtcgtgtatgtgagagggtatgttgtgtgtgagagtgtgttgtgtgtgtatgttgtgtgagtatatgttgtgtgtatcttgtgtgtgagtgtatgttgtgtgttgtgtgtgtatcttgtgcatgtgtgtatgttgtgcgagtgtatgttgtgtatgtgagtgtgtgtatgttgtgtgtatgttgtgtgtatgtatgttgtgtatgagtgtgtgtatgttgtgtgtgtgtacgttgtgtatgttgtgtgtgtgttgtgtgtgtgtattgtgtgagtgtatgtatgtttgtgtgttgtgtgagt

SEQ ID NO: 7260 - DNA, 6000 bp, Homo sapiens
ggcagggactgtcctgggctgctttctttccaccatgccctctcacggagcagggtcgccacagggcactttgccacacctggacctcgcccacaactctgctttcagaggctcctgctcataagtctcttcagactccagacccatctacagtagcctctggaccctgggcaggtgtgccactgtcccccacctccctggtcccctcctgactgcacattcagtagctacaggtccacttcattcccctgctaaagttctgctcatctggccttccctgtctggcctccagcctcacagtttctcactgagaccaacgcagcagcctcctgatctcatctccctgcctctgggcaaaccatctctgagccatcacccactccaaggccaggctgttgttaaactcacagatctgacctcaccactgccctgactgcaactctttatgggtcttcctttgttatcagcaatacaaaattaatacaggagactttctccacaaggaaaatccaaggtccatatcctctaaaattcttcaatatttgaaaacgttattaatttgtattaaagaaaatatttatttatttatttatttatttatttatttatttatttattttgagatggagtctcgctctgtcgccaggctggagtgcagtggcgggatcttggctcactgcaacctccgcctcctgggttcaagccattctcctgcctcagcctcctgtgtagctgggactacaggcgcatagagaaagggtcttggtctgtcacccaggctggagtgcagtggcatgatcttggctcactgcaacctccgcctcccaggttcaagcgatcctctcacctcagccgcgtgagtagctgggaccacaggcatgcaccaccacacctggttaattttttgtatttttggtagagacagggtttttccatgttatccaggcttgtctcgaactcttgagctcaagccatctgcctgccttggcctcacaaagtgctgggattagaggcatgagccaccatgcctggccaaaaaatttattttctttttttttctttttttttttgagacggagtctcgctctgttgcccgggctggagtgcagtggcgcgatctcggctcactgcaagctctgcctccagggttcacgccacgccattctcctgcctcagcctcccgagtagctgggactacaggtgcccgccaccatgcccagctaattttttttttttgtatttttagtagacatggggtttcaccgcgttagccaggatggtctggatatcctgacctcgtgatccacctgccttggcctcccaaagtgctgggataacaggcgtgagccaccgcgcccagccaaaaaatatattttcaagaaaggcattcaaatttattagcatacacagggataaaccacagagtgattaccctaaccaaggtatataatcttttttttttttcttcctagacagagtattgccctgtcacccaggctggagtgcagtggctcgatctcggctcactgcagcctctgcctcctgggctcaagcaattctctgcctcagcctcccgagtagctgagattacaggcgcccgccaccatgcctggctaattttgttttgtatttttagtagagacagggtttcactatcttggccaggctggtctcaaactcctgacctcgtgatccacctgcctcggcctcccaaagtgctgggattacaggcatgagccaccacgcctggcctataacctttaatttaatttcatttaattaatttatttacttattttgagacaggttctcactctatcacccaggctggagtgcagtggcaccatcatagctcactgtggcctcaactcctgggctcaagtgatcctcccacttcagcctcccaagtagctgagactacaggcatgatggggtcttgctatgttgcccaggacatgtgtctcaaactcctggcctcaagcagtcctcctgccttgacctcccaaagtgttgggatgacagatgtgagccaccagatccggcctaacatgttcttaaagaaataaatgtaaagggtgaatgaattctcagagggcatcaatctaccaccattgtggcatagttttgtttttagctactttttggttttcagtattatctctggtattttgcagagggcttggaagttagtggcctggtacatggtattatttgtttgccttccatctctgacttccattctaaagttacttgctttgccaagggtggtggcacaaacctgtaatcctagctactcaggaggctggggagggaggattacttgaggccaggaatttgagaccagtctgggcaacacggtgagacccccatctctaaaaataataataataataataataataataaatgttattgcctttagagggtgtttttcagcactgatccaagcactgctccctaatcaatgagtttggggaatgtggttatagagtagaaatcagatttgaaagcctcttactccaatataatgtgcaaacggaaaaatgcacatatcataactgcatacctttctgcagctttgcaagctgaacaccaccacggtgtaaccagcatccacacccaagagctgaagttttccgtcatccccgacgtgcctcttgtgctcttggctagtcactatttctgtgagggtgaccactattcttttttttttttgagatggagtgtccctctgttgcccgggctggagtgcagtggcacgatctcggctcactgcaacctctgtctcccgggttcaagcatttctcccgcctcagcctcccgtgtagctgggaccacaggtgcctgccaccacgcctggctaatttttgtatttttagtagagacgggatttcgctatgttggccaggctaatctcgaactcctgacctcaggtaatccgcccggctcggtctcccaaagtgctgggattacaggcatgagccgccgcgcccagccgggtgaccactattccgaccgaaataatgtaggttcatttgcctgaataagcccgattgtaagtgattatattagaggatgtttaattaacagcccaacagtcaacaaaatcactggccattgtcccagcacatataaatgacatggtggttgtcaggacacagacaaaggagggcacacacagacctgtcacattttatgcaagagatgtgttcctgaatatctcacatcattgaaaactctcaaaattcaagccttgttttctcactgaaataactgtaaaataggatttggatgacttcacatttgggcctaaagtgagacttattatcttttttttttttttttttgagatgaagtcttgctcttgtcccccaggctggagtgcaatggcgcgatctcagctcactgcaacctccgcctcccgggttcaagcgattctcctgcctcagcctcccgagtagttgggattacaagcgcctgccaccatgcctggctaatttttatatttttagtagagacaaggtttcaccatgttggtcaggctggtctcgaactcctgacctcagatgatccgcccacctcggcctcccacagtgctgagattacaggcatgagccactgtacccagctgatacttattattattattattattattatttttttttttttttttgagatggagtcttgctctgtcaccaggctggagtgcagtggcataatctcggctcattgcaacctccacctcccgggtttaagcgattctcctgtctcagcctcctgagtagctgggattacaggcatgcaccaccatgccctgctaatttttttatttttagtagagacggggcttcatcatgttggtcaggctggtcttgaactcctgacctcaggtgatccgcctgcctcggcctcccacagtgctgggattacaggcgtaagccactgcgcccagccgagacttatctttaatattgcctgatttccaagtgagcataattcaaattcacatggctctctctgaagccccgtggggctgtgagggaccatcgtttagcatctctgggacactggagcccagctgtgtcaacgggatgggatcctggctctgtgtgatgggtgtggttctggggcccgaacgcagtgcctggagtcaggctgcccaggttctagtctaccctttgctgcttccttgcagcatgaccctgggcaagctcttaccttgtagggccttagctttctcatctgtgaaatgggatgtgctctggggataatgagagaagttcatgaacgcagtgacctgaggcacacagtagtagtgagtggaggtttgctggcaccagtcccagcggaggctctcctgcctttcctggaaccaagctggccctcatgctgcttggaggactttactccccaggagagggaagcaagtcaggccagagctgggaagcctggggctcagccccacaggaaactggggcctgcggctccggtgccagggtcacaggtctggattgggcaagagcagagaaccggtccctctgatcctgttcagggatatttggagacaccaatagttctggggaatttagaggcaggaagcgaaacggggagggaggagggatatggcaaatcccaccccagcccctcctggcctggcacccctcccaaacggtgcacggaagagtgaggtgactggcatgtgtgggggcaacacgattctcctccctggggagcagagcagaggcaacccatcccccactcccacccccacactcccctaagttccaatccatttccacctctgtttactgtccaaagtcccgggcactggagatgccacgtttggcgtgcttggacacacagacacgcagacacagagacaccggggcccagggccctcctatggaccctgcccgctcccctcccattgtccacggctgtccgcccacccccattctccaagcttcagccccctccttagttcggcatctgcacagcactgaagaacctgggaatcagaccctgagaccctgagcaagtaaaatgggaagagaggtggcgggaggctggctgggggtgcaggggtgcggagggaacccagggtgtgttggggggtgctgggtgggaaacatcagaggatggattctggatgtcaggcctgggaggggatggaggaaagaagaaagctcccggtggggcgcggtggtccacgcctgtaatcccagcacgttgggaggctggggtgggtggattgcctgagctcaggagtttgagacaagcctgggcaacacggtgaaaccccgtctctactaaaatacaaaaaagtagccaggcgtggtggcgtgcacctgttgtcccagctactccagaggctgaggcaggagaaccgcttgaacccgggaggcagaggttgcagtaagctgagatcatgccactgcactccggcctggggacagagcaagactccctctcaaaaaaaaaaaaaaaaagaaaagaaaaaaaagaaaaagaaaagaaagaaagaagaaaggtctccatgatggagccgtcaatcagatgggagtaaagagatgggcccctcattcccactctagtcctggtgagcccccacctcagccccagcctcagtcttgactcagtcccaggtccagcgccagccctatcatgaccaaggagtatcaagaccttcagcatctggacaatgaggagagtgaccaccatcagctcagaaaaggtgagggccaccttgccctgcctctgcaaggcgagaatttggcggttctccaccccccagccacagctcctactcttgcccgtgagcctggctctctctctgggtctgtctccctcccccaacactgggaaaggtgtcggaactgcctctctcaggagaggggcggagtgtggggttggagtccctttattggtgacaggtgcccaaagctttcctgtgcctcctggccctcggaggtggacccgggggtgtgggaacagctg

SEQ ID NO: 7261 - DNA, 6000 bp, Homo sapiens
ctcttttgtgctatttgtaggtaattcagtaccaaactgttcgatatgatatcctccccttatctcctgtgtcccggaatcggctaggtaagtatgtggtgggaagcctcctttagggtgaagtaggggctagctctgggtcagaggtcggtcaatattattcctccccactctggttcagcccaggtgaagaggaagatcctggtgctggatctggatgagacacttattcactcccaccatgatggggtcctgaggcccacagtccggcctggtacgcctcctgacttcatcctcaaggtgtgtggtggtggggagtgatgaaatggttccatctgttcctctgcccaaacctggactccctttcccagtcccagagcatctgtctccatccgctggcaccagtgtcagcctggaggagggaagcagatgggtggggcgttttctaggcctgggttgtggtggtcatgacatcccccagcccatcttgttcctctgtaggtggtaatagacaaacatcctgtccggttttttgtacataagaggccccatgtggatttcttcctggaagtggtgagttttggagagctaaagggagctctgtaatgaaggaatggttttagggctctgggaattgggaggatttggaggaaggggtgaggagaaacgggttagagcagttttctagaggggaggctgtgtaatggtaggggagtggctttcagtacttggggttcatttgttgtgctgatgtaattcttttccgctggcatctttctcttttgttcttgcatttctgaatcataagagtgtaggatgcctaacactgagtttggaggtttgggctgggggttcagaatttcgtgtcctcagagacatttgatgttgatggaaggcctgaaggactatgccattgcctttctgaaagataactgtatgtctaaaggaatcatcaccttgtatggcatcgccctctcccccaatctatttcaggtgagccagtggtacgagctggtggtgtttacagcaagcatggagatctatggctctgctgtggcagataaactggacaatagcagaagcattcttaagaggagatattacagacaggtaagctagaatcccagtctaagagtgtggcttgggagggaggccaccagggagggatctgggtttgaggagagtatcctggagagaggcctgctacatgatcccctgccttccagcactgcactttggagttgggcagctacatcaaggacctctctgtggtccacagtgacctctccagcattgtgatcctggataactccccaggggcttacaggagccatccaggtacgggggaaggtggtgagtctggcaggaccagaacatggttctgagaaggtatttttgcaggagacctgggctttggtccttgagagctgggattccctagattatccctagtttgctgtaagtcgaaatgcaagttatttttgtgtttcaaatgagataccatatatgtccatttcataagtcggatttcttatatcatttttttcatttttaaaatttatttttggctgggcacggtggattatgcttgtaatcccagcactttgggaggccgaggcaggcggatcacgaggtcagaagttcgagaccagcctaacaaacatggtgaaaccccatctctactaaaaatagaaaaaactagccaggcgtggtggcgcacgcctgtaatcccagcaactcgggaggctgaggcaggagaatcgcttgaacccgggaggcggaggttgcagtgagccgagattgcaccattgcactccagcctgggtgacagagcgagacgccgtctcaaaaaaaataaataataaataaataaaaataaaatttatttttatttattttttgagatagggtctcactctgttcccaggctggagtgcagtgtcatgatcatagctcactgcagcctcgatctcccaggctcaagtgatccttctgcctcagcctctcagtagttgggactacaggcgtgcaccaccatgcccagctaatttttttattttttatttttttttgagacagagtctcgcactgtcacccaggctggaatgcagtggcgtgatctcggcttactgcaacctccgacttccaggttcaagcaattctcctgcctcagcctcccaagtagctgggatcacaggcacctgccaccacgcgcagctaattttttgtatttttagtagcgacggagtttcaccacgttggccaggctggtcttgaattcctgacctcgtgattcgtccgctttggcctcccaaagtgctgggattacaggcgtaagccactgcccttggccaattttttgatttttagtagagaagggatctcattatgttgcccaggctggactcaaactcctgagctcaagtgatcctcccacctcggcctctcaaagtgttgggataacaggtgtgagccactgcgcctggccaagtgtgtttcaagtgaggcacaatggcagtaagcttgactagaagcatcaataggtatgagatctggtgattaaaacttagtttcggagcataaaccaggaaagttttacttaggttgttgacttccggtagtgggaggcatatatttttaacaataattcctccttccctccaagaagagaaaaacaccgtctctcttgaattctgtttcttctcatctgcattttcacccaccctagacaatgccatccccatcaaatcctggttcagtgaccccagcgacacagcccttctcaacctgctcccaatgctggatgccctcaggtaagggaagtgggctctggacacttggatatctcaagaaaggaggaggtgggggatcctcagagggaataaaaaaggtttgtcctgttttaactctgttcccttaagaatttaacatttggacccaggtcgtcttacttcaaagctcatcactttagctagtaggctgtgggcaaattgaacctatctaatcatgaatatggtgataatttaggtcccacatctccagtgatgctgccttacaagagtgttgtgagggtatgaactataaggtactctaccaatgcaagttattgtcaccccaggttcaccgctgatgttcgttccgtgctgagccgaaaccttcaccaacatcggctctggtgacagctgctccccctccacctgagttggggtgggggggaaagggagggcgagcccttgggatgccgtctgatgccctgtccaatgtgaggactgcctgggcagggtctgcccctcccacccctctctgccctgggagccctacactccacttggagtctggatggacacatgggccaggggctctgaagcagcctcactcttaacttcgtgttcacactccatggaaaccccagactgggacacaggcggaagcctaggagagccgaatcagtgtttgtgaagaggcaggactggccagagtgacagacatacggtgatccaggaggctcaaagagaagccaagtcagctttgttgtgatttgattttttttaaaaaactcttgtacaaaactgatctaattcttcactcctgctccaagggctgggctgtgggtgggatactgggattttgggccactggattttccctaaatttgtcccccctttactctccctctatttttctctccttagactccctcagacctgtaaccagctttgtgtcttttttccttttctctcttttaaaccatgcattataactttgaaaccaaagcggccttaggtccttctctggggttttgggaagtgaagagaggggactttgttcacatgcaccctgtcccacaggcagagggggaagagactgctgttggactcaaggggcagggggaaaggtggcgttgagtatagggatagaataatgcggacaccagatgcctgggatacaataatgctgacaccagatgctttggcgggaagggccgagtgacaggatgggcgcgctggtggggagtggaaggacaccttcggagaagcaggctatggaagcacgaaaggagaaaccggctatggaagcacgaaaggagaaacctggacggccaaagggcgtagagctggagaaaccgggcttcgtccggggcactgacgtggacaggttaagcgggcgctgcccccaggtggctggcgccccgacctccgctgtccgggaaggcgtcggtccccctcccagctgtcgcccagccggccccgcctccccggcgccctcccaagccggccctacttcgcgcacccgccacgtgacgctccgccctctttgagatcacatgatttaactcaagtcccgcagtgttcctccgcgctggcgtagtccctacctttccaacctcctctccagtccctattggtctactcattttggcacttaagcgttctgtagatctctccaaacatctgttttctttttgacttcttatttctggagatcatctccgccacttgggtactactttgttttggtgtcaacggccgccttcagcgtagcaacacggttcgtgaatagctaaccttgtaattgtccctgctgttcctctacgttgttaacgaaaggaacttggagaaccaagtctcgtatgatgattaccatcttttactcctcttcagccccagcttccttgaggggacggttggggaataggtttagagtaattttcgatgagcaaaagccaaccgtctttgctacgtcgcctgcgtagcccacaaattgattccaaagcgattacgctaatggcgtgagggggccggtcagttggtggtgctacgctagcagcgttagcgccgctgaggtagtggcgtatcttagcggggggggcagtccccgatagtcgggggcggggttggtgaatagggaagtggcgcaaattcgtggatcgctccgctgaatccgcccgcgcgtcgccgccgtcgtcgccgccccccgtcccggcccccctgggttccctcagcccagccctgtccagcccggttcccgggaggatgaagttcgtgtacaaagaagagcatccgttcgagaagcgccgctctgagggcgagaagatccgaaagaaatacccggaccgggtgccggtgaggacagtagccagggccgagggcgcgggacgcttacgctgacgccacagcctggccttggatcgggacaggcagcgcagggatcaggctgctggctgtggtggggttggcagcgagcctgaaactgctgtccttgggacccaggatgaaaggagtggggtagtggtggatgtggggttgagagggatgtggacaggagagagaaaccttagcatttgaggccttagagagtttgacagcctgagcttcaaatggtcatccccccagctagctaaggttgcgagattgaatcactagtcgacccaaacaagtcacctccgtctgattaagatagttgtttatggtgacgccctattgggggatggatcctggatatttaaatgagctccagtcagtgaggtcaggatctctgggactcagtgctgcaccgcgtgtacaaagacaaagagatgaatctggggtagatttaggtgctaggaatattgtttcttgagttcttgacaggtgcagcttcggggctgcattccttctgtctcctaattttcatctctttatcaggtgatagtagaaaaggctcccaaagctcggataggagacctggacaaaaagaaatacctggtgccttctgatctcacaggtgggaacctgatccaagactcaggcttgcttcctgtgggtgggagtgcagtctctgcgggaggaggctccacctagcagctgttcttttgagggcatttttgacctctgtgactttcttgcatcttgtatcttttgcagttggtcagttctacttcttgatccggaagcgaattcatctccgagctgaggatgccttgtttttctttgtcaacaatgtcattccacccaccagtgc

SEQ ID NO: 7262 - DNA, 6000 bp, Homo sapiens
aggcagaggttgtgatgagccaagatcgtgccactgccttccagcctgggtgacagagcaagactctgtctcaaaaaaaaaaaagaaaaaagaaaaaagaaaatatttgttgaacagtgaatgaaaatattgtttatttgcaatttattcattcattcctcaaatatttattggtgataaaatccagacacatctctaccctcttggagcatacagtatagtggggatattgacattgaataaataagtacataaagtaaatacagtattttcaaactgtgataagagctttgaaagcaaagtactggtagccgtgagagcactatgcagatgatctgactcagtttggggtggggtggtcaggccaggctttctaaaagaagtgctatttgagggatagctgaaggattagttggttagctggatagaggaaggtgggtgggagtggatggagaagagcttccagacccagagaacagactgtacaaaggcaattcagtgggcaggaacagagaaggccagtgtggctgaggcagtcaggtcagccatggtgtgacacttactgggaagaacacgagtgtcactgaaagattttattttattttatttcttttttttttttttgagacagtgtcttgctctgtcgcccaggctggagtgcagtggcgcgatctcagctcactgcaagctccgcctcccaggttcacgccattctcctgcctcagcctcacgagaagctgggactacaggtgcccaccaccacacccggctaattttttttttttttttttgtatttttagtagagacggggtttcaccatggtctcgatctcctgacctcgtgatccgcccgcctcagcctcccaaagtgctgggattacaggcgtgagccaccgcacccggccaactgaaagattttaaacaggaaatgacaaagctctgagtgagtaagaagtggtcactccagagaatagagtttaaaatgaccagtgtggaagggagattggtttggaggcagttgctgtgtccagtcttgggctggtgtggcgtggcggcagtgagtttggagagaagctggatatagttaagtgatgacaaatattttcttttagagctaaaaggaaaattttcaagaaaatctcagctggtctgaaggtagtgaattatttcaattgattgttcacagtcagttacagacggaacttctttttccactctcactgctttctcactactgcatctgactagtcttttaacataataaaaaaaaaggccgggggtggtggctcaggcctgtaatcccagcactttgggaggccgaggcgggcggatcccgatgtcaggagtttgagaccagtctgaccaacatggtgaaaccccatctctactaaaaatacaaaaattagctgggtgtggtggtgcgcgcctgtaatcccagctatttaagagaccgaggcaggagaattgcttgaacccgggaggcggaggttgcagtgagccgagatcgcaccactgcactccagcctaggcaatagagcaagattacgtctcaaaataaaataaaattaaaaagaaaaaaagaaaatctcaccatcggaaaaaaaaaaaaaaaaaaaaaggtcggggccaggcgcagtggctcacaccggtaatcccagcactttgggaggccgaagcaggtggatcacctgaggtcaggagttcgagaccgacctgaccaacatggtgaaaccccatctcaactaaatacaaaaagttagccgggtgtcgtggtacatgcctgtaatcccagctacttgggaggttgaggtaggagaattgcttgaacttgggaggcagaggttgcagtgagctgagattgtgccattgcactccagcctgggcgcagtggctcacgcctgtaatctcagcactttggaaggccaaggcgggcggatcacaaggtcaggagatcgagaccatcctggctaacacggtgaaaccccgcctctactaaaaaaatacaaaaaaattagccgggcgtggtggcgggtgcctgtagtctcagctactcaggaggctgaggcaggagaatggcctgaacccgggaggcggaggttgcagtgagctgagatcgtgccattgcactccagcctgggcgacagagaaagactccgtctcaaaaaaaaaaaaaaaaaaaaaaaaaaaaaaaaaaaaggaaagtcagttgcggtagctcactcctgtaatcccaccactttgggaggctgaggcagggagatcacttgaggtcaggaatttgagcccagcctggccaacatggtgaaacctcgtttctactaaaaatacaaaaaattagctgggcgtggtggtgcgcgcttataatcccagctactcgggagggtgaggcaggagaattgcttgaacccgggaggcagaggttgcagtgagccgagatcgtgccactgcactccagcttgggtgacagagcgagactctgtttcaaaaaacaaacaaagccagaacaatgatgacacgtggctgtaattgcagctatttgttggggggtgggggggcatgctttgagcccaggagttcaaggctgcagtgagctataattgtaccactgcactctagcctgggcgacagagtgagacccggcctctaagagtacattaatccagaaaagtaccattaatccaaaagtacaacaataaaaacgaataacaaacagttcatggctgggagcagtgactcacgcctgtaatcccagcactttgggaggtcgaggtgggttgggatcacctgaggtcaggaattcgagatctgcctggctaacacggtgaaaccccgtctctactaaaaatacaaaaattagctgggcgtggtggtgggcacctatactcccagctacttgggaggctgaggcaggagaatcacttgaacccaggaggtggaggttgtagtgagccgagatcatgccattgcactccagtctgggcgacaagagcaaaaactctgtttcaaaaaaaaaaaaaaagagttcatgaaagtcttcattttatacaaaagcaggtcaattagcttagcataagggggactttaatatgtttagcgaataaacgaaggaaagacagagaaatgtttgagagggcaaaacaaagataaaaaacgtgagagagttgaggtaaaaaatggagagaggaaaatgaaatgagagagagccagaataagcagggtatgtgagaatctgagaagtatgaggaggttggagggtagtaggaagattgggaggaaactgggcagggtgggtggggaaagtgcagtgtgcacctaagaagaggaaagaaagattaattgctgatgctgggttccaaggagactggagacaaggcgcaaaggtaaacgaaaagacaaggagtgggctgggtgcggtggctcacgcctgtaatcctgcactttaggaggtgggggcagggggattgcttcagttcaagtgttcaagaccagcctgagcaacatggtgaaaacccttctctaccaaaaatacaaaaactttagctgggcgtggtggtgtgcacccgcggtcccagctactggggacgctgaggcggggtgatcgcttgagcccaggaggcgaggctgcagtgagccgagattgcacctctgcactccagcctgggtaacacagacttcctcctctcaaacaacaacaaaaaaaagacaaggagtgaaacaggaagctccaaagcaggaaaggcaggaaggggagatgaccaaagatgaaggaggaaggagcaaaaggctggaaggggtgccgggaggaaggagggagcaatgctttggggagagatagcaggactgcagggtgagggaccatggacgaccaccttagagagccagattatagggaggacggaacagtgaggcgtgacagagtgcacagcaattggcagtccaagcccaggcccgggagggaaagagaaacgggcgagtgtgggggaggggtgggaaaggtggaggataggtctgaaaagactctaagggaggggaacgatgggtgtggccaagactctgacctagccctcaccctgctccccaccctcggccggctttaggtcccagtggtttcttcctccagttaggagccttgatgccggaggggacagtggtaggtggggaggttgagtgcaaagggttcaggctgtaagtcatgttgggttggaatgggggcacaggaaggtggggctgttggggagccacgctaagccgggtgtctgtagcagagccagagaaccgggacactgaagagggtgctgaagggggcgactctcagggatcgagccagggcccccgaaggtgggatcgaccagggtaggagacaggaaaaaaaaggagagcagcgggtgggggcgaaagcagggccgaggagagagcactttggacagaacccggcggggaaagggcggcgccgaggcttgtcaggggcgccccgcagcgtcccaggcgcacctgttgggaagaaaggaaggggcttcccggtgttcgagggaaatccagtccggaggggctgactcggagcttgggactcctggggagccaccgcctcctccccagcggcggtcaaaaccgggcaagcgaaggggcgtgaccctggtgctcaggtttcttcctcctcacctgggcaaggaggggtgggggccacgacttccggttcaggtgagtgtcccttcggtgacgtcaggtcatcctcggccgcccctccggtcccgcctccccctcccgcgctcccggggcgcgcgggccgcgcccccgacgccctacatatactcaggtgcgccccacctgtccgcccgcacctgctggctcacctccgagccacctctgctgcgcaccgcagcctcggacctacagcccaggatactttgggacttgccggcgctcagaaacgcgcccagacggcccctccaccttttgtttgcctagggtcgccgagagcgcccggagggaaccgcctggccttcggggaccaccaattttgtctggaaccaccctcccggcgtatcctactccctgtgccgcgaggccatcgcttcactggaggggtcgatttgtgtgtagtttggtgacaagatttgcattcacctggcccaaaccctttttgtctctttgggtgaccggaaaactccacctcaagttttcttttgtggggctgccccccaagtgtcgtttgttttactgtagggtctccccgcccggcgcccccagtgttttctgagggcggaaatggccaattcgggcctgcagttgctgggcttctccatggccctgctgggctgggtgggtctggtggcctgcaccgccatcccgcagtggcagatgagctcctatgcgggtgacaacatcatcacggcccaggccatgtacaaggggctgtggatggactgcgtcacgcagagcacggggatgatgagctgcaaaatgtacgactcggtgctcgccctgtccggtaaggccgcgggaccgacggggcggacgcgcccttgaccgaggtggcggggtggcgcgcgtgggagagccgaggccccacggctgggggccctgggttgccggggagctgcagggcgaggaagtggtcggctgggggcggcggggctgggcgggagcgggccggggttccggcggctgcacgtgggcgcgcacctcggtcgcccacgttcctcttcctcccccaacccagcctcgtccccggctcggagcagcggtgcttaggccggggccatcccctcctccattcccgggcaggccatggcctccgtcatctcccgtccttttctcagacagaaacggccccggggcgcggggcacggggcgcgccgagggccgaagggcggtgcggctggtcagagtgggccgccgcctgctgcctctaatcttatcggccgattagccgaagccacaaacccggtggcctcgatagcgggctcagagcagggacgccggctggcatgtgcgccgcgc

SEQ ID NO: 7263 - DNA, 6000 bp, Homo sapiens
taacatgagtccaggagttcgagacgagcctggccaacatggtgaaatgccgtctctactaaaaatacacaaattagctggcgtggtggtgcatggtgcttgtaatcccaactacttgggtgtctgaggcacgaggatcgcttgaacccaggaggcggaggttgcagtgagccaagatcgtgtcactgctctccagcctgggcaacagagcaagacctgtctcaaaaaagaaaaaaatgcataccttcagaaaaattaagtatgccttcaatatattatacagattgtactatataaagcatacacaaaaatagaaattaaaaatgatgatagctgggtgcggtggtgtgtgcctatagtctcacctactcaggaggctgaggcagaaggattgcttgaggttaggagtttgagactagtgtgctaagatcaagcctgtgaatagccactatactccagcctgggcaacacagcaagaccccatctcaaaaaaaaaaaaaagagtgacttaaacttttcaatgacttacttactactgcactgcaaatagattccaagtgccataccactgtctccaaggcctgcactggccatccgggctttgtgattctttgtcactacatggcatccacattgccaacccaccacattttcttctgcctcaagattttgagctgctcttttcagcctgttttgcagttattctttgtgcctagaatacacttctacactttgtgcaagcttagtttagcttcaataggatcaccttggtgaggccttccacatctgaaggggcacaccctccaccctccagctgttccaccgcctctctgtgctttttcgttttgtttgagacagggtctcgctttgtcacccagctgtaatgcagtggtgccataaggactcgctgcagtctccatctcccagggtcaagcaattctctcacctcggcctcccgagtagctgggactacaggtgtaagctaccacgactagctaattattacttttttgtagagatggggtcttgccgggtgcggtggctcatgcctgtaatcccaacactttgggaggccgaggcgggcagatcacaagttcaggagttcgagaccagcctgtccggcatggtgaaacccaatctctactaaaaatacaaaaattatcagggtatggtggtgcgcacctgtagtcccagctactcgggaggctgaggcaggagaattgcttgaacccaggaggttcaagaaagagatgagatggggtctcaccatgtcggctgcctaggctagtctcgaactgctaggctcaagcaatcctcctgcttcagccccctacccagttacttgggaggctacagtgggagaatagctagagctcaggcgttcaagagcagcctgggcaacatagtgagatgctgtctctaaaaaaataaaaatatcccagcactttgggaggccgaggcaggtggatgacctgaggtcaggagttcaagaacagcctggccaaagtggtgaaacgctgtctctactaaaaatacaaaaattatctaggtgtggtggcaggcacctgtaatcccagctactcaggaggctgaggcaggagaatcgcttaaacctgggaggccattgcactccagcctgggcaacgagagcaaaactccatctcaaaaataataataataataataaaataataataatgtggtagtatgtgcctgtagtcccagcttgaggatccccaggcatgaggatagcttgagcctaagaattttgttttgtttttgtttgagatgtagtctcgctctgttgcccaggctggaatgcagtggtgcaatctcagcttgctgcagcctctgcctcccgggttcaagcgattctcatgcctcagcctcctgagtagctgggattacaggcatgtgccaaccacgcctgggcaatttttttgtatttttagtggagacggggtttcactgtgttggccgggctggtctcaaactcctgatcttcagtgctctgcctgcctgggcagagtgggattagagatgtgaagtactggaattagagatgtgagccactgtgcccggccgaacctaggagtttgaggctgcagtgatctctgatggtgccactgcactccctcctgggtgacggagcaagacctcagtctcataaataaataaataaatatgctgggtgtgatggcccacacctgtaatctcagcactttcggaggctgaggcaggtgtactgttggagcccaggagttgaagaccagcctgggcaacatggcaaaaccccatctctacaaaaaatacaaaaattagctggacatggtggcccatgcctgtagtcccaggtactcgggaggctgaggtgggaggatgccttgatcctgggaaacagaagttgtaatgagtggagatcatgccactgtattccagcctgggcaacagagcaagaccctgtctcaataaacaaacaaacaaacaaacaaacaaacccttagaggggacctccagagtggcccaaaggggctgggtgcagtagctcatgcctgtaatcccaacactttgggaggccaaggtgtaaggatcacttgaggccaagagttccagaccggcctggccaacatgcagaaaccctgtctctactaaaaatacaaaaattagccgggtgtggtggctgtagtcctggctgcttgggaggctgaggcagaagaattgcttgagcctgggaggtggaggttgcagtgagccaagatagcgccactgcactccagcctgggtggcagagtgagactctcaaaaaaacagaaaaaccagagtgacccaaaggtccagtggcagagccaaggctgggtctgtaggctccttcctcccagtccagtgctctcactgcatttccatccttcacctcaggtggcatctagggcacagggggaacctccacatggagaaccactgcagtacgtctcacgtctcttctctgtccagaccctccaacatttcccatctcagggtataattcagtggactaaaaggccatgcgtgacctggcttcttgtgacccctctgaccttcccctcattaactccattccagtctcactggtcttctgcctcaggacctatgcccttgctgttccctctgcctgaaacacttacccagtaatctgcacagctcagtccctcatctcctttaggttctgggtcaactatcatcttctttctttctttctttcttttctttcttttttttttttgagacggagtcttgctttgtcgccaggctggagtgcagtggcaagatctcagctcactacaacctctgcctcccaggttcaagcgattcccctgcctcagcctcccgagtagctgggactacaagcgcccgccaccacacctggctaatttttttgtattttagtagagacggggtttcaccatattggccaggatggtctccatctcctgacctcatgattcgcctgcctcggcctcccaaagtgctgggattacaggcgtgagccaccgtgcccggcctaactatcgccttattggtgatgccttcgccttattggtgatgtctaaataaatatttatttatttatttatttattttgagatggagtctcgctctgttgcccaggctggagtgcaatggcgtaatctcggctcactgcaacctctgcctcccgggttcaagagtttctcctacctcagcctcctgcatagctgggactacaggcgcccgccaccacacccggctaatttttgtatttttagtagagatgggtttttgccatgttggccaggctggtctcaaactcctgacctcaggtgatccgcccacctcggcctcccaaagtgctggaattacaggcgtgagccaccgcgccccgccacgatctttctaaaacacacatttgaccttctttgttctaaaaatgtctcggtggactcctcgctgctcgtggggccaaatcgcagcttccacacaacccgccctgtatgtggactgcactccgtttctaaactcatctcttgcgccactcagccagtggcccccaaggcaggactggtcctggctcaggatccagtcgaagacactcatctcgggggtcttttctgaccgcgcttcctcctctggccctctaggcggcctgagcacgctcactgacaccgtttggcggcctgtcacccgcgtggctggggcacctgcagaaactgctgtcgctgcgaggtgcccgtgtgggtcaccgctgtgccagggagagaagacggcgaggtcgcccctgggaggcagaaggcgagccaggagccagtcctggaagccaatgagtgagtgtgaagggtgttccgctgcgtcagcgaggcccgactgcccttgggaggaggagcccaggggccagcgcggcccgggccgccctcgcctcccacccagggcgctgagcacgcacgccgccggcctggcggcgttcgcggggcccgggaccagccgccgccttctccaggcgctcctactctctgggcatctgcagtccgagcggaaggggcgggaacgtcggcgacgccgaggagcaaagcccacgatcggcttcccggggcagcggacggctgccttcctcccggcgcaaacgcaccgcccaggagggggcgggctcggcgggtcggggggcggggccggggtccgagctcgggcccgcctccgcctccgccagctcctgtgagctgccgagtgctaggcacccgggctcttctgggggctccaggtgagcgggggcacagaggggtcagggagaccgcccttggggtggggctgtcggtctgaccgcgggtccatctgtcctgccgtcggcccacagcctcctccgcaggatgggagaacaaagggagggggcggttctggggcccccgagggaatccagggtcccaggtacccggtcccgcccactgacacttgggtttctccccgagtcagaggcgccgcccaagagaccctgggccggcgccgggcgcagctgcctctccgtctttgtgtctgtctctgtgtctgtctggctatctccgagtttgcctccgcttccagaactaagccacccagacaccatcatctcgaaaaccccagcccttctcccatggcaggtaagtgcgcgcaagtctgggggtctccgttatcccccccacggacttgggagccgggtttgaacacatcctcccggaatgtgctcggactggctgggtggggcccctcccttccttccggggaacctccaccctgctcccctgccccatctttctctgcctcttgccaccacgtttcccccgaagcctcgcggcccatgggctgaggaataaggggatgaggccttgagtccctttctaatctatcctgctcccaccgctttacaggctacttgccccccaaaggctacgccccttcgcccccacctccctaccctgtcacccctgggtacccggagccggcgctacatcctgggcccgggcaggcgccagtgcccgcccaggtacctgccccagctcccggcttcgccctcttcccctcgcctggccccgtggccttggggtctgctgcccccttcttgccactgccaggggtgccttctggcctcgaattcctggtgcaggtgagtgggaaggagggagggaggatgactgggaggggacttgggcgtccagatgggccagctgatgtgcgcgccgcccctctctttccagattgatcagattttgattcaccagaaggctgagcgagtggaaagtaagtagaaggagtgggaggttggacctcatgatggtggcccggatggtgggctcctgggcgcgcgaggctctacgagtctccccgtgtcacctcgggcagcgttcctaggctgggagacctgtaatcggtatgaactgcgctctggggccgggcagcccctgggtcaggcggccgaggagagcaactgctgcgcccgtctgtgctgtggcgcccgccggc

SEQ ID NO: 7264 - DNA, 6000 bp, Homo sapiens; identical to SEQ ID NO: 2852

SEQ ID NO: 7265 - DNA, 6000 bp, Homo sapiens
acagagagacagatccccgatggcaacttttgaggacctggatcctgctgtttctagctgtgttctagttacaagattcttctttttcggtttaatccgtttgaggagggttggcaagtgtcttggtcattaagtccatcacagcaaagatcatgctgttttaataatctctctttgtgtttattattgtagcttctgataccagcacaatgcctggcattgtagaatgagagagccctcacttaacaaatgagaaaaatgaggccccaggagaaaggcatttgctccaggacaccatgcagagtgggaaagctgggactagaacccaagtctcctggctgttaggccaaatcagttgactcaattaaacaaatgtttattgaacacctgctacctgccaggctctgggcttggcatgtaatatggaaggtaataagatgtcaaccaggtgccgtggctcatgcctgtaatcccagcactttgggaggccgaggcaggtggatcacctgaggtcaggagtccgagaccagcctgcccaacatggtgaaaccctgtctctactaaaaatacaaaaatcagctgggcttaatggcaggcgcctgtaatcccagctactcaggaggctgaggcaggagaattgtttgaacccaggaggcagaagatggcaccactgcactccagcctgggggacagtgagactccgtctcaaaaataattaaataaataaataaaaaggaagatgtgggttcttgacaacctctctatctagaggagaattcctccccctttcaaaacaacaggagcttgttaaacccagtgaatctctaatgaatggagggttggagagtgagggaccggaaccaggagtcctttcacgcacccaatcccaggagattctgatctgcctatgtcttctcccacccatacagggctctggcatgtggcacccccaccacccacactgccctgcttcccagtggccaggggcctgggcctgctctgctggctggttccctggtcgaaccagtaaaaagtgatcagtgcttcgccagcccaactaggactgtccttacagaatactgggcacaaaggtcctgcccaaacacatccttcccgttagcagtctgtctgcctgctatgcactcaccatagtttattattcatttgcctgcctcgttcctggcactgtgcttggtacttgttcagagagaacttcacatattaaaaagataccactttatgtgtttacattatgctttaatacaaaaagagacaccttcttgaccgggtgcattggctcacgcctgtaatcccaacacttcaggaggccaaggtcggcagatcacctgaagtcaggagtttgagaccagcctggccaacatggcgtaaccctgtctctactaaaaacagaaaaattagcagaggttgtagtgagccaagcttgtgccactgcactccagcttgggtgacagagggagactgcctcaaaaaaaataattaaaaaggccgggcacagtggctcacacctgtaatcccagaacttcgggaggccaaagtgggcagatcacctgaagtcaggagtttgagaccagcctggccaacatggcgcaaccctgtctttactaaaaatagaaaaattagccaggcatggtggcggacgcctgtaatcccagggactcgggagcctgaggcaggagaatctcttgaacccaggaggcagaggttgcagtgagccgagatcacgccactgcactgcagccccggccgacttctaaaccagtaattgtctgaagagaaaaaaaaattacgaaataaggccgggcatggtggctcacgcctgtaatcccagcactttgggaggccacggtgggtgggtcacctgaggtcaggagttcgagaccagcctggccaacatggtgaaatcccgtctctactaaaagtacaaaacgattagccgggcgtggtggtgcactcctgtaatcccagccacttgggagtctgaggcaggagaatcacttgaacccgggaggtggaggttgcagtgagccgagatcgcaccattgcactccagcctgggcaagaagagcgaaactccatcttaaatataaataaataaataataataaaaataaaaaataaaagaaagcgtttatgaaagtgtggtctcggccaggcgcggtggctcaagcctgtaatctcagcacttcggaaggccaaggcgggcggatcacggggtcaggagatcaagaccaccctggctaacacggtgaaaccctgtctctactaaaaatacaaaaaattagccgggccgggtggtgggcgcctgtagtcccagctactcgggaggctgagggaggagaatggcgtgaacctgggaggcggagtttgcagtgagcagagatcgcgccattgcactccagcctgggtgacagacagagactctgtctcaaaaaagaaaaaaaaagaaaaaaaaaagaaaaagaaagtgtggtctctgttgcctacatcaccatcaccttgagtcctacatcctttgaatgagtcttgggggtgtgccctagaaaatcattggccaattcccgaagccagtacatgtagaagccaaatctgagttatgcaaatacattatttttctattgttcaacttacctctatttgggtctccattctacctgcctgcagaaaacattctctcagtcacttccaggtgaactccgtcatcccactccttctcccacctccaccattgatctaaatttggggagttcctctgagccacagcctaggtggggtggggtgggaaggggctgctggatgagagtcctctttctgagatgaatcctcctgggcccttcatctccgtgggtcacacatgccctcatttctactctgctgctgccgtccccacgatccaatagcaatagcacgacccctggccttgaccgtgtatctggggctctgtcccttccacatcacccccaaaccagcatcaaatgtcttgtctggctctgcactaggctcccctcagttagtgcagggtgtccaactgggggcggaagggcttcctgtgcctgcctcttccaatcctccatgtcttatttataccctgacagacactgagggttttgaacttaaaaggctggaatttggcatctttgttctctgactagaaagaggaatcatttgaagaccaaaaagcaggagccagcatctcacagcatgatctgagacccccgtggaagctgctcttttctttctcatcacataggctgagccacccgggactgtcagtgcacaaggaccagggacgcggctgctcctctgagggggaggaagccaagagtatcttctcttagattgggctgagttcccacacccagcacacacattccctgctcactcacctcccacagacagctgggaaatgacacctctggtgacagagccactctccgggcttctgtggggagcgggtggggcactgcagtgggggaggatctcacacccggaggccctgggaagccagggtgggggagggaggaagctggttcctgtttgtcttagagatcaaggccatcagcctccctgcaccttccagggatgtagtaagcacccccaccccagggccaaagggcctcgcctaaaatgcctcctgcacccttgaggcttgctttgaccccctgcactccaccagagcgacagctcccctggtcccatcttctctgacaagctgggtgggagtgtatacagctgctgggtgtgcttagagggcctaatggagaccagccagggataatctcctatgttatccacatcaagccatttaacaaatatggatttagtacctacatatgcaatgtatttggggtccagagagaggagggcaacggtccaaggtcacacctgcgaggcgaatacgcatgtaaagcagcaccttgtaacctgtgcccactgtgcctactactaaagaaaaaaaaatgagagaaaaagaaaaaaggctttttttttttttttggcccaggccctgtgcctgggaccaaagcctgagccctttcctgcagtcgggtcgctgacctaagcctggggcaaagctaggtcttggccagtcagcagccaccacgtgaagcagcccctgcccccatcacccccggcagccttgtgccctcctcctcggggtcctcagctcaccccacctcagtcgggcctgctccagcggttaagtacccctagtctgaaccttaatcgtgaggcggggcagccccctccccacaccctgtagacactcccccgtcctccgccccctggacttgtttgggcgggaagagcctgcctcatcttttcttcctaccctcctacccagtggccagggaccccaggcttcctctgagacatccaccagcggtgatgggttgggaccaatctcccccactcctctccaccctagcagtaaggtccccgctctcgatactgccccagcacctgcactggccctctctgatttcccaactccagcccattccaagtgctgaaggcgggtcgctaggtgctgggacctgggcgcggggcaagaccttgggctgtgtggggtgcaggctggtttactgggttcacgattgagggagtggtctgggggttaggtgtagggccaggctgcgttgtgctctaaggggcaggcggcaggcggtttgggggggctgtggtcagacagggtggggtggcggtgggtttggggaagccgcagcagcccgccttggggtcccgcgagtgccgagggagctgccggggcatggtggcgcggggcccgtggtcctgcccggcacgacccccgccccgcagcgccccgcagcgccccgcccccgcggccccgctcgcgacgcgtctcccgcggcgccccgcccccgcccgcagtgcccggatgcgggtgacgcgcggccgccatctttccgtcccgggcagccagcgccagtcggagccagcgcgagccgccgccgccatcactgccgctgccaagtcctccacccgctgcccccgccatgtgagtcggccgcccgccaccctcaccgcgcttccctgcgccggccgccgcccttggcaaccggccgtcgggagtgcccggggtctctcctgcgttccccgcgccccggggccaggcccaagccggtgactgcgcgcgggcggccgaggagccccgcgtcccgggctggccggctcgggcgatggccgcgggaaggagcggacccagtgtcctcctgcccctccccgcccctgtcaccgcggccgcctgtcttttcgggtcgacccggatcgcatctgtgaggtcgccctcagttgacaggcggggaaactgaggccgggggggcctcgctcaaggtcacgcagctcatcggcggcagggctggaccgagaccagggcttacatcgggtggccttcctcccgaaaaggaggactggagggacgaggatggacaggtggatgggcggagccctggctgcggggccgggaggctgcaggccctgggtcttaatccgtccctgctcctcaggtctgctaccgctgccacggccccccctgctgccccggctggggagggtggtccccctgcaccccctccaaacctcaccagtaacaggagactgcagcagacccaggcccaggtggatgaggtgagtgtggggggagtcaaaagcagtaggagggaccctgggggttggcgtataggtgtaggggcccatgttggtttgggagtgatgacagttcacgcctgtgggtttgcggacaaagataccatgccccatccctgtctccctgtcagcacgcacttggaagggcgctgggggtgttaatcagctttgctagcctggggtgtgccagcctgggcaggtgtgctctggtgatggacagagcgcctgaggttccatagagggagggtgttgctatgacatctgagatgtcaccagcatgcccctgatgtgtgctccttgcatgtccccaggtgtgct

SEQ ID NO: 7266 - DNA, 6000 bp, Homo sapiens
gttttttttgtttgtttgttttgttgttgttgttgttgttgttttttgagacggagtctagctctgttgcccagctggagtgcagtggtgcgatctcggctcgctgcaaactccgcctcctgggttgaagtgattctcctgcttcagcctcccgagtagctgggattacaggtgcccgccaccacacccagctaatttttgtatttttagtagaaatggggtttcaccaggttgaccaggctggtctcgaactcctggccttaggtgatccacccacctcggcctcccaaagtgctgggattacaagcatgagccactgcatccggcctcaatttttttttttttttttgagacagagtctcactctgtcgcccaggctggagtgcagtgacgcgatctcggctcactgcaagctccgcctcctgggttcatgccattttcctgcctcagcctccctagtagctgggactacaggcacctgccaccacgcctggctaattttttgtatttttagtagagatggggtttcattgtgttagccaggatggtctcgacctcatgacctggtgatccgccctcctcggcctcccaaagtgctgagattacaggcatgagccaccacacccggccaatttttgtattttttttttttagtagagatgagggttcaccatgttgggcaggatggtctcgatctctcgacctcatgatccgctgacctcagcctcccaaagtgctgggattacaggcctgagccaccatgcccagccctgatatatatatatatagatagatagatagatagatagatagatagatagatagatagatagatgtaattttgagacagagtttaactcttgttgcccaggctggagtgcaatggcgcaatctcctgctcactgcaacctccacttccggggttcaagtgattctcctgcctcagcctcccgagtagctgggattacaggcatgcgccaccacccccagctaattttgtattttttttagtagagaagaagtttccccatgttggtcaggctggtttcacacccccaacctcaggtgatctgcctgccttggcctcccaaagtgctgggattacaggtgtgagccaccacgcccagactcctgatattttttttattttattttttttgactcctgatatttttaattaaaaaaaaaattaggaggtcagggaacccaatatggaaggcagattgtggcaaaagaatttaatgatactactaatgtatgaaataacttttctgaagggagctgggggaaaggtgctgacctgagtaattttggaaatgagtcgagtctgtaagatcaaaggcaaatggaactacacataagcactgtaccctagtttataagattgttctccacaggggtatgtgttaacaattctcttttgagacattatgattacaaataaagaaatattttattttattttattgaaacggaatcttgctctgtaacctaggctggagtgcaacgacgcgatcttggctcacagcaacctccgcctcccaggttcaagtaattctcgtgcctcagcctcccaagtagctgggactacaggtgcgtgccaccacgcccagctaatttctgtatttttagtagagacggggttttgccatgctgcccaggatcgtcttgaactcctgacctcaggtgatccacctgcctcagcctcccgaactgctgggattacaggcatgagctactgtgcctggcacatataaagaaaaattttaggctgggtgtggtggctcacccctgtaatcctagcactttgggaggccgaggcaggtggatcacctgaggtcgggagttcgcaaaccagcctgaccaacatggagaaaccctgtttctactaaaaatacaaaattagccaggcgtggtggcgcatgcctgtaatctcagctacttgggaggctgaagcaggagaatcgcttgaacccgggaggcagaggttgcagtatgccaagatcatgccattgtgctccagcctgggcgacaacagcaaaactccatctcaaaaaaaaaaagaaagaaagaagaaaaagtttaggccgggtgcagtggctcatgcctgtaataccagcactttgggaggccaaggcgggaggatcacctgaggtcaggagttcgagaccagcctggctaacatggtgaaaccctgtttctactaaaaatacaaaaacaaattagccaggtgtggtggttcgtgcttgtaattccagctactcaggaggctgaggcaggagaatcgcttgaacctgagaggtgaaggttgcagtgaactgagattgcaacattgcactctagcatgggcaacaagaacaaaactccgtctcaaataataataataataataataataaagaatttaaaaagaaaaacaaaacaattctgatactcctatacacgtgtcctggaataaacaattaagtaaatagatggcaaattatggaagccaggtttctcacagttggggtgggagtttagataaacaagggaggtggctagaatgatccatgtagtaatggattaaagttggagacatcagtatgaattcatgcttagcttaatatagatatggatggttatatatggaaatacatgtttgtgtatatacgtgggttagtatacacacatatatttccttgctttctcagatgtgagggtccagaagcaatgatacctcaaaagcaacaagcacacctagggcccagatcttggattctaaaaccatttgccaataaaagaaaataggggtccttggagaaatggctgattgcaggactgtggcaggaaatacacaaaatgagcctggagcattttatagtaccagaaagtaaggtgacactaaataaaaacaaggttttaattaaaataccaatgatgacaacaacactgatgggactcttatttttctccctggttgaggattgaccgccatcatgaatgacttagtaactatctgaactaggaagttcatgatcaactgactacatacttcaggaggaacaaatggttattgaggtccttcaccctgggaagacaacagtacctaagacagaaattcaggaaaaactagccaaaatgtatgagactacactagatgtcatcatctttgtttgtttttgtttgtctttatgagatggagtctccgtctgtcacccaggctggagtgtagtggcgcaatctcggctcactgcaacctctgcctcctgggttcaagtgattctcctgcctcagcctcccgagtagctgggattacaggtgcctgccaccacacccggctaatttttgtagttttagcagagacagggtttcacaatgttggccaggctggtctcaaactcctgacctcatgtgatctgcctgcctctgcctcccaaagtgctgggattacaggcgtgagccaccacgcctggcctcatctttgtatttggattcagaactcattttggtggtggcaagacaactggctttggcatgatttatgattcactggattatgcaaagaaaaataaacccaaatgctgacttccaagacatggcctggatgagaagaaaagaactcaagaaagcaatgaaaggaacacaagaccagaatgaagaaagggggactgcaaaggacagtgttggtgtggcaaaaagccaaaggagtaaagatgctacagtaacatctgtggccactgtggatttttcacaagatttataaactaaaaacttttgtgtgcaaaaaaaaatggatgggggtatgctaaagagacacaggagccaacggaaacagctctcaaaggccaaagctagaacgaaattagctagaaaataaatatgaagtatattggattataacccaaagtataaatgtccatgagtccatactgattaaataaatggttgaataaataatggaggagtagagacaaatatctcatatgaaagaactccaggccagggatggtggctcacgcctgtaatcccagcactttgggaggctgaggcgggtggatcacgaggtcaggagatcgagaccatcctggctaacacggtggtctctattaaaaatacaaaaaataagccgggcgtggtggcgggcacctgtagtcccagctacttgggaggctgaggcaggagaatggcgtgaacccgggaggcggagctctcagtgagctaagatcgcgccactgcactccagcctgggcgacagagcgagactccgtctcaaaaaaaataaaaaataaaaataaagagcctaaggactaaggatttaattaaccaagcaccaacccgtgcagcctcaggagactggtcccgcagcgcaagtgtgtccctctaccccccgcaagccgggccgcgtcttcctggctctcctggcgccggcaccgagcagggcgtggacctgaacttatgtgaccccacccggtcacaacccggggtaggaagctaaagccgtccgcccacccgaggggcggtcccagcaccccagtgggggactgctgcgctcggcctctgtgttcgatcgggaacccaggtctcttccctgccaataacaaaaccgccgcgtcccgggcctcccttccggagccggagtcggcggccgagcgctggtggcggagcctggacagttaattccaaccgcctccgggtgattccggggacaggagcgccgagagctcctccctttggccgcggagccggctcggcgctgattggctgagggcctcggttgtggctcttgaaggctccccattggccccgcgctccagtggcaggagtgtggcggcccggcctccgcaggctacccggggttgaagctactgcgagctccggtggctgcctggggacgctcagggacgctcattcctggccagagtcctgacttctttctcggatcgagatctcgttgctggctcgaggaaatcaccggctcttctcccggatccttttcttctctcacttgctggctttcttcttcctgcctccctggcttccatctcccaaccccgcgattccctcctctactcccgtgctcccgtcgcccgccatcctgagccatcccacctgcaaccttctgtcttttgcccctccttgacctcagagggtcctgccttaagcttctcaccagaatctcctagatttctatctcttccctgcttgccagctcttgactcccaaattccagctgacgtttgaccacttgacatttgaccctgacacccttgactgcaaatctaaattcttatcttctgcaacctgtactgctgaaacaggccttccccctgtcttccaaccccgctttctgacacccatttttactttcttactcttgggtcagttcctgctacagctatcccaccatggacttcttgatgagtggcctggcagcctgcggggcctgtgtattcaccaatcccctggaggtggtgaagaccaggatgcagttgcaaggagaactgcaggcccctggcacataccagcggcactaccgaaatgtcttccatgccttcatcaccatcggcaaggtggatggccttgctgccctgcagaaaggcctggcccccgccctcttgtaccagttcctgatgaatggcatccgactgggcacctatgggctggctgaggctgggggctacctgcacacagccgaaggcacccacagtcctgcccgcagcgcagcagctggggccatggctggggtcatgggagcctacttggggagccccatctacatggtaagaagagggctcttgcctgggaccttcagggcagatcctcgttgtaggataggagctgttctttcccaagggcataggtggcagagtgctgccccactgcaagcagggaaaggcatcaggaaagtgctggtaggcttcggagtcttctgatctgccctatacacacccatctgatggacacgattgaatgtattgattaagattatgggctttggggccgggtgcagtggttcac

SEQ ID NO: 7267 - DNA, 6000 bp, Homo sapiens
acaaatgagaagatacatgcatattttcttatttctctttcttttttacatgaaaggttagcatactatatttttcatggtagtattttttaaaagcatggtagaattctgtcctttaaaatttgatagaagtcatctatgtaactaccaagacatggagactttcaagagagatgttctttgataatttatacaattccatggttattggtctattcagagtgtatctcttcttaagtcaatttttggtaattcatgtcttaccaggaaagttaagatattgagtagaagatgcaaatctttctttagttcagagaaaatttcttctgccatatattttattttctcctctctctccttgtggaattactgttatacacatattagacctctatagtctagctatcacagatcatcttttctcttctgaattccaggataaattttcaagcttgagttctgggtcacacattcagctttcttcggttcccaatcttctgttcattgtttccattgaggtttaaatttagcaagctaaaaatgtttcctaatttcagtttgtaatttcttaatgattccttgtaatttcagtttgtaattacataatccactacacttgcaaatacaatatcctcccaaatattattaaaaacataaaagagaaagatgtttaattttttttcctcttcttcttgtggaaatttcatttcaaaggaaactaattttctctgaccatgttccgttctgttgaaagtctgaatctttttgtgttttcatatcattactttttctctctctgtttatttttaccaggagggagtctatatttattctggaatagaagttgaggtggttctcctgattatcatgaatagtcagtaagcattcagtcaaataaataagtggagagaggtattttaagcagagaggacagagagaggaagggcatgaagatataaaagcccaatgtcagccaggcacagtggcttgcacctgtaatcccagcactttgggaggcccgggtgggagtattgtttaagcctaggagtttgagacctacctgggcaacacagcaagactccatttctaccaaattaataataataataataataataataataataataataataataattagctaggcatgcctgaggcaggaggatggcttgagcccaggaatttgaggctgcagggagcattgatcatgccactgcactgggtgacaggaagaccaatgtggattttcttttctcacatattttatgtactgggatataatttacaaagagcagaatatgtaacttttaagtgaagatctcactaacttgtgcatatgcagaaaccatttaaccaccatcaagataaaaacaccaccccagaaagttcactcatgtccactttctggctaaattgttcccttcccccaagataaccatcattctgactcctatcactataagttagtttgctggttcttgaacttcatataaatggaatcatgcactatattttcttttgtgtctggcttcttttgctcagcatcatttttgtgagattcacctatgtggacaaatgcatcagtcatttattcctttttactgctgagtagcattccagtgtacgaatatcccacaatttaacaaaaaatgcattctactattaatgatatttagggtgtttccagtttggggctattataaataaagttgctacagtcattcatatatatgtttctgtggggatatatacattcatttatcttggatatatacctaggagtggaatttctaggtcacaagtagatgtatatttaactttattagatactgccaatcagtttcccaaacttgttgtgccgtgttacactcctacaagcaatatatgagtgtttcagttgctccacatccttgccaacatttggtgttttcagtatgaattttagctattctaatgactgtaaagtggtaactcatggtttaagtttgcatttccccaaagactcatcatgttagcaccttttcgtgtgtttattggccatgcgcatatcttttttttgttgaagtgtctgttcaagtcttttgcccatttttaaattggattctttgtctttactacttttgagttgtgggagttctttatatattctggctataagttactagaaatcttactatccactggtggatagtaatgatgtcaactgagatagggaaggcaggagaaggagtttgggagaagatgaggaatttattttaggtcatggagtaattaaaaggcttttggattgattatctaggtatgggtgtacagaaaacacttggaattacagatctggagctcaagagagaagtctgggcgatagtttgggagggatcagtatgatgggaatggatgagattgcccagggagaagagaagcagccttatctgaaatctcaagcattgtaatgtttaagagatgatgaagaaatgaagccagaagaagaaaacagaaatcatggtgagaggtggaggagaagccaaggaggggattttcaagaaggagtggtgccaaatgctgtagtgaggtaagaaaatgaaaccattggagttgacatttggggtttccctggtggtctctgttcagagaattgaggaataaatgtaagatgaggaagtggaggcaggggtagactcctctttgaaaacattaggcagtgaaaggaaggagagtgatttcaaagagccatagattttaaaacaaagcaacaaaggagttgtagaaagaggtacataatcagatgcttaatgagtgacagaggtacctttcagagtttttccagcagctttggggaggtgggaaatggagaatggataggtgtcaggtgctgatcagatctgtgacagggagacgcagacagaactcagtgttgacggcgtggcataacatgcaggctccacatctgggccacagctgtaggtggagaggagaatgcctacttctgaggggatgtacgatgggaccaagttggcttcttgggatgctcagagccctaggagtgagcaccaatgagccactcttttgcagttttcctccattttcagaaggcaggcatcccataatttctctggcagattatttgcctttccaagtgctctcctaatccaacatttccatctggcacacagtgtcattcttgctcctgaattcctgattccagagcatttctgccattttcttcctttgcacagtgtgtaccttccctcttctcctcttcttccaaatgtccatatttttgtggtggaaaaagtggggacaggggagacagaagactggaatccttatcaagtcctctctcagcccttggtggctctggttccttctctgtgaaagggtgacgtgtggggaaggggttggggatgaggtaggagagggggtctgagttccttcccacgtctaacgatggctggaaccaggcctctgtgttcaaccaagggtactttctgtttctgtccatttggggaagttgctttttcttggtatttcgggagtcaggaaaagaaaagtcattggtgttcatatctctcaaagcctcaggtagggctgcggcttttgaccaacaataacgtatgaccatgaccttgtggccgagtttgcacgcctctaacagatattatgacacagttccattcaatagtggaagtggagatttcagcgttgccctttgttaacccacaaatgaagtgctactcttccattgtgagggctgtcggagcagtagccaaccttcttatccccattttttaaacgagggaaaggaggcataggaagcgcagtgtcttgtgggattccctggggagtccttccaactcttggtagagcatcatctgcaacgtcgtctgggggagaaaagggggaggcaagaagagggccttgaccctggaggcaggaactcccgcacaccctcactcccttccccaggggctggggaaaccactcaggtgacagtagccttggtgccggccagggagggcgggaagtccagccagaggctggaacagcagtgctgaacgccgggactggctggtatttctatgaaggttcctgcagaaggatgcgggtcaaggtgcccgtctgcacagcagtagtgcaggcattttaagggttaagggcacccaaagaaaatagaagtaggggccgggcgcagtggctcacgcctgtaatcccagcactttgggaagccgaggcgggcggatcacgaggtcaagagatcgagaccatcctggccaacatggtgaaaccccgtctctagtaaaaatacaaaaaattgggcgtggtggcgcgcgcctgtagtcccagctacccgggaggctgaggcaggagaatcgcttgaacccgggaggcggaggttgtggggagtcaagatcgtgccactgcactccagcctggcgacagagcgagactccatctcaaaaaaaaaaaaaaaaaaaagaaagaaaatagaagtaggaagaggaagtgggtcgcagtgagagaaggaagcagctcgtcggagcttcctctttctcgtctttcccctaagcccctaccccagacctgcccccctgctccgcccagccctcctgcggggccaaagccgcgcttccgacgcgggggcctaacctccccttactccttgggggtcgctggtgctccgcgctggtgcccctcgggccactgccatggaccggccagggtctgcttcttccgagggctggcgggtcagagccggggctgcttctcagacgccttgcggcctcgggggcgtgacccagaggatgtggggccgggcgcgcacctggctgacgctgccgggccgccaggtggctggagaggccggctccgcggtcagccccgccccattaggccccgccccctgacaggctccgccccgcccgccggaggagcccaggctgggcagatgctgcggctcgccgcgcggctccagctggggcgcggtggtcccgacggtcacccgaatcgcagggagtcgccgctggagaggggctcggcgcccggcggggactgcaggtgtgtgactgggcggccagggcggatgcggagggcacgcatgggagctccaggcagagctggagcaagctggggaccgtcggggagagtgggctccgcgagcagccgccgcagcccgagggctggacagatcctgctatcttccggccccgtggacctggcccaccgcgggggcagcgggtctgcaaacctgcgctccagataaccccagagacttaaggggcgtcgcggggaccacttatcgttatccgggtaacctctgctgggcggctctgcgcagctgtgtcctcagcctcctgcctctgacacaggacgccctgtgtcgtagggtcaggtcccctgcccgctccagcggggaactgtccgtgagcgtgggcatcagggctcttgtgccgtcagaacctgggagtcatggaagtgcccgcgtaaggcgccctccgtcgagcctcactcagcctgctagttagccagccttgggcccagacgcggctgctgtcctagagaactgcacgctttctgctctcagaggatctgtgtttacacactggacatccccgcgtgactcgtgtgtgtgtgtgtgtgtgtgtgtgtgtgggcatgcgcatgtgcgcgtgctggcccatcccggcctggggtaaatacacaaaaagttcaggtcagtaggaggaaggagattgttcagaaggaaaaggaaggcgaggttaaagcagcaggatgtggtataaagcgagttaacaagactcggagtagagaggaggggtgggtttaggcagaataagggctaaaagtaggccaagcctgcctccaaggtcctctctggactgacaccctcgttttccttctgtgtcttctcatccaccccacactttccttcctgccctcaggaccacctgtaaggcactggctcccagagctgactgcaggtagggctctcttggagccaac

SEQ ID NO: 7268 - DNA, 6000 bp, Homo sapiens
aattgagaaccatttcttattctcaccttattatattaccctttttttttctttttttgcctttgccagtttgagaagcaaaaaccatcactgctttaacagcattttttttttttttttgagaccaggtctcactctgttgcccaggcaggagtgcagtggtacagtgatggctcactgcagcctctacctcccgggctcaggtgatcctcccacctcagcctctcgaatagctgggactacaggcatgcatcgccatgcctggctattttttggtattttttatagagatagggtttcaccatgttgcccaggctggtctcaaactcctggcctcaaggaatcttcctgcctcaacctcccaaagtgctgggattacaggtgtgagccaccgcacatgaactttaatagcatttttaagctttttgagctaatagccatttatatttatttacctatttacagggtctggctttttttttttttttttaagaaaggtccagagagtaaatattttaggctttgtgggcaatatggtctcttgagactactcatctctgctagtgtggtataaaagcagccatagacaatacataaacaaatgggcatagctacattccaataaaactttatttacaaaaacaggcagtgggccagatttggcccatgggctatagtttgtagactcctgatctattttgttgttgttgctgtttttagtttacaagaactctttgtataccataataggaaaatcatgggctacctactccagtcaatggatgaatgtgaccaaacccttaataactataactttattaaatgtttttaacacaagtatatttggtttgcttaaataattaattcctgccaaaatgcaatacctacaagtgtcaagtacagttacatattgataccataaagttaaaattcaagtttaaggccagtcgcagtggctcacgcctgtaatcccagcactttgggaggccgaggcgggtggatcacctgaggtcaggagttcaagaccagcctggccaacgtggcgaaacaccgtgtctattaaaaatacaaaaattagccaggcgtggtggtggatacctgtaatcccagctacttgggaggctgaggcaggagaatcacttgaacccatgaggcagaggttgcagtgagctgagatcgcaccactgcactccagcctgggagacagggtgagactccatctcaaaaacaaaattcaagttgaataatgtaacactatagtgagtttcagtgttgcagtgaaaaaaggggccttgcttttgtttctaatttgtttccatctgaaatctaaactcaatcacttggcatttaaggcctctgaaatctaattccagcttctctttcctgtgttatcctgccagtccctgatactgaagccaccccaagctatttgccgttctgcaaccaggccctgcactctccacttttcctcctctgccccccgctattgctgtaacccgaaatattctgccttcaatctttacccgctgactcctagtcaaaatcttctctcccgagccttatgaaagttctgtcttttctctctctccctcttttttttagagctagtatagttttttaaaataaacatttttcagtgaagacaaaatacagaaaactcaatcacttttgtaaactaaaaataaaatcataagctccccaatccccacgctgccccaccccagccactgactgaacagatccccttttggacaaagggacccccaaaacaccttaaagcagagttcccagccttgacggaatgggaggtcagacatgcctcattataccccctctcttttgtggtttagacacaactgatcagcattaatgttaaaatagagatcataagattgacagactgtgtggcaataagatatcaaattataaacaggacctaaggccatgcacccctccaccctgtggctgggtgtggtggctcaagcctgtaatcccagcactttgggaggccaaggcgggtggatcacctgaggtcaggaattggagactagtctggccaacttggtgaaaccccgtctctactaagaatacaaaaattagccaggcgtggtggtgggtgcttataatcccagctactctggaggctgaggcaggagaatagcttgaatccaggaggtggaggttgcagtgagccgagattgtgccattacacaacagagcgagactccaccgtctcaaaataaataaataaaataaactatacactgccacaaggtttttctttttctctggcagctaaacaagcacttatcttgagataagcaatatgaaaacaactgcaacctgtccagttcataggcacttactaactgaagccctgttcaacccgccataagaacaattttgattggacaacagagtgatttcagtaatgttctcctggcaagaagaccactcaccacggactacctctggccagtttactgaggcttcccacttaacgtgccgtcatgtcctgaaaaggccttttgacatataggacctaattgtaatacatttaaatgttaggtctccatcccaaggtgaatatgagtgatatattacatcaatgtttgttcaatacacatgtgttgggaccaccttcatgagtattcatagctcctcctataacctgttgaatatgtatgtttgtttgtttatttatttatttattttttgagacggagtctcgctctgtcccccaggctggagtgcagtggcgtgaccttggctcactgcaacctctgcctcccaagttcaagtgattctcctccctcagcctctcaagtagctgggattacaggcacctaccaccacgcccggataatttttgtatttttagtatagatgggatttcaccatgttggacaggatggtctcgaactcctgacctcaggtgatctacctgccttggcctcccaaagcgctgggattacaggcatgagccactgcccccggcctcagttgcagagttctatgtgtgtggttctacattggctcaacaagtgacattatgcaacccactgtaggctgctcaattgtttctcaatgatcttgtaaccaactctcaagatatctgatatccgaaatgtataaagcactcactttctattggagactgttaaagttaaaccaagagtcaagagctaagtcctagagtatgcttaaaactttagacagtgattgttctgcatccacattcttaaagctttcaggcatcacaacacacatttttgaaaagttttgcttctcctaaaatctaattcattgttttctcatccctcaaaaaaccaaaacccctcaaaacgaacaataaaaccccacagctttttcttcccagaatcttcaaaacaataggcagtcacaaataagatttcagcggagcggcccagtccctttttctctccgctttagctccccctggcgtccccttccccttctgtcctggtctgaaatcctcatcatttagaaaccttccttaggattagaggaccaacaacatcccctcagggggttgctcaaacacacgttccctcccagccctttctcactggtacgccagttgggattttagcagatttcctagctggtcccaggggccgacacagacagcatccttctgtgtggttacgaaggagcctagggctttgcgagcggcgtggggttcagagccaggaagggctgacctagtgggagaagggttacaaccacccgtactcatccggcccgcctggggaagaggcatttggtcccttttaggtgctggcgcttgtccgagctggtaaaaaccatctcactccctgaggcttggatcgaggaagtgactctccaaggccttggggcaggtcaggctgtgcgggtcctcctgtgcgtgtccctggccagggctcctgccgttgtcccacactgcctttcaggtgtccccggtgtctcactattcctgtttgcactacacgtcctccgaattcctaaaccagccagcccaaagatgctggaggcctcaccattgaagccgatcacggcgtcaagttccagctccgccacttgggcctccggcgaaattttgttatccatccttgggaggttctgattactttgctctcctccctagtggctgcagcgtcttctggtcgttatggtaacggacgagcgcatgcgctccagctccacgcccgcgcagaaacccagcctgccgagttcgagttcattagcattcttggaaatgaaggggtatggggactggaagagagatggggtgggactcctcttctttttttttgtgctatttctctggaaatttaggggatggcactaactgcgcagaactaattcctccatccccttgtgtagagtctgtgacttcttagtaactctaaaatcaagcaccgaatgaatggcatttaaaaaatatgtaatcaggcgtacaggactgataggaaggctgctataaaaaatatatataattgatacttctttgggcccctgtttggagcagtgtgaaaaaaattttaaagattttttaaaaagcgttgaggtataatttacatatcataaagttaacttaaagtaggttgtagtgagtttacgcagcgtgcaagtctcaccgcaatctagtgttttgtttattgttttgtttttgaagcaggataaatttttaagtaactgctacagagaggtcttgcagcgctcccaccttcctgggaaaatgctttgtttctatttaacaattttaactgagcttagcagttcgcgtctcttggtgggagtagattgctccagtgtactgtccgcaggggagcgctttgctttctctgattatagttctgaggccctagctactcactttgcaaactccaggctccggtcgcgcacgggacgaactgcggggagtgagccgcgcgggccgccgtagtcagctgctaagagcaggaagagtccgagcggcgggcggagtctgcaggatggcaccggacccctggtgagtcccgggtgagggcggcggtgcgtggagggaccttcggggaggccgggcttccggagagcaggcaatcacttcgcattgccgctggtggcctttcgggatgaggggaggggcagcgagacctttcctttactgagggggctcagccacatcccgccacacttggtccttgcaagggtggcccgggaaggagaccaggtggtccgctggagagctgaggacttacgccaaatctctgaatattcctttagcttttctgggctgcatctcgttgcggggatttcccgcccatcctggttttggagctagctggctggtgcaggcttccctggactcctataaaagtgaagtcgaaataacgtttttgtagcatgtcagtccatcccggtaaacccccttatttcacaggtggagaaaccgaggttcagaatccatggccaccagccagttagtaaccagctggggctaagacctagatcttgggggcccttccagatacaggaacctgggagggaaattgtgcacttgtttataaggcattttgcactttcttgagttaatatcatgaagtcttttcctttagcagtagcttctgcagtaaaacaatagctgataagggtgatttatttagcagttaatcccaaggactgcatgatgaaagatgcaacttttgatcccaaggaacatattgtttgatcccaaggaacgtattgttattgaacatagacttgacctttctgcttaataattaaaaacatattacagctctataacgttcttgttggaatatgtgtcttatgttgttatttctaatatagtttataattgtttaagttgcccacatcctggatattagaagaatggattccaagaacaaagttgagttacctggaatctaggttatttgggccaattatttaatttagcatttacttttttaaacctaattttaggccggacgcggtggtggctcacgcctg

SEQ ID NO: 7269 - DNA, 6000 bp, Homo sapiens
cacatcaatgggctcctgagctcattggcttctgtgttggtttggctggtgtgtggtagcctggcaggcgatggaggcagggatgtgactgagagacagataggaaaggagcagggctctggagagccgtaagggttgtttctcagatatgtgggtctttggggaaaggggaggtacaaaatcttcggtgaagcactctaaattcttggagcaggactacccatgagttcatgcacatcaattatgcgcattattacaggtggccgaagggtgatctccacattctccacgctactagaaacttttagtatttttctaaaaagcatctgtatttctgtctgttgatcaatctgtcaatctatctctctcatatatctacatccacctctctctcagagaggaagagaaagaggtggatgtgcatatggatgtaattgttttatttgttatatattaatgtatattaagttttctaaatgagtataaactattaatatatgggtcagtgggagtgagtcctctttaaaaatattacttactttacaatgttaaacctctgtggtagggcatgagagatggtaagcaatgcttgtacggtagaataacaggtttataagatccaggtctgggaagggattgaaggtgggaggcttcagaggaccctgggtggcattgcaagagtaggcatcacagtaaggaagccagaagggtacagagagggaagctgaaagtcactgaacacagacctcacccatttcaccaccaagcataagaccagcttctgtgatagcaagataaacctggagctttttccaaggcagagccttattgctttcaagggttttgaaagcatgctttaacatgatgtgataattaattttaggtgttaacttgactggactgaggaatacctagggaaggcattattttgggttctttctgtaaggatgttttcagaggagattagcatgtgagtctgagtggactaggttggaaagatccaccctcagtgtgggcaggcactatccaacttgctggggggcctagagagaacaaaaacggagggaaggcgaatgtgtcattttttttttttttttgagatggagtctcaatctgtcacccaggctggagtgcagtggtgcaatcttggctcactgcaacctccgcctcctgggttcaagcgattctcctacctcagcctcctcagtagttgggatcacagacacccaccaccatgcctggctaatttttgtatttttagtagagacggggtttcatcatgttggccaggctggtcttgaactcctgacgtcaggcgatctgcctacctcggcctcccaaagtgttgggattacgggcatgagccactgagcccggccaaaggtatctttatctacctcctggagctgggatacattctccttctcatgttactgggcatcggaactccaggctgtctcgcttttggactccaaggcttacaccagtggacctctggttctcagaacttacaccattggctttctgggctctgaggccttcagacttggactgaactacactaccagcattcagggtccgcagcttgcaaatggcttgtcgtgggacttctcagcctccataatcacatgagccatttccctagtaaatcacctctcatctctctatctctatcatctgtctctaatccatctatctatattgacgtctatctatatccatatatcctattacttctatctctctggagaaccttgactaataaacatggaataacaaagagaaagggaacaacaagaagaagctgtgcaacaaagtctattgcgctctttggtattttggtaggcatttatttccccattaaagaaccatagtaatcaacagctccaacttgtttctattctagtgtaagcatctaagtggatgaaagaagacatgttctaaaaggctatgtagcgtgactgtacctaattttatgatgagactttaatcacccttcttgattttcgtcacgattaaacataatgccacatacctatcccctattgtcttatcaagaacatttctttccctgattcctttcctaagaggtgccttggacaggctgtgtgtcaccacgaaagcttgctgccactctcaagggcctcttctatggactttttccctcctggttttggtagcccttcctttccctcattctttcagacataagggtagtgacagcgccagtgctactaccctagggttgttgtcttttctagtcctttataaacagatcttttgtaaataaaccctccgtgcattatcctaatttgaatgtgctgtctgattcctgttaagaccctgacagattcacccctcccaccaaaacaacatccccatttgtgctgtcttactagggtaaccaccagccacctaggggtattgagcatttgaaatgcggctagtcccaactgagatgtgcagaagtgtaacattcacactggattccaaagacttagtatgaaaagaaagaacatacatgacttcaatcatttttatattgactacatgttacagtcacatttttggatgtatgggacatattatgaaaagataactttctctgcttcttttttaaccttttgtaaggtgctaatatttactagaaattagcctgggcaacatggcaaaaccccatctctacaaaaaacaacaacaaaaaattagctaggtgtagtggcacatgcctgtagtcccagctactcaggaggctaaggtgggaagatcacttgagcccgggaggcagaggttgcagtgagccaagattgtgccattgcactccagcctgggtgacagtagaccccatttcaaaaaacacagaaaaaaattactagaaattgaaaattatccatgcagcttttatttgtggctcacattttgcttctaaagtgcagagctgccctacatgtcatgcaagtgatggtgagaaccatgtttcctacatcgagcatctttaatacccacgtaaaggaaagacctgtgctcagaaagtgaaagactaaacacatgctatgatgtcatgttggagctagaagggaacttcgagtccatcattttccagtccaggaaactggggcatgtttataagcattcacgggactgcatgccttcaaaacaacttaaaaatggtctttgttttgttgtcttccttctgcaaatctgactgaagtacttagggaaaaaatgtgaaaacacaggaaagtttaagttagcattagatctcaactggtttgtcaatatccaattttagaacacaaaaggacattacagcttggcagggcttgtccatcctcgtaaacgcccagcgctttacggcatcagaatctaaaaagctcttcactggttgtcgaatcagttgggattggtagttcataaacataaaaccataaaccatatccagcagtgagtatttatctagcagggcacaaattcatggatccatgcaagcccagagttagaaccactaggtgccccttggaagctgaaaaagtggaagctgacttccacttccgtggtcaaatagagcacagaaaggctgcgaagttcctgcatggggacgcagaaatgcctggtaagtttcctgcaccgtggaccttgagcctgcggtgggcccttgttagcacccgcagaggtcccagaaagctgcctccacagcttgcaggggctggtaagaagctcccaagctaccgcccacatggtgaggcaacctgtggaggcaaggaagccaaaaaataaggaacaaataggattagaacaaaaaaccacctcatgcagcttccacgggccacctccctccattagacagcaaggcggtttgtatcccttcctgacctgctctccggggagcgcacgaagaggatatagggtcaggggaggcaagggaaagaggaaaccgcagtttatgaaaggacatttaacctctttgcgagcgtgcatgcgcgcgcgcgcacacacacacacacacacacacacacacaaaagtacaaacaacattaaggaaatacacactacattaaaaattgggcatagggacttggaatcggagttgaattttttttaaattttaattttgcctttgatttatgcattggtttttttttttttcgtaagaggttgttcctttctaggccctggaggactgtatcatcttatacaaatccaagggaaaacaatcaaaataagaaaagaaaagaaaacaaacaaacaaaaaacagactgatacgagaaagagctttgctccaagacccgcagcagacagttgagtaggtagaagtccaagctgctgcagaggaattcggtttgctccagacaaacgggggcgtggcgtgcagcgcagtactgggaactgctgcaaacaaaacttccaaggggacgaggagtaggttccaggcgatggaaagcagtgggatggggaaggatagggcaacagtgccaagaggggagcagagcgcggggaacctggagagggagggtcagggctgcggagggctgagctgcggtggagagctctggggcccctcaccaagctagtggcgtcttgggtggaagtcaggcccccagagatccggccggccttagctgtcactcaggcaaccccggagccgccgcagacaccggatccactggaagggggcgaagccgcggggaggaatgggggacactggggaaggggcgtcgcccctgccgcccccgccctctccagtgccattgggcggctgctgcggagcccgcgccaccttttctccatcccaccccgcccgtctggccccgcctggccgctggtccgcgccccgctgcgctcgtccgggggctggtccggcccgggcctttgacgtcaccagcaagtttgctgccctcggcgtcccacgtgtggcggcggccagcggcggcccaggaggcagccggtgagcgcctgcgagcagagtggcgggggccgctgacaggtcccgcgcagcccagcccagcccagccacgcggctcacaggtggggtccaagagcagtttggagcaacccggcgctacggagaggggtggacggctctgcacgggcctcctgtctcccgctcgggcagagggactcggggggacctcgctccttggctgagagaacctgaactcgggcggagagaacgcgcccaggcgggcaaggggaccagagaaagccggggctggaagtcactgtcgctcgccactgtctggagcgcacggagcgcagaggcccggcagccgcgcgtgccctcacggggaccgagccagtgatgcaggatcgctgagcggagatccgcgccgagaagtctctcggggccggggctgagacgcacgccttcgacaccgctgccaagaccccgattccggcgactcttgcggggaaccgaggggccaaggctgccccaagctcaggacttgggcgagtctaagacgatggtttcttaagcacggacccgcgttccccttcccgctccctcgactggaggcagggatcctgcgcggggcccccgggattccgtttccccgcggagccccggccgctgcctcccgggacagttcgcacggccacaggggcgcacggcgatgtggcctccgtccagcgcgctggcccgccggggggatgctctggcacctgtcggggtccaggcctagcatggccggcgcgttgcccgacgtcgcctccggctaggatggcccctccgggcccggccagtgccctctccacctcggccgagccgctgtcccgcagcatcttccggaagttcttgctgatgctctgctccctgctcacgtccctttacgtcttctactgcctggccgagcgctgccagaccctgtccggccccgtcgtggggctgtccggcggcggcgaggaggcgggggcccctggtggcggcgtcctggccggaggcccgagggagctggcggtgtggccggcggcggcacagagaaagcgcctcctgcaactgc

SEQ ID NO: 7270 - DNA, 6000 bp, Homo sapiens
atggaagggaggatagcaaataataataaatgttatttggtgactattctatgtgtttattttgcaagaggctcagtgggatatagcctacagctttgcagagacattgctcaacacagatgcatgggataggggtcccatttggctgagaaaaggttattggaaatgggagacgaggaaggagttttcctcacctgactctgggaagggaagagagtctggcccagatgggtaaagacaagtgtgttggcatctggtagacagggccagtggcacacaacagtgaacagctctactgctgacagccaacagggacttcggggtttggctgctggagatggaggacctgggcaaaagagacgtgaggccaagagagcaggtctcagaatgtggagctcatggaaggagagagggagggctaatcagactgctcctatctggccagaagccatgccccacactcaccaggccctaccccttttcctctgaatctttagctcttagatcagaaataatcttacgtgtcttcaggcttgatcctggcctgacggacagcagcctctgtcgtgtagcctttggagctgatcatggcagtacccaggaaaagactgtctggagaggctgcaaaaaccatgctcactgttcccagtccccgtacagaccatgtcagaggaggactgagggaggctcctctctctctctctctgtcacacacacgcacacgcgcacacacacacacacagatacacgcgcacacacacacaccgttttgcctggcagaacagacttataacttgcataatactgcagcagcccacactgtacctcatctccatttgggttccacaacagaagggagctggaaggaaatcagcgacaatctaactccacatgacaacctggctggacaacgaaacatccagcggggagaaagacactggaaattacccatacctgagccccatcccaaaacacctgagtcagcttctctgaccatggcccaggctaggtcatttgcaaagctcttgagtgattctaaagaaccactgctgtgaaaaataaaaatgatttcagcaaagagagaaaggtgaaactattttattggcactggctgtgatgctggctgtgagcagatgctggctgtgggcagaacaggggagagggccattgagaggcccttgtgactggagagtccaatcaaacgtaaagtgtgtgacagggagggactcctccaaattctgcaggtctctccagactggggatccctaacacaagaggaagtcttatgccccaagtgccagaattccaggaaactcatgcaatgaaaccagtcctcttgtgtcagagtttgcagctagaagcggttcaagggatggaggactctctgggagctggagtggtacgctgcaaagaacctaaatatgccataacttcctttacttccctctccaagaatttccaattgctcttccagcctattctgcctgacaggttagaaagttttcaatagttttcaatagaggttcgtttacttgcattgaattatctcatgaaggtcagcttgattcgggcacattaaagacagagtcggaagaacacatttccctaagttttattctaatgtacaacacatgtgatcatttgcgatggggtctaggcagacaaggcaggtaacagggagtccttccaaccaggggttggaacaaaggaggcttgatttggtgactcttgagacatttggctcactgctgtgatgctgtgagagattagctgtgcaatgtttgggctccttaaaaggaagtttatttaaaataaaacttacctgcacgtatgtaacactgtagacacagatccttcccacagtatatttaatctctgcagaattcactgggaggggaggggagccagtgggacctcttggctattacacaggttggcacttccagagagaacagtcttggcatcacaggcttcaggcatactcaaagctcttctcccttctgattccagtttctccatgccctgcagggcctcttgggattattgtattctggaaagcaaacaaagttggacactgtctctttaaataatagaggctgagaacctctcaggccaccatgacatatcccagcattggaccagcccctgaataaactggaaagacgcctggtctggcttcagttacagggagcaccaccagggaacatctcggggagcctggttggaagctgcaggcttagtctgtcggctgcgggtctctgactgccctgtggggagggtcttgccttaacatcccttgcatttggctgcaaagaaatctgcttggaagaaggggttacgctgtttggccgggtgagttttattggcaaactgtgcctctgggtgatgtgtgcctatgctttacaagaattgcctaatttcccaccccctgcaagccgcaaatgaaaaggattgcaggagagatggtgcatttgtgttggaattgactggagattcagagggctttttatatccttggttaaaaggtggatatatactctggctggggaggtggggggccatctgagagcatctagaaaccctaatgcatccagattgaaaggaagaaaggaatctagatgctttttcccccatggaaaatagctgtgcacacacagctggcaggtggccttggtaagcaggttagggagaagctgccacctgtggcagagccttggccagccgggctctgggtgtggcaagcctggtcagcaggcactgagtagcacttcctctgccaccattgagaaccaggcaggaggccagaggcagtgagggacagatgggttgggtttacctgtctggcagtatatggtgtggctgtgacctgggtggttattgattaaactattgggttcaaaagaaaggaagaagcgagctgtagcacccaatatatgcacttttctgtatgtgtattagactttattaaaaagtttatttgaaaatcacaaaggaagggaaagaaaaccctgagttagatatgctcatatttctaaagtgcttacttagaacagtcctgagtatgttgtgatcacataagtgttggttaaataaataaatgtccaaatggcataaaacaaagtaataatttctagagcaaatctaacttataaaatgacctgtggaggaaagaaaacactgccatgtctttagacttttttttctacttgcatatgcactttcatttataaatctttatctatctatctatatctatctatctatctatctatctacctacctacctacctacctatcagagttacaagctactttagtgcagaggtggtcaggtcttccctgaaaggttgatgtgagagttaaatgtgatataataatagtggtggcaatttgggcactgggcccttattatgttgcagacacgatgttaactgctttgtacatattgtctccttcaatcaccaccataaacctttaaagcaggcattactatttccttttgcacctgagaaaactgaagctcagtgaacttgagaaattgcccaaattcacaacaaaagtaagcagggtgattaggtttgttggagcccagagccagagtgcctaaccactgcaccatactgcctctcacagaccatgcatataaagtccaggcaaagtgcttggcatataacgggcactgtaaatgcagtgtttacaagtacacttcattttaatctgataacacgatagttttaaaaagatcattgtttgaagatctttttcaaatttatttttacttaccgtaagaatatacaattagctaaaatagcagctcctttcaaatcgtaaaataatatagaattatttgaatcattgagagtgatgagcttctatgacacagtacactagaggtagggaagtgtgtgtgtgtgtgtgtgtgcgcgcgcgtgcgtgaactgctgcattttcaggcagaaacctttaacatccacattcctgctccctgtcccgtgcctcaaggctggcctgcgcacgggagtctcagttgggcgcgcctctgccaagccgagactgaagggggctagcctctctccctgtaacgctgggcgggccacgttaggaggctatgaatcagctgatttccttggctgctccaaccccacctcaaatggccacctcgcacccgcccgccaaaccccatggccaggactccagccaaggctgacagccaagcccgactgctgcaggaacactttgcctagagcttattcggtggtagtctggttttgcctaggctaggaggagcccaatcccagaccatgctatccagtagtcggccggacttttcttcccctaattcgcacccaagaggagcccgctagatcaatccccgccaatcctaggaagctggcatgcttcgtaggtgcagacagtaatagcggggaccggcgcggggcaggtgtgtccggctaagacgccaggacagggcaggggctccaggacccgagaggagagggacttcttccagcgctcaagcgcccgctgccctctattagtgggaaaggaatccagcctcagccccgcgcgggcgcggtcggcgtcggcgggcccagaagcccagccctgggcatccgctgagctacatttggctgggtcttcccagagtgggctgaggagccagtttctcggtcaacactaggtctccacggggccaggggagaagggaggtgggaggtgagaaagctcagccgcctctggtttcgagtaaaagtcgccgcggttttgcagggaccgactttttcttgaggcgcatttaaggccaagtgactgtctcctgccctccctctctcctgccccctctcctccctgagtcccgccctcccgcacacgctgacccagggacacaccctactgcagcgacgcaaacagggcgttgttcccgttaaaggggaacgccaggagcctcccactgcccccttgcttcgcgcgcgcgcagccccgcagcgcagctttggcggcgccagcagcggagccaacgcacccgagtttgtgtttgaggccaccctgaggatcgggacagctgttcctttgggctgtaagtgatttggtggggagagtgaaggagatggaggagaaatgtgggcatcttccagtgagggtgccagaaagcgcagcgcaggcgcggggctttggccagctccctggggcttctgtttaggggcacagggtcccctgtgtgtcctgtttccctccaatgggtcttggagtaatacaacgaggagagcctttatggtctataagaccttacagggcaagggtgatggtgctggtgtctggatagcggataagggcggcccagttctcgccttgctgaagaggcgttgactctgggacacactggcaaaacagtccctgtggcggacatcccgagagtgttggactcctgtggttccccagttcccagcctcctgccatcggcttaattcaaaccctctgggagtcatcagaaatccttgtttatttcttccagtgcattccagagtttctttgaatgtgatgcttgtggagaggaacagaggggcctgggattgggtactttccaaactgggttattgaaacgttgtctccctggcccaagactctgcctaaaatggtccccagagtctcagccagatctttcacagccatgcatgtcctctaacaggtcatcccagccttcagttcccccaaagtttaaaatgaggggcgaggaccgcattacttgggataaatgtcctgccggctctgaccggctgaaattctcggactcagccttttaccctctgtctctctctcccgtccgctggacatctactcccttcggtccaggctcctgggctcctgtcccaccgcacccagaccggagctcaggcttgttggggttcgtgtcctggctttgagtgcctggggtgcagactggacccctaggcgagcacgtgggtctagcgcaagagcagaatgccccctgaccccaggggc

SEQ ID NO: 7271 - DNA, 6000 bp, Homo sapiens
ctgagaagtaatccttggtctcctcagtttgaggtagatacttctctttgtgctcccacgtcacactgggcctgtccttgtagtatttagcacattacacacatatgaggtgcttcatgactcagaaccccacaagacacagaagtgtgccttagtcaccactgcacctccagggtcgagcaccatgcctggctggcatgtgcactaaaaaaccacatttgttgagtgaaatgtacctttgacaacacttagtgtccttttaatgcacgtgtgttgccttctcctcgacgtgattccaagagaatgaagaccatgttatttacctctctgcaaccttgggaactagcacgcttttctacatagacaacactccacaaaagtgttccgatgatgatagtatgagggaaaggttcaataacccaccactctactttccactgagtattttttgcctaccaacttaatcataatggaaacacagttttcactctgagtttgcttattcagcgtgtgtttttgcttacttctccccatcctttgaaaataacttgaatttcttttttatgttattagctgacaagtattatattttaaagcaaattttaaaaagacattcaaattctgtaaacaactctataattctctatagttttaaacctcttccctaacaatgtacttttatttacatgattttagcgatcttattattatatccataataatgttatgagatgaacaggttagaattcttcttttctctgagacaggatttcactctgttccccaggctggagtacagtggtacaatcatagctcactgtaacctccaaatccagggctcaagcaatcctcctgccccagcctcccaaaatggggtctgcattttcttctaggttgaccattaacaaacttaatgtccatcaatgggcaatggctaagtaataaaaaaatctattgtatggaatattatatacagctaaaaattgtatgatgaggatctgtatatactaacttggaaagagatccacaatacattatcatttgaaaaaagacaaattaataaacaatgagctcatcacaattcctttttttataaaaggagaaaaattctctttttgagtttgcaaggagaatagggaagattttgacatcttgatttcactcagttttttttttttttttgagatggagtctcgctctgttgcccaggctggagtgcagtggcgtgatctcggctcactgcaacctctgcctcctgagttcgagtgattctcctgcctcagcctcctgagtagctaggattacaggcgcctgccaccacgcccggctaatttttttgtatttttagtagaggcggggtttcaccgtgttagccaggatggtctggatcgcctgacctcgtgatccacccgcctgggtctcccaaagtgctgggattacaggcgtgagccaccgcgcccggcctcaacttcacattttcaaaaatatgtgtagcattgaaatcacatctgttgcattcaaaatatgcacacttagaggctaatatactctttactcaatactagcattttattaaaaacttgttttattggccggctgtggtggctcacgcctgtaatcccagcactttgggaggccgaggcgggcggatcacgaggtcaggagatcgagaccatcctggctaacacggtgaaaccccgtctctactaaaaaaaaatacaaaaaattagccgggcatggtggcggacgcctgtagtctcagctacttgggaggctgaggcaggaaaacggcgtgaacccggaaggcagagcttgcagtgagcagagaacatgccactgcactccagcctgggtgacagagcgagactccgtctcaaaaacaaaaacaaacaaacaaaaaaatttgttttattaaattgtttctagtatcagcatttctaataccactcagggtgcctgcctgtatgatggcatacctgttgggcaacaaagacctcaatgtgcttcgaagtttgaatgcccaagtacttaatgcatacgtacttaatatttttcatagaacgccgattttttaaaattttcttttttttgaaaaagcagatgatgcggagaaagcacaaaaacaaggacaattggaaactcctggaaaactgcccagtcacccaaagaaaaagtcttggaaaatccctatgtcacctgaccaattcctcctgactgttagcgccctgcagcacgcccgtaattccggggaatttgcctatccctgtaggccccaaacagaaattactgatgtctggggaccttcaatttcatacccaaggaaggtcttgaatttcaaaggaaaatcaatccaacgtgcagttgatcggttgagattgagcaatcctcctatagatgtgaaacgaaccagtattccccttgaaatccagaaactgcagcccaacttgaagatctctttgcacagtcctagagcccagtccaccatacccgagcccatgattatccgctccaggttctctggcagcttaaagggtggagaccaagtgaccagttcaattgaaagggctgtgtgcagtacgggtcccctgaccagtatgcaggtcattaaaccaaaccgcatgctagctccacaagtgggcacagccaccctgtctcttaagaaagaacggcctcgcatctatacagcccttgatccttttagagtgaacgctgagttcgtgctgttgaccgtgaaggaggagaaggagcaccaggaagccaagatgaaggaatatcaggccagggagtccactggagtggttgatccaggaaaagccagcaaagctgcatggatcaggaagatcaaaggcctgcctattgataatttcacgaagcaagggaaaacagcggcccctgaacttggacaaaatgtatttatctaaaccagccttgggaaattacagtgttttacaataaacagaaagccaagcggatgttgctatttggcctttttttttttttttgactgtttcttcctggtaattaatgtgggaactcccaattatcttcccctgagccaaatatttgatatcatcaaaataagaaaacagaaggaggttgggcgagattagcatctgtagtcccactgaaaacaatttagtgagcattaggaaagcccagtttcgttgatgggggatggggagatgatcactggaaattagataccattcatcactaccaatttagtgctattagttcttctggcaaatgaagttatgggattatatcagggtcatgcattggagttttctggtatttttgcacagaagcctgatgaaacccatgaagaatttaaaaggggaagccctcagtggggttgacctgctgcatctgacaacattgagcttttccttctcagggctaactcctaaggaagagaattagcatatttatcctctgtacaaagagggccagtaacatcaagtgcattgaggtttctgcttaaacctttggactatggtgcagggaccaggtaatttagaagagtgcagcccactacaagagctatggcccattagaaagttcaagccttgaccaggtgcggtggctcacgcctgtagtcccagcactttgggagactgaggcaggtggctcacctgacatcaggagtttgataccagcctgaccatcgtggtgaaacctcgtttctactaaaaatacaaaattagctttaaaaattagctattaaaaattaaaagacgataatgaattcaaacacaatgccttaaaaaaccaaaaactacgaaaaacaacacaaaactccacagcactgagtggaccactgaaaacctgccatgggcaggctggacgtacaggccccaaatttgttagcttttcatctccaagggcacgaatgcaattgtgctgccgaaatgtctcgcctttgagaaacgcgtgtgtgtgtttttcccctttcattattagaatattaggttttaaatggcactggcaaacagccacataaaatttgtgattttaatagaatcccttcaattaaggaaacgtgcaaataccactatgccaacagcagtctgactcggccagacagataggatattgtcatcatcaccgcttcaaagatgacttaacgccccttaatttcacatcctttgttcaggcaagatcacagcatgagcggctggacttaaaactgtaataagtataacgtctcccatttactagatacttacactgtaaggaaaccattatcacccccactttacaactgacgaaagaagtacataaaggttggtgatatgattggcaatagagttcccaggcgcctaagctccagggcgcaaggtctcaactcctggagtctaagtttatacctcccataataataccgtccattagttactctagagtcctcctgccttgtttttcttaacgttttacttctctgcaagaacatattttaaaaagttgcttctacaatttaaagtacaaaagtaatactgtacaggagtaagtctttgtaaaatatttaaagaaaattatattatacaataaaaccccgcccccctgcattcggggcagcgacgctgggggaacgactttagaatttgcattgggtggacagcaaatacttccgtaaaacagaccatgaagctttccacttggagcccactgtggccccaatgcctttccctttcgctcctgctccaggctccgcctccgccgtgtccgggctgctcgccccgcccccgctcgccccgcccccgctcgccccgcccccgctcgccccgcccccgctcgccccgcccccgctcgccccgcccccgctcgccccgcccccgctcgccccgcccctggatttgctccctcaaagcggaggtgaggccggactgaggctcttacagtggtccctgctggcccttggtgacgggtcgcgtcagttccgacccggacccgtacgctgctgcgctgacgtggctcctggaagcagggctggcgtagggccgccatgttgcagcaggtgaggggctgagggcgcgctgggagggtggcggctcctgggactggctctgcaggttccgtgggactggagcccgcgtcccccgcgcccgctactcgaactcgaggaggagcggggcggccgggagtggagggctgtgggtagttgtctgaggagggctgctgggggttctgaggccgctgggggaggcgtgacccgtgcggcgcagagcaagtacttcttgcggctgtggggacgcccattgttaaccagcgcgagtgggggtctctctttcctcaacccttattgccggggtggagttgaggaggagcggcctgcgggcctcttagcttcctgacacccaggggtgcgatgctatcttgtaggaatcggcgacaccgccagagcctcgctttcaaattgctgtttccaaactaatgttgttggtgattctctcctttgtgctcttagagttaattgtagtccacatgttggcaaccagagactcgtaagattaataatatttttagaaaaaactactgtttatggtcacttagattgtcttaagtgtttttttctttcggttcacacaaaatttgttgagggattactatgactcagacacggttgtaggcccagggatagggttgtgaccagtacagacaggtttcttgccccgtattttcgggttagggaagtgggttctaggagatgggggttgggtggggagacacgataaattgtataaccaaagatattttcagataattgcaaaggcagggtgatgaaataacaagtgtccgaggataggacaactaagatttatggtcaggaaagactgcttatgaggagatgccttgagtggagaaaatctaataatggttaaattcagctgtattacaggaaaggtgtcccgatccagacccgaaaagagggtccttggccgggcgtggtgactcaggcctgtaatcccagcactttgggaggacgaggtgggtggatca

SEQ ID NO: 7272 - DNA, 6000 bp, Homo sapiens; identical to SEQ ID NO: 3669

SEQ ID NO: 7273 - DNA, 6000 bp, Homo sapiens
attttaaacccaggggtctcttaaaaaaaaaaaaaaaagccaggggtggtggcttatgcctgtaatcccagcactttgggaggctgaggcaggtggatcacctgatgtcaggagtttgagaccagcctggccaatatagtgaaaccctgtctctactaaaaaatagaaaaattagctgggtgtggtggtgcgcacctgtagtcccagctactccagaggctgaggcaggacaattgctggaacccgggaggcagaggttgcagtgagccgagatcacgtcactgcactctagcctgggcgacagagcaagactccgtctcaaaaaacaaacaaacaaaaaatctctgccctggtgaagttccccttataggggataggggatggacagggaatgacactatacaaaataaataagtgcactaaatacatttgttaaatgatatggccaatggagagaaataaagttgggagaggcccatggcgagcatggggaagtcagcatgttcaacagggtggagaggtggaacttgagcagaacccagaggaggtgaggagggtactgggaggaaatgcggggaagagcaacccaggcggaggacatagcacatgaaaatgccctgtggtgggtgtatacctggggtgtttaggacctctggaggccagctggaaggcaggggtttgtgctctgtggacactgtggacactgaggggcagtgaggccctgccagcaccaacatccttgctggtgtttcccaggctggcctaggctgtggacaactgggttcaggtaacttcactcccgtgccctcttcccagcaagtagtaggtccttggggaaggggcttcttccaaagctcagggcagatgggagtggggagggaactcgtgatcagggcacacatctccagatgacctctcccctgccccagttcccaccctggctaccctcttgttcctggagccaccaggggtagaatgagggcaatcaggcctgagtctatgaagtgggtgctgggcattgcggccacagcccctcaccaccttcctggttttaaagcactcccagtgacaatatggtttctgataacctgcagtacctgctgtctggggagcagctctggccacccatcctggcccctgcccacccatctcctcccaggaactctggcaggtccctgagctgtcagccagctctcctggcccccagtggtgtcctaaatcccagcagcatgtccatgagtgtgaccttaaccaccagatctcaattatatagaaaggagagaaacatttttttctttctttttttttggagacagggtctcactctcgtcacttaggctggagtacagtggcacaatcacagctccctgaagtctctctctcctgggctcaagtgatcctgccgctttagtttcccgagtagctgggagtacaggcacgtgcaccacacccggctaatttttttttggtatttttttttgtagagatggggttttgccatgttgcccaggcttgtctcgaattcctgggctcatgcaatctgcctgccttggcctcccagagtgctgagattacaggcatgaaccactgcgcctggcctggacattttcttagaacccactgtatgccaggcacttttgtacgagttattacctctaatcctcacaacagcctcactcgagatattatactcaagagatattctatgatataaatattattatgttttatgaacagaaaatagattcagagtagggaaaggtttaggttttacccaaaggcacccaataaacacatgttaattttagcactaaaaccccattttaatgattgctgggagtttctgcagcctgattcataattcaggagccagggaggtggggttagagaaaagagaggccatcaggaggtttgccctgggagctgttccatgataaatggtttcctatatctgaagagctcaatcaaggggcaaagagagataaccctgaaggtagaaaggaacttttgtttgttaaagcttcaggaagggtgactttgggttaatgggtatcatgactttgggttaatggacccctgtccatcagtggagcgggcgacctcaagaggtggggaacctctcatcactggcggcacgtaagcagaaccaacttttccatttgcccaagatgccacagaaggaatgtttcagtgagggaggttggcctggataatttctctacaagctctcagacttgggaacttttgaaaggctcaggcaagtacttgtgccccaaagtatctttggcagggttttttatttttatttttttagatggaatctctgtcgcccaggctggagtgcagtggtgcaatctcggctcactgcaacctccacctcccaggttcaagtgattctcctgcctcagcctccttagtagctaggatcacaggtgtgcaccaccatgcctggctaatttttgtatttttagtagagacggggtttcaccatgctggccaggctggtctcgaactcctgacctcgtgatctgcccgccttggcctcccaaagtgctgggattccaggcgtgagccaccatgcccagcctggcccaggctggagtgcagtggcgcgatctcggctcactgcagcctccacctcctgggttcaagcaattctcctgactcagcctcctgagtagctgggattacaagtgtgcaccaccatgcctagctaatttttgtatttttagtggagacggggtttcactgtgttggtcaggctggtcttgaactcctgacctcatgatccgcctgcctcggcctcccaaagtgctgggattccaggtgtgagccaggcaggaggtttttatctgacttgtttcaagctgcaagtctgtctcctgggtggggtgtttgcttttcacagaggaagggtggcccaggttgggtaggctggagtagaggatcggactgcatcagttctggtgtgacctcttacggttgccttactttgttctcagataaagcaaacgcacaaaaatttgttttctgggcttaacaaaacaggagtgaccagttaggtcagaagactggaacatcagtgaagtggatgtgtggtaggcggaggggaaagacttgctagaagccctcccgctgcggggggctccttcagaaatggctctgcctctagcagctctgcctggacactgagcagggaaagggtcccgacactcattagtaacagtggtaagtcagagaaccagccctgagcctgtgtccccagccctgccgggggccaatgcctactgagcacttcccacaggccagttcctgggtgatgagttttaccaacatgtatttcccttttacttttgaggaaaatgaaggtgggctcagtcacagagatagtgcatgctccaaagccagtgtctttcctgtctcctcggttggcctgccccatcctagcgatgttgtgaagattgggactacctctaaagcagcacacagtggctgctcagtaaatgctcaacactggtaggtgctgtgggccaaggtggagagaaacgggccatctggagcaggaagcagctgactgcagaagtcctgtctgggcccccagcagtctgggtgactgagcaaatcttggaacctctcagtctatttccccatattacataacacctggctacaaaagggcttttttcttttttgagagggagtctcgctctgtcgcgcaggctggcatgcaatggcaccatctccgctcactgcaacctccacctcctgggttcaagcgattctcctgcctcagcctcctgagtagctgggattacaggtgcgcgcaccacacccggctattttttgtatttttaatagagacggggtttcaccgtgttagtcacgctggtctcgaactgccgacctctggtgatccgcccacctcggcctcccaaagtgctgggattacaggcatgagccaccacacccggcctacaaaaggggttcttctgggacccgatcgtctaaactcttctccatttgaccccctccatcactactccacagctcaccggtcttttctctgttccttaggtgcccgtcctgtctccaggcctttgtacataccattcgtcttgccttgtttgccctgccctcacacttggcacatctggcacctcccctgcacattctaagacagcatccttccgtaccatttgacccaccccgttttttccaccacagtactcatccatattataaccctttattcacattttgtcttttatctcagtcaggaggaagcgagggcgggggactctgtgttgttccctaccgtaccctcagcgcacagtctggttcagaaaatactcgagagtgaatgagagaatgaatgaaggaaaaaatgagtggaggaggggtctttggccgagctaaagagcctgggcgccgcgggggcgggaagctctaggcagtgctcgtcgcgcaccgcccccagagtaaagcgaatttcagaagagggcgtggggccctgggcgtgtggggccctgggcgtgtgtgacccgggccaagtccaagtccgcaggaggctgcgcgggaagctgcttatagctacgacccgcggcccccggcctctagccccaccgccgccaggcaagggcagggacgccaggtcagttacaggctcgggtgcggcagccggcgaccaaaggcactgggcgggaggccggatccaaggggatactgctacgtagctgcagcggaaccggcaggctctgcggcgaaacacactgggacttgtagttctcggctcctctagacgctgtcgcgagcccccagataaagaggcacttcgcggtgacggggaactacatttcccagaaggccggaatatgttgggggtcaccgggaaagcgccccgactggcggcacttacccggctctataggtccggttccgggggcgcgtggctgcagcggggcccgcgtggtgcctcctgaggcggcccccggatgaagagatctgggaacccgggagccgaggtaacgaacagctcggtggcagggcctgactgctgcggaggcctcggcaatattgattttagacaggtactgaccgcaccggaccgccgcggaaactgggagagggatctgcaaggcccgaggggcgtgaaggcttgcggcgcctcaaacgctgcggggcggggccgccagttcccaggcaatgggggcgtggcgtggcgggggtgggggagccgcgtgcgggagcgccggctggtgtctgtgtgtgtgcgtgtgcgcgcgcgtgtaaacctcagattgcgtgtgtcagagacgggggcgttcctgagctcgtctgattgtgtgcctgtgtgtggccctgagattgtgtgagactcagaggttgtccgtgttagtctttgggattgtgtctcactgaaattatgtgatgctctgagagtgtgccggagagtgagtgtgagtgtgtatgaccgaggctgtgtgtgactgagcgtgggcgagggtgaaggaggccgattatatgtttgggagtgtgttgtgtggcccctgctcccgtccatcccccagggtcaggaggccagcttttgcccagaggcaagagagtggtggggaccctgcctgtctcccagccggccctgggcaggctgcagaccaccacccagccgtttcggggccataatgggtgcgaccggccccagaagctgggggcctggcttgcctgctgaggctgccctctgcagagtcctaggccagagagtgcctgtcctggcatctccccaggctcccaattccaatggattccaatttccaacctctcttgcattctcccttctatcaaagcttcctcttagatgctccatttacctttttcatcacccactcttcatgaagcctgtaaggcacatctctgccccaagcagcttctaatccagttctttcgctcccttcattccttactcacatgtgcatttattcactcactgatccagccagtattgat

SEQ ID NO: 7274 - DNA, 6000 bp, Homo sapiens
tgcccagcagcaggggctactcccagaattgccactgcatcaggcccgtgggttgttttcagctgccagtgataagtatgtgccctgggccacctctcggacaaggtgtctgaattggtgccgaccagcatcacatgtaattgccatctcgcaggtgctgctgagggtaattccgcacacctgtagctccgggaagagcctagtggggaggaggaaacgtggctctgaggtttatagggtcagacggtcagtatgttgggagctggcatgtggaggggcacagacaagggaagaatgggaggtggcatcagagcaagttttgatggaggaataggaattcaccaggtggaaagggcattcctggtggagggaacagcctggccttcaatagcttgtggtgttcagaaagcaggcagggaaagggaggcccagggagacaccagttaggggatgggggtggaggcagacgagggtggaggaagccatggctggagtctgcacggcctctgactggggtccctgctgtggtcagccctgtgctgggtgaggctggggtcacagctggttcaggccctgacaggaggggcccccagctgaggcccagcctctaatttggcagggcaggtggataggtctgggggggtggtggttaggaagcctccaggaggaggcagtgccggagctgagccttaaagagcttcgtgttgtcctctctgtctttgcactctgcacacactcactgaactgcgacaaatgaggatagctggtcagggcagaggcaggccggagttggggctcactgctgtcccccacaggctggggctgaagggcaggctctggggccgcagaatggggtttgtgtaccagattcttcatatggcagctgtgggactttgggcacgaggcctccgtctgagccttagtttcctcaagaggacctgcgcccaggtgcacctggggctccagccatgggtgcgtcccattccgggaagagctggcacacacttgtgcccccggggcagccatgagtgcacaaagggcagcctgtgccactgctggatacacgaccagctgagaacacgaggaccgccgactccagttaggaggatcaaggaagtgcctggtgggagcagaacagcaggtggggtgcagcccagctccctggagggatggtgggcacccatcctcaccctgctgcctccattagcaggccgagagggtgtgctctggaatcccatgagcacctgtgccacatcctcccctgtggctgacccttcttcacagttggtgcagctttgtggtctgtagtgcagggatcaattggcaaatccctttcccacccattccctggagaattggggtccttggctcagatgacagaccaacctgagttggaatcccagctccttggtggccgtcctggcctccaccccctcactgcctccgctcctcctatcctgcccacgcccactgcagggcctttgcacacactgtttcttctgccctcccttccggcccactccctcatatcattcagtcctcctttcagatgtcacctcctaagatgggctgccctgaccacctcatctataatggccccagtgcctggcacaggattggcacacagtagatattgtcagagatggatctgggttctgtggacaaggctgtgggggcaggtgaagagctccctcttccaggaggttgtttggggttcaaggccttgtttgggttgtaggcttctgtgctggtcagcgttgggccctacaagcgcatgccatgaggcctgcccaggatttccctcatggcctcacagaatacatcggccagagtcattaaagggcgcctgcatctgccttcagagagaggtttgaaggtagaactggggagggatgccaggtgggggttcaggtttcctgttgggtcctgatagaatcagggcaggagaggaagaagaagagggaagaggaggaacccaggcttggggaggggtggcagggcttcacaagcctggggaaggtgaactagggagcagttggggccaccatggcccagagtctatgcctcctcttccttcctgtgttcagagtgtgtgtgggaaccacaagggccttctcagtgttcatagggaagcccggttcacccatgggtgggccgcaatttgggtgccacagtgagcccctagagaccagctctcccagcttccaggacagggactaggggaggcaagagaggctcttccttaaattgtgcacccaaggtgcctcagctgccttactctagactggccccgttaactccccttaaaaaaaaaaaaaaaaagactcagtcgaatggtaatggagctccaacgtgaatactgcaagtatcaggcaactcactacctgactttccagttctaaaccattctaattgctgtagagagaactaacctttgttgagactgttgagtgatggatgttttacacacttgctttcccagaattcccacctctggagatcgtaggtgtgggagctcagagggtggggagtggactgtccccatcacacagcaagggaggggctaaaggaagagcagggcctggcatgcagccccagatagcccacttgggtgtgtctctgagggaggctgcagggctggctctagagtttcctttttcagtcttaacctggtgaccagcttccacagaaattggcacggtgactcatgcctgtaatcgcaacacattgggaggccgaggtgggaggatcacctgaggtcaggagttcgagaccagcctggccaacgtggtgaaaccctgtctctactaaaaatacaaaaattacatttcattacaggtgtggtggcgcacacctgtaatcccagctactcaggaggctgaggcaggagagtcacttgaacccgggaggtagaggttgcagtgagctgagatcgtgtcactgcactccagcctgggtgacagagccagactctgtctcaaaaaaaaaaaaaaaaaaaaaagaaattggccagtagatcagccccaggggagagtgagccagggtttggccaggccttgagtttcagaggctggccatggccagtggcacccaggcccttcccccttcctcggggcatcttagcttagtctgtgccctctgcccaagggccagccctctgttcccaggtcacaccccctcctcttggaaggccccccccgccccacccccatcagagtctttaatgactctgctgcccctggggctcagagagcaaccgccctctcccatcgcgcttcctcagtgggatgggagggggttagagcaggaagatgagacaaataaagacacaataagaggcaggaatatgtggtaaagccaagatgggtaaggggaggggacaggcttgactgttcacagtggccctggccctgctgtctcaggctagtatctgcttgttggtctcaccacattctaggctcagaaactggggagcaaagtaatgaaagaaccaggctgggaggccatggggaactcatgcctggagttcagctctcagtgtgcttttgggtcaaggacgcttccctgtcttaagtcactcatgtcagagcctttgccaagagcaatgctgtgttttgttttgggggtgagggaacacccgcgggctgaggggagggttgggccatgctagagaggccgtctgttgtccttgaacctcccaaagctgggaaataagggcctgggctggacggcggtggcgaggacaggttgcgagagagacatggctgggttttcttgcttagggtcctgaatagagagcaaggttgaggccgcagggaccccagcccccaatggactgctgagtcgctgggtctgcccagggttcaggcaccctctcaggttgcagccaactggggtgtggaccaggcagaggcgctggcctgcagtttggggcagaggcaggctttgctggtggtctacttggctgcaaaatcaactggccaggctctgatcactttgtgtgtgtgtgtgtgtgtaacttttacctttgacaaaagagggaagacaggcccaggcacctcctcaaaagaaccctagagcctgtcaccccttccttacccatcttctgtcctagggactgcagcccttcctggcttcccagggccctacaatgaatagtgggtcgggactcacttggtgactgctgggttgtgaggccttgagggggaggggcagacttcacccatctggcagagggacatcggtgctggcagtcaggaaacccttatttccaggcctcagtttcccggaagtgacctgttttcaggagtggcctcatcccagaccatcagccccgctgtggtgaggggtggccccttcctggggctgccctagaagggggaggtccctgcacccaccgcagctgccactcggcagcccttggccttaattaaacgcttcttgcgtactaagtgctgcacccatattatctcccttctaccattcgacgccagggagataatgactgtcctgttttctggaggagtaaacggagggttggagcggttaaggctcgctcagggtgccagcgaaccagtgatttcgaacacagagttctggtgtgttgggccaggacttctctgctttgaccctttaacgaagggggcgggagctgagggccagtgaccgccagtaaccccggcagacgctggcaccgagcgggttaaaggcggacgtccgctagtaaccccaaccccattcagcgccgcggggtgaaactcgagcccccgccgccgtggggaggtggggcgggggccggggccgggccctagcgaggcggcagcgcggccgctgattggccgcgcgcgctcaccccatgcccggcccgcagccccgaagggcggggcggggcgggacctgcaggcggggcggggctggggcggggctgggggcggggcggggcggggcgggcgcgccgcagcgctcaacggcttcaaaaatccgccgcgccttgacaggtgaagtcggcgcggggaggggtagggccaacggcctggacgccccaagggcgggcgcagatcgcggagccatggattgcactttcgaaggtatttttggaggcctccccaccagccctttatacaatgcctccgtctcctgcaggttctcctggggtgggcgggcatgcgggctacgcaacttgagcaggaaagagccccttcccgagggagaaggtgtgacagttaccagctcgctggggaagtggagggctacctccaaccaaattagtgtcccctgcaactcaagggggaagggtttgcttagagacccaaaagcagcatcccgacctaagagggtttggagggagagggtggtcttctctacattctctgcacccgctttgggacaggaccaggaggaagcagggaggagggcccgttgtccctctgccacagcgtctgccctattcagcacccctgcctattgtgggcatcttagacttttcaggaagacagtgggagccctagattgtcaaaattgtcagtttttctttcaggcctcagtttcccccatctatcgaagaggctcacacggactggggtaaagggatgggaaaccctgcagttgaaagtccattatgacttgatgacttgtgacctggggggtccacaaaccaggagagtttctacttgagaagccaggaagactggggctgccaccccatcctgttctgccaactgctctaggaaattcccctcctgcagtagcttccctgcctgggtacctgtcagtaggcaatgttgggtctccactcggtgccagctgcctgccaagcaaagcctcgggcagccgtaccaaaaggggtttagtcttttctgttgtacagatgaggaaactggggccagtgagaggaggctgttggtccaggctccacttcaagctggtggtgggcagggctgggagctcaggctggggatcctgagagcactggaggcccccatgggtcctgtagagcattct

SEQ ID NO: 7275 - DNA, 6000 bp, Homo sapiens
aaagttatttaacattttatcttattgcatgtcaagcccagggatagggaatacagaggtgaaaaaaattttctctgccctcaaatctggaggcaggacataggtaggggttaagaggagacaaacctgggaacacatatttataaccaggttaagtttaaaaccagggttaaatgtatgaacccagtattgtggaagtacatattagccaatgactaattccgcctagaagtgagacacagaggtgggttttgaaggatgaaaaggagctgaataggccaagcaaagtaggaagggtattactggcaaagagactaacatatactaaggcttagaataacagaaagcactagaacaggtaggtgtaaggaaaagaaaacctgtacccagagtgagaaaaaccatttcccttcatccctctatgctgtagttacatcatctgtaaaaataataatacctggccgggcgcggtagctcacacctgtaatcccagcactttgggaggccgaggtgggcggatcacttgaggtcagcagtttgacaccagcgtgaccaacatggtgaaaccctgtctctactaaaaatacaaaattagccaggtgtcccggcacatgcctgtaatcccagctacttgggaagccaaggcaggagaatcgcttgaacctgggaggcagagattgcagtgagccgagatcacgccattgcactccagactgggcaacaagagtgaaactccatctcaaagaaaaaaaaattgtaatacctatctcataaggctgtagtcaggattcagtaagataatgtatgtaatgccctcagtatggtgctgcctgcttcaataaaagtcagctcctagtgatgtctccagaacatcaaggagcatgaagctgatatttggcaattgagccagaatacatttgaaggagaggagtatcatcagatttttaaaatgtttatgttttccatgattaaaacatatgtttatatctgtttatatcagaagggttgaaaacattttaaatagaagaaaagagaatcttacctaaccctactaccacgcagagaggacttctgttaatatattggtgccatggtttccagtctttactcagtgcaattcttttctatgcctatgaccataccacataaacaagctctctgttttttctacatacaaattattatgtaagcagttttccatattattataatctctttgaacatatcattttaatgactcatattcatggagtggatagactataatttactcagccatttcgctactgttggacacataggttgtttatctttttttttttttttttactcttgtcaatataatgttatgggagaatatcttagcacataaggcttttttctgtacttgagactatttcctttagatagagacctacatgtagaattagaggcttcaagggtcttgattaaaggctaccaaattttttcctgaaagggtgtatttacactccttcagcagtatttgtttcactgtagccttaccagctttgagcattctcattttaaacaaaatcattgctaatgtgttggctgcaaagaacaagatcaaaggcacagtgtttttctcactattcagaagctggagaagagctcatttgtgtgtctcacatgcatgttctgtgttacaacctctcagtgcttggtttttatctgtttactgagggagggatcttcaggttattatcacatatagttaaaatagtaaccctttgtcatattttattttattttattttatttttttgagatggagtttcgctcttgttgcccaagctggagtgcaatggcatgatctcggctcaccgtaacctccacctcccgggttcaagcaattctcctgccttagcctcccgagtagctgggattacaggcatgtaccaccacgcccggctaattttgtatttttagtagagatggggtttctccatgttgaggctggtcttgaactcctgacctcaggtgatccacccgcctcggcctcccaaagtactgggattacaggcatgagtcactgcgcccggccatattttaaaagaaagatttttctttcttttaatgacaaacaaatgactttgtttgtcatttgcctttgaattaaggctttatgttctgatggaaataagtctacagatcttttcctttgcaatagcttctcctttcctgtagaaatttgacaggcaggactttttagctctctctgggtaagtcacctttccctctggacctcagtttccctgtcttttaaatggttggatgggtggagatgtgatttctcagcttccttctaggtggagattcttgggctctggactccacagtgcagctcaacattggcaaccctctccacatgctctgggactccagctgcggaatctcctctccttgagactgagagttcattcagcgatcgtcttttgagcatctaccacacgccaggcactattctagatgctggggatatggtagtgatgaaaaaacaaagtccctgccatcatgacctctagtaaagggagatggacaacaaagaaaccagaaagttataattcagatggtgataaacactatggaaaaaaatgaaacagggtaaaggattagggagtgccaggaagcaaggaaggagggaagttgcttatataggagggtcaggtgacattttagtggagacttgaaggaagtgagggagccggccaggcagatatccagaagagcattctaggtagtagttaccgcaagtgtaaaggccctaaagcaggaggccagcatggcttgagcacaaggattgagggggacaaagcaggggagagggacagagaagaggtaggtggccttagggctctcataaggacttggctctcactgagcgaaatggaaagcccaggatggttttgagcaggccagtgacctgattgcagctgttttcaaggagttagaaaagacctctaccctagtgggtactgcaggctctggctctgggatgagccacaccctgtcccattcctgatgagggaccttggcctctcctagccttagttctttatctaagaaataattccaaggatttagccaagtacccctccctcactgcagctgacctaactgggccaagcttttgtgtaagtggtagggaggagttggaaggggagggaggagagtggagccaatccagaggcttgaatgtttaatgtggaatttcctctctctaggggaccacaggtgggggcagcttgcagggggaggttattcagttcactagtatctagccagcacctacccatcctgagtctcggactcctggctcaggggaggtggggtagctaacaagctccaacaggcccaggcacagtcacagtggccagaattggagccatccatcctcccaagaatcaggcctgtcaggacctgcctccagaaacccactcagctgctctgttctcagggaaggtggcctttcctgattctgctccccctacctccagcccctgaattagcacccttggagttcaaaactattttccacggttggaattttgtatcaattagtaggattctttgactatttttcctctcccaccattctagaaactaacgggcctggtgagggctttgtctatttcctttcctgttgtggtcccggagtcccccagcacagtgcctggcacgtaaggggcactcagtaaatgagctgaatgaatgaaagataggggagtaaggaaggtaatgctgttcctttttacaggcaataaaacagaggcccagacagggtctgacctcctcagcagcagagcaggtgactgccttctggcctaattcctataatgggagccacccaggagcataggttcacacccaaggacctcccaggccctcccccatcttctctaagggaactgcagagccaggccctgcctgaccccagaaacaagactagtttcccaggaaaagatcctagggcaggagtggagcaagtgacagcttgttttttattttatttttattttatattttttgagacagggtcttgctctgtcacccaggctggagtgcagtggtgcgatctcagcccactgcaacctctgcctcctgggctcaattgatcctcccacctcagccacccgagtacctgggactacaggtatctgctactacgcctggctaatttttgtgtattttttgtagagacagggttttaccatgttgcccagattggtctcgaactcctgggttcaagcgatccatgcgcctcagcctccaaaagtgctgggattacaggtgtgagccaccactcccagacgtgacagcctgttaatagcaataatagcactttgaatataccagacactgcttttccacaactttttgagacatgttttgttagcaactccattttacagatgaaaaaacagaggctcagggtggtaagtggcatgccgaaggtagtggcagagcctaggtgctccaacccaggcagctgggctcagcccactccgatcctctccagctgcctctctgttacagcgcagaacatcagcagcatcaggagtcatgtgctcttccagctctgccttgagtacccgatgacctcgtttcctcagcggtagatagcgatggttaatattggctagcctgtagagttatcgggagaccaacgcacaaaaagggtttaataccgtgcccagcacatagtaagtggtcaatacatgttaattgttgatattcttgttatctgtggtgtgtctgggccgggagggagggctgcagggcggtgtctacgcacactttacaggtgaggtcatcccgcgggctgggggtgccgggcccctcgctggcccacgcccagccaggtgcacccgcggcgagagtccggtggcctcaggtcacaggcccctccccgccggacatttaaggagggacgccgggcgcaggcgcagacagcgcaagccccacgccacgcgtcgctggtcccaggcagcgagtcgctcgcgcgccccgccgcccgcctggcgacagctccgccgcgcacgcacatggaggggagcgcgagccccccggaaaagccccgcgcccgccctgcggctgccgtgctgtgccggggcccggtagagccgctggtcttcctggccaactttgccttggtcctgcagggcccgctcaccacgcagtatctgtggcaccgcttcagcgccgacctcggctacaatggcacccgccaaagggggggctgcagcaaccgcagcgcggaccccaccatgcaggtagcggggcggcgaggagcctggcaggtggagggccctggtctggagcgtgggggcagcggaggggcggggcctgcgtaatggtagtggcgggtaactggagggagggtgcattttggatggtgggcgggaccagagcaaaggggcctgaccgagaacctcagcgggtgggatgcgaaaagctgagctaaagtctggccttgcaggttaacaaaaggggggggaaaggaaagggaatggggccttggtccatgtccttccccctctccactggcagattttgaaagctgtgctaagattctctgaggtttagggctccaaaggaagtcctcatccctgtagctcccgggatggcgaggatttggggattgtggaacccagagtgaggaaccgcaccctggtcattgtgcccctacaggaagtggagacccttacctcccactggaccctctacatgaacgtgggcggcttcctggtggggctcttctcgtccaccctgctgggagcttggagcgacagtgtgggccgccgcccgctgctagtgctggcctcgctgggcctgctgctccaggccctagtgtccgtttttgtggtgcagctgcagctccacgtcggctacttcgtgctgggtcgcatcctttgtgccctcctcggcgacttcggtggccttctggctgctagctttgcgtccgtggcagatgtcagc

SEQ ID NO: 7276 - DNA, 6000 bp, Homo sapiens; identical to SEQ ID NO: 3276

SEQ ID NO: 7277 - DNA, 6000 bp, Homo sapiens
cctctcctcctaggctaggtcctctctccagttctcccgccttctctgccccccggtctaggtctctcccgctgactggttagcctgcatcaccactagctcccctcagtctcatctctctctcaggctctctactcctttcagccttggtcctctgccctcccgtctgggtgtctgagttgtggggaattgaagtgcttcctattgctatcctcctgccaaacaggtgaagtgcttcctgggcacagagatgacccggaggtgtcactagccctagtctccacacactaacacagctgacccgctgggccctctttcctacatcactgcagccccactggggccaacctctggtactgggtgggaataggcaataggcataggcaggcaggtttggagtacagaaaaggagaagctgcaggagcctgtgactggtatttgtgccactcctactccctacctgttcttccaaccttttcctctagaagctgagagaagagggtggcaataagtacttttgcctcattctgaagccttggaagtaagtacactttccctaggggtcctgtggaggatgagaaaagggaagctggaaaggccaggacttttgcctacctcaacaagggaccaagttcagtgaaagaagggttggcatccttgattgggcagcagatttatcagaagagctgtggcttcagggctgctcacctccccacccccaccctgcatctttccccagggctgggaaggatgcctaccagggacaaaaggagatgtgggaactggagccctaagcttgctagctgtcagaaggactggtgccacttgatgcccaggactcatgccaaggactgctgccctgttcccagccccttgcttgatggggaggccatttggcccatctggccaggagaggcagcagagggtgaggtctggcttttttatcttgtctccactccagggagctgtcaccatgcctcactcgtacccagccctttctgctgagcagaagaaggagttgtctgacattgccctgcggattgtagccccgggcaaaggcattctggctgcggatgagtctgtaggtaagtggacatctgtagccaggtagggtacaggtggctaggggaccctggggatgttctcactgcctctctttgtttgcccctaggcagcatggccaagcggctgagccaaattggggtggaaaacacagaggagaaccgccggctgtaccgccaggtcctgttcagtgctgatgaccgtgtgaaaaagtgcattggaggcgtcattttcttccatgagaccctctaccagaaagatgataatggtgttcccttcgtccgaaccatccaggataagggcatcgtcgtgggcatcaaggtgcagcccctggccctgctctgaatggaagctgggtgtgaaaataagcttgtgtaggaggggtagcaaggagaatcctgcctggattcaaccctctgcttgtacttcctctacaggttgacaagggtgtggtgcctctagctgggactgatggagaaaccaccactcaaggtataggatgggtgggcttgaggaccaaagaggtgttagatagttgatgctggtaaaagaggggcagagtaatgaggttggcactgtgcttgcagggctggatgggctctcagaacgctgtgcccaatacaagaaggatggtgctgactttgccaagtggcgctgtgtgctgaaaatcagtgagcgtacaccctctgcacttgccattctggagaacgccaacgtgctggcccgttatgccagtatctgccagcaggtgtgtgtgttgggagggtggtgagctaggtgccctgtatgcctggtggggagagagtcacaaggctttcttcatctcccctactgcccctcccaagcatctctgctcttgcctgcagaatggcattgtgcctattgtggaacctgaaatattgcctgatggagaccacgacctcaaacgttgtcagtatgttacagagaaggtgagtccacacctgggcacacaaacatactgcagggacagctcggcaggagtgtctgttccccagaacccccagcttagatccaggcacactttcccctagcactttttcacttcatcccggcacaggcctgtgatctgagcctgtactgagccctcacagtctgtgcccatctacccctacatagggagcatcgagcagtaaccagtgggggcccagacccttagtaaacctcctctaatccccacccaggtcttggctgctgtgtacaaggccctgagtgaccatcatgtatacctggaggggaccctgctcaagcccaacatggtgaccccgggccatgcctgtcccatcaagtataccccagaggagattgccatggcaactgtcactgccctgcgtcgcactgtgcccccagctgtcccaggtactacccagctccctaacctgctcctatccctaaggcccatcttcaggtccttcttgtggccttcaggggttccctatcctggaaaaattgggagtgaccagtcagtttgtcttctctcctccacactaggagtgaccttcctgtctgggggtcagagcgaagaagaggcatcattcaacctcaatgccatcaaccgctgcccccttccccgaccctgggcgcttaccttctcctatgggcgtgccctgcaagcctctgcactcaatgcctggcgagggcaacgggacaatgctggggctgccactgaggagttcatcaagcgggctgaggttgggagctacaggtggtggtgggtgggggcagcacccagaggctatagcctgggcagggcttggcacctgtgggctggctcagcctgcttactccacgctcccttttgcaggtgaatgggcttgcagcccagggcaagtatgaaggcagtggagaagatggtggagcagcagcacagtcactctacattgccaaccatgcctactgagtatccactccataccacagcccttggcccagccatctgcacccacttttgcttgtagtcatggccagggccaaatagctatgcagagcagagatgccttcacctggcaccaacttgtcttcctttctctcttcccttcccctctctcattgctgcacctgggaccataggatgggaggatagggagcccctcatgactgagggcagaagaaattgctagaagtcagaacaggatggctgggtctccccctacctcttccagctcccacaattttcccatgatgaggtagcttctccctgggctctccttcttgcctgccctgtctcctgggatcagagggtagtacagaagccctgactcatgccttgagtacataccatacagcaaataaatggtagcaaaacattctactttgcctgtctgttttacacatcaaattcccacctcccagtttctgatctctgctaattctatctctgggccctctgactctggaggtggagagggtgggatttgagtcttactgggcttcaagttatggaggaagggcacatgcagtcaccatccccagctcaggctcttgctctcttgatgtccaagtctggagtggggcaatgaggaagactgcaagtcttctagggactgccacatcagtggcactgggctgcagctacagaagtatggagtgaggccaaactggcaactcctgaaggcagatttgtgcaaggctcaaagcagggaggcagcaagacaggctgggataagagtgggtgggagtctctcccatctcgcagtgttaagcccagctgggacctggtaccttccactagggtgagccacaccagtaagggcaagcgagcacctggactcccgcccaaagaggaaaaccaaggctctgcgggctgccagggctgagcagggcatctaggaggttgccaagggctatggcccattttcatttggggtagaagtgggcacaaagggagccaattggagggtctgggtaaggacagctctggtgaggcctgatgctgaactttaaccactgggctgggttgtgaggtaggctgagaacctgggtctaagcagataaaaagaagagataacaagctgcgtgtgttctgtgtcaactggggaggctacaaatgctccaccctgtgtggcctgactttataataacaaaaatagcttgcacatagcaccaaccctgttctaatcactttatatgtactgacacatttcatacaactctataaagtaggtactattactatcatccctattttaatagagaaaacaggcacagataggcacagaacgatcttctcacgatcactcacctaataagtgatgaagccaggatttgaaccgcagtgatcagcatctagagtctgggctcatgacttttcaagatttttaagtgaagtattctgagttttccaagttggaaatgaattaaaacgtattttaaaatagcgagagagccaattgtgctaaaacatactagcttgctacctccgtgtttgaggctttgaggagagggcaccctaagaggagttctacgataaggataataagaccgtgacagttgacgttgagggctttccgtgtgccaggctccttacaagaacggcctcatttatgtaaatatctccattttcagatgagcctcggagctgcctgtagttgcccagctagtatttaaggactgcagaggttgcgctcttgattgcggggctagaagtgtgttctacagggaagcggggaacttcgttccagcagcgccgaaacccgcacggcccctaggctgtccctccgcgcccgggtgacttcctttcagatccccagcgaagctcccagcggagccctcccacccctcgcccgcttgctcccgtctgcgggtctggagtagcgctcgcgattggccccgatcaccgccgcggtcctgccccctcgttgcagagattccgattgggtgaggctcacgaagctctgcccccacggtggccggagcagccggaagctagcatggcggccgccggggctgcggctacacacctaggtgcggtgggcttcgggtggggggcctgcagctagctgatggcaagggaggaatagcaggggtggggattgtggtgtgcgagaggtcccgcggacggggggctcgggggtctcttcagacgagattcccttcaggcttgggccgggtcccttcgcacggagatcccaatgaacgcgggcccctggaggccggtggttggggcttctccgcgtcggggatggggccggtaccctagcccgtttccagcgcctcagtcggttccccatgccctcagaggtggcccggggcaagcgcgccgccctcttcttcgctgcggtggccatcgtgctggggctaccgctctggtggaagaccacggagacctaccgggcctcgttgccttactcccagatcagtggcctgaatgcccttcaggtgagactgctgtgcgggagggtcgggggacagcccccccggcaaggtggagactcagtgacggccctgatgctccttcctgtagctccgcctcatggtgcctgtcactgtcgtgtttacgcgggagtcagtgcccctggacgaccaggagaagctgcccttcaccgttgtgcatgaaagagagattcctctgaaatgtgagttactggggatcagggctgcttttcgcctctgagctcagttcagagctgagttgggtgggaggagcgggggtgtaccataaacgcagttaaaaacttactgttgaaagacctctgaatgaacagtgtgtttggtcagaaaaaaactactttcaaattcacagtcactaaatagcaattttactcgtaagacaggctacctaatcggaagcagttgatgcccatcagggtataggggaagaggtgggatatagtggaaagaacacagagtttgaaattaaattggatttgcatataggccctatttagtttgtttgtttatttatttattatattttgagac

SEQ ID NO: 7278 - DNA, 6000 bp, Homo sapiens
gccaggagcgcggggaggcggctgccttcgacctccgccaggtgagaggcagcgggggcgcgtgggacggtgagccgagaacccgccgggacacagagaagccagcaaaggggctgcggaggatccgggtccagggaggagagcgcggcgcgggcggctgagcgcgaagagggagtgcacggagcgctggggtcacccgaggaaggcgcaccagagccgagtgggggaggggcttcctgaaggccgtaattgcagttctgagacgtttaagcatcagtagaagttgggttaatgatcagtaggaaagggaacagcagagggcacagcataagcaaaggctctgaggcaaagagagctggactgatctgaaaaactgagaaaaagatttaatgaggctggagcacaaagtatgaggaagatgggcaaatgagggggctggagaacattctagagcctattgagaagcttggattttatagattgggcagcagagaccagtggagaccatgaacagccctcagtaggctccggactgtcagaatagcctttggaaggaactcctttgtggctgcgtggtgcctggagtgggggggcaagagcgggagagaggagaccagtgagaagttacagattttagggtaaatggtaatggggaaaggaggtgataataataatagcaagtacctacccagtgctgctagagtgtattttacacgttaactcctttcatcctcacaaaagctcagtgagattgggactgttgttattattattccctttacgcagtgagagaactgagacccagagagattaagtatcttgcccaaggtcacactttagtaaaaggcaaagtcaggatttgaatccacacacttatctagtacactctaagacacaggggcagattttagtaaacagtaggagatggactctcagaatttggtgcctggggagagggaagaggagagagatgcctggtgacaagcccagcccttgcctctccacaggagagtgggaacaatgaggtcatcttcatggccttggacttggccagtctggcctcggtgcgggcctttgccactgcctttctgagctctgagccacggttggacatcctcatccacaatgccggtgaggggcagcaggccctgcgtgggggtggggtggcgggtggccaggggcaactgccccctccagcgggggccctgctggggccagtggacacatgggaaggatgcccccttctcccatctcatagatagggatgccaaggctgcagagctccttctggagcagccgctcacatttagcctctgccccaggtatcagttcctgtggccggacccgtgaggcgtttaacctgctgcttcgggtgaaccatatcggtccctttctgctgacacatctgctgctgccttgcctgaaggcatgtgcccctagccgcgtggtggtggtagcctcagctgcccactgtcggggacgtcttgacttcaaacgcctggaccgcccagtggtgggctggcggcaggagctgcgggcatatgctgacactaagctggctaatgtactgtttgcccgggagctcgccaaccagcttgaggccactggcgtcacctgctatgcagcccacccaggtgaggtctggttctttggcttccgattcccctctcctttccttgccccatcctgtgccccccacaccactaccgcctccccaccctccatccctcattgagtcacagaatctcagggcagcaaggaagcatagtccaaggagagacctgttccttgctgctcttggaaccaggttctcctggtttaggttcttcctctcacaccacaagcctgggtcctcagccctggggggtatatggccatgaataagacctggattcccacccccaggagccatctgcactgactgaactgataatgatgatgatgatagctaataattcatccaagaagcatttaccgagtacctactctgtatcaggcattacttgcagtgctggggatatagcagtgaacaaaacaaagaccctgccctcatagagtttgcattctagtttggaggagagggagacagccaataaatatatacgatgaggggtggtgatagagtgctctgaggaaaaaggaaacagcaaggggcaaatggaacgggaatatggtgtggcagtcaaggaagacatatctataaaggtgacatttgaacagaggtctgaaagatacatggctcactggggagatgcccagaaaaagagagaacagtgcaaataataagtgcagaggggctggaagcggtggctcatgcctgtaatcccagcactttgggaggccaaggctggtagatcacttgaggtcaggagttcgagaccaacctgggcaacatggtgaaaccccatctctaggctgggcgtggtggctcacacctgtaatcccagcattttgggaggccgaggcgggcaatcacaaggtcaggagttcgagaccagcctgaccaacatggtgaaaccccatctgtactaaaaatacaaaaattagccaggtgtggtggcgcgcgcctgtaatcccagctactcaggaggctgaggcaggagaatcgctttaatccgggaggtggaggttgcagtgagccgtgatcacgccaccgcactccagcctgggggacagagcaagactccatctcaaaaaaaaagaaaaaagaaaaaaaaaagaaaacctgtctctactacaaatacaaaaattagctaggcattgtggctatcacctgtagtcccagctattcaggaggctgaggcaggagaatcgcctgaacctagaggtggacgttgccagtaagctgagatctcgccactgtactccagcctgggtgacagagcgagactctgtctccaaaacagaaaaaagtaagtgcagaggccctaaggcagaagttcctggtgtgcttgagaaaggctaatgtggctggaacagagtgaggggggagagtggcaagaggtgaggtcatagagaggcactgtgtcctgtagggtttggagggaggttcactataggcattctggcttttactctgagtgagataattggggatccagagcaacactttgtcttatggaagaggttataccaggataacaagatctgtcatattcatattaccatactgcattttagatagtcactgcctaaggctcattagtaattataatagcgatgatcacaattagcctttattaagtctttattacactccatatcactaatgtccaaaatagtggctggtatactgcaagtacttaataaatgctggttaaacaaggaacaggacttgagctagaagaaaagatggagagagactgagaattgtttcagacatgggacacagcatgaacaaaatctgggatgtggggtgaacaagcagtctggatggaagcgaagaggcttcatgcaggaaatgagtgaagtcacctcgcagaagccccgaatgcctggtaaatactatcctggttcccttgaaaccagattctgtccctgttcttctagctctgttctattttttttgttgttgtttttttttttaaagagacagagcttgactatgttgcccagtctggtctcaaactcctgggctcaagtgatcctcctgctccgcctcccgagtagctgtgactgtaaatacacaccactgtgcctagcccgactcctttctttcttcctgcctacagggcctgtgaactcggagctgttcctgcgccatgttcctggatggctgcgcccacttttgcgcccattggcttggctggtgctccgggcaccaagagggggtgcccagacacccctgtattgtgctctacaagagggcatcgagcccctcagtgggagatattttgccaactgccatgtggaagaggtgcctccagctgcccgagacgaccgggcagcccatcggctatgggaggccagcaagaggctggcagggcttgggcctggggaggatgctgaacccgatgaagacccccagtctgaggactcagaggccccatcttctctaagcaccccccaccctgaggagcccacagtttctcaaccttaccccagccctcagagctcaccagatttgtctaagatgacgcaccgaattcaggctaaagttgagcctgagatccagctctcctaaccctcaggccaggatgcttgccatggcacttcatggtccttgaaaacctcggatgtgtgcgaggccatgccctggacactgacgggtttgtgatcttgacctccgtggttactttctggggccccaagctgtgccctggacatctcttttcctggttgaaggaataatgggtgattatttcttcctgagagtgacagtaaccccagatggagagataggggtatgctagacactgtgcttctcggaaatttggatgtagtattttcaggccccacccttattgattctgatcagctctggagcagaggcagggagtttgcaatgtgatgcactgccaacattgagaattagtgaactgatccctttgcaaccgtctagctaggtagttaaattacccccatgttaatgaagcggaattaggctcccgagctaagggactcgcctagggtctcacagtgagtaggaggagggcctgggatctgaacccaagggtctgaggccagggccgactgccgtaagatgggtgctgagaagtgagtcagggcagggcagctggtatcgaggtgccccatgggagtaaggggacgccttccgggcggatgcagggctggggtcatctgtatctgaagcccctcggaataaagcgcgttgaccgccgaagctgcgctcactcctgcctcaacgcgccggccccgccctccgccgccacacttccggcggggctgcgaccgcagaggggcgcgggcgagcgagcgggcggccggccgctgggggtggcgggataggctgggcgcggccggcgctgcagacccgctgctgttgtccgggtctgtgcggtcccgagggccctccgtgccgccggcgccatgggcaattgccacacggtggggcccaacgaggcgctggtggtttcaggtgagggggcggcgaggaaggtgggagctgtggagggtgctcggggtgggtgcagggctggggagtgcacggggaagagctgggcctgagtccaccgcgcggcgcagggcgctggcccccgggccgcacctgaggccccttccaagagagatctcgtgctcacgctttccttgctgcgcaccctcgggcacccaccaggggctccccctcccgctgtgggttttcctgtgtttatttgcttctcctccccctccctaggcgggcctccccgccgctctactgtgaggttgggggtcccgaactgaagccgcggggttccaggagggagggaactggtggttccgggaacgcagaggtttggctggattccagcgcccgggatggggggcgggtcgcgcagccctggagggcaggtgcctgtatggggaggggccctgaaacagaggtcgtttctcggcacagtcagacccgttaattccaagcaggctggggcttgttggggattaccggcactgcccgcccaggagacgcggatgcggcctctacaggttgggaaacccggttctgggcagtgcagtttgggattgcaaaatgctgcaagttccagaatttctatctaggtggggcatggggactgcggtactggggaaaaggaactgctattgagattttatatttggggcgctttgagaagcggctgacaccttgcaagccaccgggttgtgcagctccttgctctcaggagctgggggacgggggtcctggtgcctgacagcttggaggcctggagctggaggaatttctcttctctatcttcccactatcagtgctgattttttcagcctgcgtgcagatttggtagaactggttactgaagagatagaaggggatagaagccctga

SEQ ID NO: 7279 - DNA, 6000 bp, Homo sapiens
ctgtctcaaaataaaataaaataaaataataataataataataatatcaacccctgacctaaactacttgtgttatctgtaaattccaggcattgtatgaggaagcattgcaaaagtttctgttctgttagctgatgcatgtagcccccagtcatgttccccacgcttgctcgatctatcacaaccctttcacgtgtaccccttagagtggtaagcccttaaaagggccaggaatttctttttcagggagctcagttcttgagacatgagtccgctgatgctcccagccgaataaagccacttccttcttcaacctggcatctgaagggttttgtctgaggctcgtcctgctacaccatggctcacagagattgcagatagatcgtggggtagtcacagtatctgtaaagtctggggtgtcacctacaccctgatttctcctcacgtgtgagtatccttcaagctgggcctttccacatcagccactcctgccttttcctctcttttagaaaaaattatctgtgaagtctgaatatacaatgagttaagcagggttagcaacagaaacttaaatcgatgctaatctgacaaatacttactgattttaaacaattattactgtgcctctcaatggggttgtggaagcagcaggggcccatggtgaagactgagggaattaattatggggcttagatagaaagtgctataaaagtcttagttattgttattggcattagcatttgcccagcaagtgcttctgggggtgtttggggtgttatcatagagtgagtggtgtggtgaggctgctgccgtaatacctgactgagagataatgggagttcaagtcaagaggatggtggggctggggagagggaggtgggagaccgggtgatggggtgctaggaggagggtttagcaaaggcagaaggctctggaggaatgaggggaaggagctgggaaaaatgaccaatgacaaaatgaacctacttccaaatgtttctggcctttcttagggctgaacctgatctgttcctcccccaaaccccccgcactcccaaaaggaccttgtctggagttccctttagcttgcttcatctggatggggtgggcctgctaggggctcccatggagacctccgtagagatgagcccagggttcacagtggcagcaagtcctgccttggaggtgccactgaacatgaatgtagagtcaccagaaccatgccaggaaaaactgggggtcccaggaaaaaccaggggtgtcggggaggtgctggtgggaatggagcaagatgacactctaaggactgaatattgtcagcattttcctgggcctgagaaaaagcccacaaggaggggtgggccttcttctttcgttattgtataaacagggcagagacaggacagacagatggcaccaagggcttccggagggagagcctgggattcgcatggttcggtcctggctggctccacaggggactcactgctggcctttgagacttccaggaagtgggttttcttggtggtgtttggggcaggtgtaaatatttatgtgcccctttcctcttaaagtgaaagcttgtatttattctgagccccagagcagcttctaagccccactatttctgggctcaagcaggtgaacaaagaaaaactattgctgtgcggtgattgccaggcagcctcttcccagctgcccaggacctgtcgcccttgacatctccctggctgtccctatacaccaccagcaccaagcttcgcaggtgcctgctgggtttctggcttgcatctcttccctgcggccaccagctgacgcctgcattcacattctaaggaacccgtctgtcccaaccaccacgacaacccccttcccccctactcttacctgcagcccacgcaggtcacagccattagatccttcccctgaagcgctgcttccctcctgccgcactcagggctccctcctgccttccatgcccaggacagggcctcccggcctctccaggtctctggagcagagaggttgtgccttcctcatgcggtcaggctcaggctgggaaggagcggcccagaggcggggggaggcacgggtgcggggctgcctcttccccggtagtggacgctgaagcctgtccacctgaattggaggcggggcggggcagtcgactgaccgccaggcaggggagcagggcgcgggctcagagggagggagtgggaggccgaggaaggacaaggtgcttgtggcgatgagtatcagaaggcagagcggagctgctcaagagaggctggctctgtggaggtgaggacctgcaggtgggcctggcctctctgtgggatggtacccagggcaggaggaagagaaacacctgtttagagagagggggagggtctgggccagttgtgtgcggactctgccatggaggcagggggaaccagggcggggccgtctgtgtaattctaatgtcatttgctaatggtggttgcccgcagctggggagcaagaggggaggagatgggaccacccggccagagagaggaggggtcgaaggcccccttggaggaagggcccagcgcacagggcctgcaaggagttggccccttccccacccacagctgggcagtgcccactgagatcatcctccctacttcacaaacagagacacaaaggccagacagcttgaggttaaggagctcggtcaagcccacaccacagtacagggtgggggccgggatttgacccaggtccacagggtgcccactctctaggcagcacctgcacagaacagggcagtgccatagggaggggctgcgcgctgggcaggaatgcatcttcggctagaaagagtctagaaggaagatcagaagtggcgagactgcacaattaagaagtgctaagaagtcacactggacagacctggtcttggtagccaagcgctgaagtcacccctgcagccgtcctccgctttggcgcctcttcccagcgtccctgcccccctcctttggccctcctggaaaggacactttgcgttttctgttgcccttgcctatacagcacaaacatgctcatttaagaagtggaacgtgggaggcagcagacaactgtgttcatctgaaaggaggaggccccactcccgtgcaggcgctgcccctgggggtgaaattcccaagcttgttggggattctcccgcctggcgttgccgctctgaatgccagcacctaacccctaatgtccctactgcagccctcccagcatcccccctgcaacctcccagcaactccctgtacccctcctaggatcgctcctgcatcccccattatcccccccttcacccctcgcggcatcccccctgcacccccagcatcccccctgcagcccccccagcatctcccctgcacccccagcatcccccctgcagcccttccagcatccccctgcacctctcccaggatctcccctgcaacccccattatcccccctgcacccctcgcagtatcccccctgcaccccccagcatccccccatgcacccccggcatcccccctgcacccctccagcattctccttgcaccctaccagtattcccccgcatcccggcctccaagcctcccgcccaccttgcggtccccgccctggcgtctaggtggcaccagaatcccgcgcggactccacccgctgggagctgccctcgcttgcccgtggttgtccagctcagtccctctagacgctcagcccaaccggccgcacagttttcaggggtcagttcctccaagtacaaggggcggtggcttctctggagctgcaaacttgtcactgctatttcctttcggtcttctacttcctatcgttcctggcctcctcttggggagaggtagagccctctcctttccgcctcagggacaacccaaagcaagtactgcatgtgccctttttaaagttttaaataattttagcaaaaaggatattaacattaaatcaatttttaaactttttgaaaaaattatcaaaactacatgcacatggttcaaaacaataggctcctgctgggccctttcagataattcaaattgtcaccaggttggagtgcagtggttcgatcacggctcactgcagcctcgacctcccgggctcagctgatcctccacctcagcctcctgagtagctgggaacacaagcgcgagcaaccacgcccggctaattaaaaaaattttttttctagagatggggtcttgctgtgttgcccaggctggtcttgaattcctgggctcaagcaatcctcccgcctcagcctcccaaagcactgtgctcctttttgacgcagctttgaactgtagctggttaacaaaatgagaaccagttcttcattccttcattgtggaagtctttattgtgagactctggggacggagaggaattagacaagggcctctaagctgagctcacatcccagccggtcagtcagataaacgcatgggtatcgagtactgctaggtcccaggaagaaagagagagcagctttcgggatggggacgatggggaggtgtccgaggtcaagagaaagcggcacgagcagacccctgtgtgccgtcctgtgggcgcggggcggcaggggaggcgcacacctgctcctttgtgcagcctcccccctcccgcaaagttaaagagcaggaaagtcaggattcctcgctcggccctgccctgccggctgctccgcgctccgctcctccctgcgagcgtgtgtgtgtgtcgggggtccctcccctcctggctctggggtcgggcgcgcaccccgccccgtagcgcggcccctccctggcgagcgcaaccccatccagcgggagcgcggagccgcggccgcggggaagcattaagtttattcgcctcaaagtgacgcaaaaattcttcaagagctctttggcggcggctatctagagatcagaccatgtgagggcccgcgggtacaaatacggccgcgccggcgcccctccgcacagccagcgccgccgggtgcctcgagggcgcgaggccagcccgcctgcccagcccgggaccagcctccccgcgcagcctggcaggtgggtccgcttttcctctccgcctcgaacccacgtttctttccagaccttcttccccgcctcggggagggggatagaaccgctgcgccccaccgccctgcgaggaggcgaggaggtgcatgcgccccagcggtgggcgccggatcctgcccctgcgccctccacgctcagcaagagccagagctgaagctgaccggccagagtgggagacgaggaacgtggagtgctcgaagtgggcgggcgtagggggctcctttgtctattgttgcaggggctttgcaacctcttgaggacccgtgaaagaccccttaaagagggtcttgagcaaagtgctgtcctgcgctttgggaagagttgcttgctttcgtttcaacccatggtttatgtttgatctttactttgctgtcatcgcgtgcaggtggctttatgcaaagggagagttctggttgacacaaatgcccagacagctagagaaatctctgagtggcgcctaagtgggccgagtctccgtgcgcttgggtggtttcactgtcagagctgaggcgctctcagacacctcacaggccattcagaatgtatgtgaaactccaactccaacgactgtgctacgtggttgaaggatataaccatcatttgcttgaaaattgtgtacattcaaacttgttcttgaaaaaaagctctctggagctcaagagtggatttgggtcttgggctaaggagcagattttcttctgaactggggcttttgcatattgaattgttccttttccatttgggactctgaagaatttgagaggggtagaatttctgaatcagacattacaaagactttgtgtatgtatttttaccatcagttttgtccagaaaagtgaacctggtcaatggattatttatgagcctgctagctaactctcatcataggaag

SEQ ID NO: 7280 - DNA, 6000 bp, Homo sapiens
atagtagttacctaggacatacttacactaaaaagatatttgttagttatttactagaaattcaaattcacctgagtgccccgtatttttatttgttaaatctggcaaccctattcagatagcccttcaggtattgctttaaggtttaagatttctggtgatggaggaatcctaataaaggggaatgagaggttggagaatcactgattgtcgtttaagctacgaccaggccaggtgcggtggctcacacttgtgagcctagtaatttgggaggctgaggagggaggatcacttgagatcaggagttcaagaccagcctgggctggagaaaccttgtctctaccaaaaatacaaaaattagctgggcatggtggtgcacacctgtaatcccagttactcaggagactgaggaaggagaatcacttgaacccgggaggcagatgttgcagtgggctgagattgcaccattgcactccagcctgggtgatggagtaagactctgtctcaaaaaaaaaagaagaggaagaagaagaagaagaggaagaagaagaagaagaggaagaagaagaagaagaagaaggagaaggagaaggaggagaaggagaaggagaagaagaaaagaagaagaagaagaagaagaagaagaagaagaagaagaagaagaagaagaagaagaagaagacgacaacgacaagaagaagcagcagcagcagcagcagctacacactgggtccctgtgttgctaaagaaccactctattggccgggcgcagtggctcatgcctgtaatcccagcactttgggaggcgggtggatcacaaggtcaggagctcaagaccagcctggccaaggtggtgaaaccccatctctactaaaaatacaaaaattagccaggcgtggtggtgggcgtctgtaatcccagctacttgggaggctgaggtagagaatggtttgaacccaggaggcagaggttgcagtgagccgagatcacaccactgcacttcagcctgggcaacagagcgaaactccatctcaaaaaaaaaaaaaagagaaaaagaaccactctatcattgctaggctatgcctgccaaatttctagtttttctgtcactttaaaactatcagtggcattcccagtgacctggccagatgaccctgctggccctggggccctctagccatttcctgagttgctgtctctgtcataccaagtttggtcacagctcaaaggctgtgggatggcagtgctcagtgatcactgccctgccctgcaggcctttcccacattctggttggttgtttctctctcctgttcttcattcccataccagagaaagtactgtgaggcctgtgtacccacccagccagcctcccataaggcagccctgtgcacgcatccccttccagggcagagcacccaatttgcaccttgaatttgactccatggttctcaaaaggagattcacaaaccattgtgtagagtcccttggaaggcttgttaaagatgaaatttctaagtcttatcaggactgaggaaggaaaggtactggaacctcccccaggtgattctaatacttgccttaatcagaaagtcatggactcccttgtctgttacccttctagaagtacctgggccttaggaatgggaagcagattgtctttttttaattttttatttttttgagacagggtcttgctctttcacccaggctggactgcagtggtgcgatcacgctcactgcagccttaacctcctgggctcaatccatcttcccacctcagcctcccaagtagctgggactacatgccactatgcctggctaatttttgtaattttttttttgtattttttgtagagatgaagtttcgtcatgctgcccaggctgatctcgaactcctgggctcaagcaatccacccgcctcagctttcaaagtgttgagattagaggcatgagccactgcaccctgccagattggtctttattcccaggaatgttcagactcgagggtgctttttcctctttccctcttggtctaagccactgtggaagctgtggagtattggactctgtaaatactccaaacagccaaactacttaggcttaatggttaactactgggcttaactacttacagaaaaatgatttctcccctctgtcagttctaggaaagaggactgttccagggatttatatgaccttgcacgagtcatatgacaaaattctttgactctccagcaggggcgccattataccatttttcttatctgaagtccctgctcagcacctgaggccactctgcatggctcctgatcatcattaacgttctgctctacgatgtaagaccttcaaaagcgcagagcttgttttattcatctatgtatcaccacttaatgttatggaagcattaagtggtggaagcattaagctggaagcatcattcatcttatagacatcatagctttgtagagttattataacaattttccacagatggcagtagagtgactagagaagccatattttccctaattcatgacaaagccaccatattggcttggctgcaactggcatcctcaatacttagaatacttagcacatggtagatactcaataaatatctgctgaatacatttccccaacattctgatgacaaaaatgtcatacagaaaagttgaaacaatagtacaatgaagatctatagacccctatttagttgaataaatgttaacatttgctatatttgctgtgtgtttatgtgtttacttttcttgctgaatcatttgaaaggtagttgcaattatcatgacacttgacccataaatatttcagcaggcatcccttgagaattagaacattctctacataactgcaataccatgatcacaactaataataattaatcattatttcctaatatcacctaatatccaattgtagaagttgctggtggtgctctactcacacatccttggcctacccagaagttacctgcaaagagttcccatatagccagtgacttcctgagcatcttttcctggacatgttggccagcttgagagagtacactttgccctcacagggcaggctgaaagtgccagagagtcaacaccttgagagtgtccctcagccggagatggagagaagttgcttccttccctatcagtagttgattctgaggtatgctgcacagaatacaacttgtccaaagctccagggatatagttgctcacggtagtaatctttaacacattctttactagtttcctcccttccctatcttacttccttactatgcttcctgagatcacttttttttttttttttttttgaggaagggtctcactctctcgcccagattggaatgcagtggtccaatcttggctcaacacaacctccacctcccagcctcaagggattcttccacctcagcctcccaagtagctgggattacaggcgcccgccaccatgcctggctaatttttctatttttagtagagacggggtttcatcacattggccaggctggtctcgaactcctgacctcaaatgatccaccctcctcggcctcccaaagtgctgggattaagggagtgagccactcaccgtgcccggccgagatcacctttaaataaactattggcactcaaagctctgtctcagggtctattttggaggcaccaagaaccaaaacatcactccattgctaaattcattttaaaatgacaatcttggatccctggagaggcaaactcaaaacctgtttgggtggtgcttgcaacccagccaacaggagctgctcttagctctgatttttgcttgaacaatgctatagtgaggttgtgttgatttaggatgccctgctcagcctatattaataataatagtaataagagctactgtttaccaagagcttactgtgcggcagattcacatgcttcatttcatttaatcctcacagtgactccgtagggagggtactattactatttccattgtattgatgaagatcctgaggctcatggaggttaaataacttttcaaagttacatagctagtaagaggcagattgctggtgtgcttcagcagtgtgttaaaatgtgtagataactataaatattcttctgttatatttttgtgtaaatgggaacaatagtacttggcagataaaatttgcatcgttaacaataccataaacatagtgtaatgcaaggatctcccaatcaggtgagagcctcaagaggataaaactgttccctaggccaaggtgggcagattgcttaaggccgggagttagagaccagcctaggaaacatggcgaaatttcatctctaccaaaaatatatatattaacaaagtttagctgggcatggtgactcacgccagtagtcctagctccttgggaggctgggagcagaggttcagtcagccacaattgtgccattgcattccaatctgggtgacagagtgaaaccctgcctcaaaaaacaaaacaaacaacaacaacaaaaaaacggctccctgccatgcctggcttggtacagcttatgcactgggcttgggttactagtggtaactaagacttttccagcattatttaagttgtgtagaatcttccaatgttttgacctctgttaaagtcaaacttctctttggactcgtcccttcacaatccccaggctagatgatcaaaacgcagccatcttacttaaatatgacaatattcagtgagatgcgctacagatttttgcacaagttcaagctttcttggaacaacacatccctgttagtaatatccggccccacctagtaaccgaggtagacatagaaacttagatcttaagaagatgtctttcccaattactatcttctctaagactccataaagaaaaacagactttgaacccaagttatcttatttatttgaccctgctgtcataaagcgttcaaattcaagtattataaaggattgtaacagggaaagcatttagggttttcaggcagaggaacagttggccaaggaagtcagcttctcagagctcaagaggtaagtggtaagactgtcttatatagaaagtagagagtcatacagattaaaaacaagccaagtgaggggaatacattttgaaaagttgctgtctcggtggagtggagggaaagagaagacatagatttgtccccttaatagggctgggtgaggtctggcaagaagcctgcactctcagtttttattgagtacttgtagtgcagagcgcttgagaaaactctactattgaccacattctgcagtaatcactgttacaacactgtgatagaaatctttttggcaaatatttaaaattacaaaagaatcaatattagtagtaattgcatcttacgaaaagattgatgcaggcttgtctgccagaaagggtgagcctggcatgaatgaaacttactcctgtcagggcacgcctgggacaggggaggagtagagtaggtataggtatatttcagctcttgtaaattaatactggtgttaaggggagagaactcccagtggccagggactggaaaagattaacagcagcttttttttatttttttattttttatttttattttttgagaccgagcctcactctgtcgcccaggctggagtgcagtggcataatcttggctcactgcaacctccacctcccaggttcaagcaattctcctgcctcagcctcccgagtagctgggattacaggcgctcgccaccatgcctggctaattttttttttttttttttgcatttttagtagagatggggtttcactatgttggtcaggctagtctcaaactcctgacctcaggtaatccacctgcctcagctcctaaagtgctgggattacaggcatgagccactgcacccagcctaacagcagcttcttaaaggaaaagaatattaatctaggcagtagattgggtagtagggtggttgagagtagggtggttaagagcatggtcttgggagtctg

SEQ ID NO: 7281 - DNA, 6000 bp, Homo sapiens
tctctttctgttctttgtataacaggacagactactggcagcagccgggtttttatgttgtcttttttccttttattttttttaaagaaattctttgctgggggaagaataattcacatttaactgcatgtaattttccccagtgaggtcagtggaagctgagcagccaaacagtggcaatccttgcttaatcagcaggaagagatacaaactaataaatgcaggacagaagaaaatgctggaacaaagaaaaatcttttagagaaaagattaaagaactaagatccagaagagaaagtttatttcatgaatactgcaaaagaataaggcacaggggaataaaaggtagattaaagttcacaccacatactagtggtgctcttaaccaaaatagcattaaccagagtcagacacaaccctgaagaccatttggttcaactccttttgtttgttaactactgagaaaacaggaccagagaaagtaagtgatgtgcttagaagtggtattaaaagctgagtttgctccctgactattggttcaacactcttttcactaatataggaccaaagagcacctacatcatgcactgaaacatacatatatcacataagtcttctatttggtgtcagtggtgagggacacaaatgaattagatgagggtgatctttaactgttgttcttactgaattctgatcaaaaagtaaagtagcacctttgggaacctataactaaaacactgtggtaccggtatatgactaaacaaacagatcaatggaacagaagaaaaagtccagaaataaatatcaaatcagtggaaacaagcattggaacaattggatagacatctggaaaaaagaaaaaatttgatccatacttcacactatattggaacaccaaggaccagagttctaaatataaaccatgaaattatacaagtaatagaagaaaatatgagtaaattcctttataatctggaagcgggaaaaaaccttcctagctgagactcaaaatccagaggcaataaaaagggaaatcaaattatatgaaacttttaaatatcacacacatgcaagtgcgcattacacacagacacacacacctcaccataataaagccaaaagacaaatggcaaactggaaaaaaaaattaaaacttaaatcaagacaaagtgctaatacctctaaaatttaaaatgctcctaatatggggcaggaaggggaagacccaaaacacaacttttaatagtgcaaaacattaaaaagacagttacaggagaaaacatttaaatggtctttaaacatatgtaaagacatatactccccctcataattacagagatgcatttaaaattagatggagatacttgcctatcagatggacaataaatcccaaagttcaacaacaaagtatacagtgaggctgtatagaactcgacaccatgatacactgttggtgggactgcaaaatggtataatcaatggagaggaatttagtaatgtctggaaaaattccaaatgcatttacccttttacccagcaatcctacttctaggaatctttttcaaagatttactggcaaacatataaaattatttaggtacaagggtattcactgtggcattattcgtaacagcaaaagtctgaaaaacccagatgtccaccaataggggactggttgaataagccatggtacattcccaaatggagtactatggatcaaacagtgaatcatacagatacctatatactgatatggagtgatactcaagatacagtaagaaaagaagaacaagttatctaacagtatgtatatatgtcaccttttatattagaaggggggataagaacataccatacatatgcttacattttttttaggttttcaaaaagaaatgttaatgatacaacgaaaaactaataaaaacagttactaatagcagaaggaaggaaataggatggaaaagacagagaagcaagatttatctgaatatacattgttatatatataattttgacttgtgatcctgaaaagctgaaaactgaaacaaagtttatatcaagttggtgatataaaaatacacagaaaagaattatttcacattgcattagaacacagaatttactatacacttttagtaaaataaagcaagcagagctacaaacaaattttaaactttattcggtagtctataatctaattgtagcaatcaatactggtattattttgaaattattgtgagatgatgcaaatgagcaattatgtcaatgatatgaggaatcacttatagaaaatatgggggacagaagaacaaattaaatcttcccaaagagtcaaagagaaaactccaagatgagagacattttaggaaataattgactgagttttggcaacaagccagtggcataaagaaaaaaaggagtagggaggtgggcaaagaaactgattcatttggattttgacttggtaatttctatgttgttatttctttcatgcttttaaagtactttattgagtactctcagttgtattcagcaggaaaatcagtctaaatagccaaccatattaccaaaaataaacaatatctgactctcaagcatagcaaatgttacctataataatggaaaactgaaaccactgattagcgtgggatagctattccttggcagatgctttgtgatacctttcacaatgttggggtaatatatcctaggacacaaaagaatacgtaaattaatttactgcttaatctagaatgtaaaagttgcctaactatcattactgacctagacagcctaatagaaaatgtaatgagtctgaataatatttaaaataagttgtaacacatacttatgcctctaaaaaatattttttttgagtaacagtaatacagtattattttatttcatgagaatttcttttatttatttatttatttttattatactttaagttttagggtacatgtgcacaacgtgcaggttagttacatatgtatacatgtgccatgctggtgtgctgcacccagtgtaagagattgttagaattcaaatatattgaaatgatctccctttttctttttgagaattttacaataatctttgaataatatgaagcaatttggtatgtcccaaacttgaaatgagaaacattgccactactattgcactggaattttctattatatacaacagaaactaaacttgatacagcctaaacccaaattcatttgaatccattaatgaagtaacatgtcttttctttcaaacaaaagtactgttaagtgtaatgaaaatgcataactctacttctacactgacttaatgaggtttcctaaaattaagagatttaagtggtcggtaaattgaccctcagtcacatctttagaagtgcagcagtgtatatatgagcttaaatagaactctaaatgtcaatgcattccctatttccacaatattgctgaatgtagtatttttaacacattattttaagcactatgattgatggctggtttcctaaatccacagtaagaatccaattgagagttcaactgaaccctcaaagtaaagtggcaataaagcacccaatcaacaataaacttctatgttgcggactcttaaaatgcagatacttttcgaggaacattagttttatacaaaaggtggctcctagagtatagtttctcttgtaagaaaataaacttcaaattttaatacaacaaattctatttgtggtataatctaaataatgctaatataatttagagaaaaacaaacgatttagtaacaaggcataaagagactttccttacacataacatgctaaatattactcgtttttaaatggtgccacttggtaacgaaaataccgtaactttatttgctttctttaaacttgccattctggaaatcagatttgtgttttaacagatttacacaagcagtccactgaagagtggagcaaaatttatcataaatctgatctcactttataaaactcatgatgaaaaattttccttttatatcatttcatgtaattttaaaactataaactactttcccagaaagatgaaatgtgcaacactctgaaatcacctaaattgatactgctattcttaaaacataaaatcaaataaatggtcattcatacagcaccaaaaatgtctttggaaaaaacaatactcatatccacttaccacccaaggttgcataaagaaaaaaaactttaactccaaatatataaaataaaacatgtttattttacataggaactgataatctgaagtataagatgctaatttccaaatgtatcctggcttgtgtgtagccttggtcaaatgatcattgtatcagaaagataaagaaaaaataatcgtatttcagtacttctatacatcctaaaagggaagacggaacacttaagtggttgataaatttgaaaagctgattaaacataataatcaccatgttgggggaagacataaaagtcataaaacagattttttataatattaaaaaagtgacatgaaaattatacaattttagaaaggaatataaaaaggcaggagttaaaaaatagtgggactaatatcatagaaaactatccatgaggaaggtcaaatttattttcaacatgtaaaaaggataaagagtagaggtattttaaaaattcacagattcttaatgaggcaaatgttaaaatatggaacccaatctcagacaaatacatagaaaggagtaagggccaactctcatgcataaggtatcccatcctatagcaaatcagatatataggtacgcttgatgccacaaattttttaaaaaattgtccattttgttgcgtgtgcacctcttgccataaatttgagtcagcaccagcgacagctctgcagtcctcctatgtggtactgatcaggtggttgcagagcttcagctcacagcaacacaatgcagctgagcaggcaagcacagcccacagccagaaacagttccgactctacagaacaagacgacctttaagtttcccagagaaaatgagatgctgatgttgaagacgacaccacggtaagatgttatttaaatcagtaaaaggctgactttggaatctttttcctttttcttttaagaaaaagtcaacgttaggattaaatatatattcaatagcaagtgcatgcaccagaaatttgctgcagtgtcagttgagggatattttttatacattcagtcactctgtaaatatacatattgttttcctttaaaatgggcactgaaatatacagaaaaaaatcactttataaaatgtgaggtttataggtactgtgttggtctggatttttcaagtgctttttacaaagatatatttatcctaaaaacatacagataaaatttcgaagaactgctttaatatctaaataaaatctaccctatatacacacattgaattacattactgcagagattaaaaaaaaaagacacgacagccattttttctcatctgagtaagaaagcatatcatcaaaaatagtaatagcctacaactgcaactatttatttgcaaagaatgctattttatcatattaaggctctagaaagataaataagaaagaatatggttagaaaaggggggagggagagagaaaataaaggagaaaatgcaggagagagtagggagagagtctctctctaccacatagcccaattgaaggattaagcatttggactataaatgaaggggagctttgttagtttaatcactggaacaattataaaaggactcgacaacaacgaggtttattgaaaattttgcctaatgctaactgacccatgcagatgcctaaactgtatttgcatattaaaagaagggtgtatctgtttgtttctaggctttgatggaatatcagatattgaaaatgtctctctgcctgttcatccttctgtttctcacacctggtattttatgcatttgtcctctccaatgtatatgcacagagaggcacaggcatg

SEQ ID NO: 7282 - DNA, 6000 bp, Homo sapiens
gcatgcccacggacatggaacacacaggacattacctacatcttgcctttctgatgacaacagttttttctttgtctcctggaacaaaagcaaactatacccgtctgtgggctaacagtacttcttcctgggattcagttattcaaaacaagacaggcagaaaccaaaatgaaaacattaacacaaaccctataactcctgaagtagattataaaggtaattctacaaacatgcctgaaacatctcacatcgtagctttaacttctaaatctgaacaggagctttatataccttctgtcgtcagcaacagtccttcaacagtacagagcattgaaaacacaagcaaaagtcatggtgaaattttcaaaaaggatgtctgtgcggaaaacaacaacaacatggctatgctaatttgcttaattataattgcagtgctttttcttatctgtacctttctatttctatcaactgtggttttggcaaacaaagtctcttctctcagacgatcaaaacaagtaggcaagcgtcagcctagaagcaatggcgattttctggcaagcggtctatggcccgctgaatcagacacttggaaaagaacaaaacagctcacaggacccaacctagtgatgcaatctactggagtgctcacagctacaagggaaagaaaagatgaagaaggaactgaaaaacttactaacaaacagataggttagtgaagaaaaatgcaaagtagcaatgagaaggcttatggagtaaaaatgaagtcagttggtatttaatcccaaagtgttgttctgattatctaaaatttgacatggtagaccttgcaatttagaatcaagcaggtgagacagggagaagtatgcctgcttaattatttaaactgtgtacttttgttttgacactgaatattttaaaaagcaaataataaaataactaagcatttgaggaaaattttaaggataaattgaggaaactgattaatagagatagcaagggataattaaataaatattccctatgtagcaacagtggttagatgatctttgtctgaatgtaattaaactttgaatagttttagtgtgtccttaaagccaagtatatgctttaacatcaaatggaagtcaaattcctaatgcatagatagagagagctaaactgtgtaatttaatggtatcttccttgctggatgtggcagaatccacaccagcttatcaaccaacacagctaattttagaatagatcctttatctttccatatggcacacgtaagaaagtgtttttctactattaatattaaattaaaacctttacttttgtataataaattaaaactcagaataaacctgtgaccacgtatatttgcattcactttattactttagagaacacattgtaaagatcaataagaaatagagcacaactaaaataaataagatttatagccacaccaataggctaagtgtaaacgcaaagtatgtttcactgtttatgattaataatattcatcttttctataaatactacttactggaacattaacaacaagtaccaaaggttgattaatttttggacttcaaggatgccaagtagcctaatgatttattaggggtgtgtgtgtgtgtgtgtgtgtgtgtgtgtgtgtgttcaaatctggaaaactgcatacttcaggttataatttaacctttaaagaaactggcttcaagtaaaataatgacttacatttaagttgagaacccccccatcttcaattaaatatattacaaaaattggtttgagagactttccaaatatctactgaaattaacacagggctaagatcaggccacatttcaaaaatctcatcccttactgggcatttatttcgggcaatatagtaaccattttaaaaatattttttatatgttttttcccaagtatgactacaatcttactctcccttctaagctagtgattcttaccctggctgcatgtcagaatcacctgaagagtttttaaaaaacaccaatgcctaattcccatgtcttccttctgatgcaactggaatggggtgaactctaagcattggtaatttttacgtaactctcaaggtgataactgctcttggtcatcaaattcaaacgtctagctattattaaaatgagaggaaaaaaataaagcatcatttttattatcaatttattagcaatttgtaaaaaacaaatctattctctaaacgagaaatcataacaatattattccagataaagttaagtgttaacaaagtaaaaaggaaagcatgagaatattcatgccagtcatggtgactgaaatcaggttatcttttgaggggaaaaataacccagattagaaatgaaactgggcagacttcccattctgtgcaaaaattgaaaatttgagattgtgcaccagtacatccaggagtaacacaaagcactccttgaatcaagggtcataaataaacacgtgtcagagaaaattaaaagaaattaatatcatcataaaaataggaaattactttcatattcaacatactggtcaaacattttctcaccagagagcttctaccacaaggatatttaaaagaatatttaaaattcaccactcactatcttggctattaaacatatactctcagaatggtactatccaatgatagttactgaacaaacagaagtgtttcctttccaaatgacaggtattttaaaatggtaggtaagatatctttgagttcaaaatttaaaagtcatttagttttgaacaaaaacacattccctacccctgggtattacagttcaccagcttaattcagggatttaaaaatagtgaatcaggttaggcacagtggcttacacctataatcctgggaggatcacctgaggccaggagtttgaggccagcctgcacaacaaagtaagagcctcatctttacaataaataaataagccagccagcgagcatagtagcatgtgcctgtagtcctagctactcgagaggctgaggcaggaggattgcttgaggtcaggagttcaagaccagcctgcgcaacacagcaataccctgtccgtaaaaacaacaatacttccaaaaaccagtgaatcaaaagctttatagcatttgattatattatgctttatagtaggagcccataaaaaaaaactattctttttgcaccaagctataagtaccctgaagttaagaacaaggtcataataacctgtgtttcccgcagtgaccaggaaaaagcagtgcatgggttaacacattccgtacctactataatatgcatcatccaaggcactttacatttatttaattccacaataagcttataaattaggaattatgatctccatttttcaagagaggaaaggtgacttactcaaagaaatttttattcagatggactcactcctttcaatacactttgtttagttaacttaaaaattttttgtattttaaatttttgtgggtacatagtaggtgtatatatttaaagggtaatgagatgttttgatacagtcacgcaacgtgaaataatcacatcatggagaatggggtatccatcccttcaagcacttatcctttgtgttacaaaggatccaattacacttttagttattttaaaatgtataattatggtattaatgacagtcactctgttgtgctatcaaataggtcttattcattctttctattgttttttgtacctattaactggtaacaccatctccccaacccctcattaccctttagtaacaagttaactttagttaacttcttatttaaaaaatgatccccaatttattttattttccactgagaagtaactactttgtgggtaatcaaataaatagttgagaacttgaactcaaaagtcactagtaaaatatttggtcaaaataatttaattacaaatatacaaatggcaaacaggcatacgaaagggtactcagcaccactgatgagagaaatgcaaatcaaaactacaatgatacctcatctcaccccagttaaaatggcttatactcaaaagacaggcaataacaagtgctgggaagggtgtggagaaaatggaactctcgtacgctgttagtgggaatgtaaatcagtaaaaccactatggagaacagtttggtggttcctcaaaaaactaaaaatagagctatcatatgatccagcaatcccactgctaggtatatacccaacagaaaggaaaactgtacaaagagacatctgcactcccacttttgttgtaacactattcacaacagccaagatttggaagcaacctaagtgtctataaacagatgaatggataaagaaaatatggtacatatacacaatggagtattattcagccataaaaaagaatgagatcctgtcatttgcaaaataatgtaattatacttttaccctggactttttatattatgaggaaataacattacatttattggttacctgcagttggtgaggcatttatacatgttatattatgctatcttatttaatcctcacaataacccaataaaatattcctttagaggaggaaacggtgactcagaagtgcagagtcttgcctaaggtcatacaagtaaacagaacacatcactcacttcttatgagaagaaatctcactgtaagtgataacccaactggcagcttttcttcttagaacatgtaattttctcttcgggactccatcctaaatatttaatttacataatcatattactagagtatctcaaatatttatttacataattaaaagcactcaaatcatagggctccaaaatgtatttcaaaataagttctgttaaagtaatatatttcttagtcactttgtggtttattgcacttccggaaccagctattgataaacttcctctttttctacagaaactatttcagtttgctagaggaacattttaaatctgaattgaaccacccattttcctttcttagccaaatcaccaaaatgtccagttagaacaagaatttagcattctgcaaaagaagttaacagctgaggtaagaaaattttcacacaatttggtttgatcttgctttatataaaatttattttaaaaactgtcattagtgttttaaacttaaactctgatagtctaaagatgtctataacaggtttttgtggttttgttgcatagaattaaaaaatactcagttcagcttgccttagaaaaatattttcacctaggtttgtataagaccttttaagtttatttaatctcacacacacacacacacacacacacacacacacacatatttttttttttttttgagatagagtcttgctctgtctcccaggctggagtgcagtggcacgatctcagctcactgcaacctccacctcctgggttcaagcaattctcctgcttcagcctctcaagtagctcggattacaggcgcccaccaccacgcctggctaatttttttgtatttttagtagagatggggtttcactatgttgcccaggctggtctcctactcctgaccttgggtgatccgcttacctccgcctcccaaagtgctgggattacaggagtgagccaccgctcccagccacaatcatatttgttaaccttagttttagaattaaaaagaaactatagccatggcagataaagctaagggttagaaatagaactagattccacaggctatgactgaatttataacctccaaaatattaattgttaaaagttctaatgtactttttatagaattttcctgtacataatataatgcataaattaaaatttttgtatcccctttagtttgcatagtaagaatggtcactttcacttaatttagaaagaaaaagaaatcagatgtggtatttgactattattattatacatgctttattttttacatatagattttatatttaataatgatgacatgaaaacattatggctcattttaaaagcttactaagccaaaaatgttagtcaataatcaaacatg

SEQ ID NO: 7283 - DNA, 6000 bp, Homo sapiens
ggctggagtgcagtggcgcaatctcggctcactgcaacctccacctcccgggttcaagcgattctcctgcctcagcctccaagtagctgagattacaggtgcccaccaccatacccggctaatgtttgtatttttagtagagacggggtttcaccgtgttggccaggctggtcttgaactcctgacctcacgtgatctgcccaccttgacatcccaaagtgcttggattacaggcgtgagccaccgcgacagccttacgtgacattttatacaccactataggggtaggacacctagggaggccaggatatagtctagttagtcaagaaaagcaatgaatcgtttacaaaacacagactggaacttactttaatagaaactttggtgtctttgtgagctagcttgagagcattgtggaataccttcaggtcctcttctaaagccaaggtggcagcaggtagtttctgttgttcatgctctatgtgctcagccagtttcccaggacagtctatgaaaacaagccttttgctacctttgaggccagtcagcagccgctcatgatacttggtgtactccctgacccaggagttacagttatagatatagactgcggagacgttgtcgtaagcaaagccaggaaaaacaacaaaccacttagagagaaagtctgttttaaagcgattgctaggcccggtatgggtaaggtccactacaatttcatatggctttgcataatatggctttaaagtcagtaagacatggtatatcagcaaatcaccattgatttgaccagttttgaacctaaggaaaatgacaaaaaagacaaagattattagcagtgtttaaaataaatatacagatgccactaatcaattttattttatgattcattttctagagagaataatataaaacaattcttcaaagtctggattcattttttaaatcagttgttttttggacactgagaaataaggctaagagaagagacaaatctccaattcaaaaattttgagccacgacaacaataaaaaatttgcccatgagtcaagaaaggaagaaaacagtgggaattagttggttgcctgcagggcccaccaaactccttaggcgaatagtctggtaggaatgacccatctggagctctggagtgagatggttttagccaatccatttatcccaccttgatcacagactgattcagcaatgaacacattattcaaaccaggacaaccagggccaaagaggcccagttcaggtagtttagcttaaattgttgggatttgagatatttctttcctggtgtttataaacaagggaatacgtagccctaggagttgctagctcatattttgggatataaaagaagagcctcccaaaagactgaagagaaggagctgagaaatagacaaactggaaccctggccatatcatttgtgtatgagataaagcctctcctggggtcaaatttatcccaggactgctcagttacataagccaataaataccattttttgattaagccatattaggtcatatgttgcttaaaaccaaaagaatactaataaatgggagcagccacagtgaggaccatgaaaaagccctgaagtaatggtaccaaagtttcaaatcaaaacaatctatgttaacttaggcccaaagttttccatatgtgatgattctggtgataatactactaagtaagttaaaataaatctttacctcagaggttggttaatggatataaaaatataatcagggctgggcacagtggctcacgcctgtattcccagcactctgggaggctgaggcaggtgggttacataaggccaggagttcgagaccagcctggccaacatggcaaaacgctgtctctactaaaaatacaaaaatcagccaggcatggtggtacatgtctgtaatcccagctacttgggaggctgaggcacgagaatcacttggacctgggaggcagaggctgcagcgagctgagattgtaccactgcacttcagcctgggcaacagtgagactgtcttaaaaaaataataataaaataaataatatatgtattgttagaattagatagaaggaacaagttctactattcatagtaaggtgactagttaataataacattgtatatttcaaaacagctagacgaaacaatttcttttctttgaggcaatggatatcctaatcaccctgatttaatcattacacattatatgcatgtatcaaaatatcacacatacaggcagggcatggtggctcacgcctgcaatcccagcactttgggaggccaagacgggcagatcacctgaggtcaggaggtcaagactagcctggccaacagggtgaaaccctgtctctactaaaaatacaaaaattagctgggcgtggtggcacgtgcctgtagccccagctacttgggaggctgaggcaggagaattgcttgaacctgggaggggagtttgcagtgagctgagattgtgccactgcactccagcctgggcgatagagcgagattccaacaaaaacaaaaacaaaaaaaaccaaaaaaatcacacatactccattaatatgtacaaattatcatgtatcaataaaaaacttcacctcagaatttttaatcttgttgggagaaaataagataaaaatatgacaagtcaaatgattttaaaacaacacaaatatttcaagatagaagatatgaggtagaaagtaatcacttatcaaaggaaatgcagagaaaatactgttattaagacaaaggagagagagagagagattaacacaaactgggcagtcagtgaaagctacatagaagatacagtggctgaatcaggtaaggaggaatgcagactcagcaagaggactgggcaggccttatggagaaaggcaaaaaggaaaagaaacaggtaactagatgtgttgaagagacagctagtctagccagaatggaggattcaggtagagaagttttgagagataaagctgggaaaatacagaatagtcaaattgtggagagaccataactgcccaaccaaagggcttaggttttctactaggggctcaccatttctcagcatatgttctgtggactactggcgtcagaatcaactgtggtgcttgataaaaatgcagtttcctggtcccaacctggacctactaaatatggatctatgtagtggggcctggaaatttttatcttttttttttttcccttaactcaggctggactgcagtggcacggtcacagctcactgtagccttgacctccccaggctcaggtgatcctcccacctcagcctcctgagtagctgggactacagataagcgccaccatgcccggctagttttttgtttttgtttttttgtattttttgtagagacaggattttgccatgctgcccaggctggtctcgaatttctgtggctcaagtaatcctcccgcctcagcctcccaaagtgctgagattacaggtgtgagccaccatgtcctgcttttataatttttaaacaatcttctcatctgatgtttatgtacacaaacatttctgaatcattgttgtatgtattagggaactgttcaaccggttttattttcccttaaagaaagggtggtatgaccaaagacagtgatgtatacaagatataagaaggattcagggctaccgaaaaggcactgtagagtctaggtatgacctgataaggatctaaaatagtactgttgacagtaaaaacagggaaaaagaaactgatccaacaatatgaaggaaggaccaacatgattcaaagtctgatcaggactgagaggacttaaattaaaatgatgtgttgtatactaagcctctgatattagaatgttgctatcatgaacagaaacaagaagactgtcacaggcagcctcctttaaagaaaaaataaagttctttttatttcattaatttaattaatttttaagagatggagtcttgctatgttacccaggctggatttgaactcctgggctccaccagtgatcctcctacctcaacctacctagtagctgggattacagatatgtgctgccatatccagttctttttttttttttttttttttttttttttttttttgagacagagtcttactctgtcttcctggctggagtgcagtggcatgatcttagctcatgcagccaagatctcatgatctctgcagcctccacgtcccgggttcaagctattctcctgtctcagcctcccaagtaggtgggactacaggtgcatgctaccctgcctggttaatttttatatttttagtagagacaggttttctctatgttggccaggctggtcttgaactcctggcctcaagtgatctgcctgcgtcaaccctcccaacgtgctgggattacaggtgtgagccaccgtgttcagcccatacctagttcttaaagtctgtttcagtcatgttaaacttgaggtgatgacaggatgtttgacagttgtgtgtgtgtgtgtgtgtgtgtgtgtgtgtgtgtatacacacactacaccacacgaaagcattttctgtcccatataatctaagtttactagatattttctcaaataattgctgcagttccacaattgttacattatctgatcagtatcccatggactccaaactcacattttcaaatcagtctgtagatttcaaataagtcttttagagaagatttgaaatggaagataccatttcaaaacctcttttgaatgacactaaagcatgtagcaggcctatagaatgagcatactgtcaaaaggcattaagtggaaaaccctccctgctctggaggcggggattggttctacaaagcctcctgtcatgccagtggccaactagagaagttggagctttttcgttgtttttttttttttccctcctgtgacatgtgctttagttgcagtggaaaggaaatgtgtcatctgtggtttggttttaaaagtggaaaactagctgcacatatccttttttactgcagatttactttaaggctcatattctccaagtctattctgctttaaaaagaagacaagaaaagaagtggtttatcaaaatcacgttataatcagattttgaccaagcattttgtaaggtaggtcatatatatacggcttttcttatgccttttcacttctaacgtctgacagattagtgttcgaggaaatgctatcaaagtgtgtaagaatctcactaacaaactagaattgtgactgaaaatgtatactttttttttctgtcctgttacataaattttaagttagaaatgaaaaaatttgccatcgccatggagttttaaattaggattacgaaggatctaagtttggtttcctcaagtaaactggaaatgttttgttatttttcaaaagttaaaaaataaatttctcattactaatgcttggacattacaaattctactgaaaataaattctactgaaaatgatcagatataagaaaacttctgataacacaacctggcctccaaggcataaactggagtaaaaacagtcctcaattctcaggcatttgtaagggcaagagaaagtctcattttgtcatacagtttgtttatttgggcactgcagtacatctggctgaagacaatcaacagcaggcctattatctgttccgtggtaagcactgttaaaatgtgtaccaatactatgatgtatactacactgttaatgaactaatgtgaaaagaataatctactttaaatcattctagcatctaatacagaagtccagtctagtataaaaagatggaaattacttgctaatccaatttcaagtatttctttttgtggaagaatcatgaaatatccaaagatttatgtcactaaacttaaaaattaaagctgaacactattatacaaaagccagtgacttgggcctttaattgtctactaaaggtcataatctaaaaagtaatcttaatcctggaatatttaatagtttttcctccctact

SEQ ID NO: 7284 - DNA, 6000 bp, Homo sapiens; identical to SEQ ID NO: 767

SEQ ID NO: 7285 - DNA, 6000 bp, Homo sapiens
agagagagagaaaaaactcgttcaaggtacaactgctagcagacagaggtagatttcgtaaagatgtcattagaaaaatcttcaagaggctggccgtggtggctcacgcctgtgatcacagcactttgggaggccaaggcaggtggatcacctgaggtcaggactttgagcccagcctggccaacatggtaaaaccctgactctactaaaaatacaaaaattagccaggcatggtggcacatgcctgtagtctcaggtactagggaggctgaggcaggagaattacttgaacctgagaggaggaggttgcagtgagccgaaatcacaccactacactgcagcctgggcaataaagtaagactccatctcaaaaaaaaaaaaaaaaaaaaaaaaaaaaaaaaaaaaaaaaaggaaaaggaaaaaaaaagaaaaagaaaaatatttaagagctttgattcatacctctctgctgttcaaaaactttcatcaacttctcattgcctaacatgtttgaaagctattcttcccccagtttcctccatctatgtgctttctttggttttctcatctataaaatggaggaagatagtaacatctaatcataatattgaacaatgaaataaattaaatgtaaagcacttagaactatggctggcatatagcatggactatggaactatttcctgtaattgtgattattttaataaattgcactgagctgctcaagccagaaacctaggggtcattcctgatttccctttccttcaactgccacatccaatccatctccagttgtcaattctacctttaaaatctcaaagccgtagctgggcgctgtggctcacacctgtaatcccagcactttgggaggccaaggcaggtggatcacaaagtcaggagttcgtgaccagcctggccaagatgatgaaaccccgtctctactaaaattagccaggcgttgtggtgggcgcctgtaatctcagctactcgggaggctgaggtacagaactgcttgaacccgggaggcagaggttgcagtgagccgagattgcgccactgcactccatcctgggcaacagagcaagactgtctcaaaaaaaaaaaaaaaaaaaaaaaaaacaacaactccaagccatccaactccctctattcaatctcataaatccaccatcaccttttgcctagactattagaaggctataagtcttctctctaccattctccacgtagtggccaggttgtttaacttttttggatgtataacatacatttaaaaatgtgcatatctggcctgatgtggtggctcacacccgtaatcccagcactttgggaggctgaggcagggggatcacttgaggccaggagtttgagaccagcctggccaacatggcaaaaccctgtctctactaaaaatacaaaaattagccgggtgtggtggcacatgcatgtagtcccagctactccggggggtctgaggtgggagaatcacttgaacccgggaggtggaggttgcagtgagccgagactgtgccactgcactccagcctgggctacagagccagactctatctcaagaaaacaaaaacaaaaacaaaaatgtgcatatatcataaatgtaaagcttgatataaatactgcatacccacaaaaccatcagagacatctttaaaaaaatataaacctggccaggcacggtggctcacgcctgtaatcctagcactttgggaggccaaggtgggcagatcacaaggccaggagttcaagaccagcctggccaacatggtgaaaccccatctctactaaaaatacaaaaattagccgggcatgttggcgggcgcctgtaatcccagctacttgggaggccgtggcaggagaatcgcttgaacacaggaggcggcggttgcagtgagtcatcatgccattgcactccagcctgggcaacaagagtaaaactctgtttcaaaaaaaaaaaaatatatatatatatattttttaatatatgtatatatacacaaatatatatacaaatatataatatatacaaatatataaatatatattatatatttatatattttatttattatatattatatatatttgtatatattatatatttgtatatatatttttatatatatttgtatatatattttatatatatttgtatatatattatatatatttgtatatattatatatatatttgtatatatatatatatatatatatatatatatatatatatatatttgtttatatatatacctgatcacacatctctggtgtgtgaatccttcattggcttcccattgcacttgggctaaaatccagggttgttcccatggcctgtgagtccctgcatggtttggcctgtctacctctctaacatcattttgtgcttttcagttactgctcatttcctcatcatttcaccttttgccagttataatagccctcaaacacaccaagctctttcccaccttagggtcttcacaatactcttccttctgcctaatattcttttccccaactcctcatatggctggctcctcataatttaggcctttgttatgtcctcagaagggcattccgattatcacgtctaaaagatttgggcctcccagacctcttattcgagttgcaaatttctgttttctttttttttttgagacagagtctcactctgtcccccaggctggagtgcagtggtgtgacctcggctcactgcaacctccacctcccgggttcaagtgattctcctgcctcagcctccagagtagctgggataacagacatccaccaccatgcaccatcattccaagctaatttttgtatttttagtagagatgggttttcaccatgtcggctgggccggtctcaaactcctgacttcgtgatccacccgtctcagcctcccaaagtgctgggattacaggtatgagccaccataccaggccctacctttcctttttcttttcttttttctggagatggagtctcgctcagttacccaggctggagtgcaatggtgcaatctcggctcaccacaacctccgcttccagggttcaagcgattctcctgcctcagcctcccgagtagctgggattacaggtatgtgccaccacacccagctaattttttgtatttctagtacagactgggtttctccatgttggtcaggctggtcatgacctcttgacctcaggtgatccacccgcctcggcctcccaaagtgctgggattataggcgttcttatgccatacgtttagttaacttttggagtacttccatgggactatcaatcaagacatcctgccttcccctggctaagagtgaaagacagggtggagagggaacttgaaccaagagaggtcagtcaaaatttgtatcacgagcagagtcacaaacagaaattggtggaagctcgttcactgcaacaacgttgcctggataagaacttctaattcctgttaggcagtcccaatagtattgttaagttcctgttctttcagggctggctttacttattttgtgagctactccatacacttctaataaattccgttttagtttaaattagcctgtttgtttctgttgcttgtaaccaaagatccctaagtgacaaaaatgtttaatttcctgcttgatttagttgatgctacctctcaactttgtatttttgctattcacttaagaaaagcttgtacataacagttactattaaacaagcacctaatatgtatccaggtgcttcatatggataaactatgtctagtcttaaaactctgtaaggtaaaaatcatatatcaatataatgtcttttggtagagtaaaaaacactttttataactataattaaggacaatttgtaaggttttctctcctattggaataactaaatccaaaccttgtttttgagggttctcattatgcaaaccaattatttttataacataagggcctctagggcagtaaacaataccttctattcccagctatttagcccagaggtggcacttcccagaggaagggaggagaggtggaactctcatccaaattcaataaggctgtgtcagccaacttcagcgagacaaagctgtacataacataaaagcactttacaaaccttaaggtaaatcacattcattttggtataaaaacggcatgaaaggaaactttctgtcaagtgtccccagtgcatgctagttacaattcataaagctccctctgcgttagtactgtattcatatcgctggtggtgacatatacaactgtgttcaaggatggagaccattttcatccagtatagcaagtgcatgcagttatgcttgaatatagccaaaacctggaagacgttaaactaccagcttggatgaaaattaaccgtctcaagtactgaggaacaagcatgaacctttctcaatccaatcatctttccttataattggcggcaataaatctaaggctcctatctcctgctatgtcgctttaaatcatttctggaaggctaagacatataaattaaccaccatccctgccgcacgcgtacagcaaagtcctttccacctccagattcccttcctcccaccgcccctagcttcatcgcctgcaggaacacagggctcagcaacgggcccgagctctggctcccggcgccagacgtctgcgcggtgccccaaacagcttgtcaaaaagacctcgcagagagaggttcagagctgtagctttccagcgaggctaccatgcagacccagctacgaaaagtaaaccaaactagccaaaaccagcccacaagggccctcttctgtttcagcggggcgggagcggaagctcaggtgggtcatagagttctctagttctggtttccggaccgcattcggaactagagcgcctctcttccgccaggcatcccagaggtcctggtggtttcatttccgggtgcggcttctgtcataaagcggagacctcccttcaaacgtggcgtcgtgggttgtttgcgcctcgcctggggtcagcgagcaaggacgggcgcgggcggggatactcaaagccaacagctggagtcagcccttgtgtcccgggctcacagtggcacgactgaatcctcagagtcggctggcttttgagctctcacgattggggaggagggggcgtttctggttcgcagctccagaggattgcgttccttcccccatacctgtcccccacagtcacgctctgccctgacgtgcagcatttgacaagttaccccctcgccacatactacttccacccacgtccgagttaactttgttcttaaccttcttgagactaccctcggcctccaggtctttttttcccagttcatttttgcccataagattgagtttcgagtttcagatatcatgcagaaagtttacctttaagactgagcacccatctgatactcttcctcccgaaaaagttcatgctcacgagagagtttgtgggaaaagtgaaagccagtacacgcaggaaactatggctgagcacggggctcacttcacagctgcttctgtggccgatgaccagccatccatctttgaggtggtagcacaggacagtttaatgacagcagtgagacccgctcttcagcatgtggtcaaggtaaggtattaattcttggaaaggttttagggacaactgggtaaaaaacaaacgaataatttgtgcttatttggtagcctagcgtttgaaatagccaatttgcaaataacttgtatcccatgacttaagagttactgagtctctgttatgtgtagagacctgtactgaatacccagcatttcagggtccaacagtgacttatttaaaacaaattgtgtagactttagaggaaaagggggaatgtaaataggtgtagaacttgtgtaatggaatgaatttcacttattgctttattttgctttaggttcttgcagaatcaaatcccacccactatggcttcttgtggaggtggtttgatgaaatctttact

SEQ ID NO: 7286 - DNA, 6000 bp, Homo sapiens
caatttttcttactttgctctttacaggaaaaaggtcactggtcagaacagcaagaagaaagtagctcttgaagacaaaagttaaaaacagactttaaaaatactgtcccagaaatgtaattttatgatcccagcatgaatgttattttcatggaatacttgaagtcttacagtcacctgtaccaaacatttgaaatcaactacaagtacatgggactggtgataaatgatcctaaactatcaagtcagtttcaatttgtaggtgccttttttttttcctgtagagatgagggtcttgccatgttgtccaggctggtcttgaactcctgacctcacacaatcctcctgccttagcctcctgagtaactgagattacaggcacaagctgctgcacccagctctgtaggtgacttttaaatgattatacaatggaaataacattcattgacatttctgtggtttgaatccagagagatacttcttatagaaaaacaaatgtttatgctaaaaataacaccaaaatgtggtgaactcttaaggacttttcccttcaagtgtgaaggaaggtgtgatgaatgctgtggagaggcatctggaacagaaattcaaaataaagccttgacattaaataccccttccactgctcactttgtggatggtagcatgagctgtctaccaagaagaaacctgctgctctcttaattttaatatttcctaatttgttgatggccttttgtgttgtgaaccacaacaaagagaggcctcttttgtggctggttattccagttccctgggattttaaattctttggtctattaagtatccttgtattggatacgtaataccttagtgctgtcataatgttgtacaagatcatgatcagcttctccctttcttcattttctgtgatttaaccatgttctttcctgtctctttccatttaagatattttatttgaatactgataaacattttatcctgataaggaagaatgttcttgttacttgatatacctctgtcttcattctcttacagcttatctttccttaggttgatggtgcctcatttaataagtagatctctacttaagctaaaggattatgatcatatggtgttggagactattagctattagatttttctcaaaatatgagttttgtacaatggaatgaaaaagtgacttcatatacgtaagactggtgcctaagaatgacttgaatgttatcagtactaccacagaactataatatacattgccttttctcagcagcatttgaattcaacttatttatttcctctatttgtagctttttgttctagagtcagaacaggtggactttgctttgaatattttagatgggacaaaaattgttcatcttcggaatttatttaaagaaagatctactggtacagggtgtaaaaatacttacaagaatatgatttttttgtttgttcatgcaaacagatcctttacccaatatatattctggaggtaggtatactggtgcaacccatttgccagctgtgtgactttgagtaagttcttaatttctcagagtttcagtgttctcatctataaaattatgtctccaattgtgagtacctagcactgtacctgatacatagtaaactcacaataaatatttcttaaacatagattttgttaggaatacaggcttgataacacagtccttacccttacaatgtaatgttagagataaaggagcaaatagagtcacgcatcacttaatgacagagatatgttctgagaaatgcatcgttaggtgatattgtcattgtgtaaacatcatgttgtttacttccacaaacctagatggtatagcctaccagtacacctaggctatatggtatagtctgttgctcctaggctacaaacccgtatagcatgttactgtcctgcatgctatagacagttggaacatgtagacttgtataaacactgcacacttaacctatactaaatttattgaaaatatttttcttggccaggcgtagtggctcatgcctgtaatcctaacacttcgggaggcctaggcgggcaggttgtctgagctcaggagtttagagaccagcccgggcaacatggcaaaaccccatctctactaaaaaaaataccaaaaaaagttagccgggtgtggtggcatagtcccggctactcaggagtctgaggcaggagaatagcttgaacctgtgaggcggaggttgcagtaagccgagatcgcgctactgcactccagcctgggcgacagggcaagactgtcttgaaaataaacacacacacacacattatatatattatgtattatatatattagatatatattttttcttcaataaattaaccttagcttactgtaacttttactttatgagtttttttgttttgttttgttttttttttttgagaaacagggtctgttacctaatttggagtttagtggcacaatcatggcccactgcagccttgacctcttagactcaagtgatcctcaaacctcagcctcccgagtagctggtactataggtgcgggccaccaacactcagctaatttttaaattttgtagagacgaggtcttgcttgttgtccagttgggttttttagacttttttttttttttttttttggagatggagtcttgctctgttgcccaggctggagtgcagtggcatgatctcggctcactgcaacctctgactcctgggttcaagtgattctcctgcctcagcctcccgagttgctgggactacaggcatgcgccaccacacccagctaatttttgtatttttagtgacagggtttcaccatgttggccaggctggtctcaaactcctgacctggagtgagccactatatctggcctttataaacttttttgattcttgtcataacacttagcctaaaatgcaaatgtacagctgtagaaaaatactttatttctttatatccttattctagaagctttttttctattaatttttgtttgtttgttttgttttactatttacttctaaaacttttttgttaaaaaccatggcacaaacacacacattatgctaggcatacaaaaggtcaggatcatcagtctcactgtcttccacccccacttctcatcccaccattgtatctgctgtctgtggctgaccaaaacatcatcatgtagcacatgactagtgtggcaagtgctctgttagatgtaaggccatgatgctaaagcatcacaagagggcatctaacccagattggggatgtcatggaaggccgacatcctgagttgaatcctgcaaatgtaaaaaccaataggcaaagaagaggaacaaaaaggattccaggacaaactgaggtcacatctatgatccttgactttattgtgtctgtttaaagtatctacagtaacctgtatcaacttagtcagtgtattaatactaaatttagctccttcaaagcagttggaactatgtgctacataaatttcagcttcacacaaggaagggaaggagtgaaattagtgaacaggcagttacagcaaaagaaaaaacataaaaattgaatagctggctctggtgaaatgagcaaggactttagagtcaaactggcctggatttgaatcctgatcctcattgcttgtagctgtatgatctggacaaatgacagtagctgtttctaaccttgattttctcatctgtaagatgccaattgtaactcctaaggatactgaggattttttaaaatgcgtgtacagttcctgaccagtggtttgtgcctaataacttattacaaattattacccagtaaaaaccttgagacaagagtgaaaacgtaaagctaattaatccattacttgttagcaagcaaactacgtgcttgagaaaattactcaactttcatgttttacttccagacagtagtttgattaaaagaaaaaaaaaaatcacagcccaggcatgtggctcacaccctggcacttggaggccgaggtgggagcatagcttgagcctagcagtttgaaactagcctgggcaacatagatcctatctctacaaaaaaaaaaaaaaaaaaaaaaaaattggcccggtgtggtggtgcatgcctgcggtcccagctactcaggaggctgaggcgagaggatcgcttgagccagggaggctgaggctgctgtgagccatgatcatgccactgcactccagcctggacaacagagcaagaccctgtctcaaaaaaaaaaaaaaatcagtaaaaaatatgccgaaatagcttcagagtaattatgaattgccttccaaaaaccactgttttgcacttgcctgcaagaataggaaaaacaaaaggactgtaaggtggcaggatggcagaaccaaacaagagtagtacaccttggagttttttcgaaatatgggttgggtttttgggctcttggttgatttaaaataaaatttaaatgccttcagcgtctgtgataggtgccaacatgaagctaccgagttccagagaaagaggggagagctgatcactcatcagtgctgcgagactatcaaagggcccttcaggacctatctgttctttgtgtgtaaagagtaacaataaaagaacaccagtgtacccaccgtatagtttaaaaatcaggactcagcctactctttccactaaccgcgatcatggttttcaaacggaggaccaacggcgctttgccactgggccgccagctgggccctgcagagggcctaccagacaatgaatcagctcccttggagaggcgcccgcgaccgccccaccagcccgagagctagaattgaatctgggggacccctgcggcgccgggtcacgtgccgtgggcgcgccacgcctccccgagggccgggggagtcacgtgggcgcgaggccccgccccatcgcccggtccgcggcgaggtggggcctggtgtttgacccggaagtggctgtgttcagctgacagctgctgataaggtggcggcggcgaaggcagcggcaggtcgggagcaagatggcgctgcggccaggagctggttctggtggcggcggggccgcgggagctggcgcggggtccgccgggggaggcgggtaggtgtgaagagccgggcgggagcccgctggcctccgcgggggcggcgaggggcgcttggcagttatggcagttttctccagccctgatccttttccttggaactgggctgcgggaggagggtcatcccccagggacccaggccgaaaggggcgtgtggagcccaggtgctggacgctggtgttccgggatcagttgggggcgccggccgcctggaatcgagcggggagcgagcgcgcgcccagtgtgggaggggagagaagatgagggtcctcttggggtgggggggggcggggcaaatcaggaaccgcgactccgctcctagtcctagctgcctccgaagcgaccagggtcttccctttccttgggctttctagacttaaccggatatgttggagggagggctttaaaaatctgttcacaaagctggaggactgtttccaaggggggtgtgtgtgtggactatttgtctcttccccttttagagtgtcctgtcctctttatttccttaacccgcgacaaacagcaggaacatctaaagacctctgaattagtaatggtcttgagatagagttcttgtcttgtacactaactcttaagacttgtctgtcttctttttaaaaaggcatttaaaaacaaagaaagtgcactgttaaacagcagttgcgcatttattagaacaaagcttccagactcagcccttaaacaaatctgccctctgccacatttcagccaagaactgccgtggttcttatacccagaatggtaagggagatgtacgttttacaagctgacagattcgttatcatttaaggaaatattttattctaggaagttttcactccacttctataatgacctagtctgattttgttttactaaccaacacacaacagcaca

SEQ ID NO: 7287 - DNA, 6000 bp, Homo sapiens
tagtcccatgtttcttctatccctatctttccaatatggttacatcagaatttttggttcagtgagtatgtggattcatacttgtatgatatataaatattgtttactgatacttttcattcctaagccaagcagaatatggaggttacatttcctttcttgtatgatttgtatattttttcctagtgtcagtatttgcttcctgcaatctaaaccatgtctttgagttctaggaaattttcttgtattatttctttgataacttctttcttctccctacaaggtctcactctgttgcctaggttggagtgcagtggggcgatcatggcttactgcagcctcacactcccaggttcaactgatcctcctacctcagccttccaaatagttggggctacacgggtgccaccatgcccaactaattaaaaaaaaattttttttttgcagagatgggaggtctcactttgttgcctaggctggtcttgaactcttggactcaagcaatcctcctgcctaagcctcccaaagtgctgggattacgggctagagccactgtgcctggcaatcgtttttgttttttttttttaagcctcctactctcatttgaatgctctaatatctttcatttattatctgaagcagatttttaatagtaaattgtttttcgtttggaggtttttatttttttttgagacagagactcactctgtcacccaggctggagtgcagtggtgcgatcttggctcactgcaacctccgcctcctcggttcaagcgattctcctgcctcagcctcccaagtagctgggattacaggcacacaccaccacacccagcttatttttgtaattttagtagagacagggtttccccatgttggccaggctggtctcgaactcctgacgtcaggtgatctgcccgccttggcctcccaaagtgctgggattacaggcgtgagccaccatgcctggccctatttattattttctgaggctaagttattccttcagcttctggcttctagcttagtcctaaagtagtgtactcatgggctgtgtcatgaatttctagtctccaatgggtagttagatggtagatgttaacagttacatggataacctagtcttctgttcttctgtcaattgttgagcaaaccattgggatataattgctacaagtttaggttcctgatgagttcccaatttatttcatatttcatatttcagaataatcactctagagattactgagtgagattatggaatactttactaaaagcctttgaaatttggatgaaacctcctgaccaggacgttagaagggaactcaggctggccttgcacttggagagagcagtgaactggagagcttggggtcccacctggcttctgtgcttcttgtgctgcttctggtttttttgctggaagagacctgatcgtatggtttctgtgctcaacagaaaactctctgcagaggaattagagcgaaaacggcaagagatgatggaaaacgccaaatggagggaggaggagagactgaacatcctcaagaggcatgctaaggatgaggaacgggagcagaggctagagaagctggactcccgggatgggaagttcatccagtgagtgcatcttcttcctgccagggtctttcatggggaaggtcttaagaggcaggctggcagctggttcccgttccagtgtttctgtgtttgcacatggagcccagccttcagaccaccttggctactactcttcctttctgaccacacagtgggatgtttttcatttgaggggaggagaagtgaatttggtattttctaaatcattgaaattccttgaccttcctttttaataagaattcatggcccaggaagcctttttccaatgaggctttgacttattttccaaaacagatacattttcccttatggacactggtttaaaaacatttggttccaggtggagtcactcgaaagttatctatgggagcttaaaagaggttgtgtttttacagctgctctatggctaacaacccatttcttctgaagctgccagaatagttgactgattgaaaatgtttttgacttgcatttgcctgtcttctcttcctagccgcatgaagctggagagtgcatctacttcctccctggaggatcgggtgaagcggaatatctactctttacagagaacttcggtagctctggagaagaactttatgaaaagatgaaaactgtcccctctcttattggttttcctgcattttccagggaagctgctgaccccttaattctctttataagagttcaaatgacttctttcacagatgtcaaaccaccagtgttcaaagtgaccctgcttcattgagtcctgaaacagctcacttcctttgagagctagtgtgacttgctttgtgggacactcagtaactttgggttttgactctttaacgggtgggcactggaccatctcggtgggagtgcttgtgccactctggaaggctgttccctggggttgtgatgtttatcatgccacttccttcttacctgtgccaacagacctatttcactgcctcagcgtacaccagacccttcagaaacctctctggtgtcacccagatagattgtgcttactgagacaaatgaacgtttacttgatttagaagataatgtgacagaatgatgtcaggttaggtcaaagccaagggagtgacagaatctggaaaatcaaacaatacaaaaagccctaaatgaactgttaactatttgatctttggatgtaaaattgtaatgcgtatatgtacaaatgtacaatttttacatgcttttaaaaaaggttagctttgtgaaaataccttgtttggtcaatgactttactgggtaatagaaccacattgaaccttgatggcaagtaatacaataaggcaggccagctcgtttttctctctgaatctggctggtttaggaggagcctgggtttatcgacgagatctggagtatctattcttttccactgcttgcagtctccaatgtaggcagtgtaaaggtatagtaaaatgattttaggagtcagaaccaaattgccaatatgctccatggctcctaaaggaaaataaaatggaagtttttattttgcggcttcacttcttaccgtgtagtaaccttactacaattacagattttcaggagttgtttgctagtctctttcagtcaggtactaaaaaaaaaacaaaaaacaggctgggcgcggtggctcacacctgtaatctcagcactttgggaggctgaggtgggcggatcacgaggtcaggagatcgagaccatcctggcgaacacggtgaaaccccgtctctactaaaaaaatacaaaaaattagccgggcgtggtggcgggcgcctgtagtcccagctactcgggaggctgaggcaggagaatggcgtgaacccaggaggcggagcttgcagtgagccgagattgtgccaccgcactccagcctgggtgacagagcgagattccgtctcaaaaaacaacagcaacaaaacaaaaccctcgaggggccactctcctgtctttactccttttcccttctctattctttcaccagaagccctcatttgaccagtgaactcctaggccctcttgacccgcacattagctgggcgatttccttgttctgctaattcctaattctgcttaaaatgtatttggatttctgtttttgaacacttatgatgccaggcactgtaatgcttgaaacccgatctttccctagagaatgtaacatacgtttttattcatttaatcacttcattatgccggggttaattatgtttattttataattggtaataaaggccacatttatttttgtaactgtttaaagagcgaccacctgtggagtaccgtgtttacgaatttccatgcagaaagaacaacgttgacctgtaatttgtgtcgaatatatggagatccctcatctgagaattatgtaacaaagcgtggggcagtttactcaaagattttacgaaatgagccagagtaagacgattagtgggataggtgtctgaaggtgctggcggcctctgagctctgaccctttgcggggagaacaggcagcaggtgggtgggcgcggggcccattcataaaaaccagtgttcctggcctgcttctctcattggccctgggggcaaggggcgtgccccgcgggtggagcgcgcccggggcccagcagagtgggcagatccacgcttaggtggagcgagggggcgttccttggctttctaggctggactttctcttccccttgctgcgtccctcctctcccccggggtgggcatggtacgtcccgccctcctcgcattcccgtccctccttcccttccggagcggtggcatcgccgccatcttggcattcgggttgcgggaaagagccaaaccctggcgttggggggcccgggcggggagcccctcccgcggtccacagcgacgcctgcccagccctcctccccttccggctccggcacggggccccgaggcgttcggaggccaggcgggtttctgtcaggcccggggaggaggggcgggcggggcggccgctgcctccccgggacgggccgtaccacgcggacggggaggacggggccaggggactgcagggcggctgcaccgcccgggggcggggtgcggagcgggccggcgggctccccggggcggggcgggagggcggggcgtggggcggacggaaccaccggggcggggtgggaggtaacgggacgggcgcgaccatggcgcggtgagggagcgggggtggggatcggtccgggggaggcctgaggccgctggcttgtgcgctgtctccgccgcccccctctttcgccgccgccgccgccgccccgggcatgtcgtccaactgcaccagcaccacggcggtggcggtggcgccgctcagcgccagcaagaccaagaccaagaagaagcatttcgtgtgccagaaagtgaagctattccgggccagcgagccgatcctcagcgtcctgatgtggggggtgaaccacacggtaaccagctcctgcgcgcccctctgagcgcggccccgcgcgctcccacgccccctgcagccctgggcccttgccccgcaggccctgccggtgacgcctgccacccctcgccaagccacttgcacgcccaccccacccttgcacgcctttcggccccgtgtgcactccccgcacgccacgcgaggcctggtgtctctgtggtctgccgtcgccacctccccttccctccagcccttctggcttcctgcgtgtggcgtgctcgcttggggcagcccatggagcgcaaaggcaaggcctcagtgcagtggagtcgctttcatccctgcttctcctcctcccccctcatcctgtttgtgagggtgtatattcccccttgttccttacagccggctgccagctctgtcaagtagcagtggtctgcccaaatagtcctctctttctgatcgtttggttgttgtggctgctcaaattcttccatcctccaggcctccttacctttgaatgtagaactccaccctgggtttccttttttttccctcttgaacaagatgtatcaactggagaagcacaggcttccttgaaccagacacttcacctgggtctctctgggttagggagaagaaagaatggctattaaccatttgagagaagaggatgcctggttataaggagggactattcatagtagaaataatatgtcttcccatagtttttgaaggtgatcattttaaagatgttgacttatctgttgtgtggctgcaatgttgtgatgatgcatagtgattatggtcctagataggagagataggtcccctgggtccttagggtgctttgagattgttcaacagcccctgccaggaagttggatcctgacagtttaagctggaagactgtttatgtggtgtttgttcagggtctttattctccctcttccaaccacttgctc

SEQ ID NO: 7288 - DNA, 6000 bp, Homo sapiens
tcaaggagtaagaaacaggctcaagatgagacagagtgcttagatcctgaatatatttcagcatagatgccagcacctatcatttcttaaggagaagatgaccacacttacctatgcccatgtgcctgcccttccggcgggccaaggtgtttttccggcatcgagcccgggaatggaccgtcacaggcttgcggatgatcagcccatctttgatgagcttccggatctgctgacctgggaaagcataatgcacctggtcagtcaactggggcccaagcacatcacagagtccaaataggccaggccagagacactgctcacattcttggccccacggtctcaaaaaggatggaaacactggaacttatttcttgccttcaaaaacccaaaaaacctctatcttttctttttccttcacaaacagaggttgtgagaaataccctttgtctttgagacagtctccctatgttgcccaggccggtcttgaatttctgggctcatgatcctcctgcctcagcttaccaagtagctgggattaaagatgcctgccaccatgcctggccatttctacattttaaatatatgaaagcacactcaaaagaacaagcctgatacaatgactcctccattttatagacactctgaatgaactttcctaggtttgtaacaagtcaacccaggctaggtgtggtggctcacgtcgataatcccagcactctgggaggctgaggtggatggatgacctgaggtcaggagtttgagaccagcctgaccaacatgatgaaaccccatctctactaaagatacaaaaattagctgggtgtggtggcacgtgccttagtcccagctacttgggaggctgaggaaggagaatcgcttgaacctgggaggcagaggttgcggtgagctgagatcctaccactgcactccagtctgggtgacaaagtgagactctgtcccaaaaaaaataaaataaaatataaagagtaaattagctgggtgtggtggtgcacacctctaatcccagctactcaggaggctgaggtgggagaatcacttgagcctgggagcaggggttgcaatgatcagatggcaccactacactccagcctggacaacagagcaagactgtctaaaaaaaaaaaaaaaagtcaacacaattgtgttatcattaatctgacgcaggagaaaagaaggaagtagggtgaagagacagatcccaggtactcacgggagttggcattggcgatttcattggtctcattggggtctaaccagaccttcttcttgccacagcggaggacactagaggcgagcctcttctgaagcctgagcatactagacacacagaaaacatgattagactctgaaagccaatcctgggcaagaatgaacgtccccatcaagacctgccctttgtgacccacaccacagccgcgaaataagactcttccctaaatcatctttaaggctctgggctatgcagctggcccccttgggtttaagacttcaaaacccacgctatgccttcacctctcggagcctcatgttcgcatttctcctctggaaagtcaagccaaggacttattggattgaataggggggttatgccatttctggtactcagcgtttaaagaatattcgaggtgagtagacctgatttctagtctaggaatgcaggcaagttactctgttttctgggcttatttccctgttttatcacagtaacaagcctcgttcggctattcgcagagatttcctttatgagaggccaaaggagtgaatggagtcaagagttagagatcacctctctcggcagtcggaggcctggggcctacactaggcttgccctacatcacgtgaaagcagagatcggctccgctccgggtgtgccaagcaagaaagggcccacggcttggtcttgttcgctccgtttgctctgctcgcgtgggtcgaccggacacgtgtgcggtgcggcaccagccggggcagacttttcctggtctcagttgctgcgacgctccccgccccccctcactccggaggcccgggacgaaagtgctccggcctaccccaaaccccgggaccggccgctttagggcggcctccatttcatctcccccaaccccagctgcggtcccaagaccgacagtcccttgtcgacacgcgtcagcgcctgatggagaccagctcgccctcacctcatggctgcggccgcagcagcgaaaggaaagagctcgctcgggcccggctcctcccattatctgcgaaggggagagcccaaaccctgctccaatttcgtccgtattcctgtccggttctttcatcttctgccacactaaactcactcatagcctccatataggcctgaaatgataaaagtcaaatatcagaaatcggttttaaacttaaaaacataaaaaagtaccccttccgtagggaaagtggtatagtccgacttcctactagacatgcgcagcaagggttcccaatcacgtggttatctgtaaccggaagtcagctggattgcgcaggcggagtgagagaggttttgctagagtggcctggtgtttgcgggcgttcggggggttgtgggtggatgttttattagctgagaaaaaatcagttaaagaagcgagagagaatgacaacagatatcagacaaaggcgaactcttattcactcttgtagtagattgaaaacccctggagtgcagaatcgatcactaaaagatgttagtgtttttacgccactgcgggtcttgcaagctcttggagggcgggaactagtctcagtctcatttggctcacaactgtactgcggcaggcatggatccgcgatcgaacacacctcagaaataccgcactggctgaatggatgaatgattgcagaaagtaaaattaaaaaaaaaaaaaattgggttgggctcgatggctcatgcctgtaatcccagcactttgggaggccaaggcaggcggatcacttgaggtcaggagttcgagaccagcctggccaacatggtgaaaccctgtctccactaaaaatacaaaaattagccgggcgtagcggcgcgtgcttgtaattccagctactggggaggctgaggcaggagaatcgcttgaacccaggaggcggaggttgcagtgagccgagattgcgccactgcactccagcctgggcaacagagtgagactccgtctcaaaaaaaaaaaaaaagcagtccttttcttctgatctggaacacccaatgtaaaaatccaagaagaacattctggggtttaagaagtctacatctgaattgaggctccaactcatgattggttcctgctgatcaccctatccgtttcatctcaactttcctggctgagaaagtagaagagagagaaagggaagcaacatttatgctacttcctcacaacaacacgattagcgttgccctcattttacagctaaggtaacagattcagaacacagatatttctgattgcaaagcccatacttttgcggttatgccagcctttcttgtctccaaggggcaggtggaaaccctgctcagggttggaactctcctggaacgtttctaatgggcttcatcttcactcactgctccgccttccccaaggtgttgtgatcagaggaatgacagactgaccattcacttgctattagagttgggtgaggaggaggagtcccatagtctcctgtcctgcggaacacagcaaggtggtggccttattgtaaggtcacttgacctggagagggtcttctccatctctcctttctgtggagcaggagaaggggtggagtaggaagggaatgggtcctcctgtcatgagtgaccccttcattgaaacttacagcttctccaaacaccccagcaattcatttaattctccctcatcctcccaataataccaggtgacacagactccacagtaccagcaaccccattttataggagaggaggaaactgatgctcagagaggtgatttgtccggggctatacaaccagaaacagcctgagccaaattggcgccagagtctattgcccagaatctcctattcctcttctctccaccagtcatggtgggtggcatccagatcttggatgtttctccctaaatcaggggtaaaggtggcgcaattctaggtcaaaggtcatgagatctgattttaccagcttctcctctctcagctccatatttcttcctcttttctcatccaagagcagggacctcacccagccccattcctggccttttggaagaacaggggttgggggggcggtgtatcctagtgactgattagggcagaactcctggacccctgggatttattttgctgtctctattggacaccctccccatctcagcctcagcctcccaccggcagccccagagccatgttggagggagaggcttttctgtttggtttgaggcagcctgggccccacactggggagaaaggagttaaagccaggtcccaggatcaccgggaccgggaagttccggtggtccaaacaggagtgggttggggggacccgcaggaagagaggtttgggacaaaaggggggtggtgccagccatgccaatccccatcagcgctcggcatccactggtagaccgcccccccacccctcccccaagttccacgcctagtttctgccttcccgccccagcgggccgcctgcaccccacggccagtcagaggcccacctgcggccacctagagccgagaggggcttgcctccctgctgccgcacgcccattgtgtgcgccgagccggcggaggggctgcgaggggcggggccgggcgggcggagggagggagcgagggaggggcgcggggagatgctgagcctacgggggaggcggcggcggcagtggagagagcgggaggagcgagggaaggcaggaaggaggcagccgaaggccgagctgggtggctggaccgggtgctggctgcgccgcgctgctttcggctcccacggcctctcccatgcgctgagggagcccggctgggccgggccggcggcgggaggggaggctcctctccatggtccagaagaccagcatgtcccggggcccttacccaccctcccaggagatccccatggaggtcttcgaccccagcccgcaggtgaggcgtggtggcccggcccaacgggagggggtcgctcccgcggaccgtgttaaggtcggctcgagaggcgcgggagaggaaggggttatatgccgggcgcggaggagagagggatgcctgcgcgccccccatccttgcaggttgtgattgatgggcgctgggcctggggctgggtggcgatgctgcggagcggggagggggcgggtgggctgcctgtcaccctcgcctccttatctcccccgcgtcaaggttcctgccgcttgggcaccagcttcagtgggctgagcgtgggggtgctggtggagggggatctgggccttgagaaggggaggttgaaagaggctagaaagcgagccaggcaaggggggcgacgcagagcacgctcgggggcgccaggcgggtgtgggtggggcgggggtggcacgaggaggtggccgaggcgatggtcagagggcggtgccaaatgccaacaggccttcaaagccgcagacactggttctcgagggtggggaaagagccaaccccggtcgaggtcccctcccagccacctgggctccatctctatgtcggacctgctcccctccccccacacccacgttgacttaccccacccccacccccgccccaaaaacgcctccaaagtttggaaagttggatggatgccaactcataggagggggggaagctgttttacctgggggaggggtctacttctccatccccacccgcacacttttcctacacccctggttactcccaggaagtggcattcttgggcgcggtgggttctcatggggtgaccagcaggctctgggatggtcgcgccaggggatttctttgggagtgtccttctccaag

SEQ ID NO: 7289 - DNA, 6000 bp, Homo sapiens
gtggttgggtggggggggggtctcattacgttgccaggctggtcttgaactcctggcctcaagcaatcctcccgcctcagcttcccaaagtgctgggattacaggcttgagccacagtgcccggcccaaggtctgtttttattttgttgaatttccataacctagtaaagtagatgctcaaatatcattcaaatgtggaatgaattaataaaaggcaacacatactgagcacttaattatgtgccaggaattgttttgagtgtttcatttcacatttactgacccatttaatatccacaacatgaggagggtattatcatgatcatcgccatcttcatttactttattttttccgaacaccagtgtcacttgccaattcttttagcaacgaggtaactgaagcacagagaggttcagtaacttgcttaaggttacacagctggtaactagaggagctgcgagttgaaccctggcagtctggtgccagaggatgttaccagtgctgctctattttggcttatcttaatcattaacgtatatgcaggtttagactttttattatgaacagttttaaacattaaaaaagtagagaaaatagcccaggcgtggtggctcatgcctgtaatcccagcactttgggaggccaaggtgggcagatcacttgaagtcaggagttcaaaaccagcctggccaacatggtgaaaccctgtctcaactaaaaatacaaaaattacctggatgtggtggcgtgcacctgtaatcccagcccactcgggaggctgaggcaggaaaatctcttgaactagggaggcggaggttgcagtgagccgaaactgcaccactgtgctccagcctgggtgacagagtgagactctgtctcaaaaaaaaaaaaaaaaaaaaagtatagaaaataatataaggaacttcatgtcctcatcacacagcttccataattatcacctcatggctcatcttattatttccctatggttcccagtccagattatttcgaagcaaatgcaatcactgtatcatttcatccacagatattttagtatgtatgtatgtctgaaaggaggactttttttttttttttttttttgagacgaagtctctctctgtcacccggggtggagtacagtggtatgatctcggctcactgcaacctctgcctcccagtttcaagtaattctcctgcctcagcctcccgagtagctgggattacaggcacgtgccaccatgcctggctaatttttttctatttttagtagagacgggatttcaccatgctggccaggctggtctcaaactcctgaccttgtgatctgcctgcctcacctcccaaagtgctgggattacaggtgtgatccaacgcacccagccaaggaagactttttttttttttgagatgaagtttcactcttgtctcccaggctggagtgcaatggcacgatctcggctcactgcatcctccacctcctgggttcaagcgattctcctgcctcagcctctcaagtagctgggattataggcgcctgtcaccacgcctggctaatttttgtatttttagtagaggcggggtttcaccatgttggccaggctggtctcgaactcctgacctcaggtgatctgtctgcctgagcctcccaaagtgctgggattacaggcatgagctaccacgcccagccatggaggactttttaaattaaaaaaacaaccttaccacaattccatatcacgcctaaacatttagaattccttaatatcgttgaataccttgtcagtattcaaatttgcctgataacttaataaaatctttttttttttttttttttttttgagacagagccttgctcagtcacccaggctggagtgccaatggtgcaatcttggctcactacaacctctgcctcctgggttcaagcaattctcttgcttcagcctcctgagtagctgggattacaggcgcccatcaccacacccagctagtttttgtagttttagtagagacggagtttcaccacgttggccaggctggtgtcaaactcctgacctcaggtgatccgcctaccttggcctcccaaagtactggggttacaggcatgcgtgaccatgcccggcctttttttttttttttttttttttttttttaaagtcagtttgcttgaatcaggatccaaataagacttttagttgatatatcatttaatttattttaatctgtaagtctctccccctcttttttttcctttttttttttttttttttttgagacaggatctcactctgctgcccagactggaatgcactggcacgatcacagctcactgcagccttgacctcccgggctcaattgatcctcccacctcagcctcctgagtagctgggactatagacacaccaccatgcccaactaatttttgtattttttgtagaccacggggttttaccatgttgtccaggttggtctcgaactcctggacacaagccttggcctctcaaagtgctgggattacaggcgtgagtcaccatacctggccccagttttatttgttaagggaattgggtgtttgtcctaattttcttcattctagactttgctgactatatccctggggaatgtatgttatgctattttgtgtcctcatcttttcatataacttagcaaacattccccatactgccacagggttttcacaatctgtcctaaatggcttcatactattccatccagtggatatactgtaatttttttcttgggcatttggttgctttcagtttttcactactataaatattgctggaatgaacatcctgacacattgcagcttttcctgtacatgggatgacttccttagaatatgctaccaaaagtgtaattatggctctgaggcaagaagaatttttcagcttcttggcacacagtgacaagtgtttgtccaagggtttgtatgtcccccagcacgaaataagagagctgtcactcactctgaatagtgcttagggctattcacagctgaagaacgtttggggaagatatgataattatgagggccaagagagaaggagaaagatgacaacagggactcccgctaaataaagcagaaagtgatctgcaatttaccacaaacctagagtgagtcagaactctgttcattcctattgtgaaaaaaaaatcctcgataacaggagttattaatagtgcatgacatgttcagtaatctttctgttagactctgcattagtcagaaccttatttgagacgtggactcagtctgggtcactgaacttcatagagatgtcaggaaactgaccaagatccagagggatcgatcaacttgatggaggatgaagaatcccagagaaaaatcaaaggagtcaagcaggcacacttcggaaaaaacagagacacctttcttgccttaatgctggggaggtttctgtgaaaagaacaacactgggtttgcttatgtctgcagaaagatgactataaggaaaggcacctccacaaaccaggagaaacttccacaggacataggcagagctatttcagactcagatgattatttcgatcttggaatgagcccttttggggccattggccctggaaatattgaagaagctgcctgttctgctctgggtggttcaaatacccacctgcctggtgaccactaagtgcctctgggggtcccactccagctgtgtgacaactgtttcctggcagccccctggggaaggaaaggtaggtgtagtccgagtaaagtgctccgcagtttccctgggctagccttttccttcctgttccctcactttcagttcagggtgccatgaactgccattcagagtcaggttggcatgccatgacatcatctgaccttgctattccagccctgccctgcatagagtggacttagaaagaagctgggtaaggagttgaaactacccagacaagacctcttggtgacatggagaatgggagtaaccgaggagacctcaagagccatttagttcaacctcctacagtaatattaagtagattcctacaatgcaacaggtgctttacatacattcttttgggttcccacaaccttggaggtggggtttcacaggtgtggaattggagattaagacaagtaatttgcccagggtcacactgccaataaaggagggcctaccccatgtctaccaggcagtaaagtctgtgcccttgcctttagacgatgcagatgtgaaaactgcagaccagagcctctcattcaaagccacacaagctgacctgagacagaaactcaggctccttactactgatggaggaatctatgatacgtagcctcttctcacgtcaggtgcggggcggccaaggatgtggcccggtccggggcagcctgggccaagcgtgactgagaaggagaaggcaggctccgttccgggccctccagaccctcatcccagccaatgttgtgaaaagcgctctcccaggagggcccagcagggcaaagggccgggctagtctgtttctggaggagccaatctggggccagggcggaggcagccaggtgcagtggaaaaatcctgcagttggggtcagaatatttgggtttcgatccagtctaggacccagcaaagacctacagaaagttacttacaagtccgagtctcctcatctgcaaaactggggcacggataaaatacacttgaagggcacagaagcaaaagttggaattgttacgcaccaaaattctatcatccgatctgaccatcacgtcacggtacaacttccaaccgtgcgtccccgaagaggccgggaacggagcccaggaaaaactacaactcccaggaggcgtcgggagggccggcccggagccagcggaagaaactacaactcccagaaggcgtcgggcgtgccggcgcggggcggtgacgtacggggaccggcgcggagcgctgattcggccggagctgccagcggggaggctgcagccgcgggttgttacagctgctggagcagcagcggcccccgctcccgggaaccgttcccgggccgttgatcttcggccccacacggtgagcccggaaggaaccaagaggccccagggctacgggaggggcgggagagaaggtgggggctgctggggaggcgccccgggctggagagacgggggcagagggagtggggggtggagggagtgcatcagccgagggggtgcatcggctggggaggtggccaaggaataaagtgcgagcgggaggccgggggtggaacgtcgggaggagcgcctcggctaggggtgggaggcggggagcggctcggcttcggggataaacgtttggctgcctccagggctgggtgaacgcgtggagatggctgtggggtcccggaccggaccgggttccgagtgcgaagacccaggctggggaacagagcgggacccctccccccggccccgcacccgaggtctcactcagaaaaccccaacaacagtgaggactccgcctcttcgctcctcctctcctgtgcttagtgcgggttcgcctgggcactcgctttccgctcctaccgccctcccccagtcggggtggctgggccaaagttgagaggttatcagctgtggtcctgcagcttggggggtgggcggaatggacatggcattgtgacgtgctgccccggactccccgttggggtccccatccaggcctggatgttttgtgctcctcttccagaagacaggaggtttgctgttgtgagggctgctctttcctgggggagggaatgggaagggctcacctggtggctgccctggtggtgctcagccttggcttgagtgtctggcatactggctgggcccggatatttgtatgtggagccaagagggtggggcgggaaggagggggaaagagctaccagcaaaaaagtggttaacacaacagagttgctgcaggctctggtttgaggcaggttatgaaaccacatcagggcccagcactaagcagccacctgcc

SEQ ID NO: 7290 - DNA, 6000 bp, Homo sapiens
cgctaagcaggatacataagaaaaagataaaattggccaggtgcggtggctcacccctataatcccagcactttgtgaggcctaggcgggtggattatttcaggtcaggagttccagaccagcctggccaacatggtgaaacctcgtcactactaaaaatacaaaaattagccgggcgttgtggtgggtgcctgtaatcccagctactcgggaggctgaggcagaactgcttgaacctgggaggcggaggttgcagtgaactgagatcgtgccattgcactccagcttgggtgacagagtgaggctccgtctctctctatgtgtgtgtgtgtgtgtgtgtgtgtgtgtgtgtgtgtgtgtgtgtatagttatgtagtagtcaatacaaaggaaataaagctgagaagggacaggaaacagaggggtaaatttctgctagggcagctggggaaagcctcacgaaaagacagcatttctgtaaggactttttaaaatgttagcagggcacaggagacaaaacagcagtgtgatggctcaaggatgtcagtaaatagaataaataaataaataacaataaaaaataagtggccagttatggtggctcatacttgtgatcctagcactttgagaggccaaggctggcggatcaattgagcccaggagttccaggccagcctgggcaacatggcaagaccctcatctctacaaataattttttttttttgagatagagtctccctctgttgcccaggttggcctgcagtggcacgatcttggctcactgcaacctccacctcctgagttcaagcaattctcctgactagctgggaatacgggcatgtgccaccatgcccagctaatttttgtattttttagtagagacgggatttcaccatgttggccaggctggtctcgaactcctgacctcaggtgatctacccgcctcggcctcccaaagtgctgggattacaggcatgagccaccatgccaggccttacaaataatttatttttatttatttagttagtttttatttcataatcataagcttaattctgcaatccagctaggcatggaaaggaacaaggaaaacagggaactcaaagcgaactgatcgagagcacaaagattctaggatactgtgagcaaatggggtggagggtgctctcctgagctacagaaggaatgggctggtggttaagataaaacacaagtcaaactcattagagttgcccacagtcagcaatggtgatcttgctggtcttgccattcctggacccaaagcgctccctggcctctgcaatattcatgccttctttcaccttgccaaagaccacacccttgccatccaaccactcagtcttggcaatgcagataaaaaactgggaacggtttgtgttgggtccagcatttgccatggacaagatgccaggactgtatgcttcaggaagaagttctcatcatcagatttctccctgcagatggacttgccaccagtgccattatggcgtgtgaagccaccaccctgacacatataccctggaataattctgtgaaagcaggaactcttataaccaaaccctttctctccagtgctcagagcaccaaagttttctgctgtctttggaaacttgtctgcaaacagctcgaaggcgacacagcccaagggctcactgccagcggcgatgttgaagaacatggtggggttgaccatggctgatagttactgggtacaaacacatacgtgcacctatgtgtgtcttacatgagcagtggccccacaatccgatggccagggagaggtgtctggaacagagaccggagcgaggcaggattggcctctcagcccagccccagattttttttttttttttttgagatggagtcttgctctgttgcccaggctggagtgcagtggtgccatctcggctcactgcaagctccgcctcccaggttcacgccattctcctgcctcagcctcccaagtagctgggactacaggcgcccgccacgacacctggctaattttttgtattttttagtagagacggggtttcaccgtgttagccaggatggtctcgatctcctgaccttgtgatccgcctgcctcggcctcccaaagtgctgggattacaggcgtgagccactgcacccagcccccggccccagtctttaggcatggccgagaatgggccaccggctgccagatggaggcagcgtcagcaacacctcctctcaggctggatggcgctatcagggaaggaggaccgggcctgagattgtagagtctctgggtctggccctgtggcatcacaggctgcagacagcacagggtgactgtaggctctccacttcccaccccaccctggcccaccgcctcagctgctttccattcccgcagggctgatgggctttttccaggtggcgccaatggcctgacccagcaggagccacgggacaggacggggtggggaccattcctggacagtcaagggagatgagatgtgaccctgagcccctgtggctgggggcagggggccggtagcagctttgccaggggcagagggaggtcgggagggtgaggccagcagcgcccccaacccacatcctgttttcagaatctggggctccagcatgtgctttttcccttggactttctccagggcagcgtcccccacccaggcccactcccaagggaagcctgcacgagggcaggagggttccccaacacacacaagcaggagtttacctagagtttttcctgcgggggctgggcccctgagctggagggagtggtgggtgaagggtacgtgccttccccttcctgaaagtggacctgggggtctgcgtcagcatatggaaaaccacacaggcacccatggctgatagggagaggaactgtgaccaaggaggtgagtcctgctgcccttcttcagaggggcaggcatgacctccctccagtgcctgcacccaccagccccacacaaggctggcatagaggcaacccctcctggggactgtcaggccctgggacagcacctgggaagcccagccaggctggatggaggacagttccatgaaaggctcaagagcttgggctcaagaactagttgggcctcgcataggcctggatctgctatttaccggctgcgcgacagcaggcaagtggcttagaccctctgagtctcagtttcccctggtgtaaatagtgccctcatgccaccattgacagagaatcgaatgagctcattggcatatggagctaacggggttccacacggggactggcccagcaggtgcataggtgaagcgggttttgctatgcactcaggcggacccctaggaaggcagagcagacaaccaaacatctcagcctggagtgtcccctccctgaccactcagatcaccgtcggtcacccttactcccttctccataaaacagcttcccccgccacccagggcagtaggagggaactctcaattcagagccttctggggggaaaaagtcctatttttcacattataaaataacatgaggccgggcgcggtgactcaagcctgtaatcccagcactttgggaggccgaggcaggtggatcacctgaggtcaggatttcgagaccagcctgaccaacatggagagatcctgtctctattaaaaatacaaaattagctgggcatggtggcacatgcctgtaatcccagctattcaggaggctgaggcaggagaatcgcttgaacccgggaggaggaggttgcggtgagctgagatcacaccactgcactccagcctgggcaacaagagcaaaactctgtctcaataaataaataaataaataaataataaaataacatgttaggccgggtgtggtagctcacgcctgtaatcccggcactttgggaggctgagataggcggattgtttgaggtcaagagttcgagatcagcctggtcaacatggcgaaaccccacctctactaaaaatacaaaaattagccgggcgtggtggcgcacacctgtaatcccagctactggggaggctgaggcaggagaatcgcttgaacccgggaggcggaggttgcattcagccaagatcatgccactgcactccagcctgggcgacagagctagactccatctcaaaacaaacaaattaaaaataaataaataaataacatgttcattatagtaaagctggaaataacagaaaagtgggaaggaaaccaaagattttatttaactatcaaagccaggcacttgggatattttaatggttttccatatgggatttttttttttttttttttttttgcaggcacaagggtttttttggttctctgtaatatggttgggaattcaatattaagaagtagagaatcccagctactcaggaggctaaggtgtgaggatcacttgaagccaggagttcaagatcgacctgggctatgtagagagaccccgttccaaaaaagatgtaaagctggaaggaaacttgggggtcagctggactggccgcctttgttgacaaggcaggaaagcctggctcagtaccgccgaatgatttgtccaaggtgagcggtggcagagctggaaccagaagctgttagatgtttgctgccccttaaactccagcaccaaacctccctctgtccccgaagaccatcttcacagggcatggttagtgcgtagtggatctaggctccagactgagggtctgtctgggaagggcttctaggaatcccccagcttcctcgataaaggatgtggctctggttacccccctcccccatttccagatggaaatttagctaaagagtgagggccacagagcccagcaaggggcgtggtccgtgcctgttcccaagggcggagccagccagcagggtcaccctgttcctttaagagaagggggagcgctagcccctctcagccatcctgtcctgtcctccatcctggccaaatccgaaagggaaaatgaaagagggagcaggaggcgccggtcccagccacctcccaaggtccctggctcagctctgacaccccagtcccggccccagggtgagtggggttgggtggcggtttaggggcaccaggggcgtgtggggacctgtgtaagtgtggggtggggaggatctcaggagatgtggaggctggaggcacaggaggccagggaggagggagaagcctggcgtcgcactcccaccacgctggggtaggagggcagggacacctccgacaaaggaccctgtgagagttatgaaagcggagttgcctctgtaccagccccccaccctgagaggagttcactgcagtaaaaatggtgagagaaatggtgggccaagaaaggagtggtctcgctgcctctgccactcccactcctcccatgggcaccaaattgggtctagcgtctcgggttcgaggctccactcttcccacagcatccttgacagctaagggcaccgctgggtttccgcttccgaaaccaggcaagtcaggggctggtccagctgatctccaaggtccttcctaagaatctgggatctggaggatcccagggtcgaacggagacggctcagggggtgcggctaaaatgcaaatgggggatcctccccagcacccatcggtcccaaagagaaggtaacccatagctgagcgtcgcctgctcccctcgggccctcccgtggccctccgtttcatactggtctcatcgctaaacccgggcctctcctacctcacgactcaccctgaagtcagagaaggtccaacggaccccaccccgataggcttggaaggggcaggggtccctgacttgccccatcccctgactccccgccccgcgtccccagcgccatgggggagtgggcgttcctgggctcgctgctggacgccgtgcagctgcagtcgccgctcgtgggccgcctctggctggtggtcatgctgatcttccgcatcctggtgctggccacggtgggcggcgccgtgttcgaggacgagcaagagg

SEQ ID NO: 7291 - DNA, 6000 bp, Homo sapiens
cactccagcctgagcaacaagaccaaaatttagtcacacacacacacacagaaaagaaagaaagagaaattgggcttggttttggcttcttacctcccactgtctaggctgagttttcaaggttttccatctcagaggctagtggaaagggcagaagggagaaaaaaagctagggggagggggcagctaaggagcctttccatgaaggaagaaggtcctggagcctgacagtccccaggagcagcgacaagaagcaggggagggagaggactgctgctggctgctccaccccccacacacataatgtggggtctcgcgtctgcctctctcccgcccctaattagcagctgcctccctccatattgtcccaggccagcgcctcttttgtgctcccagattcctgggtgcaaggtggcctcattagtgcccggagaccgccccatctccagggagcagatagacagacaagggggtgatcaggggcacagtgatccaaccctggcctctgaacgccgcagcggccattccttgggcccagcctggagacggcccccctgcagcaggctaatcttagacttgcctttgtctggcctgggtgtggacgcaagtgcctgtcaattccccgccacctcagagcactataaaccccagacccctgggagtgggtcacaattgacagcctcaaggttcctggctttttgaaccaccacagacatctcctttcccggctaccccaccctgagcgccagacaccatgaaccttccttccacaaaggtaaagatccagggatggaggggtgactcaccatcccagagaagcaaaaagagtgcttgctcagagggctggaagaaaggccaaaggtgtctccactcttggtcttttcctgggtgtgctctgaggcaggagcacctgccttggctcacattgggttgggtgctgttttgctaagagcctgtgtttgctgagctctatgtgtcaggtgctccgtttgcacctgtcatctcttgtcatcctcccaacagccttgcagagtagaaattatttctagtatacccagtttacaggtaagggagctgtgccctctgaaagggcaggaaactggttcaaagcaacggagttcagtcactcctgcaagggggcaggcagatgagagagcattctggagtcttgctagttcctgatttccatgtgtttccctgctgtggagaggaagttggggggactcagtagggcccgggtttttcccaagtttacaacttctgctgcagacagacactcctgttttcaggtggagtggcaagtgccctagtggtggcacagtggcctaagtctccagagaaaagggggattcactctgcccagggggtctcaaaaggcttcctgggggagatgctctgctgggtcttgaaggaggagcagggaaagtaggccgataccagcaagggcgcaaagcaaggagaactaagtgacagccagaaaggagtgcaggcttggagggggcgcggagccagaggggcaggtcctgggcgtgggagctggtggcgggcgccgtgggaagacccccccagcgccctgtctccgtctccctaggtctcctgggccgccgtgacgctactgctgctgctgctgctgctgccgcccgcgctgttgtcgtccggggcggctgcacagcccctgcccgactgctgtcgtcaaaagacttgctcttgccgcctctacgagctgctgcacggcgcgggcaatcacgcggccggcatcctcacgctgggcaagcggaggtccgggcccccgggcctccagggtcggctgcagcgcctcctgcaggccagcggcaaccacgccgcgggcatcctgaccatgggccgccgcgcaggcgcagagccagcgccgcgcccctgcctcgggcgccgctgttccgccccggccgccgcctccgtcgcgcccggaggacagtccgggatctgagtcgttcttcgggccctgtcctggcccaggcctctgccctctgcccacccagcgtcagcccccagaaaaaaggcaataaagacgagtctccattcgtgtgactggtctctgttcctgtgcggtcgcgtcctgcccatccggggtggcaaagcgtcttgcggaggacagctgggcctggaagcccggctgtcgggcaccagccttagcttttgcgtggttgaatcggaaacactcttggttggggagttcccagtgcaaggccctggggcacagagagaactgcacaggtgcatgcttggatcgggccatgcgggactcctacgatgctctgctaggcattctgtagcggggactttacccagagacgcggaaggggaaggaaagcaagaaaggttgcagcggtcgggcgcggtgctcacgcctgtaatcccagcactttgggaggccaaagcaggaggatcccttgaagcaaggagttcgagacgagcctaggcaacatagtgagtgagacatctctccaaaaagtttttttaattagcggggtatggtgggcgagaggattgcttgagcccaggagtttgagtttgagccataattgggccactgcactccagcctgggcaacagaaggaggcactgtcaaaaaaaaaaaaaaaagaaagaaaaagaaaaaagaaaagaaagaaaggaaagaaaggaaggaaggaaggaaggaaggaaggaaggaaggaaggaaggaaggcaggcaagctgcatagagcagcagaatccagctaggaaggggtgggagtcaatcctgctgaaaaggcagggaatttgaacttcaacaatgagtcatccagaatggctgcatcatggggtatagggtgtggggagtggagaggctcaggaagggacacagttacagtcagtgcagcacagctcgcaaaggctctcacaaatcatcgggctttgcactttatcttgtaggtaacagagtcatgggacattcttaagcaggggcagtacaagattttactgcaactccagccaaagacacctgttactggtgttcccaaaatccatatgttgaagtccgtacccgtggcacttcagaatgtggctgtatttggaaataaggtccttccagatgcaattagttaagatgaggtcatactagagtagggtgggcctctaatccactgtgactggcgtccttataaaaaagggaattggaacacagaaacacacacagggagaacccatgtgaacatgaaggtagagattggctcctacaagccaaggaacaccaaaaattgccagcacccccacccccagaagataggggagaggcatgcaacagattctccctcatagccttcagaaggaaccaacgctcttcacctgaccttgcttggacttctagcatccagaactgtgagacaataggtttctgttgtttgagccactcactttgtggtactttgttatggcagtcctaggaaactaatataacatccaaaagtagagacacaggctaggctccgtggctcatgcctgtaatcccagcactttgggaggctgaggcgggcggatcacttgaggtcaggagttcaagaccagcctggcaaacatggcgaaaccccatctctactaaaaatacaaaaattagccgggcattgtaatgcacgcctgtgatcccagctactaaggaggctgaggcgggagaattgcttgaacccaggaggcagaggttgcagtgagctgaggtcatgccactgcactccagcctgggcaacagagcaagactccgtctcaaaaacaacaagaacaagaacaacaagaacaacaacaacaacaaaagtagagacacagaaaaatgtggcacttcttagcaatctaacatcccagataatacctagctcagagggtggggagaatttagcctgccctccttgcccatagggttcccactttcactgcttcagctgttttgtcgtgggaagcagccaccctcagccacagaactcagctgcctcaattttctgcataggtagtgagaaagtcctgtgtctagtctcactttggtccctcttgctgctgtactggttccatcttggagaagttagaggtcaaagttcacatgtgcatccttggagatttgcaagccatgactctgcccacctcgaaactatctttttcagaggtagtttctcccaaacttgcctccagcctctcttccacttgaagggcagcagagaggaggattaagacagtaggaagagggaaaacaggcaggcaactgcccttcaagacacttattttgtaccaaagacatgcattatggtattacattctcacggtaactgcatcaggtaagaattatcagctccattttacagatgaggaaagtgggcttggagaggatatcacacgattggtgtctagagctgggactctacctggtggactccaaagctcttttcattccaccatgctgtgtctcagtaggcagagttcgccagggtgtcttgggaaaactgaggcaggaggtaagaatggtgctttctagagttggggtttcaagccttcccattgtccattctctaccagcaaactagcctcttaacccttgctgtctcacgctggagctactggcctgtgggtgctgcgaaatatgtcaactccagtaggcggcactgtgaaccagacaccagcccagcgtggacgccgcgcgggaaaacccgcgaggtggagccacaaggagcagccagggaaccacgtgtggaggcgtggccagcctggaagagggcgggtctgttattcaagccccgcccatcatttcaggcctcccctcccggtgggcgtgccccgaattctctccccgagagacacgcgtgggccgctcccctctgggaggagggctgcccagaggggtgcgggtgtcgctagcggcccctccccgtgtggggccacgtggcgggtgcgggccgagcccgaggggaagaacctggcccgtggggaggtgggggggaccgaaacggcgctgagccgagccgagagctacggggttcggagcagaggcagcggcagcggcagcggcagtaagagggaggggaggaggcaggagggcgcatggggcgccccggcccctccgacagcgcgccccctccggcccggccgcgctgaaagctccccagcgccgcgccttgaacccacgccccggggccatgccggtcatgaaggggttgctggccccgcaaaacaccttcctggacaccatcgccacccgttttgacggaacgcgtgagtgggacggaggtcggggcttgaggttcgagctggggggcaagtatcctcggggccgtctcggatctcctggacatggtgagacccgaggcgaggggagagaatggaggtgcgggtctaggaactcccaaagccgcggtgcaggaacagggcggggagtgccctgcgaggggaggaggggaaagggccgagagcacgggggccaaggttagggggtgtgactcgaggcagaagaggctctttgtgcggcagagcggaggagggtccttcggagccgcccactctcgggcagagctgtgctgggggcgtgtatgggggtatccgagacacagaagtggggcaaagtggccgggcattctggggtctactcacagactccagctcccactacctccagaaaaaaaggagaaaagatcagacttcagcaggacctagtttggattgaggtcgcgcgcccccaaatcgtggggcgtcagtgtctaaggtgggtgaggcaggaggaggggagcggtctgtgcgacggtgggaactcccagctcgcccaacgtagcttgggtttcaggttcagcaccttggacagccacatcactcctcccccgcctcttctcccgccattccctcttcccactctggaacccagagattccccgccctcacctcccccaaccccgccattccctcgggaaccctggccgggatctggatggtgggggagcggtacccgagggcggaaactgagccgccggg

SEQ ID NO: 7292 - DNA, 6000 bp, Homo sapiens
gaggctgagttgggaggattgcttgagcccagcagttcgaggctgcagtaagccctgattgagcaactgcactccagcctaggcaacagaatgagatcctgcctcaaaagcaaaaaacaaaaacaaaaaaatcccacttgtcttcagcaactcctcccccatgagatttaaattgtaatctgtaaatgtccattgatagggaactggttaaacaaatatagtagacgtatacattggaaaacaaggcagttctacatgtactgatatggaactatccataaaacatattaataactgaaaacaggaaagtgctgaaatatatatatgtatgatcatatatgcagaaatagtctatagaagattccgcaagagaatagtaataataggcttggcatggtggctcacacctgtaatcccagcactttgggaggccgaggtgggtgaatcatctgaggtcaggagttcaagaccagcctcgccaacatggtaaaactccttctctactaaaaatacaaaaattagccaggcgtagtggcacatgcctgtaatctcagctacttgggaggctgaggcatgagaattgcttgaacccgggaggcagaggttgcagtgagccgagatggtgccactatactctagcctgggaaacaagagcaaaactccacctaaaaaaaaaaaagagaatatagtaataattgatgtctcctggaaaagaaactagttgctgggatagagataaaattttttagaggccgggtgctgtggctcatgcctgtaatcccagcaccttgggaggccgaggtgggtggatcacctgatgtcaggagttcgagaccaggctgaccaacctggtgaaaccccgtctctactaaaagtacaaaaaattagctgggcgaggccaggcacagtggctcacgcctgtaatcccagcactttgggaggccgaggcaggcggatcatgaggtcagaagatcgagaccatgctggctaacatggtgaaaccccgtctctactaaaaatacaaaacattagccaggcgtggtggcaggcacctgtagtcccagctacttgggaggctgaggcaggagaatcgcttgaacccaggaggcggaaggtgcagtgagctgagatcatgccattgcactccagcctgggcaacagagcaagactccgtctcaaaaaaaaaaaaaaattagctgggcatgggggcacacacctgtaatcccagctacttgggaggctgaggcaggagaatcgcttgaacccgggaggtggaggttgcagtgagccgagattgtgccattgcactctagcctgggtgacagagagagactccatctcaaaaaaaaaaatgataataataataatcatcatcatctaaggatcttatgggacacttaagaaatgaaggtcctataaggttctctactgtcactcctcttttttccaaaagctttttcaatccttagtagaaggaatttaaattactttaatacatttctcctaaattctaaagtaagttggtaatctgccagttctagcagttatatgtgtatatatgatcttatatactagcttaattctacttgagcctcaaatgagaaagccatttgtttgtgagaaaacagttattgaagtgttagggtacccggtgtggtggcacacctgtagtccaagctacttgagagggtgaggtgggaggatcacttgagtccaggaggtcaagactgcagtgagctgtgattgtgccactgcactcagcctgcatgacagagcaagaccttgtctcaaaaaaaaaaaaaaagttggaaaaaacacaaagccgaagtggctcacgcctgtattcctagcattttgggaggccaaggcaggtggatcccttgagcctaggtgtttgagaccagcgtgggcaacacggtgaaaccccatttctacaaaaaatacaaaaattagctgggtgtgatggtgtgcgcttatagtcacagctatttgggaggctgaggtgggaggatcacctgaacccgggagttcgaggctgcagggtcaacagagtgagactctgtcttaaaaaaaaaaaaaaaaaggcggggcacagtggctcacacctgtaatcccagcactttgggaggccaaggtgggtggatcacgagctcaagagattgagaccatcctgcccaacatggcgaaaccccgtgtctactaaaaatacaaaaaaaaaattatctgggtgtggtggtgcgtgcctgtagtcccaggtactcgggaggctgaggcagaagaatcgcttgaacccaggaagtggagggtgcagtgagccaagactgcaccactacactccagcctggcaaaagagtgagactccatctcaagaaaaaaaaaaaaaaaaaggaaaaaaagaggttaccagtaaccacgtatcttgcctttctagcagaaacagtacttcaggataacctgataaacagccctagttgatggctccattttctatgagaatttcggataacaaatatggtgttgtaaacccttaaaaaaccctacaatgttgttagggcactaacccagtccctgcactgtcggtctcctttctgagtttgtgggttctctgtctgggttgaggaggccctgggtccccatagaccagtttttcactcttcctaatgataatggataccagactagaagtgaccttttgccaggaccatcatccagccagctggggaaacccaagtgtggtttcctaaggagggaaaagggttgccgcttttctgtgggaaagggagctggcgccacttcagacactcacagcaccagtgctgtgctagacagcaaaatgggggaggatgggcagcctccctatttctggactttctgcactaaggaccctccttgggcctgctcagaattgcctgctcccttgtacccagcatggatgaaaatatgctttggttaatcttctgaaacagcacatgggagttggggagtggctgtgggtgcctgtctccctgccccagtggaaggcttagagcagaaggtggaaagagcatgaaagcaggagtccagacctgggttcaagtgccaatgccaacactaacctgcgagtgatctctggcaagccacctgtcttctgcaggctttccttttcctgtctgtcaaatgagggggtgggatttgatggtctctccgatggcttactgttagtccctggaatcttgaaagagaaatggactcctagatcctgctcactgagattggtgtcagctgcctctgagggggcggtgggagggggaacacagggaaaggtgagttttagagagaggtgagacgtgggtttgtgggttgcttttgtttttgttttttttgtttttttgagacagagtctcactctgtctgcactcagacagtggattaccaactggcagattaccaacttactttagaatttaggagaaatgtattaaagtaatttaaattccttctactaaggattgaaaaagcttttggaaaaaagaggaattctactctgtagaattccactcaggctggagtgcaatggcgcgaatctcagctcattgcaacctctgccccccgggttcaagtgattctcctgcctcagcctcccgaatagctgggattacaggcatgcgccaccacgcctggctaattttgtatttttagtagagatggggtttctccatgttggtcaggctgaggtcgaactcccgacctcaggtgatccacccacctccgcctcccaaaatgagccactgcgcctggcctaatttttgtatttgtaacagagacggggtttcaccatcttgggccaggctggtcttgaactcctgacctcgtgatccacccgcctgggcctcccaaagtgctgggattacaggcatgagccaccgcgcctggcctaagagaggtgggcttttaaaaagggctttacaccaggcgcggtggctcccagcactttgagaggctgaaaccagcagatcacttgagctcaggagttcgagaccagcctggtcaaaatagtgtacaccccgtctcttaaaaaaataaaaattgaaaaaaataaaaattgaaattagctgggcgtggtggcaagcgcctatagtctcatctactcaggaggctgaagtgggaggattgcctgagcccaagaggtcgaggctgcagtgaactgtgatcagaccgctgcactccagcctgggtgacagagtgacaccctgtctcagaaaggggggttgggaggtgggctttattttccgtttgattgcccatcttaattctactctgttagggcaattctaaaaagaacttagaggagcttcgcagcccttcaccaccaccgtgaccccaaatacgttctctctttctccccccgccccccacaaacaaccccctaagcttacccctgagttagtaacctggttggggttggtgatgaggaaatccgagaggcctcttagaaaatattgtaaagggcaagggtccttttgtgctcaaaatctaggtaaaggcaaatacaagattttgcctataatttcagaatctcctggtccacccggctcccagatcttgaggattttcggatgagcaattcaagtgagagggaaacagagagcaacactcttagaacctgattccgttcctcagctcgcattcctccgcccgtcccgctcccgccgccagcggaggccctagtctcccgctccaactattccaaccatcccgggaagggtggggcgctcggctcttgggtccccctccgccgccccgcctcgtcgatctccccttctgccccggtccctccctttctggggtggggccagccaatcagcgatcagactccggagtttggcccgggagctggggagctcaccgatcccccgcccagcagttctggccgctgtcccggtgcgcacggacgtggctcgagtttcctctgctctccgctctcgcccgctagctctcctcccttccgctcctgcttctctccgggtctcccgctccagctccagccccacccggccggtcccgcacggctccgggtagccatggaggaccccacgctctatattgtcgagcggccgcttcccgggtaccccgacgccgaggccccggagccttcctccgctggggctcaggcagcggaggagccgtcgggggccggctcagaagagctgatcaagtcggaccaggtgaacggcgtgctggtgctgagcctcctggacaaaatcatcggggccgtagaccagatccagctgactcaagcacagctggaggagcggcaggcggagatggagggcgcagtgcagagcatccagggcgagctgagcaagctgggcaaggcgcacgccaccacgagcaatacggtgagcaagctgctggagaaggtgcgcaaggtcagcgtcaacgtgaagaccgtgcgcggcagcctggagcgccaggcggggcagatcaagaagctggaggtcaacgaggccgagctgctgcggcgccgcaactttaaagtcatgatctaccaggtgagcccacagggcggaaggcgcccagagctcccgcgcccggcccgcgtcccctgcctgggagttggggtggggagacctgcccgtggcgctgctcccctcccagcctggcccgggcgcccggcagatccaccctccttccggtgagcgcggctggggtggggttgggtggggtaggatggggtggagggagcggcggactcctggggcgcgtagaggggcgcgctctgcacctcgcacctccccactcagatccttccctcgggtcccaaacttgtagcagaaccgaattagcgggtggactcgaggacgctgcccctcgcagaccgctccctccctaattggctctgtcaaacttcttcctacttgggggaagtttctaggaaagtcaggggtccctcgcgatcgttggggtccgctgtaagcggacactggctgcggggcccgggcctggggcctctgcgcctgc

SEQ ID NO: 7293 - DNA, 6000 bp, Homo sapiens
tagctgccctatttccccaggctcccaccttcttgagaacactgtccagtgtttctggtcggctaatgtcgaagcagatgagcacagcatcagaatcaggataggccagaggccggacattatcatagtaagaggaacctgaaggaagacagggcatgaggggcctgagtggatgggaggcctggaagggaatgggagaccttacagatcctggtcaagggatgctgggagcagagaatggaaaagagcaaccattaatacccatcattaatacccatcatggagtctgggtttcccaagtgggggagcgggcagaagggaggtcacatggtgggaaacggctctctgcttccctagtggtttaaaaagtaataatttttattcttgactgaggtttggacccctttgagaagctcataaaatctatagacattctcataaaatgttgcatgtgctttctgggctttggcagtctaaagccctgaagggaactcttgtaaaaataaaaaccctccttatgttgggaggaggaaaagagcagtggcagggagagcactctcccattctcctgggacttgacctcagatttatctagttcaatggagagaaacagcctcctgaccacccctcactcaagacattctaaatgtcttttctgcttttttattttttgagatggagtctcgctctatcgctcaggctggagtgcagcggcatgatctcggctcactgcagcctccgcctcccaggttccagcgattctcttgcctcagcctcctggtagctgagattacaggcacgtgccacacgcccgattaatttttgtatttttagtagagacggagtttcaaccatgttggccaggctggtctcaaactcctgacctcaggtgatccccccaccccagcctcccaaagtgctaggattacaggcgtgagccaccgtgcctggcctctaaatgtcttttctaaacccagtcttatctctgaaggaacatgttccaaattaaaagccattccttcccaactttcccaggtaggcaggacccagctgaggggctcagatcctaggctttctccttcaggacatggtttctgtcaggctctgcaagttctacctcagtttccctggattttagcagaatattgatttttcccttcctgttggaattggatggatgggctgggcttacctggaacctaagggtctaaccaagggaggggacagagtgggccgccttggaagtcagggtgacccccagggacttggctacctgaagtgtcccacatgttgagctcaatgcggcgcttgtcgatctcaaagctcgcagtgtagttctcaaacacggtggggacataactctgcagacacggatggatccagatgagatcatctctccaagtcctcaccccagataaatgccctcctcactcccacaccccgtccagcccagcccctggacacaagttggtctgggattgggcaaaggggagatcccgggagctcctgcccccccccccccccccccggagaatctctgctaagctcccagacctcctcctgttcccttctggtcccttcagccccctagttcttcccctctccattgcccaggacctccgacattcccctcgccctccctcccggatgctctggttctcccaaaccccatctatctcaccctgctccctaattcctcccaccccaatcctctgcagtccttcctgagccctcaaggcctccccgcgtcctccgaccccctgtctcttgtccctggttacccgagtacccattcccatccgtcgccagggcccctgtcacccaccccccagcagccttagcgtccccctcccaagacgcaggtccctcaccccgggataggcgtccttggcgaacacctgcagcagcgccgtcttgccgcactctgcgtctcccaccaccacgatcttgcagcggccgctctgcccctccatggtcccggctacgcgccggtcccccacgccacccctctcccgggccccgccgccgcctcccccgcccctgcaactgcagccgctcgggccgccaacaccggcatctcgcgggcccgcgccgagcccccgccccgggtccgcggccccccctccgccccgcccccagccaggcggccgcgcccccccggcccctcctcccacccccgcagccggggggcggggcccagaagatctgggcggagccctgggaacagaggcctcagagccggggtccagcccgccggtgtggtctgaggggcccctgccggtttgggacaggccgaactgggcttatttgactttctcggatataagggcaggtcagagttcaagcgaagttcttaggggtagaatatgagcggcacaagcgcgaagctcgggcctgctgtgtacccacgcgtgcacgcaggtgtaccagtgcggacaagagctggggcagccatccacttcctgaacacggcgggagagagatgctaaggggaaggagggagcctctttggttttctctcccgcgtccgcctatgtcctggcagggggtcttggggaaatgggagggtgaaccccagcacacccacccggacggtggtgacatcatagctttccgtccccatggcaacgggcagccgggtctccggttacattgacttaaccgccggcctagactagcagagaagcgtggactgagttcctccagccaagcactgggtggaaagttttgggggagctgcgtcctctggtggatgcttggggacaaggagataaggaagagaaagaaccaaccgccagagttgctctgctggagccagagctaaacccaaaagtcaggcttgattaagagtctgacaataggccgggcgcggtggctcacgcctgtaataccagcactttgggaggccgaggcgggcggatcaagaggtcaggagatcgagactatcatcctggctaacacggtgaaacccgcacggtgggcgcctgtaatcccagctactcaggaggctgaggcaggagaatggcgtgaacccgggaggcggagcttgcagtgagccgagattgcctcactgcactccagcttgtgcaatagagtttcgaaaaaaaaaaagtgcttttttatatcgaggcaattcgagtcaataatatatgctgcaaataattctgtaaagataactagaagctgggcgcggtggctcacgcctgtaaactcagcactttgggaggccaaggcttgcttgcgtgcaggagtttgaggccatcctgggcaacattagcgagaccctctctctagaaaaaaaaatcaaaacttagctaggtttggccactctaggcacgctgcctatggggtagccctgctctgcaaagagcagtaaaacataaagttagccgggcgtggtgacacatgcctgtggtcccagctattcaggaggctgaggtgggaggattgcttgaagccgggagtttgaggctgtagggagctgtgatcgccccacctcgctcagcctgggtgacagagtgagaccctgtatcaaaaaaataaaaatataaatataactagagcacgcagcatcatcactatgttacagaagggaaaatgaggaacagaacgttaacaccaaagtcagaaagttttaaaggcttggtctccatgcttctactttgccactgcaagaccacagtgaattaagtctcatccctgcctgggttagatgtcagagcctgagacacaatgtagttggactccagtccacaggtggctgactccaaatctgatatgagttaactccaaatctgatgtaagttcaagttttgggactgttccttaactttttttttttttttttgagacggagtctcgctctgtagcccaggctggagtgcagtggcgcgatctcgactcactgcaagctctgcctcctgggttcatgccattctcctgcctcagcctcccaggtagctgggactacaggcgcctgccaccacgcctggctaattttttgtattttttagtagagacggggtttcaccgtgttagccaggtgaatctcctgacctcgtaatctgcccgcctcggcctcccaaagtgctgggattacaggcgtgagacaccgcgcccggcctttttttttttcgagatggagtctccctctgtagcccaggctggagtgcagcggcatgatcttggctaactgcaacctccgcctcctgggttcaagcaattctccagcctccgcctccctagtagctgggactataggcacctgccaccatgcctggctaatttttgtagttttagtagagctggggtttcaccatactggtcaggctggtctcgaattcctgacctcaggtgatccacccacccgcctcggcctcccaaagtgttgggattacaggcgtgagccacgccgcccggccctttttttttttttttttaacagggtctcactctgttgcccagactggagtgtagtggcgcgatctcggctcacctccgcctcccaggctcaagcgattcctctgcctcagcctcccaagtagctgagattacaggcgcgcgccactaccgcccggctaacttttttatttttagtaaagacgggggtttcaccatgttggccaggctggtcttgaactcctgacctcaaatgatccaccagcctcggcctcccaaagtgctgggattacaggcgtgagccaccgcgccaggcctatcccttaaaatagtttttaatttgaataaggtttactatgaataaataaatcacagtcggcttgatcccaagagcacagacgttcctggtgccccttttcgtgctctcccagcttgcgccactatggccctggccctttaaggctgagcgcgaggccccgcctcgcccggcgccccgcccctcccgctggatcccgcagccgcggctcttcccgacgcgttccgccttccccagctgtgcactctccatccagctgtgcgctctcgtcgggagtcccagccatgtccgacgagagagaggtagccgaggcagcgaccggggaagacgcctcttcgccgcctccgaaaaccgaggcagcgagcgacccccagcatcccgcggcctccgaaggggccgccgccgccgccgcctcgccgccactgctgcgctgcctagtgctcaccggctttggaggctacgacaaggtgaagctgcagagccggccggcagcgcccccggcccctgggcccggccagctgacgctgcgtctgcgggcctgcgggctcaacttcgcagacctcatggctaggcaggggctgtacgaccgtctcccgcctctgcctgtcactccgggcatggagggcgcgggtgttgtgatcgcagtgggcgagggagtcagcgaccgcaaggtgagcgggttgcgtagggcagggcagggctgcgcaggccactgggcagtggggcacgagtgggcgagcgccgggggtgtggcagggcgggagaaactggcgcggacctgggtgcacgagcgtggaaagcgtagccaaggaacttgtgtttgggggctcctggagagcggcatttatgtggggaggggagacgaaattatcgccccttccccaaccatttttagttgtggccgccgcccagaagctgtgctggtgggggggaaaacaataaggtgcccatgcgcatgcgcacaaccacactaccgtccccaccccccccccccccccccattaaaaccacacctgtacccctacccaccaaacactctctgggtaattgtggtctgtgactatgagtgacggttagtgccccctttccccgagggagcttgaggggctatgtcgtcggggttgggcgggggcacagcggccgtgccagagtcctggtcacatgcagccccgtggtctgtgggggtgtgaggcggcccctcccaaagcaaggccaaagagacgagacacgcccatcacggaggagagagagcctttgctaccccaccgccaccagccttacaccgc

SEQ ID NO: 7294 - DNA, 6000 bp, Homo sapiens
tgcgattacaggtgtgagccactgcacctggcctgtccccacattaaaaaaaaaaaaaaattcctctccttccacttaaatgtcacctttctcaaatattaaaagacagtatacatgaggactatttctgttctttcaattctgttctatttgtctagctgttgattgcctctttagtactaaactttattaattcattttttttgagacagggtcttgctgtgtcacccagacttgagtgcagtggtgtggtcatggctcactgcagcctcgaactcctgggttcaggcaattctgcttcagcctcctgagcatctgggactacaggtgagcaccactacacccagataatttttgcattttttgtagagatggggttttgccatgttgcccaggctgttcttgaactcctgggctcaagtgatctacctgcttcggcctcccagagtcctgggactatagcctcagtactaaactttaaaaattgttttcatatttttaaatcccacctcccttggtcccataactctttttttcccagaactttcctattattcaccaatgtttatttttcctgatgaattgtggtagcatttaataaattctctgtgaaaaatacttcttatattttaattggaattgcattgggtataaagattatttcagaatgaattaatataattgcactattgaactgttctttccctagccatttgaggtacattttatcttttatgtccttcactagaattttaaagtttttttctcccaaatatcaataggtctttcatttttcctattaagtttataaattggtatttaatctttcttgatatcttagtttggattttttctttcattatacttaataattatttttgtccacaggaaagtcataatgttttttttgtttgtttgtttgtttttaagacagagtctcgctctgtcaccaggctggagtgcagtggtgcgatctcggctcactgcaacctctgactccctggttcaagctattctcctgcctcagcctcctgagtagctgggattacaggcacgtgccaccaagcccagctaatttttgtatttttagtagagacggagtttcactatgttggccaggatggtctcgatctcctgaccttgtgatctgcccgcctcggcctcccaaagtgctgggattacaggcgtgagccaccgtgcctggccggaaagtcataaatttttaatatcaattgtatactctgccatcttaaattttttcatcatttctttcttgtaatttgtttctttttattggtgagtaaatatgccattgtatggatataccacaagtgaatgaatatttatccattcacttcttgatggacacttgaatgggattaatgcccttataagagaacttgaagggagcaccctagtccctttggcccctactgccacatgaggacacagcgttcatccctttatgcccgtctttctttctttctttttttttttttgagatggagtctcgctctgtcgcccaggctggagtgcagtggcgcgatctcagctcactgcaagctctgccttccgggttcacgccattctcctgcctcagcctcccaagtagctgggactacaggtgcctgccaccacgcctggctatttttttgtatttttagtagagacggggttttgccatgctggccaggatggtcttgatctcttgaccttgtgatccacctgcctcagcctcccaaggtgctgggattacaggcgtgagccaccgcgcctggcctatgcctgtctttctcttccaccatgtgaggatacctatccagtgccatcagtgaggaacaggccctcaccagacactgaaccagctggccccttgatcttggactttccggcctctagaactgtaagcaataaattactattacttcttataaattactgtggtattttgttatagcagcaggaactgactatgacaggttttaatttgcatttccctgatgacaaatgatgttggatgagtgctttctcatatgcttattggttatttgtatatcttcttttgtgaagtgcatgttcatatcttttgcctgttttttgattgggtggtttgtctttttattgagttacaggagttctttattctgaatacaatctctttgtcagatatatttcttcctagtctcccagtctgtggcttgcctcttttcttttcctttccttttctttcttttttcttttcttttctttttttttttttgagacagggtcttactctgtcacccagcctggagtgcagtgtcacaatcatggctcactgtaacctctgcttcccaggctcaagtgatcctcctgcctcagtctcctgagcagctgggactactggcacaagccaacatgcctggctagtttttgtaattttagtagataccgactgggttttgccgtgttgcccaggctggtctcgaactcctgggctcaagccattcacccgccttgaactcttaaagtgcttgaagggattacaggtgtgggccactgcacctggtccctggtcctattttcttaatagtgttttgttttgttttgttttgttttgttttgttttgttttgttttgagacggagcctcaccctgtggcccaggctggagtgcagtggcgcgatctccactccctgcaacctccgccaccacacccggctaatttttggtatttttagtagagacggggtttaaccatgttagccagaatggtctccatctcctgacctcgtgatctgcccgccttgacctcccaaagtgctaggattacagacgtgagccactgcgcccggtcttttttttttttttttttgagatggagtctcactctgtcacccaggctggagtgcagtggcctgatcttggctcactgcaacctctgcctcccgggttcaagcaattctcctgcctcagcctcctgagtagctggaacggacacaggtgtgtgccaccatgcctggctaattttttgtatttttagtagagatggggtttcactgtgttagccaggatggtctcaatatcctgacctcagatgatccacccaccttggcttcccaaagtgctgggattacaggcatgagccactgcacctggccaatagtgttttttgatgagcaggagttttaaattttgatgaggtccatttatcaattgttttcagggtccatgctttttttaaaaattttttctttttttagaaacggtgtctctttgtcacccaagctgaagcgcagtggactgatcatagttcactgcagccttgaactcttgggctcaagcaatttgcctgcctcagcctcctgagtatgtgggatacaggctcatgccaccatgcctggcttttttgtatcctttctaggaaatctttgcataccccaagatttaaaagataccctcctgttttattctagtagctttatcgatttgctttatgtttaggccaatgatctctcttaaattgcgttttgaatatggtgtgaggtagggattgggtcccttcaggcacataaatatctacttgttccaacaccacttcctggtgttcttgtccaaaatcatttgacccatatcagatggatcagatggttctcattatttttccaacagtaaacattgcagctaagaatgtgtctcatgcagtctctctccactcaaaaagtgtggtctgcagaccagtggcgtcacatcacctgggagcttgtcagaaattcagaatctggcaccactccagcattacacaaccccctagtgagtctcaggcacgttacattttgaggagcaatagtgtagatatttcttgaggaatgaggataatttttgaggaatgaggggaaacatcatcatgacatttgctgcctctcacagcctccccatgcactacagcctgtggggcctgccaacccattttccctggttactgtgcagggctagatttacttccagacttaacctctgggtccacctctcctgacatgtgctgtgccgttctttgctgctgggattgagggaagggggcccactcactcacccactcctcaccttttaatacccacaaccacctgctcactcacccagcagttcctatgctctcccctatacacattctttcaccaggaacctcagtttcctcaattgcagaaccaaaataagaatggtcttgatatcaggaactactgtgaagggaagtgatctgaggagtacctgggcatggagacagcacaatataagtcagttatcgtcatggccatttcagagctctttttccagtaaagcccctggatgctgctcgcctctgctatgtagcctcactcccctgcagccgggcagaatggagtccccctcctctccagcctgacttctcctcccctgctccgcgtccccagggcagcgtgcaccgataaatctttcccagcgcgttgcattgttacagcgagttgccctcgcatccgaccggccccccgccccacctctggagatcttcaaacccaggatctgtgccttggtcgtctttgaagccccggcccctggcacagcgcctggcacctggagggcgctcaataaatgtttgcaaaatcgaattctctgttgagcaggtgtccacccctccactcgcggagggtgggttgcgcgggcggaagggaagtctggctgtgtgccagggtgcggggggacacaggcaggggactcagggagcgggagagcgggagcgggtacgacgccggctagcggagcccggcccggagggtgcggcggtgccagacgcggagggcggcctccgctcctcccccgcctcctccccgcgccgcgcctcctccccgcgccgcgcctcctcaggctccgccacccccgcccggcgcggcagccgcagggaggggtccgggaaggcggagccagcggcggcccaggctctgggcactcgcgcggctcccgttcgcggagcacacatcccggcgcgacgaggtaggaggccgcgaggggaacggacgagggagctgggcgccgcggcgggaggggcgggaggccgggccgagaccctcctcccgtgctcccggacagcctcgcggcccaccgagcccaccgcgggagtctcaaccccgcccctcggcccccgcctccctcttcccgcgcccgccccgccgcgcgccccccgctccctgctgctccgcgtcctccgggaccgccctccgaggtcccccggggtcgctgctcctgcgcccagtgcgctccttgttctcccacaggttccttcggagagcgagcgggagtcggtgctcggcctcctgcggggagcagcccgagggtgagtccggcgtggcgtggcggggcggggcggggcggaggctggagggcccggggccgctcttacgcctcttagtggcaccggggctcggcgctgcgggctggctccatgtttgcggaatgaatcagtcatgactctccttctcctcttcctaaggaggactttttgaggtccacgtgctgcagagcacctttggagggcctcatgagataggggtcccccctcctgcatagtggaagcccgactcccatttccccccctcctctctgcactccagtctggaggctccctttgggttgggtcttggggggtcggggacagggggcttgtaggcccagccaggtagttgtggaaggtgtgtcccagcaggagacttgagccagggctcttagaaggttgcagtggagggggcgcgctgcggaggacagctgacactgtcaggcagggtcacttggcacctccaaggccagcctggaagagcctgcttgaatatggattttgacccacagcttactgaaagcttccacgccgctgtttcttcatcaataaaatgggaacattcgcagtcatttctcaggactttgtgcagacaaaaagtttatcatagaaatcaccccacacaatgcttggcacatcgaggacactcagcacatctt

SEQ ID NO: 7295 - DNA, 6000 bp, Homo sapiens
ggacacttcaaattatggttggcttgtaggggggctccagcaatagacactgggtcattggggtggttagcaggactccccccactcccagggtttgcactgacttttaaaaattattattattactactattactattatgagagattggggtatcactatgttgcccaggctggtcttgaactcctgagcttaaggggtcctcctgcctcagcctcctgagtagctgggactacaggcatgcaccccacaccccgatgcaccgacttttgcaagctcttccccactttggcgatgggccacctgttactggcccctcacgtgatgcccatatcaaagcccttggcacttcagtggaggtgctggagggagaggaggaaaagagaagtgggtggcacagatggatgtgggcaaggtgccagtaaagagtgtgtgggcagcgagaagaggacatgctatctgtaacagatacctggggctccagaagccctggggtggatcctgccttccgcaggagaacctgaagtcagccaggacacagcagacagccagagataaggactaaccacccacggcccgctggcacctagctagaacctgcctagacctactcccagaagggaactgcgtttatagaacaccttctgtgtgcctggcacatggcagccactctacctctgtcctctcccaaagttgttatccctattgtacagatgaggaaattgaggcttggcaaggttatttaactggcctaagacacacacatgaagtggctgagccaggatttcaacacaaaattgtctggttccagaacttcccaccccaatagggaggtgggcagactaaaatcaggaggcaagggaaagtgcaattgttgggccaggtggaggaacagatgctgcttacaagagaggttttggggctctgccctctagaaaggcaatctgacatgaacgcaggccaggctggtggtaatggtagtggtagtggcggaggaggcttcaatttctgtcttgaggttgtgggatgagcaagaggccaggaaacttggtccttcacggaggccttggtttagtcctggtgggaaggcaaagctgtctggatccattcctgtctggatgccctgttgaggcggggactagggaggacggcatagcttttcctttagaacagtggtttccaaagtgggtgtgcacctaggggtgtgcaagatgatccttttgggtatgggaagacaaaattggaatttctatttatagttaaaaaattaatcctggcctggtgcagtgactcacacctgtaatctcagcacgttaggaggctgaggcaagtggatcacttgagcccaggagtttaaggccagcctgggcaacatggcaagactctatctctacaaaaaattaaaaaaaaaattctccaggtgtggtggcatgcagctgtggtcccagctactctggaggctgaggcaggaggatggcttgagcctgggaggtccagcctgcagtgagctatgatcatgctactgcattccagcctgggcaacagagtaagaccctgtctcaaaatatgtttatttatttataaataaaatgaaaataaaaattcatccctatgtgtgtgatttctaatatgcatactaattagttgaataacacaaatatagtttataggcaaatatttatataattttatatagtccattgaaggctctaatttttttttttttaaatacggagtctcactctgtcgcccaggctggagtgcagtggcgcaatcatggctcactgcaacctctgcctcccggcttcaagcgattctcctgcctcagcctcccaagtagctgggattacaggcgcccggaaccactcccagctaatttttgtatttttagtagagacagggtttcatcatattggccaggctggtcttgaactcccgacctcacatgatctgcccacctcggccttccaaagtgttgggattacaggtgtgagccatggcacctcgcccaagtttttttttttttttttttttttttttttaagtatagtccataaataaggtttccagaactaggcactggccagtcgcaggtgtggaggcgaagcacctcagaggctgggtgtagataaactgggaatagctgttggtggcccctgctggtcattataggaagtgcaccatcactcagtgcaaagccttacctgctggaaatttgtaacacttttgagttttatttttctctgtgccttgactcccaaaactctgggctgaacaccaccataggaataccttgattttgggggaaggagatatactacctgcacctttatgacctctgaggctgaggcagggaggaaggcagagctaattacaaacctcagagaaggaggactcattcccctcttgaggtagggggcagcccttaactactaggggatgcattgccgaccttcaaacctgcttcccttcccagctactccattgccaaccattagcagctctattcctttggggaacagcttaggacacactgcacctttattatggcattcagctgtgctaccaagaagcgctttttgtatctatgtaacacactcctttccgacttcaaccccagactgtgaactctaggaggttagggcccttatctcagtatcacagtaagtggtaccttgcctggcacagaagaggagcatcctattctgcatcaataaatgtttcttctcattctgtaactgcacaaggctgttgtgagaatgaaacaatttgtcaattgtaaggtcctgaacagatgtgagaggctggcattctgcaaggcctttattagagagatacttgttgaccgacgaatgcagtggggcagccgctaagaataatgagttgggctccacctccccaggtgggccagaatctgagatcccagactgtcctgaggatcctaaatggaatggaagatttgatgtgggtcgctatggaggtaataattgcttgattaagaagtaattaatatcttgtagagattcaagatccttcctcttccaaaatacaaatagctgagtgatttccagcccagaggtggacaggtgacagtggagggtagcctttataatggaaaggggaactcttcctgaattcaattataaggattttctaggccgggtgcagtggctcatgcctgcaatcccagcactttgggaggctgaggtgggcagatcacctgaggtcaggagttcgagaccagcctgaccaacatggagaaaccctgtctctactaaaaatacaaaattagccaggcatggtggcgcatacctgtaatcccagctactcgggaagctgaggcaggagaattgcttgaacccgggaggcagaggttgcgacgagccgagatcatgccattgcaccccagcctgggcaacaagagcgaaactccgtctcaaaaaataaaaataaaaaagaagaagaagaagaaggattttctagcttgcagatagaggaaagagctgcaagcaatgcgctccaagaaccctctttgtttagagaccaaagcctgcaattcctgtcaaagctatctgggttcgatggctttcttctctcagtaaaagcctgggtcacctaaacaatgtggttttcagcagttcggccgcctctgtggctttttcctatatccaaacttatacccttggaactcaggggagagctgagtcttggaacccagggaccagtcccctgctttcgggatagattcccatttctgagatttccaagcaagtttccagaatgtaatccatttcttttctttttgtttcttttgagacagggtctcactctgttgcccaggctggagtgcggtgttgcaatctcggctcactgcagcctcagcttcccaagtagctgggactacaggcgcgcgctaccacgcccagctaattttgtttattttattttttgtagcgatggggtttcactatgttgcttgggctagtctcgaactcctaggctcaaccgatgctcccgcctccgactcccaaagtgttgggattatgggagtgagccaccgcgcccggccaaagatgcagtccatttatgatcttaggaatccagttagcaaggaaaagggatgactctcacattttgttcagggcaactggacggggtggctgaacgccgaggtcggagaagtagcgtagctggccccaaatgctagtcgcactgcacagagcctcccgtatttggaggcccagcatcttttactagcagatgtggggtggagccggaggctgggcgaaggcgggccagtgggtttaaccctttatttactttttgggctgggactctgaggaaggctagccagttacttctttattccataggcaggaaaatggaccaggcctccctcacctagacctaaaagaggctctcgaatcctttcaggaagacatttcctcttttttgcaaaatttctggaaagtctggaatccggatatccaccctctgagtccttaaaaagctgcccctgatcccgaggccttctggggctggtatcctgcttcctgggagtctctctgaagtcctcctattctttttctcaatatggaagcaggataacgaggaaaagtgaggcacgcctggaactagaacgccggtctaagccaagatgggtgggcggagtaatcaagccggtctcattaggcacttttaccatcgcccctttaagggatccttgggagccgaggggcaccagcgggtactggtaccagtcctgcctccctaacccttcccagtgggactccagcagggcgtcgtggtctgtgcggtgtctcccaaaccactacctggctgcccccgtaccagctgctgggaaagactacttcctccgagttgtgccggcctccgcgttctcctcacctcccctctcctccggacctccgccccctcgcggagaggccttgccgctttaagagccgggctagcgattgacaagcaataaacgctgagcgcccggctgcgctggagccgcccggagctaggggcttcccggggcgcaggtaggcgtcccccggcccccgggccagctcctatcccaagacctccgccttcttttcgtcctgacacggcacttaggaccctattcactgggtttaaactccacaggcccctttcacccaggcccgttccctccctgtccacccgcccccgcccctgggccctctttctggggtgctggttgggagaaccaagccccgctgcccattgacactggtccccgcccctgcggtaggggctccaaagtggcttcaggcaccaaggtggtgagctgtgaggggccccggtatctgcgcggcctccccgggggctgtgcgggttgggggtacttagaagcccggcattacgtaagaaccgtgctgttagcgcttccgggggttggggagcgagacagaggttgcgctgggtcccggtggccccctggtccccctaggcagctaacaccacaatcttccctgggagggggtccgcagaagggcgcgcgctgcttctcccgcttcccaagctgtagcggggcgggtcgggagccagggttagggtctggagacttgggaggggaccggtgccagaagcgaagagctagggttagaaagttaggtcaattaaggggggggcggtgcggataaagacggggtgggggttggccggggcagtcatttagtgacctcatccctggtctccggcgggcgcgcacgtagagagccttctttgatggctcacaacacgcccccctcccccaggtcctagcgcccagggtgttagggctgggtccgttggggcaggggtgatctgatggtccaagcatgcacgtccgcctggcctttcgaccccatcctctggccctcagttctgtccagacctccccgcgacctctcgctctccaaagcgcctttgtcagacctttcttctccgcacctctttgtatgtgtatggatggagggatgggtgggaggt

SEQ ID NO: 7296 - DNA, 6000 bp, Homo sapiens
cagccgagggtgctggtgatgagggtcacggggcacagggttctgagggtagggggactggactggctcagctctgagagcctttccagttccagccccatcccccagctctcccgcctgattccccgcacctccccactccctcaccaggtgataatgatgactggtccattcctaacgtgtgtgcaccctgccccacttccatccacccccagactgctcagggctgcacctcacaactctgggccctccaccagcatggtctccctggggacctcacacttcccgcattacttgtccctccgggcccatcccttgtttacatcccttatcctccctctgaggtttgtatacactccctgctggacatgaactcctatcgctgcgtggtccctgccctgctgccttggctcaggctgcctgatacacgagccccgtggctccttctcccgttcactactcagccccttgcctgcatctagagaagactattttcaagctctttcccacctgtcatcccatgtggtcacaacagtccagagaggaaaaggaagtccagagagagggtgtggtcagctcaagatcacacagggcttccaacccgaggaggtcctctacagcccacatgtcccagccgtgggacacttccctttaatgcaaaatcccaggggtctgagtccctagtctatgagggcacagaaagccgtatcttcaccgagcaatgtacataggtccctccaggccaccttggccagaccacgtcccctcctccagcctcctggctccagccaccacacctcccttcaggtgctcccccgtgccatctggatgtccactcaccttagctgccaccgcaaaccatggcctgctctgccccaaacatggtctcagaccctcccctccatccgcatggggtaacagaggcaggtgatccagtccagcaagctttgctgaggacttcaggatagcagctgagaattaccggctgagcatggaagaaaagatgtaagggtctgctcacatggaatgggtctgccctcagcagtcacaggccaagctgacacctcattgccaatcccattgcaagagacagttcccttaaccatcatcgaacccccgtcctacctagtctcagcttctactccttagagtaagatagagaaagcagctggcccttctaaggccactacccagtcctcacttctcacttgagggctgactgcatccaggatgattgaaaatgagaaagtaaggccaggtgcagtggctcacacctgatatcccagcactttgggaggccgaggtgggaagatcacttgaggccaggagtttgagaccagcctgggcaacataacaagaccctgtctacaaaaaatacgaaactcgctgggtgtagtggtgtgcgcctgtagtccccgctactcaggaggctgaggtaggaggattacttgagccggggaggtggaggttgcagtgagccgagatcacgccactgcacttcagcctgggtgacagagtgcgattctgtatcaaaaaaaaaaaaaaaagaaagaaagaaagaaagaaagaaagaaagaaagaaaaaggaaaaagaaaatgagaaagtcttgtcctttcagaagaactccaccctctgcccacagagtctccctctgggacaacccatcccaacccgtgatctgagctgtatgctctgaaataacatcatacggggttcgccctcagctcacttcattcctgctgacatctgcctgggctcccggctttctcccaaaggagtataaatttgaacgaggacacatatggaccttggggaggggaatctgagggctcctcccttagtgctctaggaagtggtagagcagtagtgacaagagggactccaaggaaagagcaggatgggctgtgagtgtgtgaagggccactcagggcacagctcaaggcatcttggggctctgctcaagccctccaggtgccaatctttctgaccacgaccatctctgtccagcccggggcatagtcaaagggaggtaagactccctcgtgccttgcttccccagagggcagcctagtgccaggcgcatggaggccttcagatgaatcaaactgacccaagtccaaattggaataaaatgagtgagggttgccctcacctcttcctggaaaagcataaacaagagtaaatgtgggccaggcaaggtggctcacacctgtaatcccagcactttgggaggccgaagtgggcagattacttgaagtcgggagtttgagaccagcctggccaacatggtgaaactctactaaaaatacaaaaattagctgggtgtggtgttgggcgtctgtaatcccagctactcaagaggctaaggcaggagaatcacttgaacccgggcggtggaggttgcagtgagctgaaattgagccactgcattccagcctgggcgacagagtgagactccatttcaaaaaaaaacaaaaaacaaaagaggcctgacacagtggcttatacctgtaatcccagcattctgggaggcagacgaatcatctgaggtcaggagttcaagaccagcctggccaacatggtgaaatcccatctctactaaaaatacaaaaagtagcccggcatggtggtgggcgcctataatcccagctacttgggaggctgaggcaggagaatcgcttaaacccaggaggcggaggttgcagtgagccgagattgcgccattgcactctagcctggtcaacaagagcgaaacaccgcctcaaaaaaaaaaaaaaaaaaaaaaaaaaaaagattaaatgtgacattgggcagagttagaaaagaaacatctacattcagccagggcaacaagaatgatctagaacatgtggtgtgagtggaaagaaccagcgtccaagctgctgtgcctctgcctggctgtctggtggggctgccagggggtggtgcctgcagaacagccaaacagctggccagattttccccctaagccagatgatgccatttgttgttccacccccagccagctgtcagtccttcccgggccccaggagaggtgccccattgctgccccctgcactcagctgtctctgactcctagggcaggcagaggggcaaggggactgggcacactggctgggtcaaggagtcaaaggtcttcacttggcactcactgccacaggccataggaagccaacccagtgtgggcccagggtttgggacagatcccaccagctggagcaggagaaggcacctccagccccctttagccagggcctctctctgttcctgaccggcaccaaggcctgggtggtgggaggggctcagatctggcagaacaccagctgtccaggcagattagcaggtcggagtgcccacgctggcttcaccagcccagaggacttgggcaagtcactgctctccttttgctgccctttctctgtgagaggtgaataaacatcgtaaacagtgttgtcctcagatgggcttagagagcttggcaagctagagcgtgtgaagtccaggcatggtgcactgcacggggcaggtgctggtccgttgggcattctttttcctgggaaagcctctctgtggctttgtttcctcctctgtgaagtggggggtttgtaggaatccagcgtgaccacaagatgaaggcctcagcataattcctggaaccgaggtcctccataaacaggattctgcctcaggacccgtgtccctccccttttctctctccacaggactcagcccctggcaggcttgtggtgcagatagtgaatggtcttgcagtggcgggatttgtccacctgtgtgtccctgtgtttgagtttcttctgcttgagtctgaacttcaggctggtggccacataacccaacactctcactttacggatgagaaaacagaagcccagagagggccagggacttgtccaggttccttcagccagtccatgccggagctgtactaggacaccctcctctctgtgcccagagcgatggccacaacacccctttctgtctgcttgaaaacccctcttcattcttgctgatctgtactcatctttcagtctctgcctctttagcaaccagagcctacgaagaggtgaccaggctctggtcaccccccagagcagagaaactgggggtgtaggggtgggaactgaaggggaggggcatggcaggggctgagaatgcggctgttctggcctgggggcctgagccaggctgcctacagaggagccagtatgcccagacattagagctttgtgagttgaagagcttggtgtggggatggttgttttgttgagctgacattgtttcaggttgactgaatgtcagtgtcttagtgtccaggagccagctctttagaaccagccagggtcttggggagaatgtggctggggcatcctagtctggatcaaggaggggagggggctgtccgtgccccgtgagtgctgagcagttccctgtggagaaaactgcagaggaggagtgagtcctagcgtggataccaagagagacgagaggagcaggcgcccttgcaccttggggccagagcagaagggcctggccagagtggaggatggacagaggcaggacagggacctctggaggctggtgccttcctgccagggcactgggagccctgaggacagagcgatcaaaccttcatccacaaaggaagagtcaggagaaccatggggaccaggagggccccgagaggccttgggggctggccaggcgggtggggtgggccagactcacagctgtccagatgtgggtaagagataactctgtttactgggcacccagtgggagcggggtggggggtgtgggaaggggctcccagggccagtggggcgggcagattaggaggcgggggcatgagtcaggggtttgcgagctgcccctggggcgctggtgctgtcagaacgagtgggaacgtagctggtcgcagagggcaccagcggctgcaggacttcaccaagggaccctgaggctcgtgagcaggtgggcagggcagggaggggctggggatggtccttcggtgcctgccctgagggcttctacaggtgcccagcctgaatctatgcccaggtgggccaggctcctgacctccaagggggtgcaggtgggtggggtgagaatgttaccatgcatatgttgcccctaagggaacaggcccattggcacctgaaaagaggagggtggcaggtggtcaatggcagcagaggtatgtgtggctccggtgcgtgtgttgcggggggtatctgatcccctccaggtatgggcccttgtcagcttgttggatcccacagggtcaggtcttgtccaccccagactccttccttcctaatggggtcctcagaccaccccctctcccacctaggaggcaggatgtcagctgacacagtatcccctttgggacacttccaggggtctacctggggcacctggctccacgcccagcgtggtcagtattggagggaactgcagagcctcctaccacatgagaatctcaaaacacttagctcaggctaattccatgggaactgagggcaaatcagaggggaaatgaagatggcaagtctgactgtaaccccagcagcaagggataatgacagcaaacattttcatagcgctccttatatgctaggcactgttctaagccccttacaaatgtaaatttccttaatgcttacaacaggtctatgagatgggcatcattatcatcacccccattttacagatgagaaaactgaggcacagagagttgaagtcacacgccgttagtaaatggcagggctgggctttgaatccaggcagtccgactgcagagtccgtgatcttaacaactaactctaaaccagctaacagttgttttgttggaggcaacttagcatagtgcttagggatgtggctggagtcaggtagtccaggctgtaacctggctctgatacctacctgctgggtggctgaagcaggtaaatgtctct

SEQ ID NO: 7297 - DNA, 6000 bp, Homo sapiens
ccagcctggccaacatggaaaacccggtctctccaaaaataaataaataaataaataaataaataaataaataaataaataaacaaaaaaaaattagccgggcattgtggtacagagcaagacttcgtctcaaaaaaaaaaaagagtaattagcatacagaccttattcccttttctccacttgttccaataaagtcctccatcactcccctactcctttccaccctcagaatccattaaagatcagactacaggccgggcgcggtggctcacgcctgtaattccagcactttgggaggccgaggcaggtggatcatgaggtcaggagatcgagaccatcctggctaacaaggtgaaaccccgtctctactaaaaatacaaaaaattagccgggcgcggtggcgggcgcctgtagtcccagctactcgggaggctgaggcaggagaatggcgtgaacccgggaagcggagcttgcagtgagccgagattgcgccactgcagtctgcagtccagcctgggcgacagagcgagactccgtctcaaaaaaaaaaaaaaaaaaaaaaaaaagatcagactacatttgctatgggcctgggatttggacttttcctctgggcagtagggggcctcagtggttctgcagccctgggccctgctttgggagactactctagatgcagacagtgctggccctggactcagaggtgctggtggggtcccatccatgggtgaagcccttgagtcctccatcagccccagagatgtcttcctaggccctgggggttcaagctggaggggacactgcccctgtcccagggcttgccttggacaaattcagccttgtaataaactggccccttgggtatcaggtgaggactggtccttcagtctccacaaccacccctgcagctggtactttcttctccccttttacagttaaaaagggagagtttctgcttttccatctgtgcgaggaagctgcagatggccacatggggccacatgttgcctctggaaggaccactgggtgcataaccaatgtaaaccttgcctgagtcagccaggccagtggccacctctgcagccttccaggcttgctcctcgagggtgggcgtgttgagtcagggctccatagcttctggagcatgtcaaagctcctcctccaccctgaactgccacggtcattcttgggagagacttcacgaggtcccgaggtgtcccatcacccatggataacctctccagcggccactgctttggtcacacccatgaggcctcatggttctctaagcttcaaagcatttacattctggagaaggtaaggactgtgatccacgcggctctgggcccctggcaggtctcacagaactgtttattgactcttcatgtagctttcagagacatgatattaagaatctgtacgttaggcagagcaggtgatatcgtccttattttcagatgaggaaacaggtgtatccacaaatctctaaggatcctatttaagagcatcacaaaaagaaaaccagaaatggagtgcaaggccctcaatgtactgttggggaaacaggctcagaggtccccaggtttgattcctggctgtgctactttgcactggtgaccttcgttctgggtataagaagttattattatccatcactgcatactggaggcagaggtggggccagaatctggggaactttccatgccacaggttctagagagcaattaacaacaatacagtaacagcaatagtagtagttgtcatagaatgcttgccacttgccagggttctaagcacgtcacagccattaatgcattaaatccttacataatccctagaggaaggtgcgttatcatcaccatcagcccattttgtaaatggggaaactaaggcttagaggccttaagacacttgcttgtaagaggcaggtgagatggaaagccaggtcagggtgctgctggaacacagcacctgggttgagaactggacagggtgggagcccatctggctcaggcacgttggggggtctaatgctgactctttcatttgagtgaccttggggcgatttgacctttggggccccccttttctcatccataaaacgggagagtgtgtgcagggaaagtctgggttctcctccacacgagtaaagtcactacacacaagagccctcagtttcctcccctgttccgtaaaccaaaacgtctaagttgtaaagaaccttggcggagagtaggctttcaccttgaccgatagtttatttatttatttatttatttattattttttgagacagagtctccctctgtcatccaggttggagtgcagtggtgtgatctcggctcactgcagcctcgacctcgcgggctcaagcgattctctggcctcagcctcccaagtagctgagactacaggtgcgcaccaccaccgctggctaatttttgtatttttagtagagacggggcttcgtcatgttggtcaggctggtctcgaactcctgtcctcaggtgatccgcccacctcggcctcccaaactgctgggattacaggcgtgagcccgaccttgactgatagttgattaaattatttcgtgtcatttctgaactcagcttgagatgggaagggaatggaaaggacgccttctctcgggcccttttgcccagcgcccctttacaggtcacagattgcactctccctgctcccaagctggagtttcagagctgtgggggagctcaaaggcattttgtcagggaaagctgatagttggcccctcggagtccacgtgctaacccggcaggcgccggctgactgggctcctccagcgccggacgcgaccagtgggggcctgaagggcggggaaggcagagacgtcaaagtcgaggcctacccttcttaaaggcgcaggctaggagtacccatctccccgcccgcccccccccgcctccacccgcccgcccgcccccctccgccaccgcccgcgcgtgctggtttctctgttaggacaaataagcaagatagcacagaagttctaaacgcgaagtgggtggtggggcctggggtacggggctgccccgggaaataaagtgtctccctgacaagcgggatcggagagggcagcgctggacttaagccttcctgtctcccggggaggcagtgtggagccctgggaaaagcacccggccggttcgaatctccggctcttcacgtcgagcctcagtttcactttctgtaaaacggggtaatctatttctttttcagacggagtttcgctcttgttgcccaggctggagtgcaatggcgcagtctcggctcaccgcaacctccgccttccgggtttaagcgattctcctgcctcagcctctcgagtggctgggattactggcatgcgccaccacgcccggctaattttttgtatttttagtagagacgaggtttcaccatgttggtcaggctgctctcgaactcctgacctctggtgatccgcccgcctcggcctccaaaaaggctgggattacaggcgtaagccactgcgcccggcctttttttttgagacggagtgttactctgttgcccaggctggaatgcagtggtgcgatctcggctcactgcaacctccgccggccgggttcaagcgattctcctgcctcagcctcccgagtagctgggattacaggcgccagccatcatgcccggctacttttgtatttttagtagagacggggtttcaccatgttggccaggctggtctcgaactcctgacttcaagtgatccgcccgcctcggcctcctaaagtgctggattacaggcgtgagccaccgcgcccggcctgtggtaatctatttcaacaataacctactgcaaagagttttgagactcagaagaaatcacgatacgagagcaaccaacaccaaaacgtcgatgccctcccgcactcagtgctcttcctctccgcgcagagtcattccgggccttaggcgaggttgtgatttgcccaaggtcacgcgaaggtgggatctggctccccatggctctcccgtctcccccggcttgctcacgtcccagcccgcccggcccgggctgcagctcagctaacccagtggcgcacacccgcgcggggccctgtggtttacaaagcgttttgcagttgcaggcctgtcctgtaacctgaaaaatgggggcgatgctaaggccggcgagagaagtcgccgcgaagttttcaagtctcggcgggtagcccggcaagtaacttcgtcgttattgtgtggtctcccggcgatctcgaagaactcattctcactgccgccgccacgcacctgaggacaccgaggaagagggccagtgcgtcaccctcgccgtccagaaggcgctggggtttccagtgccgcgcgcggccggggcggggctggtgaaaatgcgctgttaaggccggcgcggcggctcacgcctggaatcccagcactttcgaagaccgaggtgggcggatcgcttgagcccaggagttccagactagcctgggcaaaatagggagacaaaaataaaagtaacaaaccagccgggcgtggcggcgcgcgcctgtggtcccagctactccggaggctgaggcaggaggatcgcttgaacccgggaggtcaaggctgcagtgagcctagatcgcgccactgccctccagcctcggcgacagagcgaggctgaaaaagatgctgtctaaaaaaagatgctggaagtgcgtgctgctgccacgttaagcgcgacgtggagaccgcgaagttggccggcagctctcagcgctggacaggcatggaactcgcccgcgcggccccgtcaagggggcgggaccgtcgcaggtccgggcggagacgcgagtgggcggagccggggacactccgggcttgcggctggtcggcccgcggcgggcggggcctcgtggcgcggtgtaggggcggggcccccttggctgctttcggcgtcggcctaggtgcgctgcgagcgcgcgcggaccgcgcacaggcggcggagccggtatgggcccgcctgaccctgggcgccgcgccgcacgagcaccagcctagagccaggtaggcggcactgggccggggctgggggcggagacggaagcgggggtctccgggcggccgtgcgagccagggcaggtgctggggccgtcgagctggcgtggtccccctcacctggcggctctccgccgttcggggccgggagtgtcgccgagggtcggggagacgtcctggtcctacgttcctacttcccgctctcccggctgcgccccgggcctgcattttggggcgggaacccagagactgctctttctctccgggccccgggtctggcccgtccggccgggcggggagggccgggcatcccagcccgcagtcctgaggaggcgacgggcccttcttggtcaccggatctgtttacacgtcaccctcgatgcccggccgtccctccacgcccagtaacttgggctctcaggtgcctgcccggggccttggtgctggagtgggggctgtgggggcagcacaggtactctgattttggggccacgagggccaaatccgcgcctgcacgtaggaggtgcgcagtggacacgtgcgaggtggacgagggaaggaccctggctcctactgcattcgagcgataggtctggcaccctagcttccttcggaaccactcctgagtgaccttgggcaggccacctcgtctccccgagccttagttttccccggcggaggggggcggacagtccctgctttagaggtcattgccagggttgttgaggcaacagatgtttcgagggcggtggatgagggttgggttaaagtctcacagtgggccgggtgcggtggctcacgcctgtaatcccagtgctttgggaggctgaggcgggcggatcacgaggtcaggagatcgagatcatcttggccaacatggtgaaaccctgtctctactaaaaatgcaaaaattaactaggcgtggtggtgcg

SEQ ID NO: 7298 - DNA, 6000 bp, Homo sapiens
tgagtactcagatctgcctatattcctaaaatagcaaagatccttacccagaaagaaatgacattagacctacaaaaattagccgggcgtagtggcacacgcctgtaatcccagttactcgagaggctgaggcaggagaatcgcttgaaccgggaggttgccgtgagccaagatcacaccactgcactctagcctgggcaacagcgtgagaccctgtctgtctcacacacacacacacacacacacgttagaaaatgaaaagtgaggccaggtgtggtggctcatgtctaatcccagcactttggaaggccaaggcaggtggatcacttgaggtcaggagtttgagatcagcctggccaacatggtgaaaccccatctctactaaaaatttaaaaaaaaaaaaaaaattggccaggcatggtggtgcatgcctgtaattgcagctactcaagaggctgaggtaggagaatcgcttgaacgtgggaagtggaggttgcagtgagccaagatcatgccactgcactccagcctgagtgatagagtgagactccgtctcaaaaaaaaaaaaaaaaaaaaaaaaatgggcggggcacggtggctcaagcctgtaatcccagcactgaggccgaggtaggcgaatcacgaggtcaggagagatcgagaccagcctgactaacatggtgaagccccgtctttactaaaaatacaaaaattagccaggcatgatggcgtgcgcctataatcccagctattcaagaggctgagacaggagaatcacttgaacccgggaggcagaggttccagtgagccaagatcatgccactgcattccagcctgggtgacagagtgagacgccatctcaaaaacaaaaaaaaagtgattttctgagagcaggggaggtgacaagtcaaagaggcagactggactgtatagagtgttatgtgaagatacgtgcagttaattgccttgttctgataaggcctcagccaccttggcctgaaacatgaaagtactccctcttcaaacccttgatgactaattcaggcctcgtcagccatttccattcttatttgccaaagacagcttcactcacttctaccaactcatatctcaatttttgcagcattttcctgggtggccttcctgactagaacctaatttcctgttctgtgtaagcttactggcttttcagaatctgaatgcagctcattttgtattcattgcttcccagtaaaattgtaatctctgagagaacagggagtgattcttatatccccccaccgcagcccccaacgtatctcacactgaatacatagtaaacattttgattatatgttcaagaatatgagcaaagtggccaggcacagtgtctcatgcctataatcccagtactttgggaggccaaggcaggaggatctcttgagctcagaaattcgaggccaacctgggtaacatagcaagaccccatctctacaaaacaatttaaaaattagctgggcatggtggcacaagcctgtggtcccagctattcatgaagctgatgtgggaggactgcttgagcccaggggtcaagtctgtagtgagccatgttcaggtcactgtactacagcctgggtgacagagcaagatcctgtctcaaaaataaaaagaatatgagccaagtaaaatatcattaactgaggattgtgcatcagaattgagccaaaaaaaattcaaaaatgtgttttttggtttttggttttttgggttttttgagatggaattttgctcttgttgcccaggctggagtgtgatggcacgatctcggctgaccgcaacctccgtctcccaggttcaagcaattcttcctcagcctcccaagcagctgagattataggtgtgcaccaccacacccggctaatttttgtatttttagtagagacagggttttgccatgttggccaggctgatctcaaactcctggcctcaagcgatccgcccaccttggcctcccaaagtgttgggagattacaggtgtgagccaccatgcccagcaaaaaaaaaaaaaaaaaaaaaaaaaattgttttttaggcatagtcttactcttgcccaggctggagtggagtggcaaaatcgtagtgcactgtaacctaaaactcgtgggctcaagtgattctcctgcctcggcctcctcagtagctggaactacaggtgtgcactaccgtgcctggctaattttaatttttttgtagagacagggtctcactatgttgcccaggctggtcccaaacacctggcttcaagcaatcctcatcttggcctcccaaagtgctagggttacaggcatgagccaccaaacctggtgtaaaaaatctttataattttatttttcttttctttctttctttttttcttttttgatggagtctcactctgtcgcccaggctggagtgcagtggcatgatcttagctcactgccacctccgcctcacaggttcaagcaattcttttgcctcagcctcccaagtagctgggattacagacacacaccaccacgcccagctaatttttgtatttttagtagagacggggtttcactaggttggccaggctggtctcaaactcctgaccttgtggtccactcgcctgggcctcccaaagtgctgggattacaggcatgagccaccatgcccggctaaaatctttatgattttccatcccccatggattaaagttcagattccttaatatggcattcaaggacctccagtaatttgaatccccaagctttacccccttgcgcctcagtccaaccctttaagcattctgctatgctgagtcaactacttgtccttccctacctctgtgttcctttgctgctctcatgtattctctatgcctaaaaaccctttcattctctgacaaaaggcaacttgaacatgagttcaagtgcaacccatgtttgaatcttagttttgccatctgttggctgcgtaaacatgggcaatttacctaaaactcttgtgccacagttttgtgtttataaaatgggcataatagtacttatttcctagggttgttatgagtaacaatgatatacgactttgataatctgtgtatttttcaaggcatgcttgactgtctctctgctgcagttatgtgtgttcatgtcttaactctttctgggctgtttgttaagtctccttgatggctatctttggagtttttaaaatattttattttttataattttaaaatagagacgaggtctcactgtattgcctaggctggtcttaaatgcctgagctcaagccatcctcctgcctcagcctcccaaagtgctgggattacaggcatgagccactatacctggcctaatggttatctttgtatcctttatcaacacagtgccttgaacagagtaaatacttattgaaaacttgagtgaaatgtaagttcatatttggcctcacagaatacaccagtaatacagcaatcactcacctgaggacagtgggaggatagaaggtaagtagaggactgggttaagtattcgttcaagcaaatacattaattacacgcctcccatgtacttgacactgggaactcagcaatgaagaaggcccagaccaaagttcaggcttttagcttcctgtcctataaaggataagattcttaactctaggctgaggtagtaaattacgaggggacttcaaaatggtacagggtggttgagcaggatacggcaatggttaagtttgatcagaaaatagaaatcaaaaggaaaatgtggctatggttacccctagcggacctcttaaatcttcctgagaacctgcttttttgggaaggcatgagtgccagtaagacttggcactcctcctcttccgcttaccgagagaaaatgactttgcctttctgctcaaaactcatcccttcactttgtcaccctatgtttgcatcttccatccttagtgtgtgtttccatccagtctttcagcaatacacgtactacacattggactcttgggtagtctctagggctgtagcaaggagccttgctcccaagggactcatttacacaatcctgtgaacggaccaagagtaaacagtgtgctcaatgctgtgcctacgtgtgttagcccacgcggccagcctgaggagtcagggaaggctcccctaggcaaagcccccaaccagaatcaagtcttaatggttaaagagctccatcacccaaaaaggattgagggcctaccttcaactgaacagctaatgcataatctcagaaactgtgagtcaaaattccctggaataactccactttatccccaatctccttgccacctagaccaaggtccattcaccaccctgtccccagcactgactgcactgctgtggccacactaaagcttggctcaagacggaggaggagtgaggaagctgctgcaccaatatggctggttgaggccgcccaaggtcctagaaggaggaagtgggtaaatgccatatccaaaaagatacagaagcctcaggttttatcgggggcagcagcttccttctccttccccgacctgtggccaagtcacaaagcaccacagctgtacagccagatgggggaagggaggagattagaactgtaggctagagtagacaagtatggaccagttcacaatcacgctatcccaagcagaaagtgatggtggcttggactagcacggtggtagtagagatggggtaaagattcaagagacatcattgataggcagaaccaataggacatggtaataaactattctcaggaaaggggaggagtcatggctttcagccatgagcatccaccctctgggtggcctcacccacttcctggcaattctagccaccatgagtccaggggctatagccctttgctctgcccgttgctcagcaagttacttggggttccagtttgataagaaaagacttcctgtggaggaatctgaagggaaggaggaggagctggcccattcctgcctgggaggttgtggaagaaggaagatggccagagctttgtgtccactgcaagccctctggcttctggagtgggtgctgctgctcttgggaccttgtgctgcccctccagcctgggccttgaacctggacccagtgcagctcaccttctatgcaggccccaatggcagccagtttggattttcactggacttccacaaggacagccatgggaggtgagccgtaagggaagttggggtattgggagagagcaggacccctccccatcactgcttctgggggcttcgagtttcccatttgcgatagcagttgagcaaggtgacttgtggggcctattcaggttgatttcttgtcaagaatgttggggtccaggggactggctcaggtgaaggtataagggcagggcacatgtgggctgatgggcactgaaaactacagcaagaacaaagggaagacaagagttgatgctttattttttccccaagggtcagttgtatgaaccactccaccctcaacaccttgaaatgcagagaggaggccgggcgcggtggctcatgcctgtaatcccagcactttgggaggccgaggcgggcagatcacctgaggtcgagaattcgagaccagcctgaccaacatggagaaaccccgtctctactaaaaatacaaaaaaaaaaaaaaaaaagagaccaggcacagtggctcacacctgcaatcccagcactttgggaggcagaggtgggcagatcatgaggtcaggagttcaagaccagcctggccaatatggtgaaaccctgtctctattaaaaatacaaaaattagctgagcgtggtggcacactcctgtagtcccagctactcgggaggctgaggtaggagaatcacttgaacccgggaggtggaggttgcagtgagctgagatcatgccactgcactccagcctgggtgacagagtgacactccgtctcaaaaaaaaaaaaattagccgggcgtggtgccgcatgcttgtaatcccag

SEQ ID NO: 7299 - DNA, 6000 bp, Homo sapiens
gagacggagccttgctctatacccaggctggagtgcagtggcacaatctccactcactgtaacctccaactccctggttcaagcaattctcgtctcagcctccggagtagctgggattacaggcatgcgccaccacgcccagctaatttttgtatttttagtagagacggggtttagtgctgggattacaggcgtgagccactgcaccttactacttcttttttttttttttttgagttttgctcttgttgccccaagctgcagtgcaatggcatgatctcagctcactgcaacctctgcctcccaggttcaagcaattctcctgcctcagcctcctgagtagctgggattacaggcatgcgccaccacacccatctaattttttgtatttttagtagaaatgggttttcaccatgttagccaggctggtcttgaactcctgaccttaggtgatctgctcccctcggcctcccagagtgctgggattacaggcgtgagccaccgcgcctggccaactgtccctacttctaacggcatggattagttttgcttgttttttttttttgttgttgttgttttgtttttttttaaacgcggtcttgctctgtaacccaggctggagtgcagtggtgcagtggttcagtggcacaatcacagctcactgcagcctcaacttccccagctcaagtgatcttcccacctcaccacctcagcctctggagtagctgagactccaggcacatgcaaccatgcctggctaatttttgtattttttgtagaggtaaggttttgccatgttgctaaggctggtcttgaactactgagctcaagtgatccgcccaccttggcctccctaagcgctgggataacaggcatgagccacagcacctggccagttttgtctgtttttgaagtttttgtaaatgaaaacttttgtgagatccatcttatgtgtaaatgtagattgttcattttcattgcagcataatgtacgtaacacaatttagccattctacggttgacaggcattttgggtagtttctagttttttgacttattataaatagtgctgctatgaatactctagtacaagtattttggtgaacatttgtacacattttcgtggaattgccatggaattccaaaggcatagtgtattcataggttcagctttagtagtgtagtggcggaaaggtgtgacacctttcctcatccatcataaggatcacagctgacactcctataacaaaacccagattaacaagagaagggcataaccaagttatttaaccaaagttttatgtaacacaagagacttcggaaattaagacctcaaagggccgagtgcggtggctcacacctgtaatcccagcactttgggaggcctaggcgggtggatcacgaggtcaggagttcaagaccagcctcaccaacatagtgaaaaccagtctctactaaaaatacaaaaaaaattagccgggcgtggtggtgtgcgcctgtagtcccagctgcttgggaggctgaggcatgagaatcagttgaacctgggaggcggaggttgcagtgagccgagatcatgccactgcactccagcctgggtgatggagagagacccggtctctctctctctctctctcacacacacacacacacacacacacacacaccctcaataccctagaacaattgtttttatgcttaggttcaatgcagaatggacaagcagaatgtgatcagacaaaaggggtatgatctaatttaacagactgagcggggaacccaacaaggcttgtcggttcaaattcttcttggcttcccagtgtaacattccttcctccagggtattccttcctggttcctctggaatgagggtcttcaagggggaggagagaagggggagagtgacctttctggttttatggcttgctttgggggagaggggttctagtttctatgacccgccttggggaagaggaatttttatttctatgactcgcttcaggggagaaaggggcgggagacaggagggcaggagaaggtcagagagagactttgcttctgaggccttccaatctcctttagttcaaagcactcagcacgccaaagctccatactttgggatattgttttctttctttcttttttaaagagatggggtctcgctctgtcttccaggctggagtgtagtggcataatcatagcccactgcagtttcctgagtagctgggactacagccaccacgccctgggaaatcattttctgagcctcaacagtagatattgccagttttgcaaagtccgctgggcacggtggctcatgtctgtaatcccagctctttgggaggccaaggcgggcagatcacttgaggtcaggatttgagaccagcctggccaacatggtgaaaccccctttctactaaaaatacaaaaattagccaggcatgatggcgggcacctgtattcccagctactccggaggctgaggtagtagaatcttttgaacctgggaggcggacatcgcagtgagccgagatcaccccactgcactccagcgtgggcgacagagtgagactctgttgcaaaaacaacaacaaagtgatttaggccaggcacggtggctcatgcctgtaatcccagcactttgggaggccgaggcaggcggatcacaaggtcaggagatcgagaccatcctggccaacatggtgaaaccctgtctctactaaaaatacaaaaattagttgggcgtggttgcgtgcgcctgtagtcccagctactcgggaggctgaggcaggagaattgcttgaaccggggaggtggagcttgcagtgagcctagatggcgcccactgcactccagcctggcgacagagtgagactctccctcaaaacaaaacaaaacaaaaaagttatttgtactagtttacagttgcaggctgtgagaattttaatattttattcaacaggtacaatgatgttgtttcctgtgttattttagttacatgctatttattatttccaggtattttcagagttttcaccctggtcattttatttttttcacttatttttttgagacagggtctcactctgtcgctcaggctggagtgcagtggcgctatctcagcttactgcagccttgacctcccgggctcaagcgatcctcccacctcatgcttggagtagctaggatcacaggtgcgcgtcaccacacccggctaatttttgtattttttgtagagatgggggttttgccatattgtccaggctggtctggaaccccagggctcaagcaatccgcctgcctaggcctcccaaagtgctggaattacaggcgtgagccaccgcgcccatcccacacttgtcattttaaatacatctgtagagaggcaatgtgataaggcgtggggacagactacagcaatcacagggagaagtacttaaatgctccgaggccaagcaggtcatgaaatgatttaagcagctgagtggggacattgcctacccggacaaggtgactcaagaggagctgccatgtgaaaagagaagctcaaagtaagcagcttttgactttttagggaggccagaaatctggattttaatattttggtaactaattcatatttttggaaaacatactggccacacaaaactggtcagtgcattagatgcctagccttcaagatttccactctggggctaccccttagggcttggctttgggtgggggagtttgacttgcagcaagtaacctcacttgttagcgcttaatttcccctctggtcaaaagggcaaaataataaaagcctgtccatcggcattctgatgctcagatgagatcattccagaggtcgcccatctctttactgagccttcctttattacccaaagtcttactctacttaaagcatttggagaattttcggtttcctactgggcattttaaaactggggattcctatgcatgaaaatttttcccaagtcctctgaatgggatcctgctgggatgcaaagagttaagaggaaatagcctattagggtcttgctaatccgagaagttcaggacctgaaaagtatctagagcactgctaagagccccgactctagctagatccacgcagggcccgccagatcctcgaggaattgtagagcagaacctgggaggagacattagcatcccgtgctacaatggaccaaggcctcggcggagcgcgcagaagacaactctgggcccgctaaaccaacccaggatacccaggtaaggcgagaacccacggcgccgttagcggcccgctcaaactgaggcgcggctggcgggggactctcgcccgaaaatcagcttggaagaatgaactgtccggagcgaagtctgcgcccacccggggtccagactccacgcgggtgactcccacgcgcgccgcgcctccgccgcgtcccggactatccgagagagcggcgaggactcgaccgcggaaagttggcgctcgcgtcgcttcccgcgcgttctggggcgcccccctcccactcgagcgccacgtgccgcgcgccccccgctcccgggccgcggcgggacgcccccgcccccaccgcagcgcgcagtgcgcaggcgccttcccgcgggtcgcggcggcgggagcgggaggcggcggcggcggcggcagcggcgggagcggcttctgcctcggctggagactgaggcgaaggcggcagcggcggaggaggtggaggagaggcgagggtgaaggcgatggcgacgcggggcacatgaggccgcgaccggcgggacgggccgaggcccggcggaggaggcggctccgggggaacccgccgccgggtgaggggcggccgcagggccggctgaggagaagcgggccaggggcggggtcccagggggaggcgggagaactcttggggagcccggggaggggccgaggagaacctccggaggtccggggaggagcgcggccagagcgggagaaggaggggggcgccgccgaggggttcccgccgagtccggaggggcgtcgccggcccgcgtcctgccactgtccccggcgcaccctccctctttgtccccaggcgcgcggctcccaaatcgggagggaaacggctcgggggtgtcctgggccgcggaggtgtcgggcgacggtcggggagcccggacagaagcggcgcgcactcggcggcgccccggcggtgccgacaactacccgggcggttaggggcgcagggcggagccgggccgcccctcgccgcccgggctcttcgcgggctgctctttgtctccccgacctcgatccctgcgtctccggcggcgtgcgggctcgtctgaggcttcccgcatctccccgctggaactcctgcctcccgggggttagaggagggttcgttcgagggctggaagcgggaaagcggggcggaaggactgggctcatcgcctcctgattaactcgttgtctttacttaaaatgacttttcccccactttgtcaaacttgagaactgttttgtgtgtgtgtgtgtttccttaagtctctagcttcaaaattaagagtaggcgctaccgctgtgattgtgggcagttgtgtggttggcggctgcgtttggagctctgagttgaaaagatgtacgtgaatgtatggtttagattttgttcttttttttgcgattgtctgattgggagtacttttcctttgcgaaatgggcgaatttggttttctttttgttcattgagaactggcagtgataccgatttcattatgctcatgcttaattttgttagcatcaagacgatgtgaaatcgagtaagttaagtttgaataagttcaggctgagggtcatcttgtatgcctgataagtctaaatttgttatatgtttgtgtcgtgtatacgttcaagtgaatatatgtgaaagcgctataaaaaatcaaactacataaatgaaagggattttaatttcctgataagcaggaaacagcatatctccagtactttaatatctgtag

SEQ ID NO: 7300 - DNA, 6000 bp, Homo sapiens
tggcttacgcctataatcccagcactttgggaggccaaggtgggcagatcacttaaggtcaggagttggagaacaacctggctaacatggtgaaaccccgtctctactaaaaatacaaaaattagccgggcatggtggcacgcacctgtaatccctgctacttgggaggctgaggcaggagaattgcttgaacccgggaggcagaggttgcagtgagccgagatcgtgctactgcactccagcctgggcgacagagtgagactccatttcaaaaaaaagaaaagatgtaaagagattttaagaagaggaacaacaaggccaggcgcggtggttcacgcctgtaatcccagcactttgggaggccaaggcaggcggatcacctgaggtcaggagttcaagaccagccaaacaacatagtgaaaccctgtctctactaaaaataaaaaaaattagctgggtgtggtggcgcatacctgtaatcccagctactcaggagactgagacaggagaatcgcctgaacctgggaggcggagattgcagtgagccaatatcaccccattgcactccagcctgggcaacaagagtgaaactccttctcaaaaaaaagaaaaaaagaaaaagaaaaagcaacaacagtgatagatgtgggggtgatgagaactttgtggttcctaagcttccttccccagccttctctcattcctatccccttggcccctctccagtgccttcccatccctaacgtgtataactgactccttccccacctcccctatggagccagccccctaagtcccctatcttcccaggtcttcctctgtcccttctggaggctgctggtctttcatagtgggtaccatagccaaacagaggctgagaaatgctcctggaggctttttggtgctgtccttgtaaatatgagccaaaaaaaaaaaaaaaatggactagctcacagaaatattaagacatcaaaataaccaaatcagtattttttagaaataacatacccagccagcatgaccattgacataacttctgatgatctggaatccgaagaaataaaatgcccaaatgctgggtcttttccctggctgctgttatcaaatagtgtcattatgttccctattataactgatagcctgcaagaaaggttcagatgtgccttctaagtcatcatatagggagggtcagtagatgcttcctcagatgtctgcatggcctgcttcctcctttcctttagctctttgttcaaatgtcaccttgttaaaggttttctcagaggactatgaaaatggctttctggcttgcctgtcccttacccctcacattccacatcccatttctgctctatttttctttgcagcacttatccccaactcatataatatctacttttcccatttatttgtgtattatatcttgcacagaaacgcacgcatgtacatacacaaacacttgattgtaagttccatgagagcaaaatttttcttttgtctactattgtgtcccagtggctagaaaaatatctggtacatactaagcactcaataaatatttgtacagcacataaaatatgttgtcttttttttttttttttttttggagatagagtcttgctctgttgctgaggctgcagtggtgtgatcttggctcactacagcctctgcctcctgggtgcaaatgattctcctgccttcacctcccaagtagctgggactacaggcactcgccaccatgcctggctgatttttgtgtgtttttagtagaatcagggtttcaccatgttggccaggctggtctcgaactcctggtctcaagtgatctgcccgccttggcctctcaaagtgctgggattacaggtatgagccaccacacccagccaatatggtatcattgataggtacattttaattattattagttaaaatttggtatttgtgaatatttatacatgatctccctcatcctgaattcctttattcatttacttcacaaatgcttattaaatatctgtcatcggccaggtgcagtggctcatgcctgtaatcccagcactttgggaggccgaggcaagcagatcacaaggtcaagagatcgagaccatcctggccaacatggtgaaaccctgtctctactaaaaatacaaaaattagctgggcgtggtggtgtgcacctgtagtcccaactactcgggaggctgaggcaggagaatcactggaacccgtgaggcggaggttgcagtgagccgagatctcgccactgcactccagcctggtgacggagcaagactccgtctcaaaaaaaaaaaaaaaaaatctgtcaccaagccttgtaagaaacactagggattccacagtgaacaagacaaacataattggccaggtgaggtgggtcacacctgtaatctcagggctttgggaggccgaggcaggaggagggcttgatcccaggagttcaagacctgcctggacaacacagcaagaccctgcctttaaaaaaaataataataaataaccaggcatggtggcacgtgtgtatcgtcccacctactcaggagactgagacaggagaatggcttgatcctgggagttgtttgtgtgtgtgtgtgtgtgtgggtgggtgggtgggtagcaggttctcgctctcttggccaggctggagtgctgtagtgcggtctcgggtcactgcaacctccacctcccaggttcaagtgattctcctgcctcagcctcccgagtagctgggattacaggcacctgccaccacccccggctaatttttttgtatttttagtagagatggggtttcaccatgttggccaggctggtctcaaactcctgacctcgtgatccgcctgtctcggccttccaaagagctggaattacaggcgtgagccaccgtgcccggccgacactgggaatttgaggctgcggtgaactatgatcacaccactgtactccagcctgggtgatagagcaagaccctgtctcaaaacaaaaaaacaaacaaacaaaaagtcacattcattggttcttgcagggctcaaagtctgggcggggagaaggaacacttataaacaaactagtaaaggctgggaatggtggttcacgcctgtatcccaacactttgggaggctgaggtgggaggatcacttgagcctaggcgttcaagaccagcctgggcaacatagtgagaccttgatcatgatcaccctcctccccctcctcctcctcttcctttctttttctcttcttcttcttcttcttttttttttttttgaaacagattctcactcccattgcccaggctggagcacagtggcatgatcatggctctgcagccttgaacccccagactcgggtgattctcccacctcagccttctgagtagctgggactacaggtcacaccaccctacctggctaatttctttgtagttttagtagagactagatcttaccatgttgcccaggctggtctggaactcctgggctcaagccttctgcccacctcagcctcccaaagtgctgggattacagatgtgagccattgagcccagacttgagaccttgtttctacaaaaataaaaaaaataaaaaaataaaaaattacctgggagtggttgcatgcaccagtggtcccagctactcgggagactgagatgggaggattgcctgagcccaggaggttgaggctgcagtgagcccagatcgagtcactgcactccagcctgggcaacagagtgagaccgtgtctcaaacaagcaatattagtaaaaataatatttagagattgaaaaaagtgcaatgaaagaaagaaataggaactgagagaatgtgacaggagagacctatcaagtcagatatggtggctgtcaggaggaccttttggtaattatatttcagcagaggcttgaagataagaagacttgatgcattcagtgaggaaaaccccattctgtaaccatctagggtaagtgactgtggtccacaacataagagggcttgaagagaagaatagggaagaaattttgagtcaaaaatctgggttctatccccagtcaactagctgtatagtcttgaaaaggtcacacaacctctgagtctctctttgcttaaaatgagggtccattatgcctatcttacaggtgtgggctatattagataatggatgtgaaggtgtcaaatgtaaaatacacgcacagtgtttttaccggtaaatgcatacgtagcactaacatatcactgggatgtgaatttcccacttgccagtgtaccctgaaatgagagcttgtcttagttagacttagaccaaagaaaccaaaacatgctgcaaagcccgatgtcattggtggagcatttgtgctgctgggcgtctgtcttgcttctgatggtgccatatctgtgacttaggagagcctggggaggtgtctccgggcccatggttgccttctgcaagtagtgagagaggaatgagaaagcctcttcacagaggggtgtccccagaactgtcctcatttgctcttgcttatagaccctgtccctgagatctaaagggtgacctgacgtatttgtcctcatggtacctaccagaggtcaacagacaaaagtgggctttgcttgtgtttgctgctggccccaggacagcctatagacactggcgcacaccaaagccacaggccggagagcaggcaggaagcaggacgagggctggtcttggggcaccctgaggatgcagagttcggggatgtaagggactcgggaaggagccaaggaggagagagggagaggagaagtgggggaaggagaggtggggtgagggcgggaggggagatgggggagaacgagcaagaggacggggccccgaggaaagggaggccacgcgcgagagggggccgcggggcggcgcggaggcggggcggcggcggcgggcaggcggcgggcggcgctgtcagtgcgaggcggcgagcggaatgcagcggcccgaggctggccacgtccgcacccgggggagggggccgcggcggcaggccgggggccggcgccgcctgctcgagccggggagccctcggggctgcgggtacggagcgggcgggcgcggggatcccgggcggcgggagctgggcagggacagagcagggttagggggagcagccaactcagaactcgcgcgcccggcggctgggaactttgtgtcacccctgactggccccaggacccgggaggaaaagttcgtcccagcgccgaccggagaggaggcctgtcctgagtccgtcggcgcggggctgaagttctgggtccgtttggagtgggggtggcgggtgagttgcgattccgcggggagggtaaggagtggcctgtccgtcccagactcggctcccatcaccggtgggtgatgggcatgcttctggagtctacccgggccagggcctgggggcgcgctgatagcgcaggtccagcccggccagggatcagctggaagaaggaggctcggcccgctgtcccccccggcccaggttctgtgatacactccgactcgggctctggagcagtcagtgcatgacagaacttgggcccggaaggaccttctgcacccaacgggcacagcgcccactcggggcctgcagtggaacatctgcctgggagtggagtgggcacctgggttggcccatgtggcacagggctgggcagaaccagctgtggaccttgaggactggggttgctggggcctgaggatgtatcctagggccagcagatcccatagacacagggtgtccacctcgagtcaggggccaaacggaactctcctctccggtgtcagttgcaggaaccttccctctacaccatcaaggctgttttcatcctagataatgacgggcgccggctgctggccaaggtaacctctgaccccacccatgagggacacagttcccactcagctgacactcctgtctcaggagaaactccactgtgatctctgtgactcagggcagctcagctt

SEQ ID NO: 7301 - DNA, 6000 bp, Homo sapiens; identical to SEQ ID NO: 1947

SEQ ID NO: 7302 - DNA, 6000 bp, Homo sapiens
atcttccgataaggtctagctgcctttctcacagttgttaccatcctttcctctcaaagttttgaaaatcacacctttctggaggccagcctgggtagcatacagagaccccttctctacaaaataaaagtaaagcaattagctgggcatggtggttcatgcctgtagtcccagctactcaggaggatgaggtgggaggattgcttggaccggggaggtcgaggctgcagtaagccatgatcctgccacaccgcactccagcctgggccacagagtgagactctgtctcaaaaacaaaacaacaacaataaacaaccccatacctttcaaatgtgcccaacaattagattctttaggccagtagatttcaactagggaacatttggcaatatcaagagacatttttagttgtcacaactagaggggaggagtcgtggtactactggggtctagtaagtagaggccagggacactgttaagcatcttacaatgcacaggacaatgcctccatccccaccccgcaacaaagaatcatccagcccaaaatgtcagtggtgccaaggctgagaaaccccactttagtcacttggctttgatctctgctttcaggcatgtggtctgtccccaaaaacaccattcactaaggaaatatttcttttcttttctttttgagatggagtcttgctctgttgcccaggctggagtgcaatggcacgatcttggcttactgcaacctccgcctcccaggttcaagtgattctcctgcctcagccttctgaatagctaggattacaggagcatgctgccacacccggctaattttttgtatttttactggagacagggtttcaccatgtcggccaggctggtctcgaactcctgacctcaagtgatccatccaccttggccttccaaagtgctgggattataggcgtgagccaccgtgcccggccactgatgaaatctttcgaatgaaaagatttcttggtctccacttcttgaatcacattgtcaggaagttctccttcctgtctagcttcaatccctcctttttttagctgaagagcatttcccgttgtttagccatatttttttaaaaatagagagatgaggggcttggttttcggtcaagttccaattctgtttgaacagagacccagctctcctgctgccttgatgctgtgacatctcaccctctctcgctgtctgtttctctctgtgtgtacgtatgtgtcttgtgtgtctctcttcatcctccaggtctccaggtcctgacctggccttcctgacttcctgtcctgacaagaacaaagtccatttcaacccgactggctcagccttctgccccgtcaacctgatgaagcccctcttccccggcatgggcttcatcttccgtaactgcccctcaaacccgggatctccccttcccccggccagccccaggccaccacctcggaaggatccggaagcctccaaggcctccccactgccattcgagccatggcagcgcaccccaccatcagaagagcctgtgcttttccagagctccctgatggtctgagggtcccacccctgccccactttaccatagagaccagtgccttggtggcaggtccctccccaggtcccctgagatggggtatggaggggcccttccctctcggccttcgagcactttctttcacttactgtgtcaaagccctgggtcctctttttgatgggcaccggcccctctgaacgtgatgggacctgccttctccactagtagctgggcagctcacaattcacacctgtgtacctgccacatccctcacttggtggaaaacacccagaaggtcttgagtcccccacccctgggtgtcagtccaaatgactgtataggaggcccttatttttgtcacagagcaagctggccatgaacgaaggagagaagacgccacagatttccttccctctcctccaggagaccataagatagatcccccatcctctcagccctattcccatgcctccctctcattggaggagctgaccaaagcagccctaacgggccataacacttgaccaattcagctgctggcagagggaggaaacaagtgttttcccaagtggcattttcatctcgctttcaccctgactaaagattgtcttaagtagcagcccagcccgcccagccccaggtgggtagtggggaggagagctggcattcctccaggtggcaaatggcgactctatactctccgcccgccccagggctggatggattagaaaaatgcctatttttcttgtatcgatgtagagactctattttctcccaaagacactatttttgcagctgtttgaagtttgtatattttccgtactgcagagcttacacaaaattgaagaatgttaatgttcgagttttcttatcttgtgtttagaggttgttttttgcagatcttggtgttaatagaccaaataaataaataaatattcccagcagcttgaagttctgttaaatatttggggaaggaggagtggggtagagattaagggtatatactgatcatttcatctttgtcttcaagagaaggagcctcaattcccacatctgggtgttgttatggctgtacacagagttcctgtcctctggacaccatgcttgcatactttacatggacatataaacaacagacccatgaaaaggctgtccagaatgaagagggtggtttgtcctagaggtggggtgagggagtcactggggaagttacccattcttgtatgagtctgaaaaagctccctaaggagaatggatttcagaaaggaaaagcaggtgaccaagggaagacagtttgacattgtgggtgttctttgcactggttggatctcttgacagttttggggaagctttggttcatctcagggagtacccacaacatagtgtgcagccttaaagggaacaaagaaactatacaaagacactactcttatcctttcgcagcctttataatgctgcacctgtaagagctcttaggcttttggggaaaatgggaataaccatctcaatatttcaatgatgctttggaatttccgaagcattttcacaaaagacacatccccattgtatgggtgaacagttgactaccccaagggcagtcataataagtacaattgtatctgcctcataagacctgacaacaaactcctaaaccaggctatcccaaccaccattcattgggctggtaagaaccagctaccatgttaagtgctttacataaagtgttattgaaatatgacaaccacccagtaagagaaatatggtaagtcccactgtataatcaggaaaggacaaatagatcgaataactttccccaaaagacacagatatgaagtgggagagctaggattggaaacctgatcatttgaatccagtgcccatgtttctaaccacagcgctctcctgcttgttattatattcccattaatttcacgtgaggaaactcgactcaggacaagcgaattgtttgaggtcccagctggtaaagaagtagagctggcaggtctctcttcccagctatttggtgccctggcatcgcgggctgagccagtagagtaagctagtgagcaagagagcaaatgtatggggctttcccatgccactaatatcgaggagacagtgggctggggacaccctatcttctatcccttactcctccctctaaaagacttctggctcccccgcaaagccttattgagtcaggcccggagcgatgggtgtggtgctgcccagtatttccttcctttgcctgaggctgtgccaaaagagcaggctgctagaagaggagcctcgacctagagagcagcccagagtccaccaggtggccggagatttgggccaattaagtagggggttggaggtagtagtaggaagacctgaggtcagtcttgccctggcaattcgtgccagcaagtgaagacccaacacttgcatgaggaagggatccaacgaggagctcattaatgggaaatattcaggagcgcggccgaagggtttgcgccattgttggtgagttgttaagacttggaagaaaactgacttcagtaagcttccatttccacccctcgatgtgaggaaataagatcagggctgacaaacagtgatgactaataataccttaagcttgcacagcatactttacagtttacaaaacactcttatttgatcctcacaacagccaagaggcgacaaggtggctattactaattatccctagtttccagacctggaaaactctggctcagaacttgggtgacacgggtaggttaccccgcctttaagtgaccaagccgagacttactgtgccgctctcccccttggaagcctagtgatgtgcctaggtaatgagcaggtaaagtcgctgacgctgggcagcagctagacggcgctgaagctccagtaaggaatttggcattaggacccagcagaagcctggccgcccgccgcggaaaagactattggatttgctctgccgaccacacctcctcccgccccgcctacctgtccgtcttcgcacagcgcagccaattggtggcctccacatccttatacgtcattattctacgcccaggtggctctaggacaccctgtggtgctctgggtcgcagttgtcctcagagttgcctgattggaaaaatctccagggcgagggatcagtctcgaggctgccggttcccctggccctcagggatggagccaaggtcccagggcgggttttctttcctaggaagtggttgctgggttctgaggagtttcccccttggcagccatgagccggcagttctggtagtgactgctgggccctgctggacagcggtcgcatgcagctcctatgaggcccctgccgccggtcggcgatgtccggctggagctgtcgcctccgccgccgctgctgccggtgccggttgtgagcgggtctccagtcggctcctctgggcgtctcatggcctctagcagctccctggtgcccgaccggctgcgcctgccgctctgcttcctgggtgtctttgtctgctatttttactatgggatcctgcaggaaaagatgtgagcgaccccgggggcgggccgacagtctctccccagcctgtgacagggatcccgggccttctgcctctggacccgggctttcctcttgtcctcctgcccggctgtcgccctcttagcaccctactacttttgcagctatggctgagcctacccagaattccagaactccaggattattttctggattcttcggacttggttattttcttttcttagctgtttttccccgcttggttctaagggcctgcgttttacaggctgagacttctattcctcaaacaggacccgagtcggcccccttttggtactcccagatgcttgcaaacaacctattcgtcctcggccttggtgccatagccgaaataccgtctcctcctgcctggggtacctgatttcactatctcgttctgcatgtttcctctccgtctttttcgggtattcttttcttaggctttggaatcagtaggctgggatgtctagtttctagatccagtaaaatcagccccttttgcaaatgagcctagtggtccttaacaaactctgcctacatccagagaggcaagataattttaaagttttcagtggctcgggatatattagatgacagtgagtgaaatacactaatttctccctcttttctcatgcatttcatttctagaacaagaggaaagtatggggaaggagccaagcaggagacgttcacctttgccttaactttggtcttcattcaatgtgtgatcaatgctgtgtttgccaagatctgtgagtacccagatagtaatttgttgggtaccccaccaccccaagttccctcagtatgctgggcattaagcattgattcaaccttaaaggctaactcatgatctccaccccattttgtacttacacagcctctctgtgaagtctgtaaa

SEQ ID NO: 7303 - DNA, 6000 bp, Homo sapiens
aatcccagctacttgggaggctgaggcaggagaatcgtttgaacctgggaggcagaggttgcagtgagctgagatcgcaccactgcactccagcctggcgacagagtgagactccatctcaaaaaaaaaaaaaaaaaaggcgggggcgggggggagctaggtatggtgactcacgcctgtaatcccagcactctgggatgccgaggtgggcaggtcacctgagatcaggagtttgagaccagcctggacaacaaagtgaaaacctgtctctactaaaaatataaaaattagccgggcatggtggcaggcgcctgtaatcccagctactcgggaggccaaggcaggagaatcacttgaacctgggaggcagaggttgcagtgagccaagatcatgccattgcactccagcctggaggacaagagagagacttcatctcaaaaaacaaaacaacgaaaaaatgcctttacagatttttcttttttctttctttctttctttctttttttctttctctttttttctttctttctttctctttccctctttccctttctttcttttttttttctctcactctcttcctctttctttctttctttatggagttgtggtattgctctgttgcccaggctggagtgcagttgtgccatcacagctcattgcagcctcaacctcctgggctccagtgatccttatagcttagctccccaagtagtagctgggactacaggcctgcatcagcacaacctgggctttattttttatttttattttcagaaatgctctggctatgttgcccaggcttctctcaaactcctaccctcaactgatcctcccacctcagcctcccaaagtgctgggacagattttctaacaaaccccttcatcatacggatgaataagctgaagtttacagcccttatccttgtgactgtcactaagtgggtaatcagtaactacttgctcttttgtttatggcctaagttgttcaaaatgaccagtccatactagaatacaaggttcctaatttcaacaccagtttctttcacctcaatcatactgagtgatgtgctttcattgggtctactataaaaatcattatagccataaattttatttatttatgtatttatttgagatggagtctcggtctatcgcccaggctggagtgcaatggcatgatctcagctcactacaacctctgcctcccagttcaagcgattctcctgcctcagcctcccgagtagctgggattacaggtgcacgccaccatgcccggctaatttttgtatttttagtagagatggggtttcaccatgttggccagctggtctcgaactcctgacctcaagtgatctgctcgccttggccttccaaagtgctgggattacaggcatgagccaccacgccccaccagccataacttttacttcatatatttttttaatagcttgagatataattcacataccatatgattcactcatttaatgtgtaaagttgaatgtcttttagcatattttcagagttgtgtattcaccattataatcaatttttagaacattttcattatcctaaaaagaaaccccatacctattagcaggcactcccatttcccctcatctcaccctctcatgcccctgagacctagccaatcactaaattcacatttcatacgaatggaattgtacaatatgtggtcctttgtgactgacttctttcacttagctttttcaagattcagctgtatctctgggcatggtggctcacgcctgtaatcccagcactttgggaggccaaggtgggtggatcacctgaggtcaggagtttgagatcagcctggctaacgtagtgaaaccctgtttctactaaaaatacaaaaaattagccgggtgtggtggcgcacacctgtaatcccagctactcgggaggctgaggcaggagaatcgcttgaacttgggaggcggaggtttcggtgagctgaggttgcaccattgcactccagcttaggcaacaagagcgaaattccatctcaaaaaaaaaaaaaagattcagctatgtcatggcatgtacttaaaatttttgttttcttttctattctttttttttttttttggagacggagttttgctcttgttgcccaggctggagtgcaatggctcgatcttggctcaccacaacctccgcctcccaggttcaagcgattctcctgcctcagcctcctgagtagctaagaatacaggtgcgggccaccacgcccggctaattttgtatttttagtagatacagggtttctccatattggtcaggctgatcttgaacatctgacctctgacctcaggtgatccgcccgcctcgacctcccaaagtgctgggagtacaggtgtaagccaccgtgcctggccaaaaaaaatttttttttttttttttgtcagggatgaaggtctcactatgttgcccaggctggtctccaactcatggcacaagccatcctcttgcaagtgctgagattacaggcgcgagccaccacgcctactcccctcccctccaacgactttctttttattgccaaataatagtccattgtatacctatgtcacattttatccattcatcagctgatggttatttagctgaattttattttaactaaatgttatctctgataactggcagaagcttaaaatcaagacataagtgtgtatctttctatgttgaacgtatacctaaagaagtatacttattaggaatgacaattaaaatctcgtacttgaaaaatcgatacttttttcttttttctttttttttttgagatggagtctcactctgtcgcccaggctggagtgcaatggtgtgatctctgctcactgcaacctccgcctcccaggttcaagctattctcctgcctcagcctcttgagtagctgggattataggtgtgcaccaccatgcccgactaatttttgtactttttagtagaaatggggtttcaccatattgttcaggctggtcttgaactcctgaccttgtgatccacccgcctcggcctcccaaagtgctgggttacaggcatgagtcaccacgcccggctgatacttttttctttaaattttttgatgtgtatgataatattgtggaaagaaaaagtaaagccttgccctatgttttttggctcttctgatcccccaggaaaagagaggcatgcatataggtagaccaggtgagtgacagccctcaggaagagaaaataaaagaggagagattcagatcaagactttttctagttttcaaatatgaaaggttaagaagagaaagggcatttgcggctcacagccaaccagctggtcggcattcctactacccaaatatctaaatgacataagggtgaatgtggggtgagggtgagaacgggaaaaaacacaggccgcaaattcagtcccatctggcacttcataagacttagtattttcatctttgtccttccaaatttataggtttactcttgcccaaccttcatattgtttttatgggtctccaggtgggtcatgcgtaggaaactttaggggactacttcatacttggtgggaagtacttaaacttgtaaaccccaagctaagggtagttatgatcccggtgggtggccaattctccccttaaacctatgtttatcctgcctttcctcccccttttcttaaacgagtcgggacggagagctgagtcacctgagacacagagaagggacttttgagagtgtcttccgtcccatttgcggacgttagatgagcacaccgggatccttgactcagcccgctctaggcgtgggcgttgtgtcattccccacacgtgacactctcccaggcggcagaaacctcacttgtcatgggacttattcactccagtgactccaccccttacctcctctgttccccaacctcccacttaccctttccgccccacttcaagacttgaggagaggagggtggctggagcctggaaatgtccccgtcccaagttggccagaagtagcagacacactatgtgggaaagtgccacatgtaacgttccagtttcacccttctccagaatgctatcacccttcctgtttattttttaataacttgagatataattcacacgccatatgattcactcacttaacgtgtaaagttgaatgtcttttagcatatttagagttgtgtattcatcactataatacattttttagaacatttttattatcccaaaacgaaatcccatacctattagcagtcactcccatttcccctcatctcacccttgctcttccatagcacaaaacagttctattctattcgagaccacctttccacttgggcagaccctggttatggttttttttccctccctttctgtttccagtttttttcggagcccggaattctcaatctgggtaattggtttgagtcccggctcagcccgtttcccgttgtagctgcgtgaccttgagagcaacgccactttcctgggcctagtttctttgtctgtgaaacgaggtccaaatatctacctctttacgcctgttgtggggatgaagtgagtaggtgctttgtgagctttaaaaagccatagaaatgccagctaagttaactcgtcactcttcccgaacccctccctttcccctgggacccgccccgcgaatcccgctgtggatggatacttctccccacccgccgaccgcagtctttcccattggcgcccgcaccgtcttcgcggcgccgggtgttgacgccatggcttcctccgccagcgcccgaagacgcttggccccgcccccggccgcgcctggcctcccgcggcgccccgcccatcgggccgacgcggcgccggccccgccccgcggatgacgtgtggcgcgcgcggccgggccgccccggcagttggtgcagcggcggttggggtgagagcgcctacgccacccctcccctcctccggccccggcccccaccccgccgggcccagccccagccccggcccgggctccagccctagtacccgtcccagcccgagtcgggtccgtcccgtgcgggcaggtgccgcccctctgccggcgacgccccgggccgcccgcccgtccgcttgccaccatggagctggaggacggtgtggtgtatcaggaggagcccggcggctccggggccgtgatgtcggagcgggtgtccggcctggccggctccatctaccgcgagttcgagcggcttatcgggcgctatgacgaggaggtggtcaaagagctgatgccgctggtggtggctgtgctggagaacctggactcggtgttcgcgcaggaccaggagcaccaggtggagctggagctgctgcgggacgacaacgagcagctcatcacccagtacgagcgggagaaggcgctgcgcaagcacgctgaggaggtgaggccggcggcagggcgggggccgcgggatccgtctccgggggcggccggggcggggtcgcggcccggtcggggactagaggcgcgacgggcctcctggagggcgggcctgaggccgatgccccctgggaccgatcccggcggcctccaggtaccccgggagccaggccggcgttggaagccgaggccggctactgagtgtcctgggaagggagcgagatggaggaggcagggcccggggaggaagcggcagcctggcctgaggacacctggggttggccaagggcggagattgttgggtgtctggttgcttcttgttgagggaagtttccgaccaccgtgggatagtcagatggcggttcaaagttttacccttggggagggggacacttctgccctggatatgtaacttccgctagttccagtacctttccagggggttgccttgctttgggaagttagagatctccctctttcggtcagtttcttcttgacgttttaatcttgttgagaaagacgtcttattttatgttctatgtgccttggttgacactttgtcaacttttagatgt

SEQ ID NO: 7304 - DNA, 6000 bp, Homo sapiens
ctttagagaaaaaaatattcatttcagcatctcccaatgttgtattgttattgtatctatgcatattgacagacctttcatcatcataagaactccttgtatccaggttataacctcggtctctgaccccaatcctactatgctcaactctgtctaagctgtttgttctagcttagaaataacttcaaatatgccatcttacaaataggcatctaaccacgttaatgatgatttttacctgagacaaaagtaaagaaatatttcctaatatagaaaagaaaggcttcagtgtttttgttgttgttttgttgtcatccgttgcaaagctgctttctacaagacgcagtaaaaatagcaagttgtaaggagtcagaaaaaatccaggcttaaactccagctctgccactacccaaccgattaggcttggacaagttaactcatcattctaagcctgcttcccctatccatgcgctgagcttgggaaaagggtaggtgaaagggcctatgtgtctagaaccaaacttcctaactggcctttcctccttcctcctaccctttctaaaatgtctggagctgaacttcctaaatacacttttctctttctttcttcctcgtcacttttgtcttgctgagtgtttggatggtgtccagtgggcagcatatttaatactcagctttgggctgacataccaggcagagatgaattcacttttctagggccaagctttcagccacagtaatttgcttacatatggggggaattgagcaagtaagtacatacactgaagataaaggtagccagatttcctgctgttgaacacacatatgcacacttgtttatacacaaaaattttctagggtctctgctgagagaggctagtaatgaacacttctagtgctcagagttttttctaaatgccactttccactaaagaaaccaaaattcgtggcagagaaggctgattccaaggcaggtcaggaaaatacaagataagcatggcacattgtagtgccagaaaataaggaagtgatgaaagaatgatggaaacatgtcataaaggggcttctattggctaagtctaagaaaatttgaaatcagaattaaaaaataatagtaataaattgattaaaatttgaagtcatgagtctatattgatgtaaacgaataaacaagaaatatatggtatagcaaggaaaaccctaccttacagtaaaatgccaactaataaatctagaaggactgataacattagaaaattgtcatttggcatccatcacagtgataacagattcaaacaagaagcatcaatggagaaatctggcaggagaaaatatgatgagaaacagaatatttacagtctcaaagcttctccctacaaaacacaaagattctccccacaaaacacacattgcctattaatttatgaatgtgacatatttgctaattcaccttgtaacagagaaacctggcagacccaatcttaaagaaacagaagttaacatcatgaaaccacggaataaattgagatcatgtgatgcctaagaggactcactgattgaagcacagcatctcctctaagatattcctgtcaaggggtcacaaacatgaggaaacatcagacagacctatattgaggcacatttaatcacgtaaccagcctgtattcctcaaaaatgtcaaagtcatgaaagataaggctgggtgcggtggctcatgcctgtaatcccagcactatgggagaccaagaccacctaaggccaggagtttgaaaccagcctgagcaacccagcaagatcttgtctctcaaaaataaaaataaaaataaaaataaaaaaggaaagaaaaagacaagaaaagactggcaactattccagattgaagaagactgaagaggcatgacaactaaaatcaacgagtaatcctggattaaatcctagatctaaaatggaaatgattgggacaaatggggtaatttatgtagagtccatgaataacatgatgtaaagaatttaatatatatcccccaaaatccatatgttgaagccctaacccctcaatgtagctgtatttggattaggaagtaattatggttgaatgaggtcataagggtgggaacctgatctcatgggattggtgtccttataagagacataagagctcatttactccaatctatgtaaggccacagcaagatggtagatgtcacaagccagggagacccctcaccaggaagtgaatcagttgatacattgatctttgactttccagccttcagcactttgagaaacaagtatttctgttgtttaagcaaccagtctgtggtattttgctattggtagtccaagctgactacatatggtaatactggataaatattaacttactgattttgatgcctgctctgtggtttggaaggagaaagtgttcttgtaataggaaataaacaagtaagtatgcagataaagactgaagaatctttatcattctctaatcttggtgaagggtatacaagaaatttgagtactattatgttgcagaaatattttaaattgtttaatatgtttgttaattggacattgaactaaattatgttctacacatttcattcaaaatataagtaaaaaaccaaaatatttagttgtcattcagaagtatttcataaacatgaactgtcatttcacattatcatactaagatcagatacaatgcatattttcttttattaaagtagaaagctacaaagaccaacaccacttcattgctatcaatatcactgtacataagagtttcattttgcaattattatacaaaaaatgaaatactggagtccaagacaaagactgtatactgacatatatttatactgctacctggagctacaaagaaggggtgcctggagaaacagaatggtgagtggaaatgtactgttggtatcaaggatttcagtctatgctgtaagaaaattaaactttgagaaatctcatcctagaagagctgagaatctggtacaagaaccaaggtgcatgcagatgaaaaagattttcaaacactgtcatcacacaatatgaataaatttgtagaatcatggagacctgaaatttttgagacagtatgccagagtatagaaagaagtcagaaggtatttatattttattggttctgcaattttctggccctgtgaccacaagttaatcaattactcactcaaggtgaccatcatcactcatgtggactactgcaattgcttcctaattgttctacttccattcctccccctacctttaatccattctccacaaagtaatcaatatcttttcaaaaatgtgagtcagatcacatcacttgtatgtgtcaaacattccaatagcttcctattacttttagaataaaatccaaacccttggacatggcttaaaaggctggtattaccaggcctttgttacctgttctgaccccatttcctaccactttccactctgctatgttgggaacacagtggccttctttctgttcttcaatcattctatctctttccttcccctgggcctttgcttggcctggaattgttattgagtaggtagctccttatcatcgttcagatctaaactcaaatgtcacctcttcaaaacgtccttactttactaccgcttctcatgactgtcaatcatactatgttattacattgtcttcactgcactgattgttatctgaaattcccttatttcggtaactgttacttgattattttctgagtccctcagcagaaaggacactccatcactgaagtgatctcccgacttgttctgtgctatagtgccagcaggtcgattggtgtcaggcccacagttgagagggcaataaataaataaaatgtcgaatgactagttaaaatttctcaggcctccaagttcctcatccacatagtggggataattatacctgctctggccattagaaatggccacgtagcaagtagaaatacagcctaacttttaactacattcttactatgcctcagtcatcatgaaagacgttatatgaatattattcatttactgttctgatttccattttacaagtaaggacaccaggtcttagaggacaagtaactgacctaagggcacagggccatggtgaggacccgggtaaaaatccagaaccccctaacctcagaacctgagctcttaactgctattttatagtttctagaaagatgcttccttctaacacagtaaaatccgctatgctgtctgcccccctcgagttcgtcctgtgggacaactgaagaaagctattacatcctcccacggggttcgtttctttcagtctctccttaaatggccctcctatcctggtcactctctccagaacaaacttcagcgtgacagcctccctcctgctccagctgtggtgctttccactgggcaagttgtaaggggcatcagagcaggggaagccgactgcccacgggctgagaaaatgcaggtgtcgtgggtgcccatgagggctgcggttaacacagcaaggcttcctgagagaggtgatacttgaactaagtccagggcagtgagcacaggagccagcggccaagggaccccaggagaaaagaccgcgggagagcgtcgccggggctgccgggtcgagacaaaggctggtggagtttaaataaagatcacaggcgcaaccccaagtgatggcaagcttgcacgcggacgggcgaaacgcattttcctaaatgttaagagacgttctggcgagaagcgaagtgggagtaacagtcacaaagcaaaacgcaaacttacccgtaatctggcaacccggcctccgtagcccgactgcaagcgctgccacctgaggagcctggtagccaaggcagcggcaggctcaacccagatctcgcgagacggagcacgcctcgcgagatttgacctctcgtccctgagaggcgggtgggtgttagttcagagggttatgggagggctctggcgtcctggatggaggtgcgttcctttctgtggctggcgctggatccaccctgggtctccaaccagggctgcagagagggtagagccgtttcttaggccagagtggagtgggacaggaggtgccgagagaggactgaggtggcttgggacatggaagcgctgcagccttcgagcccggcatccagcattgcagccgccgcggcggcctaagagctcgaaccctttcacacgcgcgcaggaggaggagcggcggcggcagaacaagacgaccctcacttacgtggccgctgtcgccgtgggcatgctgggggcgtcctacgctgccgtacccctttatcggctctattgccaggtaggggccggcgccgcccgcagggtggcgcagacgcgagaggtgggggtgcaagacaaatcccgggacaagccctcgctctgcgggtcgtaggtggaagaggtttccgatattatctacctaagaggagagaggttcaaaacagtcacttaacacccaaagtcaccaaagaaattggtgacaaaactgcaagtagcatccagttcttagtgattgtgcttataccatgctgcagagtgaaacccctgatctatgaactgcacctcgccaaaaaaaaaaaaaaaggtccgcagcctctaaccgggtatctagcagtctgccttaccctcctgcgcacacacgcttttaaaatgtattattcatacattcactctgcaaaccacatgtggtttatgtgccaagggtaactctggaaattggactactcgtgtttcttgggcttaaactgggattagcagttcctccgtacaaagaggcatgaattaggcctttgaggctctctcgccccacccctgttaatatataactgtaatgtacttaacctggaaactgttaagtacattgcaacggttctgggagtgtggcgcccaggaccggcagcatcagcatcacccgggaacctgttaaaagtgcaaattctagggcccgactccaggactgag

SEQ ID NO: 7305 - DNA, 6000 bp, Homo sapiens
gataaaatgagataatcgatgtaaaatttctagaaccatgttaagcattcaaaaaatctgcgtggggtgcggggcaaggggagggagaatattaggacaaatacctaaggcatgcagggcttaaaacctagatgatgggttgataggtgcagcaaaccaccgtgatatgtgtatacctatgtaacaaacctgcatgatctgcacatgtgtcccagaacttaaagtaaaaaaaaaaaaaaaaaaaattaatctgtgcaaacattgtacatcctccttccatgtagtccagttgctaaaagaagtaactttcaaataaatacaaccaaagagccaaaaataatttttagaaaggactcaagccgggcacggtggctcacgcctgtaatcccagcactttgggaggctgaggcgggtggatcaagaggtcaggagatcgagaccatcttggctaacatggtgaaaccccgtctctgctaaaaaatacaaaaaaattagccgggcgtgctggcgggcgcctgtagtcccaactacttgggaggctgaggcaggagaatggcgtgaacccaggaggcagagcttgcagtgagccgagatcgtgccactgcgctccagaccaggagagagagctagactccatctcaaaaaaaaaaaaaaaaaaaaaaaaaaaaaaaaggactcaaaactacttcttggaaaatatgagagtatccaactcagattgttagtaaaacttctcccaacccgtttcctattcttcttcttattattatatctcacaatcctaagaatcctcctattttgctaaatcccaacccacctctcaaaacatcttgaccaatatctcccagagcatggatttcttttcttattcatctttatcagggtgataaatatagaccatctacctaagtccttcgctttttctgtagatctttttttcttcccattgctttatccagttgtttttatcaagcaagtctagcaatggggcatgagagacagaagcactactcaaaggtcagcgactgtgggcagaaaaccaagtaggaaaagacgacattcttcttttcagaaaagaaggaaagactgggagcatcttcattttaaaacttgctttattcggtcatatttgtaaaaacaaaacacaaacaaacaaaaaaacagattgaaagccagttacagaacaccggaggagactggaagttcagtcaagtcttccggaggtgtctggagtcaaagtttggagaaaagctgctactttcagattggatgatcagagctaggggagcaggtcccaggtgcttgcttcctcgtatgaatggcatcctatccaggaactctgtatccctccgtgagcagagcaggtgtttgctctcctaaaactttcctctggcatctgttctattgcacctggagttagctctatcacaaattccttcttataggcacaggcgatgcccatgcaaatatacatctgcagttttgcagaaagaagaactgtaactctgagctcaacaaaaatgtcacattctgctaatgcaaaacattttccattgtcttcagctctcacaacactaatctctaaatcaaattgagtacctctttgctgcaatcatacttgggattgctcctcagaaacagattcactaaacacctcactaaaaaaaatgtggcaggtgtttacatgattcatttaaacctgtttcttgtgttttctttttatcttttgtggcttgcttttaccttgggggggtaggtttcaggaaagatgaggttaatttaaaattgcgaccatatttgtttaagtcacctttagttgatagtccagcatttctgtggaagagaccactgtaggtcaaagtgttttatttcatctgatttaatctgactttttatctcattcatttctttttccttgggtaagtatcattctcactgatgtttccaaacttaggtagcctctcaaaagttttccttataccaaccacttctcttccttgttcaagctgttctcccagtgggaaagtttgtgctaagtgataccatccagcatctcaatcaaaatccatctgcagacttccttctctctggcacctcttcctcattatgctcatcatactcagttcacttcttatctctgcacattcctacatcactaataagatgtgatctggcatctgttggctcattgtgttgttgtcgttttgttattttttaattaagttcatatgaataactttattgagcacctactgtgtgtcagtttctgttaaaagtatccaagaaatacaaacatgaataagacgatctctgtgctccagatatttctatttcaacctttttacagaaactaaaatttttcaaaatcttttaacaactttattaagatagaattcctatgccatacaatttacccacttaaagtgtagagttcagtggcttttatatattcacagaattgtacgtccattatcacaatttgagaaaattttcattagaccccaaaagaaccattgtaccgcttagccatcacttctcaatcccctcccattcccctgccctaggcaaccactaatctactttctgtctttatagatttgcctgttctgggacatataaatggaattttgtatgaatggaatcatacaatctgcagttctttgtgactggtttctttcatttaacatagtgtttccaaggttcatccatgttgtaacatatatcagcactgcctttctttccttccttccttcttttttttttttttttgacaggatctcactctgtggcccaggttcaagtgatcctcccatctcaacctcccaagtagctgggactacaggtgcctaccacaacacctggctaattttgttgttgttgttgttagagatgaactcttgctttggtgctcaggctagtttcaatctccaggcttcaagcgatcctcccacctagacctcccgaagtgttgggattacaggtgcaaaccactgtgcctggccctttaaaaaaaaaaaaaaaaagacttttttttttccagagaagttttaggatcactcaaaaattgagagtaaagtacagggatttcccacacatacatagcctctcctgttatcaaaatcccccaacagtgtggtacatctgttacaattgagcttccttgttttattttttaacccttcttatgttattacacatggctatttttcatctatctttattagctatctcctttgttaccttcccctcccgcactgatgttttagcccagtggcccaacatagctgataagaagcagactttcattccaggttcattttcccgatttagtgttgagggtgcgggtagatgaagttttgttttgtttgttttgttttagagaagtgtattgctttaaaacagggagagatagtctgacgtactgaaaggaggtgggtctttaaagttagcgaaaggtaggtaggagccttacttttgcctttggcaagtttattgaccactataagcctcagccttatctgtaaaataagttggataatgcccatctggaggagctcttgggaagattgaagcatggaaagcacctctctggaaggttcaaggaaagggaactagaattatgggtgacagaattccctggctttccaatgctttactgtaggtcgaatgagcactcctagcaggctggcctcatgccacttcagagtctctagcctgcaggctgggggctgggtatggacacgatacctggaagggaacacatataacttccatcagtgatcctggaaaggctcgacaaatcacccattcattcattctgtgtgtatgtgtgtgtgtgtgagagagagagagagagacagagtctcactctgtcacccaggctggaatgcagtggtgcaatctcggctcactgcaacctctatctcccaagttcaagtgattctcccatctcagccccccgagtagctgggattacaggagcccgccaccactcccggctaatttttgtatttttagtagagacaaggtttcaccaagttggccaggctggtctcgaactcctgacctcaggtgatccgcccaccttggcttcccaaagtgctgggattacaggcatgaaccacagcacctggcccattcattcatttttatttgaacttctcttccaggaagccctctgagtttaggtttagcgacaggaccctgattcaagtcaactcgtttatttgaaagctgcctggataaaaataaaataaaataaaaaataaactggaggataacataaaaggatccttgcagaggattcctccttttgtggatctcactgaatctcagagttagaagacgctcagagatctcaactccctcaagggtcagacaaggacaggtttttcattctgccctggatcctctcacaatagcctcgcgggagctggccctcaaaatgatgaaggaataaatgaaaggagggatggagaaattaatgatgaagaaaaaatgaatgaggtagggctgcttgtttgctgctattttcttcacaatgcttttaagatttcctggtccatctcctccttcaccacttctctccctccctcgatctcttctccaacttgtctcttacagaagggcgccgcgttcccgcgctcctccccttcccctcgccccgcccctccccagcgaggccccgcctcgctgcccgagcccggcgggaatgaatggcagcgtagccgccgcgccgctcggggtgccgattggctgaccggcgcgctgacgcgccggcgaccgcgggtgcacgcaggcgaacagagccggcgggggcggagccgggctccggggcggggcgcaggagccccggggcggaggagccggggaggcgggaggcgggaggcgggaggtgttggggccgttgaagcggcctccctcccgcccccagccgcccggtctggccccagccctgtcccgacccccggcctggcccactccgaccctacccggccgaagggttccgctggacacgcaggcggcctccggagcagcccaagcccatgagggccgcgcgcccggccgccggtgctgacgagacggagctcctggcccccgaggaggagcagaggatcaatgcggttcaagaatcgattccagcggtgagagggatggcgtcccggtcccgctgcccgtgtcagaagcgggttcccaaatcccgccgttaagcgcacggctcccggctcctcacctggattcatcctgggtggatcccgcaccttggccagggatcagttccctggggattccccaccctgctgtccctgggcgatccccttcctccaaggatgggagctcctgcctcacccgggtctcccctcgcgatctgcggacctcagatggattcccggccccgggactccaagcctgtcctccttcccggggatccctttgctcctggggctcaccctcccgacccccatacaggctgggctctggctctctctgggaacccgaaccccagccccgggcaccgcccccgagtcctccgacctggctttggcctccatccctttacctccagggtgggggtctcccggggcgcgcggaacggggtggcgccctgcggagagatttgtcgtaaagcggggtgctaggcattttgggtgctttgtgaacggccctagcaacagggaaactgaggcacgctccgccagcttagccctgcctggccgtgtaggggccttgctggttctccagctgaacgtcccagggcggtgctatttttgggctctgcgaaggggcatgttagctttcgggtggcgagacctgctgtggaggcgccggtgttaggaaacgaggaggaggaaccgtggaggcgccaccggaaggctggccgactgctcattcactgtagagctggtggaaatgccgggctggggggcgccgtggccttactcccctctggggctccaccgtctaacaatggatggaggttagcccatgactctgagagga

SEQ ID NO: 7306 - DNA, 6000 bp, Homo sapiens
aaaatacaaaattagccaggcgtggtggtgcattcctgtaatcccagctacttgggaggctgaggcaggaggatcacttgaaccacggaggcggcggttgcagtgagctgtcattgcactccagcctggacaaggagagcgaaactccgtcttaaaaaaaaaaaaaaggtggcttaactgtcctctctgtcatggcctctccctccctcttgccccagtggtatttggctcttttgtctgtcttgtttttcccagactgaccagccttggggttaaccaggggcagggtgacaactcacaggcaatgacgtccctcagcctccttccccccacactccagaggctgcaggtgactcagggtcttcgtcggtggctccggaagccttgcaggtgccctgccacatggccgctgtgctgctggctgctctgacgggtcctgccggggctactgctttcctgtcccctcccccgaagctgggagatggatttcctccctgagtgattaattggtctattttaagctcatcaaagtagcctcgtactttcaagttcctcagggagcaggcccggaagatgatacctgcggacttaaggctgctccactgcaggatatggggtcgggggctgtgtctgtcaattgtgaggtccctcagggcaggccccctcctgagctggacagggcttggctcctgagtgctgattctgcaggctgtggctcagttctgcactattactctggctccggcaaatcctcatgaaaataagcctgggagccccgagggttgcaggttagccccctacagccttcccttgcatcatccttgctcctctaaccagggacactcctgcctcctccctgactatctctgccgggttaacacctgagcatcttctggctcgataattctgtcatgacccaatacgccttccctgaccctcacatctgggttgagggccttcctatgccctgtacctaatcctggttttccctctgtaaggtggtcagagatgggcttgggcagagtagtttcaaaggctctccccaaatctctgtgcagctcccctgactgaaggcctgtgagaacagggtggtgcctgtcttgttcactgttccccaatacctcacctagtgcctggcacagagaaggtacaaaaataaaactttcccaagaatgaatggtgtgcatttgaatcttatagtgtctgaggactggggaaccatctcttatccctttgtatcctctgctgcccaaggtcagggcctctgcctgaagtccctactgaatgagggttaactggttcagagatgagggaggaagccattgctgggaggggctagaactgggcccctgcccttcccacacccgagcaagagcagtaggattgtcagatgaaacacaggacatctgctcacatgtgaggaatacatcttttttttaagacagattctctctctgtcaccccaggctggagtgcagtggcatgatcttggctcatttcaacctctacctcttgggttcatgccattctcctgtcgtagcctccccagtagctgggattacaggcatccaccaccatgcctggctaattgttgtgtttttagtagagacagggttttgcctcattggcaggctggtcttggactcctgacctcaagtgatccgctcacctcagcctcccaaagtgctgggattacaggcatgagccatggcacccagctggaatacatctttagtatactgcatgtaatatttgggacatgctcatgctgaaaaaactaactgaatttgaatttttttttggttttctttttttgagatggagtctcactccattgcccaggctggagtgcagtggcacaatcttggctcactgcaacctccgcctcctgggttcaagcaattctcctgtctcagcctcccaagtagctgggattacaggtgcctgccaccttgcccagctaatttttgtatttttagtagagacggggtttcaccttgttggtcaggctggtctcgaactcttgacctcaggtgatccacccacctcggcatcccaaagtgctgggattacaggtgtgagccaccgcacccggcctgaatttgaatttaactgggaagcctttttttattttttcctcttctttctgaatctggtaaccctagcaagggagaagtgactagccaggtgccaggtgggtctacggcctgagtctccagctctctattcacattctgcctgcttccttgatgcttcctcctccttaaatgctttctgtcagagaccagggggcactctaggcctggctgcccagcacgcggaatccaggagcactcctacctcctaatccctgccccagctgccctctggatggtcagggaaggcctgaggaggtgatgtttgagctgagatttgagagaatgtgaccagagatgatccaggaaagaacattccatggagaggtgggagtgaacttggtgcatctgaaaacagaaaggctagcgtggttctgcgatgtgggaagggagtggaaacatggaaacacagtcagcatttccttttttttttttttttttttttgagacggagttttgctcttgttgtccaggctggagtgtaatggcgcggtcttggctcaccacaacctctgcctcctgggttcaagtgattctcttgcctcagcctccggagtagctgggattacaggcatgtgccaccccgcccggctaattttgtatttttagtagagatggggtttctccacgttggtcaggctggtctctagctcccgatctcaggtgatccgcccgcctcggcctcccaaagtgctgggattacaggcgttagcacaactcaggaggccctggaactcatcttgtgccactcaagaaagggcaggaggggtcctctcctttcccacctttcccaagctgaaggactgcacacttctcaggcttccaaggcaggagcttcggcagcaggaacagggttgcaaggtagttagtctgggtgtctgtcgtcctgggttgggacatctgggagctggggcaaggcctctgggccctagtgccagagagcagtttggtggcgttgcctgttctttaaaatgggttaggtgtagccatgagcccccccatgcagcgggtgtgcaggcctctccctcagtcagaacaccctcacccacccctccccacttgaagcaggcccttgagaacactgctggcagggaggcggctgctcttcctcctaagggaaaagcctgcagccccgtgctgctgggccgtggggtgagggggaagccaaagggcccctatcacccctcagcaggagtctctcctggctttggaaggggctgaaggcccggggctctcacgagggaactcagccctgctcagccggtcaggactcctcctccacgtctaaatccacagaccaaacaaaggacatggctcagttccaccttcaatccacagggattctgcctgttagcacgctaaggaaactgtttcttactttaaattatccattaatttcctccaactgaaagatactctacaaattttctgttgttggagggtttaagcttggtccctctgagggggtgggccctgctgtgtcggccccttgtgtctgctcgtggaaggtgtgccatgtgccaccgtgtgccatatgcagctgacacgcctgtgcgtctcgcctggcgctggagactgctctctgtgtactaagcgagtactggatccccagggcctatcttgcccactgcctgtggcaatacacaggcaatacacaaagcgcattcaagtaagcaggtctccctgccccccggcctcccagaacctcggtgcctggagggcaggtgggggagggcgttcctgaatggaggccggtttccctctgcggggaggaaaccccatttccctcctacccctaggcgcttgctacatctggcccggcatcagacaggaaagaaccctttcttcccagcttgtaggaagtctgagctgggccccttatctacccacagcacttcctggaccgggggcctggaccgggctccgaaggggctggctcccggtcttggtcttggcctcggcgccctcgtttctctgcgctttgggcaggggaagctgcggacggcaagctctcggctttcgtgagagcctggtggaatcggtgttccccgaaggctactctgcgggggcgggggctagtccgggccttcccggcagtatcgtctcccccgtgggggctggggaggtgcccccagggctcccggagcggcggcgtggccaaggcccgaaccgggtctgacatctagtggcctcctgggcccgggcagggcgagggcggggcagggaagaaggtggagggcagaatgggaggcgtggagcgagaaaatcaggaagcgcgggaccaagccggggaagggcggcgggtctcgcccctggcacccgctctcctcggggcccgtcccatcccccaggcctggccgaccccaggtccttccgtgcgcagtcggggctcgcaaggacgaatcccgcggccctcgaggcaggcccgggggagctcccggccctccacccccgcaggccgcagatcccacgcacccccgatcatgggggccccggagggaggtcgcgaggccgggctcacggtggccgcggttcgcccacgtgcgggcccggagctggcagggcccggtcccgagcgtggccgcaaccgcggggacctggcacgtgcggggcagccccgggggccgcgtacgccacttccggtcccggagacaccgcccagcccgccgcccggttgccatggcgacgccgtcgcgccacggcccgcagaaccggccaagcgacccgggcgcggcgcggggaggctgaagggacgctcgggtaggcaaggtaggaggccgggctgggggtgggagcggagcgcgcaggggtgcggggcgggggcggcccaggtgagccctgactgcgcagggagggacagcgcggggctcccgagtagcagccggcctcgcacctgccccttgcggccgcgcactggactgcggcgccgacccgcaccctgggcccgagggctgcagggctcgcccgccctctcggagccgagcctctcccggtccaggcggcccctgccctggcctgcccgggtgccgggtctctgctgaagttagaaccgagacccccgcttgctggtgaccccgagtttggatctttgctcctgcgccgcgttctagagcaaggtagggtgcaaatggaccaaccagcctttgccacggctgccctcttgaaatctgaaaccggagccaccgcctcttgccccgagcagggcccgggctgcaacgtggagccgcaggtccccgcctgtgtctcccgacgcccccagcttctgagcgcgagggtgggagtttcccgagtgggaaagccccatggcttcggtggcctcggtggccctgtggtgggtcaggccggtgccaactgcgctgagggcggagctgccgccaccttgacacctgggagatggcagggccaccctccctccctccctccctgccctgtccccgactgtatcacggagcgaggatcatccgtgtggatctggggtccccttcccagacttctcctttctggtcgtcctcctctcattcattccaccttggcagcctttgtggattttctgactccgtaaatgaagttacatctagggcgcctagattctgcccctttggtttaatagctaatgaaaaaaaaaaaaaaaaagctttgccacctcctctaggtgcctggatttctcccggtgaaatttgatggaggcaggaaaatacgaggcggtggcagccccacctccttgcatgagggagcctcctagagctggaggtggaaccaccctgcttgtcccactccttttctttcttgctttattgctttcttgctttccttactttccttccttcttttttttttgagatggagtcttgctctgttgccagga

SEQ ID NO: 7307 - DNA, 6000 bp, Homo sapiens
tccataatttcttgatggacatgtttttctcactgtccttctgcatgacctaggggtgggagagagaatgaacattaagttacgaacacacacatgccctagcccactgccccagagccaccactggcaaaggcacaaagatggaggcctataccttggctactgccatctcaaagtcctcctgagtgacatggactcgccgttctcgcagggcatacatgccagcttctgtgcacacgccctgaacaggaaaaggaaattgaggccccactgctgtgcccctcatctgtggcccttgagcccagagcttcctgcctctgccctgttttcagtgggtactccaattaccttcacttcagcccctgatgctcctggcatgagctcagcaatttttctcaggttgatcccccgggtcaggttcatcttccgagaatgaatcttcaaaatgtccagccgggcctggagatggcaaggaaaagcctgagccccacaccccacccccacagccagagccactttgcacagtgtccatcacaaacctcctcattggggggtgggaattcaatttttctgtcaatgcgccctgggcgaagcagtgccgagtccaggatatcaatcctattagtagccatgataacctgagcagagaaagcaagtggggatcagctaaacctcttcctcagcctgcgtggcacccaggccttccctgggcccatcccaaggatgctaccaccttaccttgatgttcttggtggcctcaaagccgtcgagctggttgagcaactccagcatcgtgcgctgcacttcactgtcccctccagaacccccctccagccgcgaggagccgatggagtcgatttcgtccatgaagatgatagatggagcatgttcccgtgccatgacaaacagctccctcaccattcttgcccctgtgtggaggccgagctggtgttagggagcttattagcttattagctctctaaccccctacccctacctcttgcttctcacattgctagccatggttaccttcccctatgaatttctgtaccagttcagagccagagacacgaataaaggtacagtccgtatgatgagccacagcccgggccaacagtgtcttcccagtgcctggaggtccatacagcagcactccctacaggggaacagcaggactcagggcagaaagctacacccctcatttcattcagtgaacatttaccgagtgctgggtcccttgctagatgttagggatacaaaaaaaaaaaaggaacatcaaggtcccttctatccaaaccacctcaccgccctaggaacacttccccagccactcttttcagggggagggccagcccaagcaagatgcagcctatcccggtgcctccccaacccctgcagtagggctggctggggcaggaggagtaagtacagcttggccctctcagagaagccctgctcctcaccttgggctgagcaatgcccagtgcttcgaagagctcaggatgcttaacaggcagctcgatcacttctttgatctccttgatctgtttgtccagtccaccaatcatctcataagttgaatctggtactttctccaccatcatcagtgacactaatgggtctaccttgttgggcaggatcttgtgcagagtgtagctgtcattccttagagccacccggcaattgggtgtcacctgggtgaagggggcgagtttcagaagtggtacagtaagagctgaccccaccaccaccaccacctcacctgctacactcacatcattgatgtcaatgtttttgtccacgtctacaacaaatttaccttcaggatgtacctaaagaaacaagggctcatgaccttccttgacagccaccaaatcactaatcctacccaggaagacctatgagaatcccacaataccttgacagaacacagaaccctgtctcccgaggctacacacaaaggggtgggaatgcagtggagaccgagctggtccctggggtcatgctgcttttaccttgaccaacactttcttcttatccatggcccggactacttcccccacataggagccctgctcctgcagcagctgtagctcctcccgcaataggcgaactagatggcaaacagacacagtggtcacctagctactcctttggagtctccaggacccaattctacgtgcatgagctaagcatcactcttattaaaggaaggccaaaggtcaaaattcatgtatttaaggaggctacaatagggctcaggaaaaagagatgcatgtgaaactactagatgatgacagggagaaaacagtaagcactgctgtgaagacacagtgcagggagataaggacagacctcagacaaactgcccacatgcggcttcccatctttctccactcacctttagcatttagttcgttcctctgtgcctgcagcctccggaggttttggctcttatcattcacaatcagctgtggcagacaagagacaaattccattattcaagggcaggagacaggaggaggtaggatcttggccaagacctcacaggtctgaatgagctgagggaagggcacagggcacctgcatgttgtttcagattctccagtatgatcctaatgaccctgccctgtccttcaagagtccctctggaccttacagcagccatcaaagaaggctgcttgtccaatactggtccaggagtaacagaatctaatggagaaaagttacagctggctcatgtaacaccaaatttcttgcaggaaggcaacaacacctggtggaaagattgttaggtgagaaacctgagttctagcccagccgctgtcaatcaaaagcaaagtaaaggtaagacaatctatttttaaaaatctagatctgttaccaaacggcacatgggtatagcatcagctaccctgcttcaagactactaaggtgaacgaataaaaacacatgaaaaagcattcaaaaatggtaaactaaacataatacctgcaaatgcacttggaattcagaattgtcttttgtggctttcccccatccaatttatattacagttgacacttgaacaacgcagggggttagggtgaaattgaaaatccatggacctgtccaaagttaaactactaacagcctaccgtaacagtataacgtaacactaacagactactgtttatgttgtctgtaaggcttactactggaagccataccttactgctggaagccttactggtaacacaaacatttgattaacaacataaacggtcctttttctatggtttagcgctttaggctagggctctgggttgcccaatttctttcattcagtctctatggaattagcattgtccagatccctcaatgatgcccttcctcacattctcacttcaccctcacccaacctcttggtgataaatttcaactcctgagcttatgtttcccttttataagaatccttttcattcgggcttcttccaaaagggttgacctttggctagaggtacctttactattaagatttgactcgaagatgtgtaacaaactgtgaacactaagaccctcaaagagatgggactggaggagaacaagagattgcttacttctgatacatacaccctactagctaagaaacaaacaagaaaggagaagcagcagcttcttccactgcactcccaaaggaattagatggatttgtggaagtccgtttccatcccccatcatcacccttcctagctccctctggagtccgtcctcacctggagttcttcaatcttggacagataatattggcggagtccgctgcctgccttcccctcctccagctccatctgaagacacagagtgagtcttaaacgacaggttaaacatccgagggggtaaagccacttgcagggcactttgaataaggcttgacaccaggtagctttgcgtagtagaaaaagtttggacttcggaggctcaggatctgggttctaatccctccctcccttggaaccctccattttcccaggactaaaataaaagaatgggaacgccgcctacctcatacgacttttaggaggaccgagaggcgatatgatatagacggggggcgctttgcactgcgtgaagtgctctacaagcccgaggtgtcagtactgacgaaggagccagcggaacggagccaaaggactggcgtcccgtctcctgcgacccgtgggccggccattcccgcgcccatcgcttccctcactcactccgcttctaccgcgtcttcctctcccagccttgccctgactcaccgagggcggcgctgacacagcagatccggtcgcaggcagcgtccagcatggactggtccaggcacctccgacccacccgacgctcctgccccggcccgctctccactcagatcacgctcgctccgcacccagccccgtaacctgccgggccgccactgcacccgccatacctgctctggtccgtcaagcgccatcttctctcttcagcagagaccgccggcatccgagccgtcttggcgcgcaagcgcggaagcggaggattgggacctgaagaccaggcagagaagaattccgggtcaatgggcggggtgtgcggcgagaccacactaagggaaccatgatgggaggggcggctactcgagttcaggggctttggaaggggatgaggaaggagtagaactcctcctcagtgttgcctcattgaaactctgtttatagttcttgtgatatgccttcctagtctcaactttcaacttacaaaacccaaggacagagtattgagaacaatctagggccacactcaaaatggcggaaaacctcgagccagggacgcaggggacgcaagcggaagcggaagtagttagctgcatacttgtgcggttccaagtgtggagaaagcggctctgggtctaggtagtgtgcggagaggggcgcggggtggaattgctgcgggaagtgggaaactggaagtgggaaactggaagtggaatctggtgctccggaaagagacgttcccaacttctactttctccccagattgagggatactccccctttccaccatgggcaagaagggcaaagttggcaagagccgacgagacaagttttatcacttggcgaaggagacgggtgagtccggattcgctcagtctgcgagcgagcgagcgatctctgcccggttcgcctgctctttgcgaccattatgtacctctcctgcagaaggggtggtcggttgcgaggccggagaaatcctactagtgaagcagtttgcgcacttggttgttttgtccaggttaccgttcccgatctgctttcaagctgatccagctcaatcgccgctttcagttcctgcagaaagcccgagccttgctggacctgtgtgctgcgccagggggatggttcgtaacactcgccacaggttgctcctggtggccgctttctgggttctgagctgggatggcttccagtttcactgcgggaggggaacccgaatcccggtcctcttgggggccgtttcctttcttgattgcagagaaagggcttggaatacgtgcctatgatatgctttggccagtacacgtaacaccagggatgagagatcagttgccaagagggggaaaaggatggctctaggtttttaaatttctgttccttttataggctgcaggtagctgccaagtttatgcctgtatccagccttattgtgggtgagtaacggacagctctccttggtgttttaaggggtgggtgtataaggtattttgtcctgtatttctctcctccctgcttgaagcaaccttttagaatactctgacctgatttcttccaggagtggacctggttccaatcaagcctctccccaatgtggtgactctccagcaggacatcacaacagaacgttgtaggcaggtaataggagtctctctcttccttccccctttatacggaaacatctacatccctgaaatcctctaaaggcaagtttttcctttttaccgtg

SEQ ID NO: 7308 - DNA, 6000 bp, Homo sapiens
cagtgtacactatacccaatatgtagtcttttgtccctcacccctccctcaacgttcccccactgagttcccaaagtccattatatcattcttgtgcctttgcatcctcatagcttagctcccacttacaagtgagaacatatgctatctggttttccattcctgagttactttacttagaataatggcctacagctccaaccaggttgctgcaaaaagatgctatttcgcttccttttttttttttttttttttgagacggagtcgcactctgtcgcccaggctggagtacagtggcgcgatctcggctcactgcaagctccgtctctcgggttcacaccattctcctgcctcagcctcccaagtagctgggactacaggcgcctgccaccacgctcggctaattttttgtatttttagtagagacagggtttcacctggttagccaggatggtctcaatctcctgacctcgtgatccgcccacctcagcttcccaaagtactgggattacaggtgtgagccacaatgcccagcctatttcactcctttttatggctaagtagtattccataaagaggtgtatatataccacattttctttatccactcataggttagtaggcactcaggttggttccatatctttgcaattgtgaattgtgctgctataagcatgcgtgtgcatgtgtcttttagaaaatcaaaattatatcaagtatcttctccaaccacagtggaataaaactagaaatccactccaaaaggaaccctcaaaattatacaaatatatggaaattaatctgttcttgagtgatttgggggttaacaataaaatcaagatggaaatttaaaaattctttgaaatgaatgataatgacacaacttctcaaaacctctgtgatacagcaaaagtggtagtaagaggaaagttcatagcattaaatgcctacatcaaaaactctggaagaccacaaatgcctcaaggtaccagagaaacaaaaacaaattaaactcaaacccagcagaagagaagaaatgagaaaaatcagagcagaaccaaatgaaattgaaacaaacaacacaaaagatcaattaaaacaaaaagttgggccgggcacagtggctcatgcctgtaatcccagcactttgagaagccgaggcgggcagatcacgaggacaggagtttgagaccagcctggccaaaatggtgaaacctcatctctactaaaaatacaaaaattagctgggtgcagtgttgcacgcctatagtcccagctacttgggaggctgaggcaggagaatcacttgaacccaggaggcggaggttgcagtgagctgagatcatgccactgcactccagcctgggcaacagagcaagactccatctcaaaaaaaaaaaaaagctggttctttgaaaagataaaattgatagaccattagcaagattaaccaagaaaagagagaagatccaaataagctctattagaaatgacactggagacattcttttcactttaagttcctccagacctcgcctggagccctctctggcatcagggacaggaagatttgcagagcgcagggtgctcaagcccacacatcctttgagccttgaatggtggaagaaaaaaggcctcatattgggtgagaaacagagacaacttgggacaacagtcacagctacccacctccccaggcatccgtgccactcctcgcactcctcgccctcctcagggcgtgccgtccaccacattcaccaagtacctcagatgcaggatggccttcaatgtgcacagctgcccttcgaccaacgcactgttggggccgggcgcagtggctcacgcctgtaatcccagcactttgggaggctgaggcgggtggatcgcttgagctcaggagtttgagaccagcctgggcaacatagtaaaacctgtctctacaagaaatacacagattagccaggtgtagtagcatgacctgtagtcccagctactcgggaggctgaggtgggtgaatcacttgagtccaggtggcagaggttgccgtgaatggagattgcaccactgcactccagcctggacaacagagcaagatcttgtctcagaaaaaccccagaaaacaacaacaaaaaaacgcgctattgggcttatttctattttacgaaaatgaggaaccttggtcactgagaggttaagaatgggtgttgcctcatgggtgctgttggcatgtggggcagggaactctgctttgccagccaatgcccctcccgccccaggcacccaccggtcattgagaccagcgcgattgccctgatgcatgtgcagacgctccctccgttggggcagagccacccttagtagagaaccactggtaacctggggaggtttcctggctgctacactgctgggtcaggactcaaacccacgtccttcttagcaggtcttttcccagtcacagcagcccagcagatccaggacacctgggctggagaaggaggcaggggtctgagctcttctttccctgaggttcttccccctcccggcatcctagggtggctgggggtcgctgccttcttgcttccccaccccctgagccccttgtcccttcgcccgaccctggcccccattccttattttgatgttgccttcctggaaagggaggtgtcgtcagaagtcagaatgtgaagccccgggcagccgagggcagaggcaggggtaggcttgtgaggcctcctgttctgggaagaaaagggcatcatgagcccaaaatggggctcagggctgttgtcaccagtgagggaacagcacggctcaaaatgtgacaaataaccctgcaggcggtggggcccccgctgcctccgcccctcctgaaaacagatccctgcccggcatgaatgggaatgaagcccaaaggccacatctgcatccttgtccacgggatgtgtgtgtcttccctccctggagtgggagctgcttctcacttgtttttttaaattttttatttcaatattttctggggtacaggtagtttttttggttacctggataagttctttagtggtgatttctgagattttagcgcacctgtcacctgaggatgggtgccaactgccccccaccaacctccgtgccccctacagtccgctgagccctaggaccagctccagagtaggccccacaccacagggtccaggcaacacacctgtgtgagcatgcacatacacacacacacacaccccccacaaacacgtgtgccccaagcctttcccagttataccccccaactttggggagacactagccccaaagttaatgaaggactctgtcgttaggggctcaggaagagtatttcctaaaccatgagactcccagattttgccccactccccccgggtcagtctctctccagccaccctcaccagcatgcgggcccatgggcctcaagctgacctcaggtgatgtttatatttctgagctgtttattccatgaactgaacatctgacagcttttcagagaaatgttttttcatttggaacatctggaaacaagaaagaacatctggggctgcccggaacgggctgttcctcggatgaaaccttaaccctcctgcccctgacttccgtggctcaggtcctggcctgcaccccttgagagtggcccccaccttatcaggtccgaggcctaggccaagatctaaagagggaccacccagaccctctgccttccaaccatggcatgggaggtggttctgcttctccctaaatccagacagacctgccccagcacagactggaaaacggagggttgtgaggagagtgagaggtggacagagggcaccgacgatttagcatctcttcctctcctgggggtcgaggatgagagacaaaaaagaagctgccaggaaacataaaattcagagggctcagctgcagggctgaggtctgcaagcatgctgtgtacacttgtgcatgttgtgccctgcacaagggcatctctgaaggggctgcattggacccaggggcaggggcgcaaaggtgagtttatatcagttcctgagcactgtggctccatccagcactctgaggacaggcaggatacagctggaggacctgagggctcccccacaccagctcctgttccctgcccaagaccccctggacctgcagacaacaattcaacgcactcagagtcccacagttaagaactccctgaagaagcccccagtggctgcgtggtggattttcgcaaagctgtctccacctacatccaccctgtttggcagcccctacatactctttcacagcatgaggaagggaggcctctcaccaagacctggactgaatcttctcccagtggctgccacacttgacctgctcttgctccagaacctctgtggctcccatcctccacagggtcaacttccaacatggctgcctgcactccagccaagaggctctgctctgggcccctccagatgcctgacctgggtctgtggctgccctgtccttcttcagtgctcctcttcccgctgggtgaggaatagttcaggacagaggagctaagttcaggttcattcataggacaggtgcctatttcgctcacggcccaggaatagagacttgccgggctcggcccttcggggagttggcagacggcagaggggaggctggctggcccaggggatgaccaccggtggggtaagcacagacagaggggagcacaggcttcccccagaagactgagaggccccccagaggcatccacagaggaccccagctgtgctgcccaagctgggcgaccgccaaaccttagcggcccagctgacaaaagcctgccctcccccagggtccccggagagctggtgcctcccctgggtcccaatttgcatggcaggaaggggcctggtgaggaagaggcggggaggggacaggctgcagccggtgcagttacacgttttcctccaaggagcctcggacgttgtcacgggtttggggtcggggacagagcggtgaccatggccaggctggcgttgtctcctgtgcccagccactggatggtggcgttgctgctgctgctctcaggtacagaacccacgacgaggcctgtggggtttgctctcatctccagctgtctgggccctgcggctctgcctcctgcttgctccaccctcctcctctgtctctcactctttaccgcctgtctccctctcatggccctggggcctgggtctgtgggtgtcagctgcacgtggtgatgggctcaggagcctgtggccccagttcctctcctgcctggagagcatcaggctgagctgggcatgaggagcaaaccagagttagcaaccaggaccgtggaagaactaggctcaggaggaagagaggctgagggcggtgcctgggggtcgggaggggagaggctgtcccaaccggaccctggaagatgcaagatccaaatgtggtcccctcctctgggaggtgaaagatcctccgggctgtgactttcttcctgtctctctttaaaaaaaaaaaaaaaaagagagacagggtgtccctatgttgcccaggctggtctcaaactcctggacccaagcgatcctcctgtcttggcctctcaaaatactgagatttccctgtccctcctgtctcattcagatgcctgctcaaagccaccatgagggtcaaaggcagaaagggggctgggggcagggcttccggtacccccaccccatatctgtctcccaagtactgggggcagggaggaccgaggggtcttgaagctgctgtcatggaaggaggaagtagctccgggaacatagagggcatgcaggggtggggcagcccaggccagaggaggccctgactggccccgcccacttcctcccacccagcagctgagccagtaccagcagccagatcggaggaccggtaccggaatcccaaaggtcagtagcctcgcctgccgcttctgagggcaagttgtgtgcgactatgtcctgtgtc

SEQ ID NO: 7309 - DNA, 6000 bp, Homo sapiens
cctgggttcaagggatcctcctgcctcagcctcccaaagtattaggattacagacatgagccatcatgcccagctgtcatcaacacttatctcttgtctttttgaaaatagccattctaacaggtgtgaagtgatatctcattgtgggtttaatttgcatttccttaataattagtgatggtgggcactccttaatatacctcttggccatttgtatgtcctctttttttgagatggagtctcgctctgtcacccaggctgaagtgcagtggcgcgatctcggctcaccgcaacctctgcctcccaggttcaagcaattctcctgcctcagcctcccgaggagctgagactacaggcgtgtgccactacgcccagctacttttttgtgtttttagtagagacagggtttcaccgtgttagccaggatggtctccatctcctgacttcatgatccacccacctcggccttccaaagtgctgggattatgggtgtaagccaccacgcctggcccatttgtatgtcttcttttgagaaatgtctgctcaggtcctttgcccatttttgtttatttttttcatctttctctttattctgacaacattatatggcattaaataaagtccaagagacattgggctggtctgtgcccattttaaaattgtgtttttttttcttgctattgagttgtttgagtttcttatatattttggatattagccccttactgcatgtatggcttgcaaatattttctcccattccttatataacttaaaatgtgtcctccctcctaaaaattccaagttagaaccttagaatgctttaactccaatccttccttatatattcttacccagtattttagttttgaacttctaaaacttctcaaaataaacattataatgattaatattaccattattgtaaacaatatttgtttggagttgtgtactcatttgccattttattttcttgcccttctttgcatagcaaactgttctgtaatcattttttcttcttactgaagcacatttgtaaatgctcatttaggtattttgggggataaactttttgtttatctgtttttgttaactttggttcttgaaagatggttttgctgggtacacaattctaatagttttttttttttttctttcaaacaagagaggaaagtcactggattaggaccctgtcagagcataatccttccaaagctctgtgggagagatgagttcactttctaaactgagactctaatctcccctcccctcaaaaattctctcacgttttccagaactatcttaactcctccagttttatagcccccttccttgagaaacttagggatccagagagcaaaacaggagacatttcatggtgaaaacaattttccaggaaggaccccgagtttcttctctcttctacatcatggtcagtttcctcttattcctgtgttacaggaccaacaggtgtgtaggcccactgctgtgcagcaacaggccaattacactgacacagcagggtttcctgcagagaaaaagtttaatgatcccggggtgccaaatgaggagatcggggagaccgtcaaatccatctccccaaagagttctgggctgggattttagaggacattgtggagggcaagaggctggtaaactggggtcaatgactggtcgaggtaaggggataaaatcactggaatatggaaactgcattcttttgtgagtcagctcctcttggggtccttcaggccagctggcatcaattgggtcctgcagactggctggcatcagtggggtccttcagaccagcctgcatgagtactttcactggtatgcaggacctgaaagaatatctcaaagggaaaacttaacattttataatgttcaagctgttacctttagagcagttaagggaactctaatcctatgacagagtctgcataattctggggcaataggcaccgagcaactatgaggaagcaggtcgagagcatgctgacctaatgattaatgttgagtgtgctgcaagctcttttcctgtcgtggacattttgtagggcaagccccacagtaactctctgtatgcaaggtggtgggcacctgtaatcctagctactcaggaggctgaggcaggagaatcacttgaacccaggaggcggacgttgcagtgagctgagattgcatcactgcactccagcctgggtgacagagcgagactccatctcaaaaaaagaaaacctttgtgcaggcctaactcaaagtgcccatcctcaaggagtaaggtaccatgattggccttgtttacattataaggtcagccttgtggacttgggaagcagagactttagcagtagcaggaggaagatgctggacaaaaaaaaaaaaaacagtaaatgcttaggacctaaaactaaaaacagccttcgcccaggcttgtttaggacaaactctctcattcattcactaatccatgcatgcacccatccatctaccaattcaacaatgatgaagcacctactgtgtgccaggcagtgtcctacactgggtggatgtagcagtacatgagattcagcttctgccctcactgttgatgggccagtggggaggcaggaaggttgatgtgtcaacggttagaatacagtaactatttctaacaaatagatggtcacatgcccggtgtgtcccagccaagcagggcctgcccaggaaggatgggagacatcacaggaggagatggggggtaggaactggggcctgtgctttcggggaggacgttgggctgcagaagccttgcttgaagagggaatcaggctggccctgctgtgtatgcaggtgggattcccaagcactgtcccttccagaagctgtttggagcactccaggcatggatcaccccaccttcccacagtccctcacagtgaggcaggccccagaaccttcctctggccttctgctatgttgcttttccctcttgagggtctcctgggaaccaggctcctaacaatcctcttcttgcgcctgctcgggcgggcttcaacagtcaccatggcaggctatcattcatggtgacttcattttttctaggtatgtgatcttgaacaagtcatttaaccttgacgtgcctcagttttcccatctgtgagatggagacagtaacagtacctgcctcagagagttaggggattaattggttaatatttatagagtgcttgtgacagtgcccgacttgtagtaagtaaatgtttactattattattattgatgttgttattgttattattattctgactcagtggaggacacagagtctccactacagcaatgtccccatccccacccttctgtcccagcccctggcttgggtttcaggagtgtttcctgctctcaggactttgctggccccacatgaaatcagattccttcaggctgggggtgaaactccaccctgttctccttttctctgctggccccaggccctgcctcttcctccctgcatcattcccaagtccagcaaccccgtccagggacttccctgggtccaggctgacaatggcagcccttgatggttgtgtacagtagtaaccgcctttgccctcagcagtgagggaagggcaggacctcaccctgccctcccaacccggaatggagcttggccaaagtcctgaggattctggggcatccctttggaaaggccccatcaggggttcccctgagaaagcaagaagtcctgctctttccctgcctggttgcaaaagggatcttaggcagaactgagggatgagactgtgtggcgatcccccaggaaggtcctctcgtccattgaaatccctcccttacctgctcactgcttctgcggattcctccctaggaataaagtgaaacacctcaggctccaaccctcccaacccaaggctccctcctggagggagagagaggatggaggacatcaggtaggccaggaaatgaaggccatggtttgggggtgtggctgcagccagactgaccccattctctgtctgtgcctgggttgctggggactattatgggatgcatttcctgaggctctgggcctcaagttggccctgaatcagctgagtcaagatcaagtctaggttgaaaactgagtgagggccaggtgcggtggctcaggcctgtaatcccagcactttgggaggccaaggcaggcagatcacctgaggtcaggagttcaagaccagcctagacaacatggtgaaaccccatctctattaaaaatacaaaattagctgggtgtggtgacgcgatcctgtaatgtcagctactctggaggctgaggcaggagaattgcttgaatctgggaggcagaggttgcagtgaaccaaaaattgtgccacagcactccagcctgggcgacaagagtgagactccatctcaaaaaaaaaaagaaaaagaaaaagaaaagaaaactgagtgggatgtgaaggtttatgcagaattgcaccaggcatttagcaggagaagctcaaattgccctccaggcttccttagaaaagcccaagtcactgtccccttttgctatggtaactgcaagtcctggacaggtcctggcctttggatgcttgtctcccaggcatgactccaacaatgcatcccatgggatttggggttccccagatctggggcttgtaggcctgactctcccctgtgcacacgtctcatacacgcatgcgtgcacccattgcctgccccgccccttgcacagggagtcagcagggaggactgggttatgccctgcttatcagcagcttcccagcttcctctgcctggattcttagaggcctggggtcctagaacgagctggtgcacgtggcttcccaaagatctctcagataatgagaggaaatgcagtcatcagtttgcagaaggctagggattctgggccatagctcagacctgcgcccaccatctccctccaggcagcccttggctggtccctgcgagcccgtggagactgccagagatgtcctctttcggttacaggaccctgactgtggccctcttcaccctgatctgctgtccaggtaagccagtttcctggggttcctgatttggcacatgccagccgagagggtgggggtgccctgttccctgtggcttcaggtggaagagaagtcccaaaagttgctgaggttcttaggtttttttgttttgttttaagacagggtctcggtctatcacccaggctggagtacagtggcatgatcatggctcactgcacctccctgggctcgggtgatcctcccacctcagcctcctgagtagctgggatcacaggtgagagccaccatgcccagctaatttttgtattttttgtagagatggcaggggctggtctcgaactcctggactcaagtgatccacccgccttggtctcccaaagtgctgggattacaggcatgagccaccatgcccagcctgctgaagctttttaaattttttatttttattataggcaggttcctgttctgttgcccaggctggagtgcagggtgtgatcatagctcactgcagcctccaactcctgggctcaacaatcctcctgccccagcctttgcactgctggcccccttcccctggatcactgcccccaagtatctgcagggcgtgccacgcccctgcatgcctttgcccacagagtcaccatctgggtgaggccttcattgagcacagtatttaaagtggcctcacccccactccctgctccctttctcggcgctttcctgccatctgaccgctgggtgctctgcctgtcactgtttactggagctccgccagggcagtgtttggtctactgtgatcactgctgtatccccagagcctgatgctttggacatagcaggtgttcaaaaagtgtttgtgcaagaaaggaagggagggagggctacagagggccctctgtgggagggctttatgggggaggggacatttgggctgaccttaaagactgagtcggatcccac

SEQ ID NO: 7310 - DNA, 6000 bp, Homo sapiens; identical to SEQ ID NO: 1958

SEQ ID NO: 7311 - DNA, 6000 bp, Homo sapiens
tacaggcatgtgccaccacgcctagctaatttttgtattttttagtagagacagggtttcactatatgtgggccaggctggccttgaacccctgacctcaggtgatctgcccacctcggcctcccaaagtgctgggattacaagcatgagccactgtgcctggccccttctaggactcttatgggtttatttgtacattcatatcactggtccatttggaatgtattctggtacacagtgtgaattatgggatacaatttttcaattttctaaaaaaaacatttatttttgaaataaagctttattttatcatggtatcctgaaaatattagaatcatttatgaagcaattgccacattttagaaatttactttggaacttgagggcacggggtctggggtcttggcatttatcactatcatttgaattgttgctctgcaaaaggtgcttactctgcagtgtctaaaaattaccattgaagccaaaatttattttattaatcatggtgtttccttttctgttcccacatcaaaatttggtagatgggtgagggtaatttccagtaggttgccaaagaagatagcttatagtggggaatggcgagcacaaaacaacagcaaataacgcaatggaaaacattcctttagaaataaatgggtaaagtgtgtattgctgttcaaggctcttatcaaaacttccactgaaccataggtcagagagaggaattgttttctagctggaagccattacttcttggttcttgccctgaggtagaggaatctggttttgactgtggccagtttgtatctgtcttagctttaccatggggaagtcctagagggtggcatttcagaaacaatatggcaccctcaaggcagtgatcatctgattcagacaatacagtagtttgtcttcatccatctagacaatcatccattgcactaatgctttttcatcatctactaggttccagacactgtccctgtcatcaaggagattgcagtccatttgggggaggacaggccattatgacacatcctataataaaagtgtctggctgggcgcggtggctcacgcctgtaatcccagcactttgggaggctgaggtgggtggatcacaaggtcaggaggtcgagaccatcctggctaacacggtgaaacccgtctctactaaaaatacaaaaaattagccgggtgtggtggggggcgcctgtagtcccagctacttgggaggctgaggcaggagaatggcgtgaacccgggaggcagagcttgcagtgagccaggattgcgccactgcactccagcctgggcgacagagcgagactccatctcaaaaaaaaataaaagggtccgacagctgggcccggtggctcacacctgtaatcccagcactttgggaggccaaggtgggcgatcacctgaggtcaggagttcaagaccagcctggctaacatggtgaaaccccgtctctactaaaaatacaaaaattatctgggcatggtgacgcatgcctgtaattctagctacttgggaggctgaggtaggagaattgcctgaacccgtgaggtggaggttgcagtgagccaagatcacgccactgcactctagcctgggcgacagagcaagactctgtctcaaaaaaaaaaaaagtatccgacagagggaaaaccagggaggtaagggggttgcagaggaagggcagctcagtctggggaagacgaggaaaaattctggagaaatggattcctgaactgagttaggaaggatgggtaggaatttgcttggaaagaagtggggaaggcattccaagtaggggagcagccccgacaaaggcacagacagatgaagagtgctaggaactagaaattctagcagccataatgtaggtgcaaggaaggaagtggtgagagactaggcttgaaaggtaagcaaaggctgtattatggcaggctgtaaattgactttttctggtctcaaacagaggagtgaaaggaaatgatgtatatcttttttttttttgagacagtgtttcactcttgtcccccaggttggagtgcaatggcgtgatctcagctcactgcaacctccacctcccaggttcaagcgattctcctacctcagtctcctgagtacctgggattacaggcatgcgccaccacacccgattaatttttgtatttttagtaaggacggagtttctccatgttggtcaggctggtctcgaactcctgacctcaggtgatccgcctgcctcggcctcccaaagtgctaggattacaggcatgagccaccacgcccagcagaaatgatgtatatcttaggaagctcctgcatagtggcccagtagagtacgcatttgtttaggggtgcatgctggggaggggcctctcatagggctgcgtatgtcacccacaccaaaagctgaggagagcttcctagttctgttaccagatggtgccgcgcagctccaggctgttggtgccatgaacaaagaattggacatgacacacgtacaaatagcgaagcagcaaatgattaagcacagcgacactctcggagaggggtgagtgggctgacctgtgagtggttatcagtgccggtttgttacatttcacggccttttacatgtttttcctcacttgcttaatgtcacttgcctttctcttatagtgccttcaccctactttatttcttgtaagatagttgttcaaccttgtttacccccactttacctcttctgaccaaattgcccatctttacttttattttttgcgaccaaatagctactggaagtccttccaacttacttctcttaccatgtcccaacttactgcttactcccttatctattatattactttttgtggcaatatttgattgatgttttaaattacagactataaagaaacaccataaaatattaagacagtctgagagattttgatgtgttattaatatccacatggtttgcttcttttccaaagcatcccataacgtttgactctatgactgtaacaagttagatttttagaaactgatgcaaaggatcagattctagtagtttctttctctttttttttttttttgagatggagtttcacttctgtcgcctaggctagagtgcagtggtgccatctcggctcactgcaacctccgccttctgagttcttctgcctcagcctcctaagtagctgggattacaggtgccggccttcatgcccggctaaggctaatttttgtatttttagtagagacgggtttctccctgttggccaggttggtcttcaactcctgacctcaagtcatcctcccgccttggcctcccaaagtgctgggattacaggcatgagccatcgcgctctgccagattctagtattttctaccatcaaaatatctattacccaatgaaaagtctaaaggccaatcttttttttttttttgagacaaagtcttgctctgtcaccccaggctggagtgcagtggttcgatctcggctcactgcaacctccgcctcccgggttcaagcgattctactgcctcagcctcttgggtagctgggattataggcgtgtgccaccgtgcctggctaatttttgtatttttattggagacagggtttcaccatgttggccaggctggtctgaaactcctgacctcaggcaatcctcctacctcagcctctcaaagtgctgggattaccggcatgagccacgactcccggccccaaaggtcaatcttaaagctacaaggtatcttttaaaaggagtaggaataacgtattttgaggcttaaaggagtaggaatagtgtatttttagatttgaagccatcttctaaagggtacgatatttggttaacatgtcactccttatcgccatggaagaagttaattctattctttttttttttttttttgagatggagtctcactctgttgcccaggctggagtacaatggtgtgatctcagctcactgcaacctctgcctcctgggttcaagcaattctcctgcctcagcctcctgagtagctgggattacaggggttctccaccatgcctggctaatttttgtatttttttttttagtagaggtggagtttcaccatgttggtcaggctggtctcaaacccctaacctcatgatccgcccgccttggcctcccaaagtgctgggattacaggcgtgagccaccacgcccagccgttaattctattcttactgcttactcccttattttgtatgttcttcttctatcttacatcttttgcttttgctattgcttaagctagcctacgcccaagggtgctctttgccccctacttcctctgctattctctcgcctcagttccgctgcattccaagctcagcctgccccagcagcaggtctctttgacaaacctgcaattttggggaaaagtcagcccaagaaaggcagggggcccagacttatgctgtgtggcaaaagccctctttgatgggggaaggggaggactggaaaagcagagagatctttctggatgtcctgggagagcagccctttgggtggtgggtggaggctggaggcagggaggaatcccctcacagtgccatgagaagggcccccaaacccaggcgagacagagggagggtcaagaacgccaaggcaaatgtcacttgtgccttgttttttccctaaagaaactaaacaaagcggccgcgttcggtggcccctcaggaaggccggtcatttcctgaggagatatcaggccagcccaggccccattgttcccggtttccagccatggctgccattacctgaccagcgccacagccggtctctctgcaggcgccgggagaagtgaccagagcaatttctgcttttcacagggcgggtttctcaacggtgacttgtgggcagtgccttctgctgagcgagtcatggcccgaaggcagaactaactgtgcctgcagtcttcactctcaggatgcagccgaggtgggcccaaggggccacgatgtggcttggagtcctgctgacccttctgctctgtgagtgtttactctgtttccacatcactttaactccatgagcatcgaagcttctggaatcaacatgtttcttatgtttcttgcaggttcaagccttgagggtcaagaaaactgtaagtctgatgtttccactgtaacagatgtttctacctggcttcctcctttctcttctgtgatgcctaaaacgcacattaaattgctggggtttgatacttctaacaattaaggaaaagaatccaattgagaactaaagtttatcccatgtgggcatttttagaaaggcttagatctaagccaagttctggtcagtgtgttttagaagtagcacacgtttccttggctggtctgaaagtagtgggttatcttgatgaattgtttagtcagttacagatcaaactccatgttcttttctctgttctcacgactactcttgactagtctaaaaatatattaggttgttgcaaagtaattgtggtttttgccattacttttttaaaagatggcaaaaaacacaattataagtagcacacattttcttttttttttccttttttttttgagacagagtctctgttacccaggctggagtgcagtggtgcaatcccggctctctgcaaactccgcctcctgggttcaagggattctcctgtctcagcctcctaagtagctggaattagaggcgcatgccaccaggcccggctaatttttgtatttttagtagagacagggtttcaccatgttggccaggctggtctcaaactcctgacctcaggtgatccgctggcctccacctcccaaagtgctgggattacaggtgtgagccaccgtgcccggcctcacattttctagatttcagtgcattgctgttttttgggatggggaggtgatttttttattttaatgagcaattccataattagttttttgttgttttaccataatggcttatttgaatattgtaacctatccc

SEQ ID NO: 7312 - DNA, 6000 bp, Homo sapiens
ttgttctgagatttggagttggttggttggtttgagacagggtcttactctgttgcccaggctgaagtgcagtggtgtgacagcaccaccacacccagctaattttttaaaaatatatattttttaggccggagcagtggctcatgcctataatcccagcactgtgggaggctgaggtgggtggatcacctgaggccaggagttcgagaccagcctggccaacatggtaaaaccctgtctctactaaaagtacaaaaattagccaggcatggtggcacacacctgtagtcccagctacttgggaggctgaggcaggagaattgcttgaacccgggaggcagaggttgcagtgagccaagatcgcgccactgcactccagcctgggcaacagaggaagactccatctcaaaaaaaaaaaaaaaaaaaaaaaaaatttgtcttagatgtggtgtcttgccgtgttgcccaggctggtctcaaacgtttggtcttcaagcaatcctcctgccttcatgccaaaagcactaggattatcacactcagcctgggtttgttttctaggacttttgcaacaggcttgagataatttatagaagcctcccggaggctatgttctctatttttttttttaatttttaagcagtaataaatggcaaaactacaggagcagtcaactatgaagactgagaagcctaggaatgaaattcagtactgatcaagtaaaagttacttcagagttaatgacagacaccaacgatacatcgatactgcaccaaatggtaacaggtatgacagaaatcaatcatcggccgcccacacacacgagtgggaaggtgacctcactgtccccaaatacagaatggcctcacctacctcctaccttcttctcatgctgttcacctctcccttggctcagcaccccttgccagttctcccaaggtcctctctgccagttgaaggcttccctgatcgccatcctcctcaatcccccaggactcacaggttgaaagagtcgcagccaagagttagggaacctgaccatgagccaatcccagtgctaagccccttgcacgtgttaattcagttaacttagcaactgtactaagccatgcacacaactctgtagtattattattatcatcgtcatcactatctgtgcctcagaaccccttggcaaatctttaaattctcccagaagtgtgtgtttcccagtttgaagggccctgccttcctacaaactgtgaaatttggcggggtgctgcgggggaggaacccaaatcacaaaataaacctagcagaactacctgtaccatcggttcactgttgctagatggcagagtgtgtgaagttcctggccaattggagaagcagatattaaagttttaaagcaagaaattgcttcagtggcatacaagtcacttgcccagaacacaagcccctgggtgggagcatggtgggtggaacagagactggaagaggaagaatggaagggtgggtgggccatcgaagcctcccatggaagcccccttcacatattctccccctttgatggctgccctgaagagtcagcccccaaaagcaggcttgcgggaccctcttcccagaggtccagaccagattcctttcagtctacttacccaagttgaagttctcacaggctggtaaatgcagtgagcttatttgcaagccagggtcatatctgcctagcaacccaacacgaagacttgaaggactataaacgtggacagagaacaggcaggccaactttacacaaaggaatctgttctcatgcaaatgaccctatgcaagagggctaaaagagggagccttggggacagctctgaagagccaactttttccccaagaagatgttgggggtcttcttaagggcatcatgatggtcttgcccactgtaaaggaaagccgagagggggctctgcctgccacttgggatcaggcagacacaacaggagaggctaagaggggagctgagcccttcacttgatttcctgatttttctggtcctgtactccagactccaaaggttcttttgttcttatttagaactaaacagagttagttttgtttgggggcaagggggcgttgattagcatggcaatgcagtgctttctctggagaagttaaaaaagcaggggttttcacgcttggtctcactaggattgagggaacaaggtgaagccagcctctaactagggtgggcaaaagtcatgttgcgtgacttttttgtgactagcaaggctgtgcgtaggttgggtttccagctacctctccattattcaaacacagatggcaaatgtcatctttggatgagctctagtggtaaaaagtgctagtgtgtatctataaacatggtgtaaccttaggtcaatccctccagtgctcagtgcctccactttcctcatctgtaaaatgggaataatgagtgtcaactacagaaggttactgatgcggttaacattgcattacatgtatggcacttaatgcagtgttgaggacaaagcaaacatttaaaaaagattaatattaataaaatataagaatagtaacacattagtaacaaaaatctattattattattattattattattagaatcatgctccccaaaagccaggtttcacttgctcaaacattcagatgtgatttttccaatcattcattcactcctgaggatttaggtataatttgagtcattttttaaatcaagagactgaagtacagagattttatgtgacttgcttcgagtcactcaggtataaatggctggctgcacctttaggttcctaagacatacagaatatgctgtcatattgcacatgatatttccatatagagtacagtaacaggtcctaagtattaaagtgtaagatcctaaatatcaaagattatcttacaggcagccctgcattagcatgaagtgttcaaatcagtttctaaatatcattatatatggatcctttgaagaacaactcaaaaaagggctctctctcacagggagtgtgttggagtcagcaattaattggccttggtaaagcataaatcgtaacagcagcaagagctaatgggtactgaggccttaccaaatgccagtcactgcgatccgcactttacaagtaccataaattaaaccctccaattctgggaataccacctccatccccattttacagatctggagaaattaacgctctacgaggttaaattacgcctacaaggttgcaaagctgctcagcggccccttggctgtacactactggccatacaaggcaccctgtaccaacgaatcttctccccacttacacaaccagaacttgtcaacggcaaaggatggcatttaactcaggagagcctatcccaaaatggtgagagaactcagcgagcaaggaaggatttttattaaaattcagatcgccgactcctcccggtggcgaccctccgtgcatgcactcccaaactaggctctcttgagtttctgacatcagaaccacattctccgaaccccaatgaaggcagcagccggcgccaaagtctgcatacgaatgcaaataacatggcctttgcttccgagcagtttccaaatttgccctcgggatgtgaggtagagaccaagaagctaagtttgcgcccccgcaggctctgaaatgtctaggatctgacacatgctttgtccccatgaggagctcctgagatttcgcgtgcatcatccgcttagttcacggtgaccttggggtcggggactacgggatgaggggcacggactgtctaaacctccaggtcccttacagagggctccccgcgggtatgggagccatgcacctgtgccgacgccgccactgcctggagggtgcgcgcgcgccccgggccggggatgctgactcagcccggctgctcacattcctttcgcgcaacgcggatgctgttgctgccgctgctgccggtgcagcaaagtgggggaagcaaggcacccgcagcggcccggccgctcgctccctggggcccactgcgacactccctccccactgccggaaggggaactgtgggggtgcgcgagttgacgaaactgggggaagtgggcgctgcaggaggaactcaggcgccgcgcgcgcagctcacacccaaactggaaggaacctgttctgcccggggcgggcgcgaagccgccgcagccgcgagcgccgcgcgggatcagccccggcgcgcgcgtgttccccctcgccgctaaatccctaaatcctcagggcgcgggcgggactgggcggtgggcgcgccgggaaggcgcccgggggtggggacggggacccgcgcgctcgcgcctggccgaggtgctccgagacaggatgcaggcacccccaacaccctgcacgctcgcgctcctactagcgttgcagcaaagctccggggtctgggcgggtcacgcgcgcagaggcgcacccgggttgggagatcggggcgttgtgccaaggaccccggcggcgctggcgggggcggcccggccccggaccgcgacgcggttacctttcgtgacccccagcccaggcggcaggctggcgggcgcgcgaccggcgcggctcaggtccacgtgggacggcgcgcgcgcgccaggcaggccccctccttggctgcgctcagcgctcgcagcacatggtcggcggcggcgcgcccccgaggccggcggagaccggctgcagccggtataggataagagctaggcagcgacgcggggccggggcgcgggcggcagcacgcacggcccgggtcgcaggcggccggggtggggggcggggggagggtgtggctcgggtgcccgagtcgcgggagtgggtggagggcccgggcgctcgggcctcaccagcccgagccaacttgcgctagagtcgggcccgccccctaaggggttaatccttttctcatgttaccgagcggcttataaggagggggaggccaagcctccgccttattgggagcctttgggggtttattctcttcccttctaacttggtgagttggtttattattttacatgtttaaaagtttgattgtgggatgtgggttgttttttaaaaaatatgtgttggggcctttttttgtgatgggaggcggaggagaccactgaacatcttcacattttggagaggttattcccaaaaatattcgctctgacagttaggaatgcccagggccaccgggatgacgcgctcgcgccggtgtgggtagctgagagttgaatgtccgtgaccctggtacagttgggtcccggaagatacctaaaggcacgcctggcctttgagtgccccctgccccgggttgggggctccgggacgtcggaagagtcgggggctccaggctcagcccctccgcggattttccgcatgaagttgcctgcgcgtcgcaggagcgaaatgtcagaggtaccttcctaccccaggctggcgcgcgcacgcaggccgggcactgaggcagcgcgagggaaagtggggctccctgcctcccccgacccccaaacacagcactccctgcggcggccaccgtttgtccccagcgggaagccggggatttcccggcagagcgcgggtcctccacctggactgtcagaactgtcagcggctgacggccggtcccgcgcaacttcaaggttcccgggctgccaaccgcaggaaagcgctggtgtcgccaagcagttccgtagcaagggaagatggttttgcagaggaaatgggttatttccttctaggttgttgtcgtcttttctttttattccccccaccctagcaagacaggtcatagaagtttgttaggtggcgtatataaaatgtcaccaaacatggggggcgtcagtcttagaaaaagctccccggagccaactggggaagagcaattacaacttgtcaacctggaagccggttttgtttgcacggttagacactccgtgccagctccttctcgcaggagatggtttctaccccgggaatgagatttctc

SEQ ID NO: 7313 - DNA, 6000 bp, Homo sapiens
ccacagactctcacgttcccctagagagcaggttgactcttgcctctgaaagtgctcatctggctatgaagtacttggggataagactagggaggggcccagggccctggtccggcctgcgtgtggccgtggaacgtgttggactcagggcatctgtccagcatgtactgagtgatcgtgtctgtggaaatcagagctgaacaggtgatgatgagtgggagactcaggcgaggtcgccgagactgacctgtgatgcccctgcagccctgacagcggcctccagtctcagagctccacgggcacctcgggtcctcccgttacgtcccagcgtgcacctggcccagctctaccagacaggacagccctgatcccagcccacacccagggtaaggttcgtgcccccaggactgccacctgggcagcctttcctgtaggctggggagagatgggatggttgtgtctctcttcttctggtcccttctttgctcacgcctcccacacctaatgtgaaggtcctactaagtgccaggtgctcctgtcaggatagggtcacagcagggaaccactcagccacagtcctgctctggtggagtttgggttctaccaggtggattcacacagtgaacaggtcagcacagtggctgacagacaaatacagcgaagtttgatgactgctgggaagagatatttgtgccttgggtttggggagcatgtgtgtgggtgttggagtcgctatttcactgacaatgatcagaagagggtttgtggattagaggacatgagcgtggagacctgcaggatttgggagcagggcgctctggggtctgggggaagaggggtccaggcagagggaggagtgaggcaaatgtcctgcaagggagtcctgggacccggccaggccagggcagggggcagatgttttggtgcccggtgaccccggccctctcccctggcctcccttgcagccctggcccgagtctcatcctgtttgatgagcccagtcctctgaggagctgagagctgagctgggccattcattcattccttccattccttcaacaaccatgaattttacaggctgatatttgcaaccagagggcaggtaccagttacttgtgaataacatgaatagtcctcaccttctcgggaaatgatggccatacaggcatcaaactacatgactgattccatgcgccagtgaataaccccgggatgtagagatcttgtgggtgtggttctcacctggatccctccctgtcctcatgcaccattttcacggccacgtgcttccttataggcagtcctgagactccagggactctcaggctgaaggtcagggtctaatgatctctttagaggagttgtcatatacagagtttgtcctcacagggatttgtgtggccacaggacctgggttcacagacaggcagaaggtggagggcacctgggcttcccctggggagatgactcactgccatcaccgtgtccccacagctccctgttcagcagcccctacgtcctgctcctggtcctggagctgcccctgctcctgagcatgctgggtgccgtcgtctgggtgaacggacctcagagaagctctggaagcaggcagagttggccagagggtgagaaccagtagcatctactgtccatcaaggccctgcactgcgacagaacccctttgcgggactggaatgacctcctgaccactccctcccgggctgctctctccacatctcctggaattctctgtgagcctccttcagccttttccctgtgcctgatccatgaatcacacgtgaacctgatggacacagacgccctgagctgtgactccatgtctcatgtgcacgccctggccagctgaacctcgagctgtcaccaacacctctaagtgcctgatgccctctctgcacctttccatttctccaggagcttggcattgcttccttcaacgttttcacagggaggagcaggtccaggactcccctgcacctttgccaccataatggcccacactccccgggtccaggagtgcagaatatgtggctgcttccatttgctgagtgtgtcaattcaatgatgctttcgaactttaagaaatgacaatacatagattctggacctatcatgcccactaagtcagacctgggtgaaaactccattgttccctgatctccacaggcctttgctcagaatagtggactaagccccaggctgggcctctcaggactggggtccctgcagaagaggatccaggattccccccaaaacctgacaattccgttccttatgtagacacatcctggccagtgtcttctggtccctgcgggagggctggtagaagattatcagtgtgagttgtggcatggtagccaggcctttccttcctccttcctcaaggggacctgacctccccttcattccagggctgtggcttttaactgactcaaatatggaaattggttgagggccgtgacttcttaatgtggtagttaactgagtcttttgcttactagtgcagaccatgtctgcttatccagacaaaggaagacgttatcagctgaccatcgtttcggttccagggatgccacacccaagacccctgtgaggcagatgatccccatgagtccaccaggtcaaggagggacacgcctgggggtcctcacctatttttacattcagcagatacttatgggagcttctggtgtatcagacactgacctggcattggagtccagccgtgaacacccaggcaaggagctctgttttcattgagctcatattccaggcgggggatagaaatgataaacagatgcaaaaatacgtgcataaattccagaagaaatataaaagtcagagatgaaaagagtcacggaatgaaataagagaagtggggtgactgctgtgcaggagctgagggggactgtggtgaagcccctctaataggcgctgagcaagcagggatcaggagaaaggagggggtgagcgccaggatccctggaggaggagccctgaggcagagagaggagcaggtgcacatgtcctgccaggggcagatgcctccctgggtcaggtggcttcagggcctccagacagcatttcctgtctcctccccagcctgggcaggaaatggtgcaccaactttggatgactaagtcctctgaggcagtgggacatcaggatgtcatgtatccattcacccattcatcctttcaacagccagtttgttaaactgcacttggcagactctggaatgataacgggcacagctgtgaatgagacaagaggctgcacctgctctcaaggggcggccaccctagatgggagcagacattgactcgccaacagaaagactgaggaagacgagagggaagtgtgaaatgggtcatgaggacccctaaaaagcgagccaccataacccgggaaggtcaaggaacacgcaggcaaccctgtcggctggagccaggcagaggagtgggaggttgagggtctggacaaaggcccgagtggggagggtggcagcaccagtgtgaacctggatccaggaggctggagacacctaccaggtgctggggcctgccaggacctgtgtgcagaggccaggtcaggtgggtgccatcctgtgacagcaggagccattgggagttcagcagcgcctccccagggccatgtgtgtgtgtcagggatcacattgctgattctgtggagaatgaaaggggtgggtatgagcagaaggggagaccaggtcagcccatgaaagagccgggatacttcaaagccaggcccaggccagacctgagcactgggctaattggaggccctgggattgcactgggctagagatagtcccatgatgtgagtctgggggcatcaacaccaatgaccccagtgcatgctgtgtccctgagagtgtaaatggagggaggacagggcaggtcgagggtgcagagaccccttcatggtgccaggtttgcccagactcccatcactctccactcaacctcatggctgtgtgcacatactggtgctattgactctgataggaagaaaggaacagaaatctgtaggagggttgggagagtcaaggaatatgcttaaggcatgagaaggtggagaaggggtgatgccctccaggacagacaggaggtaaatcctgtgtctgactagcctccttgccctttccagggtaaagacaccctgagcccatcacgtcaggagaaccagccatgccgagtgtggatagacctgggttcccgcctcctgggaaggcctgtctgccatgtctgctccctgcggaggcccctggccatcacagtggacccaggatagacaccagcagccgctgctcatgacaaactgtcctctcagtcaccaaacacccctccgtgtgccctggggtgtgtgctggctcagtcgcagcctcacatcctccacaaagtcccacttcagcatcttcacatgtctgaactctctctctattctcagttctctgccctgattcccactggggcatggattttggcaagaagacaagatggaaaaggagggtctcgggtgggtgatgccgctgtgtgtgtaggtctgggggcaggggcacaagaggaaaactccccaagcctgtgggattttaacctggttggggactcagcaccaaaaagggacatgcagatggtgtctgggttcatagcgctaacttctgaggccagaagaagagctgggggtcttaggggcagaggtctctgcggggacctagctgaagattaagggacacaacctctctctggtcacctccaaggctaaagaaggtggcagatttagcctccaaccacaagattgtccatcctgaccaggaagtgacatgtcacagagggtggagcagcccatgtggtaggaaatggcccagcttggctctgccttctgcagtgtgagtaacacactgaagccagaagctgtgggctgtggggaagtggctgcatcgccacccaagggaccctggactttgccagacgtcagggttgagaggagccactagcaccatcccagagctgtcagcaccggcctcagcccaggcggctctctccctgagcttcctgtaccctgaccctctccagcctcagacctgagacagggctggacaaggaagcagagagcagaagaaaagcagaagcgaagctcagatctgctgggaggagattacattttgtcccctcctggggtcttgcacagtggcaggtgacattcgtgttacaggaatgactgccagggcctgggcctcgtggcggtcttcagctctgctcctcctgcttgtcccaggtgagtgggccgaccctggacttggggagctctgtcctgagtgggagagggcagggaggggtgcaggcgctggagtagcggtcatagaggggagtggggcagggagaggggaggagggcaaaggagcacccaggagcggtcagcagctgcctcaccaggggacagcaggcggcagggcacagcacgggggaggcctattcctctgtgcccgagacaggaagccctggtgggaggtgatgctgtgactgtcattgccaaagttatccaatcacaaattttatctgggacgatcacacacacagtcacactcacacgcacacacggtcacactcacacagtctcacacacatgcacacacagtcacactcacacagtctcacacacacatgcacacagtcacacatgcacacacagtcacactcacatgcacacacagtcacacatgcacacacagtcacacacagtcacactcacacagacagtcacactcacacagtcacacacacagagtcacactcacatgcacacacaggcccgcacacacccagtgtttccctagccttgcctttccagtctccatggaaacttcccatgcccttcccacctctgcacagagggagcctcccaccctcagtccctgttcctgggtggacaaaggctgcctgcctgccattgccttctcca

SEQ ID NO: 7314 - DNA, 6000 bp, Homo sapiens
aaatacaaaaaattagccgggtgtggtggtgggcgcctgtagtcccagctactcgggaggctgaggcagaagaatggcataaactcgggaggcagagcttgcagtgagccaggacagcaccactgcactccagcctgggcgacagagagagactctgtctcacacacacacaaaaaattataatagaggccgggggtggtggctcatgcctataatcccatctctttgggaggccaaggtgggtggatcacctgaggtcaggagttggagaccagcctggccagcaaggtgaaaccccatctctactaaaaatacaaaaattagcctgttgtggtggcgcgtatctgtaatcccagctactcaggaggttgaggctggagaatcacttgaacctgggaggcagaggttgcagtgggccaagatcacgccactgcactccagcctgggtgacagagagagactctatctcaaaataaaaaattaaataaataaataaaataaaaatattattatttttatatgcccagctaaatttttgtatttttagtagagacagggtttcaccatgttggccaggctggtctcaaacttgggacctcaggtgatccacctgcctcagcctcccaaagtgctgggattacaggcgtgacccactgctcttggcctcagtaagtgtttgttggatgattgacggttgaactcagaaaaagggtgccagggagggccatgacagccatagacctgcgagtcttccttttatggtgggcataaaggagaacaggacatggtttctatatgcagacatcacagtgaagaacctaccagggaaccctcaaattgatcagggatacgtaattaaaaaaattttttaaaagctctgttttattttgttttatttagtaagtgtgtgtgtgtgtgtatatatatatatatatatatatatatatatatatattttttttttttttttttttttttttttgagacagagtctcactctgtcgcccaggctggagtacagtggtgcgatctcagctcactgcaagctccacctcctgggttctcgccattctgctgcctcagcctcctgagtagctgggactacaggcgcccaccaccatgcccagctaattttttttatgttttattttttagtagagatggggtttcaccatgttagccaggatggtcttgatctcctgacctcgtgatccgcccgcctcggcctcccaaagtgctgggattacaggcgtgagccaccgcgcccggccgagaatattctttcttcatacatccagacttatttcttaaaatgtttactataaaagttttcacacacacacaaaagtagacagaatggtggaacgaactgtttttctttgctgcagtagatttaaaagcaaatgcccagtcactacagatatcaatatgcatcactggaaaacaactgacagcattttaaaaacataattactggtggaactagagaggatgttaagcttaacttagagaatgtaaataacggtcagggatgaatgggtatttttccacttagatatgttagtggtcaagttcctcaggacaatgttatgtttttttccatgccgtggtggggtgaatgcacagagactttgtaagatttcctggcattaagatgatctaagggccgggtgtggtggctcacacctataatcccagcactttgggaggctgaggggggtggatcagaaggtcaggagattgagaccatcctggctaacacggtgaaactccgtctctactaaaaatacaaaaaaattagccgggcatggtggcatgtgcctgtagtcccagccacttgggaagccgaggcaggataattgcttgaacctgggtggtggaggttgcagtgagccgaggttgcaccattgcactccaggctgggtgacagaacgagactccgtctcggaaaaaaaaaaaaaaaaaaaaaaaagatgatctatggaggagaatgcccatctgagtggtagaagagcccctgaggctaggtgagggtggactcaattaaatccagtaatatttccatgtcacttgggagttcctggttgcaagccacagaaatggctctgagtgatgggcaagaccaaaggggtcaaaatttcacccggagtggctggttagcaagagttctcaattcttttcttctccttcttctcctcctccttcttcataccttcacttgcctttattattttttcttctttttgaaggctgagcacggtggctcctgcttgtaatcccgatgctttgggaggcccaggcaggagggtcgcttgagctcaggagtttgagaccgcctgggccacatggcaaaaccccatccgtataaaaaatacaaaattagccgggcgtcatggtgtgcacctgtaatgccagctacttgggaggctgaggtgggaggattgcttgagccttggaggtagagggtgcaatgagctgtgatcatgccactgcacagtctgaatgacagagggagaccctgtctcaaaaaactaaaaataaataaagaaataaactgttagcatgttgccagcttttgaaagtcattgtgctagccatgtagtgttatcttactgtggtttcaatttgcatttccctaatgattatgattgagagtttttaatgtcactctggcctggaatgcggttgagtgatttgtagaatagactggattttttttaatgccaaataaaggaactattcattcattatcttggaatgattagaaaagccatgaaacctgccaaggattttgcccagggcggggaaaacccacctccggagaaaggctagagctaccctatcattgccctgtggagtttgtttgttccgtgaaatggcgacacccttcgcactcctctttccctccacacccgctccaccctgccacacttttgctcccagatggcgtgcccctcatttttcacctgtagaattcctctttaagtgaatgtcacatccttttgaagcatctaggggccaggcatggtggcttacatctgtaatcccagcacttcgggaggctgaggtgggaggatcccttgaggccaggagttggggattagcttgggcaatgtagcaagatcctgtctatacaaaaaatgaaaaaaaaaattagctgggcatggtggtgtgcacctgtagtcctaactactcagcaggctgaggcaggaggattgcttgagtcccagcattcgaggctgcaatgagctatgattgcaccactgcactccagcatgggcaacagagtgaaacctcgtctgcaaaatgcatgcatgcatgcatgaatgaatgaatgaataaataaataaataatagggctgggcatggtggctcacacctgtaatcccagcactttgggaggctgaggcaggcggatcatttgaggtcaggagttcaagaccagcctggacaacatggtgaaactctatctctactaaaaacaaaaaaaaattagctgggggtggtggcgggcccctgtagacccagctactcgggcggctgaggcaagagaattgcttgaacccaggaggtggagtttgcagtgagctgagattgtgccactgcactccagcctgggtgggcgacagagcgaaactccatctcaaaaaataaaaaataaaaaagcatccaagatttccagaagcttccagacatagcttgcaaaatgatgttgtggaaaaagcgcagcctcatttggatgagctccttactacctgtgtggctttgggcaagtaattgctttaagcctcattttccccaagtgtaaaatggggataaaataatacctcagaggtagctattagagatatcgtcattgtcgtcttgttttgattccccccccccccccgagatggagtcttgctctgtcgcccaggctggagtgcagtggcgtgatctcggctcactgcaacctttgcctcccaggtttaagcaattctgctacttcagcctccagagtagctgggattacaggcgtgcgccactaagcccagctaatttttgtatttttagtagagacggggtttcaccatgttggccaggctggtctcgaactcctgacctcgtgatccgcctgcctcggcctcccaaagtgttgggattacaggcgttagccaccgcacccggccttgttttgatgattaatctgcctctattacaggcttatttggctgtaccctggccgcttctttccttatccctctccctagctgctcgccataaagagcaggctgtactacttatgtccgctgtgtccgtccatgacacagagttggcaaataccagaccctcagcacatttgttgaaatggatgaatctcaaaggattctctgggaatctggtggctagagaggggtcgggaccgcgagggactctcgcgctcagcaaggcgaggagctgctttcctggagtatggaaactgagtcagcgcctccctccctcataaccaagggcctgcgggactgtctgaacacgtgggtttgacaggtcagaaaaagggagaaccaagagagtggatgctcagaaaacatgaatgggaaagacagactgagaaggaggaaagtgggatggagagggccagctgagacgtgggccaggagccggagcggagatgaagggtgaggaccggggcgggggacgagctgcgaggagggttttgggccctggggactgcgtggtagcagcggaggcgggtacaatgctccgacgcagaaggaagagcgtcgaggctccgggtgggacctgagaaggcacccggcgtgcggcggcgctgggttggaaccgccgactccgcgggtcttcggcggcgggcgctgcaggtgcaggaggcggagccacgcgggggcggggcctgtcggggcggggccgacgagggccgggggcggggcgcgccgcttgtctcctgcgagagccgcgggggccgcggagctggagccggagctgaagccggagccgggttggagtctgggcgggggccgggccggagcgggctccagagacatggggtcgaccgactccaagctgaacttccggaaggcggtgatccagctcaccaccaagacgcaggtgcgccacgggggccccggcgtccccatccacctgccgggctgggggctgggcagggccgggggtacgcgaacttggctcgtcgggagatggggggacgggcgggccccgagcgtaacgccaaggccagcgccggaacgggaccccgcggcctgtacctggaagctccatcccctggccctagtcccccaccctcagcctcctctcctgggaacacccctctccccgaagccgctgctgccaccttaggctgacgtgtgcctactccccgagccggcgacacagctgtccgccccctgtcccgccccgcggcgtccccagcttcgcatctccagcctcccgccgcccccacccacccatccaccgtccgctcccctccctgcccctcattgcccgcgggtcccggacgcacagtccctgttgactcaatgcaaacaaagcctggctggcgtccgcccgggtcggagaaacagctggtgtgcgcggcagcggcctcgctgggccctggtcgatgcccgtgggcagggaaggcccaggtcttcctgggaacacgcaaagagtggcgggcagcgaggcagcctggtggggggccctgtccccaggcctactgagcacagcctcccagctggggacctctccaggggccttccccgaggccctgcaagggaaaggctgttagcctgtgtgctctgttctctggctcagggatggggacccgcaggatggccctcagtcagctggtgaggggcctaaggaccctccagcctagtccatgctcataactctcctgtgagtccacaagtggcccaatagccacctccttataccacctggccccagcaagactgcttctctgcccaccccttctctcctggctttttgaatcaggccacc

SEQ ID NO: 7315 - DNA, 6000 bp, Homo sapiens
cttcaatatctcataccaaacaaaaaataactaaaaatggatcagagacctagatgtaaaacctaaaactataaaatttctattagaaaacataggagaaaatctttataacctttgactaggcaaagatttctttggtaaaggccaggcatggtggcttacacctgtaatcccaggactttgggaggcccaggagtttaagaccagcctgagcagcatagggagatcctatgctgtctctaccaaaaattaaggccaggcacggtggctcatgcctgtaatcctagcactttgggaggctgaagcaggcaaatcacttgaggtcaggggtttcacaatgttggccaggctggtctcaaactcctgacctcaagatgaccaacccagcttggcctcccaaagtgctggtacaggtgtgggccaccgcatctggccaggaaccaattcttttttgagacacgatggctgcaaacatcacaaaatgacagacaagcaggcattatggtgttcctcatggaaatacacaacaccatgtaagtagtctcatttaaaaaaaaaaaaaaaaaaaaaaaaaacgttggccgggcgccgtggctcatgcctgtaatcctagcactttgggaggctgaggcaggtggatcacctgaggtcaggagttcgagaccagcctgaccaacatggtgaaatcccatctctactaaaaatacaaaaattagccgggcatggtggagggcatctgtaatcccagctactcaggaggctgaggcaagagaattgcttgaacccaggaggcagaggttgcagtgaaccaagattgtgccactgcactccagcctgggcaacagagcgagactgtctttacaaaaaaaaaaatcaggccaggcacagtggctcatgcctgtaatcccagcactttggaagggcaaagtgggcagatcacttgaggtcaggagtttgagacaagcctggccaatgtggtgaaacgtcatctccactaaaagtacaaaaattagccaggtttggtggcatgtgcctgtagtaccagctactcaggaggctgaggcaggagagtcgcttgaaccctggaggcggaggttgcagtgagccaagatcacactactgtatgactgtactccagcctggacaacacagcaagattctgtctaaaaaaaaaaaaaaaaaaaggctgggcgcagtggctcacgtctgtaatcccagcacttcgggaggccaaggcgggcagatcatgaggtcaggaatttgagaccagcccaaccaacatggtgaaacaaccccgtctctactaaaaatacgaaaattagctgggcgaggtggcacatgcctgtaatcacgactactcaggaggctgaagcaggagaatcgcttgaactcaggaggcggagtttgcagcgagctgcgattgcgccactgcactccagcctggaggacagagtgagactctgtctcaaaaaataaagaaataaattttaaaaatcaggccaggttcagtggctgacacctgtaatcctagcactttgggaggctgaagcagacagattgcctgagctcaggagttcaagactgccatgggcaacatggcaaaaccccgtctctacaaaaaatacaaaaaattagctgggtgtggtggcgcgtgcctgtagtcccagctactaggggctgaggcagaaggatagcttgaccccaagaggtagaggctgcagtgagctgagatcgtgtcactgcactctagcctgggagacaaagtgagaccttatctaaaaaaaaaaaaagtcaaacccagtctaatcaaaccttttagatctaattaccaattagcagagaacacaagggacataggggccaggtgtggtggctcacgcctgtaatcccagcacttcgggaggccaaagcaggcagatcagctgaggtcaggagttcgagaccagcctggccaacatggtgaaacctcatctctactaaaaatacaaaaattagctggacatgatggcgggtgcctgtaatcccagctacttgggaggctgaggctggagaatcccttgaacccaggaggcacaggttgcagtgagccgagattgcaccattgcaccacagcctggacaactgagtgagactttgtctcaaaaacagcaacaacaacaacaaacaaacaaacaaaaaacacaagggacacaggaagatgtggaaacaactccatggggatgcgatcagcaaaatccagactagggaaaatgccacagcataaaccacttaatttctttcttttaaaaaatgtattatttagtttttgtagagatggagtgtcgctatgtttcccaggctggagcacagtggctattcacaggcactatttttgcacactacagctttgaacttctgggctcaagggatcctcctccctcagtctccctaatattgggaatacaggtgtgcacccccagcctggctctatctagtttcttaaaaaaaaacaaatataataaaatagagaaagaaaggaaaatgaaaggaaatgaaagaaaacaaatttcaagtaaaaaaaaagtaaagtggagaaaaacaatagatttttaaaaggacttccagttgcaatgttcagttcagatctcaactctttttcttttctttgagacggagtctcactctgttgcccaggctggagtgcagtggcacgatctcggctcactgtaacctctccctcccaggttcaagtgatcctcctgcctcagcctcccaagtagctggaattacaagcgcctaccaccatgcctggctaatttttgtatttttagtagagacgcggtttcacatgttggtcaggctggtcttgaactcctgacctcaagcaatccacccacctcagcctcccagtgctgggattacaggtgtgagccactgcacccaaccaagatctcaattcagacaaacatttttgtttgttttctgagctctgtcacttagaaaagcaaacttgtggctgggtatggtggctgacgcttgtaatcccagcactttgggaggccgaggcgggcagatcacgaggtcaggagatcgagaccacggtgaaaccccatctctactaaaaatacaaaaaattagccgggcgtggtggcgggcgcctgtagtcccagctacttggagaggctgaggcaggagaatggcgtgaacccgggaggcggagcttgcagtgagccaagatcgcgccactgcactccagcctgggggacagagctagactccgtctcaaaaaaaaaagaaagaaaagcaaacaacttgttttaagaaggacatttcagccaggcacggtggctcacacctgtaatcccagaaccttgggaggccgagctgggtggatcacttgaggtcaggagttcaaaactagcctggccaacatggtgaaaccccgtttctactaaaactacaaaaattagctgggtatggtggtgcaggcctgtagtcccagctactcaggaggctgaagcaggagaatcacctgaacccgggaggtggaggttgcaccgagccgagatcgtgccactgcattccagcctgggtgacagagtgagactcttgtctcaaaaaaaaaaaaaaagtttgagaccagactgaccaacatggcaaaaccccatctctactaaagatacaaaaaattagctgggcatagtggtgcacgcgtgtaatcccagctactcgggaggctgaggcaggagaatcgtgtgaaccccagaggcaaaggttgcagtgagctgaaatagcaccattgcactccagcctgggcgacaagagcaaaactgtctcaaaaaaaaaaaaaaaaaaaaaaaaaaaaaaaaaaaaaaaaaaagaagaacatttctttctttcagaaaagtgtaaacactaattcatatttgatattaaaagtttttttggggggtcggagtgacagttttgtgtgtgtgtgaagcataatgtatacgtattaaaaagggaatgcttgtcctttaaagacacatactgaaatatttactggtgaaaacacgtgatggtatttacttcagaataacgctgggcagcgcgtgcgaggtaggtgcagaaatagaggaaacaagattgccccatgagtcgcgtaactgctgaggtcggagagcgactctacgcggcttcatcgggttattccacttctgtgtatcttgaaattttctacaataaaaatgtcttaaaattgtgcgtcaaaatgataacacgaatataaaaatgcaattaaaaagtcaggaggcaatactgtcgcgcaaaaccgtgacgctagttgtgtgcgggcggtaggatgagtcatttcctccttcctttctatattttctgtctatatacttttaatattacttttataatgagaaatactaaaactcggggtgagagggggggacactcgtgtttttgccttccccgtccccgaggggactgttctcatctattctcttcccgacgtcctccagctttttgctaggcttcctgccatctttaccaagttgagattatccgggttctggcattaacagagtttgaggaaagcgggtcaagtctaccgcgccctaaccttggaccccgcctgcaggctgactttcgagtcacacgccagagcacggcgacccctaaggtcgcagcccggcttcgcaaggcacctccttctaacgcgtcggtcgaactcgcgcgcccgcgagcagccggactacatctcccaggaagctgtgcgccgtccagctgtcctgcccttggtcgcgaaggactacattacccggtgatatcttgcgggaggcggttgccagacctcaagcgcacaaccattggtccagcgtctggcggggagctgcacggtgattggcccaggagcccgccagtttcgtccgagctcagtagagttttgctgttaagactgcgcgaggagctagagagagcggagagcgctgagccgggccgcacccgccgagccgtgtgagtaacctctacctccgtccttctcgccgccctctcggggaccagcaccctcgctcctcagggtggtcgggagggagcacacgcacccgggcgctcacgagagggcggggactgtgtacacacgtgtcacaccagaccagagaagcatctccagggacaccggcggccgagccccgcgcacgcccttgagcacctgagctccagggcgtcccctcggactcaaggagaaaaaacacaccccgaggcacacgtggacacctaggtacccacacggggacctctgcagatttgctcagctgagcccttgggcacatgggcacccgaacaccaggaagagcctggtatgctccggtctcctgacagcgatccaggacacctgccactcgggcttgctcctcctttctgcccagatgggcgggaaacacgctgctcagtgtgacctgagcggtccctgggtaacccctggagaggttttgcctctcagtcgcttgccgcgtgtttaaacttcctcatgggcgcctggggaggagttccagggtgggtgagaggagaaaaggaattgatgtctggggtggaggctgccatcctgtaggtagtatctcccctcctcccccacccccacccccactactacaagtattcaagaactagggtaattctgaaggctagttttagggattttttttttttttttttgccataacaaattcaaacagtatagaattatcgacaggtctaccttcctttttcccttctcagcccttctccctgtgatcagttaccaactacctgttgatgtgtgtggttacagacttctttctatgctttgtacaactctacagaccgtatgtaggtattactgtttttgttttttgtttttacaaaaaaggaaaaaagtacatctcctggaagggatgctttttagctgagctctggtggatgagaggagctagccttgaaaaagtgagtaggggctgagagtggggctgtatttcagacgtagggaactgg

SEQ ID NO: 7316 - DNA, 6000 bp, Homo sapiens
tacacatgagacaaaaaaaaaaaaaaacaactctggtaaaggaaattctgtaattataaaaagtataattttataattatatattatataattgtatttacatacagtcatcccttattatccatgggggattggttccaggactgcccgtataaccaaaccaaatccacacatactcaagtcccatagttagccctgaaaaacccatgagaagtaggccctctgtgtctgcaagaccctgtctctgcaaaaattaaaacaaaaataaattagatgggtatagtggcacatgcctatagacctggctacttgggaggctaaggcaggaggatcgcttgagcccaggagtttaagactgcaggagccagctgggcacggtggctcacgcctgtaatcccagcactttgggaggctgaggcgggcaaatcatgaggtcaggagatcaagaccatcctggctaacatggtgaaatcccatctctactaaaaatacaaaaacttagctgggcatggtagcacacgcctgtggtcctagctacttgggaggctgaggcaggagaatcaaggcagcttgaactcaggaggtggaggttgcagtgagccaagatcatgccactgcactccagcttggacaacagagtgagactccgtctcaaaaaaaaagaaaaagactgcaggagccatgatttcaccactgtactacagtctgaacaacaagagtgagactctgactcaaaaaaaaaaaaaaaaaaaaaacagtaagaaagaaaaaaaaacagtaagaaagaaagaaaaaagtaacgcaggtctccagggatgcctttatacacagctgaacaggtttgcagctgatagagatctgggcctcagatggagactaattcaggagtcacaaacagaaagctggttgttgaaaccatgagaacaaagagttgcaggctggaattactgggagctaagtgtcaaattcagagagacagatgcagcagaattagaactggaaaatgtggactccctttggaaggatgatggttgctagtgacttcagtgggtacaatttcaatggcatcgtaggtaaggaagtcagatgcaaaaagaagcagagacagaatagactctctaccaagaacttggatgaaagaaaaagagagtagctatgaagggggccagctccatggcgttttttgtttgttttgctttgctttgctttttaggatgagctatttggggcatgttcataggctgtgataaggaccttgcagagggggcagggagggctgctgaagcaagagctgaagaatgggaggtcacagtgaagaggctggctctccctggaaggaggagagtctggagcaataaggtgagggtgcatgggcaggatcatgctgtgagcagagggaccaactgaccttttgttccaggctcttttcaagaacgttggtataggccaggtgcagtggctcacgcctgtaatcccagcactttgggaggccgaggcgggcggatcacgaggtcaggagatcgagttcatcctgggtaacatggtgaaaccccatctctactaaaaatacaaaaaattagccagatgtggtggcgggcgcctgtagtcccagctacttgggaggctgaggcaggagaatggcgtgaacccgggaggtggagcttgcagtgagccgagatcgtgccactgcaccccagcctggcgacagagcgagactctgtctaaaaaagaaaaaaaaaaaaaaagattgttggtacagcagactgccttggaagataaagatagtgcctccctctggagcagagggcagatttcctcactatccaacgtaataaagataatgtctccctcttggacaagagcaggtttgcttgcagcccattataaaagattctggtttccttatctcagggattctcagctgtgctgcaaacccattgtgtgtgcaacactcacctgggcctctctgtatcactctcatggggcttgaggagtaaagagaagtgacacaaacatgatgcctatgttgcttgctgcaccatgagtaataaagtcctttgtctctgatccagtagtcttgtgtcttctaccagcatccacagaactatggcagtttcattggttagcttgtaaggagagcaaaatctgcacagttcttaacaaaagatgactttgaacttgggggcatgggaagttgaaggtcactcctgatgggctgcattttctcacaggtatggctgggaaaagaggaggcttgaggaaagaagtaagttctagaatcattgttgagcaggatagaagctggagctgagcaaggataaggaaatggctgatgttgagagccagctgaggccaaacttgtgttcccaattcacactctggaatgagctacacctgacccctgacccctgcagcactcagccaggccagggacaggcagcacaggagaggcagaggcaagagtgaatccaggtcagagttttgctgggaagaaagccaggaacacaagagaatctgggttactgatgcaggagtagctcagattataacccagggagtcctgcctagataggaaagaaagctgctgagagagggttggcccactgggagaaaagggaaggatggagaccctggaggtcctgtgaggctgaagatgggaggaaggagaactccaggtgggtggataggagatcttggtgtgaggggagtactgccatttaaggcattggaggtggacctggattattaacacagatagggggttaactcccacacaggaggagagcaccctctccccagctcttaagactggagtcctgaggcctggcgcagtggctcgcacatgtaatcccagcagtttgggaggccaaggtgggcagatcacctgaggtcaggagtttgagaccagcctggccaacgtggtaaagcccccatccctactaaaaatacaaaaaaaaaaagctgggcatgggggtgcactcctgtaatcccagctactggggaggctgaggcaggagaatcgcttgaacctgggaggtggaagttgcagtgagccgagatcacgcctctgcactccagcctgggtaacaggctgtttcaaaaaaaaaaaaaaaaaaaaagactagagtcccggcagggagaggctgggctgtgtgtgggggccaagtttgtaggtttgtaagtggaagttgaataaattactaatgaatgattctccttttctccatgaagtagagggtaaggcacttactgagagcaagggctaggagggatatttatgggcacagagagaaggtctgaggaaatgtgagaagccagtgatcaggggataagtaacatctacaggaattttgacaagtaaacccataaagattgaaatgaaagtcgtgacaccataaattccaagtagtgcccatctgcggggtagcaagatgagtctggctctgctgagcagtcttggggtgaaggaaagaactggcccaatgtgagtgacctccagtgaccctgacttggtaggagtactgagactggatggactgaatggccattcctgaccacaggcccaggccctgggaggttttcgggaagccttgcaatcagacaggtacctgttgctgcacccagacttcctcggatacatgaagaacagattagagccaaaggcccgtgacacggtagcctaggtccctctcatccttgcagcctgctgacagttgggagtctggggcatgtcacagcctgccgcatgtcacagcttgccgaacagtggccactgaagcacacccatctcatccatcactcactgccagggagtgttccacttagagagcacgggtgctgagcttcccagccctttctgatgctggagcctgctagaccaggggtccccaatcccaagcctggtccgagacctgttaggaacagggcatcgcagcaggaggtgagtggagggggaaggagcattaccgcctgagctccgcctccttcagatcagcctcggcattagagtctcaaaggagtgcgaacccttttgtgaaatgcgcatgccagggatctaggttgcgggctccttatgagagcatcttaactcatgcctgatgatctgaggtggaacagtttcatccccaacccccccacccccacccccctccgtggaaaaattgtcttccaggaaaccagtccctggtgccaataagtttgggaacccgttgtgctgaacatttcaggtggtctctctgactggcctcgttctgtgaaaggaactcaatgcgattgaggggactggccaccctggatggttaccaaataagcgctgacagccttagctcccccacgaaacccatcacggcaagctccccacctcacccccttttcccccctctaccgccagcccagagactgagctgtcgggttttgctcctccaccctgcccgccccctcccagctgtcctggcgtccgcagactgacagatctgagggtcctttggagggagccgggcacatctcctcccggccgccgcccacccgccacagagtctagaggccgagtgccgggcccgcagagggcagagcgcagccagcgcagcaggtggcggcgtctacccgcgcctagctagccccggacggcgcgaggaaagcgccctgcccaacccgagactggcggcctcccggggctgggctctggagagagcgcagtggcaggagtggccgctgccgaagtcccccgggcagggggcagggccaaaggagcgcgcgctctgggcgccgggacgacactccagccccgggggacccgccgcccagctcccgagggtgcggcagcctctggccactcagccggggccgagagggagctgccgggcgggcaggcgccgcaggcacccggcgggcagggcggggcagggcaagacggccgcctccgcaagtgccacccggcccacccggttctctcccttctgcctgggacgtcagcggacggggcgctcgcgggccggggctgtatggggctcccgcgcgggtcgttcttctggctgctgctcctgctcacggctgcctgctcggggctcctctttgccctgtacttctcggcggtgcagcggtacccggggccagcggccggagccaggtaggggctgccgagcgcagagcgggagggcgcaggggcgaccagggcgcggggagggtccccagcccagggctccccggcggcccgcagccctcagcccaacctccgcgtggacccctctggggcagctctcagcgaggactcggccgcggccctttgtcgccagaaccctctcccagccttgacctcgcgctgcccggaccccgcggcctttgcctgggtccaaggaagacctcgcccctgtgcactggcgacccgccccggtgccccttgttggtgaagtcctccccggcctgataagtacactttctattgtcgaaatctggctgggtccccgaagcagataaaaacttccttttttgtcgggaactctccctcggtaacgtcagattctgctttttgggcaggggcccaagtctccggtttccaacttcgcggggaccctccgtcgggccgcggccagtcgcctttcccgcccgctgcggtctctgtccgccccgcgcccgctcccttctccccggcttccgctcgccgtgtctggataagcccagtgcgggcgcgatccgcgaagaggcgggcgcccgagggaaagaggggtgactcctggctccatccgcgttctcctccccgcgccgcgtcctgcgctccactccctcctcctccctaggcactttcctgggtgtcccacgaggagaacctgggagccggcctctagcaggtggtggttccggtgactgaagaagccgcaaaacgatttcgcttagcttaagaaaggcggaccaagccgtgcgaagtctgggtttgggaggagggaagggcccggcagcctcagggagaggcctccagccccagcctttcccttcctggagcttttc

SEQ ID NO: 7317 - DNA, 6000 bp, Homo sapiens
caagcgatccttccacctcagcccctcaagtagctgggactacaggtatgcaccaccacgcccagctaatttttgtacttcttgtagaggcagggtttcagcatgttgcccaggctggtctcaaacttctgggctcaagtgatcctcccacctcagcctcccaaagtgctgggattacaggtgtaagccgctgcacctgacctaattggtgaaaattatttaaataattgaaataaaattatgttgtcctaaggacatacagcaaatgaagaaatatttattcaagaaaatctcctgaataccagtaagaataaacagtctgtggcacctgagtcacatcccactcctatcttcttcccaagcaggtgtcgcttcccaagaagatggggggctccctctgcctccactccaggctgcagtttcactctaagaagggtgtgtcactggtgtctctcatctcttccagctctgcgttgcaaaaactgtattccatgcaggtgtggccaagagggctggggctcccttccccaacccagaccccacttgtagggtggaaactgtgtaccagacacagtggttaagaaactcagcagaagactgggcgcggtggctcacacctgtaatcccagcactttgggaggccgaggtgggtggatcacgaggtcaggagattgagatcatcctggccaacatggtgaaaccctgtctctactgaaaatacaaaaattagctgggcatggtggcacgcgcctgtagttccagccactcgggaggctgaggcaggagaatcgcttgaacctgggaggcagaggttacagtgagccgagatcgcgccagtgcactgcagcctggtgaaagagcacgactctgtctcaaaaaaaaaaaaaaaaaaaaaaaggagaaaagaaagaaactcagcagaaacatcagaaattatacactctgcacacaaaccaggaaataggcttcatagaattagttcagaattaaataaacaaatgcccaaggaaacaacagttccaccaacaagccccagtgtagtggggaattcagcatctagaggtgctacaatatattatctaaaatgtctggttttcaacaaaaaattatgacacgcaaaaaaactgtgacaaatacacaggaaaagaagtcaggcaataaaaagtgcttttgaagggacctaaatattggacacattggaaaaagactccaaagcagctattatgaatatgttttaaaaatcgaagtagaccaggcatagtggttcacgcctataatctcaatgcttcaggagttctaggcaggaggattgcttaaggccaggagttcaagaccagcctgggcaacacagtgaaaacctgtttctacaaaatatatatatatttaaataaattagcctgtagtcttaactactagggaggttggggagaaaggatcacgtgaggccaggagttcaaggttacagtgacctatcatcacgccactgcacttcagcctgagtgacagagcaagaccttgtctccaaaaaaaaaagtttttaatgtaaaccatgtttaaagaattgaagattaaagaaaggcatgataataatgactcatgaaatagagaatgttcactaaaaagatagaacaaaattattaagtaaatgaaaattctgaagttgaaaaataaataatcaaaatgaaaaattcactagaggggctcaatagtagatttgagttggcagaaggaagaatcagccaacatgaagacagattaatacagatgaagaacactacgaaaaataataagtaaaaatgaacagagcctcagagaaatgtagaatactgttaagcacaccaacatactcatcctaggaaagaatgctcaagaggcagagatagagagaaaaaaatattcaaacaaataatacctgaaaacttctgaaatttgttgaaaaacactaatacatagatcccagaaactccaagtgaataaatgcaggaagacccacacagacacatcatagtcaaaatactgaaagccaaagatagagaaaaatcttgaaagaagcaaatgaaaaacaatctaaattactttgtgctcatgcacttctcttttgaactggttattatatctgcctggtcctctcatgagtagaatcaaatctttagcacatttttatgtcttctatctatttgagtaatgattttaccttttactgaaaattatcttttaacaactcttatctgcatgtaagttctcacatgtcccatcagctgatgtatactaaagttcaaagactcaagctcaaagctttagtttaaaaaggagaaaaagtttttgccattgagcttaagagaataaaataaaataaaacaataaaaaggagagaaaggtagatcttaccaaacacaaaattgtgacgatgtttaaaaaataattggcagctgggcgtggcggctcacatgaagtgctcccagcactttgggaggctgaagtggggtcgcttgagaccaggagatcaagaccagactgcacgacatagcaagacccccccatctctacaaaaaaaatttgccaggtgtggtggcacccacctgtaatcccagctactttggagggaggctgccgcaggaggatcttgtgagctcaggaattcaaggcttcagtgaactatgattgcaccactgcactccagcctggatgacagaaagaggccttgtctcaaaaagcaaaaacaaaataattggaaagtcaatttctcctaaaacacacacttctctggatcccacattctgcccaggcacatgctacagcagcagtgggctggaacctgagaaccaggaaactaggactctggattatcctgccacaccagttggccacaaggtcttcaagttcaacctgcctctaatgtggcgagagggacagattgtccacagtagctcagcttgcacccaggagctcagctggatctccatgccctgcggaaggcagcgagcactgacagccagtgccttcttcagaacacagggcacgatgaaagagatactctatttagtcacactagtactgtgggtaagaacatgccttttcactgtgcacttatttgcatagcgttgcaagcaggcaccaggatacaggaatataattgtacatgtcaagtgcataaaggaactcaggataaggggccagttaggacaaagagttatgacttgatacagatcaattcagaaaatgtttatagagttaacatatgagcatctgtaggttaggcacggtgagagagaaagagagaggttgagtcagtactaacagagatgtttctccttgccaccatgacttgaaacagtgctgtgagttgcagtgtacagtaggggataaaggaaaccatcagtcgtctgtattaccctcagctgctcagacgtatgttcctgcctttttcgtcctccttgaggaaggtggtttaatcatttatcggtgcgtgccatgggtgaaggccaagagccttgtgtacagaactgaaaactgtacgttaggagaaatgcccaccgccaggtgtgaacagtgagcccaggctccaaaacctctcccacagttcaacaccctggacaatatttttataaaattactaactcacagtactttatggagggctgcttctctgaatttttaaagttttctacaaatggtcttgatgtttttcctctgaggtgtacttttttttcccaagaattatgtgggttttgttttgcattgctttgatcaaggtagagttaatgatttctcgtaggtgctactaagcagtggatacgaatgcaatcggccaggcacggtggctcacacctgtaatcctagcactttgggaggccgaggcaggtggatcatgaggtcagaagatcgagaccatcctggccagcatggtgaaaccccgtctccactaaaaatacaaaaattagccgggtgtggtgttgggtgcctgtagtcccagctactcaggaggctgaggcaggagaatcacttgagcccgggaggcggaggttgcagtgagccaagattgcgccactgcactccaggctggcaacgagtgagaatgtctcaaaaaaaaaaaagaaagaaaaatgcaatcatggctgggcatggtggccgatgcctgtaatcccagcactttgggaggctgaggtgggaggatcacttaagtccaggagtttgagaccagcctgggcaacatactgagacccatctctatttcttaaaaaaagaatgcaatctctaggtcagttggatctggaccccaagccagtggctcaccatgtgctcttgggctggcagcttgttcttggaggccatttcctcctctgtcaaatggaggtgatgacagtacccagcccctagagtggctgtgagggttccatgagtgcctgtgaagactccccactgcccagctcagagtgagccctcatacgtgctggtcattgttgtaatggtcatgatttcagaagagaaacagagaaggttgagctaaagtgttgaacatgtgtgttgggtgcctaccacaaacaaagccctgtgcatggtggcctcaaggtgtcttcatgataatcccaaaaggaagataactgcttttttccatttatatggcggcagatgggttaagtaacctgaccaagatgagactgcatataatgtggttatatttctcataaagcttgactttcagatattggcttcaaagacaaaaaaggaaggtaaacatgtttgaacacaaggagtttcccttcctttaagccacgccagcttataagccttcatacagcagtgaaggcggttcctcccttcccaggcagagactgataaactcagcacttgccggagtggctcattgttaagacaaagggtgtgcacttcctggccaggaaacctgagcggtgagactcccagctgcctacatcaaggccccaggacatgcagaaccttcctctagaacccgacccaccaccatgaggtcctgcctgtggagatgcaggcacctgagccaaggcgtccagtggtccttgcttctggctgtcctggtcttctttctcttcgccttgccctcttttattaaggagcctcaaacaaagccttccaggtaagattcttgtcctttccactcctcatatttcattcatttgaggaaacagaaaaatgatagcccagggaggactggggaagtctgagccacctgtgtgtccacatgggagtgtcaggggtcaggagtgttctcaagaagcactgggaagaaagactaatgggaagacttgcagggaacagaaagggtggcagtgggcaaccaagacgcatgggatggacatgtccagatactgtgggacacgtacaggagtttgagaactgatgggttaggtctgcagagtgcagacagaagacatgactgctttcccctctgggactgtgagtaatggcagcagcactgggttagttcttacatgccattctctacgtcctgaagcgaaagagccatgctgtgtgttccacttgtttcagacccggactcaccctaagtttgtcagttaaaatggagagcctccctcttagggatgcagtttcaattgtggacgccaagttaatccttcaaaaataccttctagaccatttttcttagaaaatacacacatctccagcagtgagaggccctcttttttttttttttttttttgagacggagtctcactctgctgccggagtgctggagtgcagtggcatgatctcagctcactgcaacctccacctcccaggttcaagcctcagcttcctgagtagctgggactacaggcgcatgccaccaggcctggctaagtttttgtatttttagtagagacaggttttcaccatgttggccaggctggtcttgaactcccgacctcaagtgatctacccacctcggcctcccaaagcgctgggatgacaggcgtgagccactgcgcccagccaataatttcatttcactgttcctaaacg

SEQ ID NO: 7318 - DNA, 6000 bp, Homo sapiens
gggatccataagaagtgctcactttgcgaggtactctgagattagcgttccccatttgtttgacctacagacgttaagtgggtgacttgtgttacacacggggagtaaattcagagatggcacctgtagtctttgcagtctgttgatacttctaaataactaactggatgactttttggggattgaccagcagatgccatctcttgccctcttgattcacctgcttgccttaatttgtccctaaattcaactaaacttcaataagaggggttgtcaaggccatggggcgcacttggaagcactgcctgggctggagcgttggaggcattggcaggcaggtgggaaggagctctcactgcagtgttcacaggcagggaggctgtgtgtggatgtgttagaattgtgtgctgttgcctctcaaaatatccactagaaacaggtgtaaccaggaaaatacaggtctctgctcactgttattaacagactgtcatttcctgacattgggtcatgtggctttactctaggaggctggttctctatttttgtcttagttcaattttctgcatcctcaaatgccaaccccagtatgtggctgggtaggtagaactgtgctgcctgcctgccatgggggctgctctccctccttacccccacgcccacagcccccttggttctgtggtgggcacaggatgtgtttgggtgtgagtaaagtcaaactctgaatgtataatctcttggtagtaatatctgagtggtgttgctactcctgctttttaaaaagacttttcttgccatctataaaaagcttttttctttttcccagcattgctcctgtgctgccacgcttgccctttttccttaccttcctttcagttttctatcaacaactcctctaaacttcagtttaaaataaaaaacagcccaaaaaggctctttgccaccagggggcgtggtaggacacgttgccagtggtctggataggggagcagaaattttgaattttaaaaattagccaccaaggccaggtgcagtggctcacacctgtaatcccagcactttgggaagctgaggcagggggattgcttgagtccaggagttcaagaccagtctgggcaacatagtgagatcccatctctcaaaaaaataataatctagaaaataaagattagccacccagttttctttctccagatgctaaagttgattcctgtttgataacagtattccagaaatgaggggaataacatatctgataggcccaagtcagctctggatagtacagtgtctggatagtacagattctgtgctcctgggacatgctttgtttattcctgccaggccagggattcagcagccctattccccaacccccgttactgtctctgtgggctagccaggctgtccgttatgtaagcacaacaggggcaaggtggggaaaccgtgtgtggaaaaggagtggagtggtggcgggtggccaaggtagactaggaagagtgggtacccagagaccacttgttcagaagttaactcctcttcccatctggcgtgagctactccattgaatggtgccaacaacagtaaagtgaaggagataatgttagattattttcagggatgattctccaagatgacagcagatcttaaaaccaaagagctgggtcctggaagaagggatcttggattattaacttctgatggaaggaccagagtgggagagagaagagttggggacctagaacatcaggaggaccctgggtctttggggatgaggcttcaccatcagctggaagaatccatgcttcacacacatgcctctgccattagtggtactgggatgtttagggtgacatccttgaggggagagccactgaaaagagggacattcacattttgctgtattcttgcagctgtccgtgtcttaataattcaagcgttcaataggtgtttgagggccaggcactgctcttgaggtgctggagataacggtgacaagcccaggtccctgacaagctccacaagcttaatggacagtgaatgtgcggctgttgcggctgttcacagggccgctggtgagggcaggtagaagaaagtgcagaccttcttaaatgcaggtgtaacggatctacatgaaagagcataattaacaccaatgtatacttaaggtagtaacagcttcttcataaagtagcaaaactaaggatctgtgggaaggttgctggtgcaaatgctttataagcttactagagactgagccttggatttaggactttagacgagtataggatggaacaaaatttttgcagtaaatgtaaaaaatgctgtgtaggaggaaggcgtataaggatgccccagctgtaggttctttagattgtctgtagtatttccacgagtaagttgtttttgatgtgtgtactggtattgctggtagatttgaagtggagtctggcggcttcttccacactcccctcccactagcttgtgtcaagatgtgacatcctatgcagcaaaactaggtgagcttgcacccccaggcggtggctctcaactttgtctcattgttcagaaatttcggccaggcgccgtagctcacccctgtaatcccagcactttgggaggccatggcaggtggatcacttgaggtcaggagttcaagaccagcctggccaacacggtgaaaccccgtctctactaaaaatacaaaaattagccaggtgtggtggcacatgcctgtagtcccagctacttggtcaactcaggcaggagaatcacttgaacccaggaggcagaggttgcagtgagctgagatcaagccactccagcctgggtgacagaccgagactctgtctttaaaaaaaaagaaatgtcatctaagccccagtgaacctcctgggaggagagctagccctggccagctgtctccaaagtgactggatgctacagaagaactgggactgtcttctgcacactcgtgcctcctggagttgtcagaacactgagcagtctcctagttctgcgtccgtctagccatggggtctgccatgaaagcctgtggatctgctattgggttggtattttaaactttcacttgggtgaaacttgttcatcattttaaataaagcaacatgatttggagttgtgtttttggcattgttttgtccttattttctttcttactcatttgaaagtcaacaatgtactttgtcagcagaacaggactttaaaaaaatgtatttacactttaaaacaatgggatggagcacaaaattaaggccctgggccaggagcattgatgcacacctgtaatcccagctgcccaagaggctaaggcaggaggatcacttgagcccaggatgtcgaggctgcagaaagctatgatcatgcctgtgaatagccactgcactccagcctgggcaacatagtgagaccctgtctctttaaaaaaaaaaaaagaaagaaagaccctgtctctttaaaaaaaaaaaaaaaaaattggctgggcgcggaggctcacgcctgtaatcccaacactttgggaggctgaggcaggcagattgcctgaggtcaggagttcaagaccagtctggccaacacggtgaaaccctgtctactaaaaacagaaaaaaattagccgggcatggtggtgggcgcctgtaatcccagctactcaggaggctgaggtgggagtttcgcttgaacccgggaggtggaggttgcagtgagccgcgattgcgccactgcactccagcctgggcaacagaataagactccatctcaaaagaaaaaaaataggcccatacactggctgaaacttccacagtggttaaaagctagtcgcccgtagataaagcctatttcacattttatagtttataggctcttttcatcaaccaccactaaaaggaagtgcatggcccgcttaatatcgtgcagtgcagcagaattcagctctccctgttgctgaggggtctcgtttgtgtatcttcatttaaaaagaagcactccatctaatatctggtttatatcacagatcagctcaggcactgtaatattcccaaaaaagtattaaaggcatcctcagcaaaaactggaaccgtgttttttttaacattaggccttatgtttggcgtgatacctgacatgcccgtcctgtgtttatttaaaataactaaagagtgggtggggagtggtaggaaagtatgtttttggttacaacgtgtttatctcaaaatccactgttcagcaacagaggcctgggaggatctggagaaacaaaaacaatagccttcatttccttcattgtaccctcccaccctgcatgcattctggaattgtgcaaagaagaaagtctggtaagaggaatagcgttgaccaaggacctgcagctgaatttcaggtctaggggcgggggagccatgttactgttaacagggaggcctgtgttgaaggctgctggcctcagctccgaagggagcattcactggccgggatctggagatgtcctctgtgaaagtgcattaaggcaaccctgaggattaaaagcaactcctgacatgcctataaaaacggcagtggctgaacgtaatccggcattatgattgctttacaagccaatccaggctgccgtttccatgaagcttcccgggtttgcttgtctctctgcattcccacatttccaaaatgctctaagacgaaccgccgtactaaggccaaagatgacaacctaagggcacctcatacagtatttcaaattgaacctgagctaaattgtgccccaaagcgtcaaggctgcccaggccgggcaggggttggccctcctgtgcctcccaggtggtcagggctctgccccctcaacacccccgcccgcagcctgtgcgtcaccctcccggggccggagggggcgggggcggggcgcggcgatgggggctccgccccgaggcggggcgcggcgaccgggcgcggcgacggggcgcggcgggctccctcggggtcccagctggcccgcactcggcggccgcggcgcgatggaggcgccggccgagctactggccgcgctgcctgcgctggccaccgcgctggcccttctgctcgcctggctactggtgcggcgtggggcggccgcgagcccggagcctgcccgcgcgcccccggaacccgcgcccccggccgaggccaccggggccccggcgccgtcccgcccctgcgcccccgagccggcggcctcgcccgcggggccggaggagcctggagagcccgcggggctgggggagctcggggagcctgcgggaccgggggagcccgaagggccaggggatcccgcggcggcgccagcggaggcggaggagcaggcggtggaggcgaggcaggtacgcaccggggccctcgcggccccctccccacccccggggctccggctgccgctgccgttccccgccgagccagggagcggggccgcggcctccagcccaggctgcccccaggaagcgcagaacccgcggcccgcaggaaatgcaggtcccgccatgctaagccgcagccccgcaaactcgccgccctcccccagaaagtgtggcgaggggcgagcccgaaggagtttgtttggaggtgttttgctctcccctcccctcggcctctcccagcccagggcgtgctccgcagctgctggctcccaggcctcgggaccagggcttggaattttgctcctcacccacttctgacccctcccgcccaccggttcccaaatccacgtgcctgtggcttatttccaggcctgccatgagagttatcttgatgtttaaaaagtaggactttcggggggcgagggaggaaagctggcttttctttttcagccaatttgaagtccagatttcagagtcagtgctgtggcgttttgtgaagcccgtgggctgggactgaaagaaaaggcacccgatcccagcagtcctttttattgtcgttttcaagctacacatctaacaccctcctacccccactcccccgggt

SEQ ID NO: 7319 - DNA, 6000 bp, Homo sapiens
cctgctgtgccgggccatgggccttcctgccaatgggagggtaccctgccaaggaaggggtgatcagggaagattccctggggaaggggtgaaggtgtggacctcgctctcaccgccgcagagtcccacagaagcagaggagcaggcaggccagcgggctgaggaggtaggccaggcggatgctgtacacggagctgctctccggccccactcggtacgcaccgtagaagagataggtgttggtgaaggcctggggacagcgacgaagatacccagcccgggtgagcaccaggctctgctcaagtgctttccatatatgatcttgttagcccccgtgcaatccccccatcaggtagggagtgtcccgtcttacaagggcccacagaggttcggcaacgtgcccacggtcacagggctttgagaaatagagccacgactggaacccaggaaccccattggtgaccactcgatggcttcccaggatgagggtggggaagtgcttctcccagaggccggggcacttttccccctttgtccctggcaccgcctacaccagctgggctctgaggaccacgggcatgtgtccatgagtctatgttgggcacagtggcctcagcctctctctaaccccaccaccggccaggccagtctgtctaggtaagaccatcccctgaggagccgaaatgtccctggaggagcagaggtcctcttagacttgtgtcccctgaagccagttccctgggtctcccagactctggaccatagccgggacagacctcactcaccctgccagtcaaaacatgccaaagttgattgtggaacctcaaaacgccaggcggggactggcggctaccagggcactggagggctgttgaggaggaagggggtcaatagagagggatccccaaggcataggtgaggctctgcggctactgctctataacccccaaccctggggaggcctgggcagggggctgaggatgtgccaaaggcgtgccccacacaaggcgaggtcagggagagagagccccggggcctgcacggcaggaccacgcccagcgttgtcgccacgctctgggccctgggccagcccccccatggcgcaggtgggcaccggagcacttcccctggtgggcctcacactcactcaagttcagggtggggcctgggtcaggggggcggagccagaccaggggcagcagcacgaagcttgcggtgagcagcaggctcagcaggttgagtagcagcaggaagcggaggaaggtgaagtaggaccgaattcctgtgccgaagaggcctgcagtgggagagcagggtgggtcagggaggccggggccggggctggggccgcgctgagagtccaagggcgggcccaccggacggcgtggggtgcccgccaggctcccacccgcccgagtccggaggtaccgctgacagtcacctgggggtgctgcgtgggcccgaggtttgcggtgcctgcgggcggaaggggtgggaggggggaggggccgattggtcgggggacccgggtgaaggcaggtgggatgatgccactctcctttttccgatctgggcagtggggctccagagagggcaaggggaggtgcgggtcgcgcgggtcctacccccgatctcgtagagcgccccctcccagagcccaaggccccgggccagccgctgcgctgcctcccgcaggcgcctttccaccgtctgccgccggcgctgccaccgctgccagcgcaaggtctgcacccccgcgggctcccgcagctgcctggacgggggtggtgacaggggcgcccctgagtcacccgccctgcccacccgggccaagcagacggggtgctcccacaccatccgacggggcagcctcgcagcaccccccccacgcaccgtctggcgcccgcgtggcacccaccagatgaggcgcttgtccatcatggcatagggcagcccgcgcacgggcgtcccagagccgcgcagccgctccatctctgcctcccacagctcctccggctccggcaccccaggggcccgctccgatgacaccgaccgcggcagcagcatctcggcgggcacgggtagaggctggggcgccgggctgccggtgggggggatatgagtccccggttggatgagccttaaggccttggctatggcctctgtgcacgctgggctgggggcgggcccttccgtcccctctgcgccggcgtcggggcctgggctcctgcagccctagggttcacttgcccgggtctgccgctctgccacctccggggctcagaaatgagagagaatcctgctgcggtcgaattcgggcccagccccgctccaactctcagagggacacacagccacggcctcagtctccccatctgtcaaatggggtgaaagatccaaagggcacagaaagtctggaccggcacaggcaaagaaagccaagacctgctgcaccccgcatccacctgtgcctgggcccaccgtcaccccaaggagagacaattccctctcttctccacgtggcagtttgcccttccggaagagcctgtgtcccaaaccccacagttcctgggactcggcatctgccacatctgactctggatgtcgggggacccccttctgtcttccttcttgtggtccagcctccagtcccaggtaccccgcgagcccctgatgaggacctgtggctacagccccagccgtggggacaggagcagggacccactgctacccttgcagggctctagctggcccccacagcccctcaccctctgcattctccctccactggacatccagctcacctggggacctagggaccaagtccctggaggagtccccttctcagacgactcctgccaagccaggcagggtggtgagggagcccagaggaggggtcatatgacaggaaacccagcttccctctccactacctccctcctcccctctcaccccatggtttcctctgctttaaactgaggccaagcaggcacttcctgtgggcccctgagatgcagaggtgaaggtgacaggcgtaggccacttggcctcccagggagctctgtgcatgctgggctgcgggtggcccacccttcccctctgcacaggagtcagggcctggtctcctgcagccctagggtccactggtccgggtctgccgcctggctgcctccagggatgtccagcctgcagctgaggccctctctgttcaactccttccagcctggataggcaggacttgacctcgaggcctgagctgggagcctgacatgggtggggatgggaacggtgggggcacaggggccaaactctttatctgccggcctcaccctggagggtgtgataatgacaggatggtgggctccccagaacctggctgctgggtttccagatactcttggtgttactgctgtacttccagcccctgtcattggcgttatggttgtgccaagacccaggcctagcacctggccggtagtaagtgctcaggaattggctccattcatgctctcccaggctagatgtttaagacatatctttgccaattctctgtccttgggcccctgggaagcccgcagcccttcctctctgctccctctctacctgctatagggcccagtcatctcaggtctgaatgttcatagcttttctgcctctctgcccacctccttcctggtttccagagtcctttctgtgtgtcaggcgcaagctatgtgctggtgctgggcacacagtgggctggggtaggagggggcacagaaccacagatgtacatgtcaataggaagtggtaggtgctccaccagggttcaatctggggaggctccccagaggaggtggcattcatgcaaattcagtgtgggtatgcagggagggggaagcagtgggaggagaggcaggggctgggtctccatgccagggtgccacttgccaagaaccagcttggggtagccatctgaggaccacactggcagctccaaaaggccccagccttgacccctgcctggtcctcgcttttgcttgcctgctctcccctgcagcagtgccctctcctgccctcctgggccccagctcacattcaccctgcctgcttcatggcttctccccgccaggaatgaccctcccttccaaatgggcttggggtggggggtacaatctcaaaggcagtttcctccatagagttcccaggtggaccactaagtctcctgctttggctgggggcaccctaaagggtgattaacttctctcagcctcagtttcctcatctgtgaaatgggaatatcagtgcataccttcctggctcatggggaataacagaaaacagggcaacgggtacagcacctggggacagtcacctaagtgtcagcgtgtcctccttttcatcccctcctctccacacagcacacaggaagtgagccagaactcttgctagataaacaatgaaccccgcccaggtgtcaggagtgggagataaccaggctccccccgccggggtcggggagagtcagcaggaggcttgcgggggcggcgggggggggggcgctgcccaatctggagtgagatactctgtgtccctggggctttcggcggcatcttacttggacgatccctaaccatgggaagcagatgagtctggaaatattgcccctttttggaacttggggaaactgagcgtcagaaaaattggggacttcaaccaggggctggaatgaatccagcccagctcagacctcaggaggaggggtcggaagttggcaggggaggaaggcatagtcgccgcggggcgcccggaggagggcgggggcgccgcgggccgggccgggtcacgtgatagccgaggcccgccccccccccccccgcccacgtgggccgggaggtgcggctactcccccggccccggcagacctgcgactggcccagtcgcccctggggccctttgccactcccttggcaaggagagccgagacctcagttcccggcggctcttgcggggcacaggtgagccctggctgcgcgcgcggcccctcctccccggcgcctcccaggtgagcggccgcgatcccggtcccgggtcccgccagccccagctgcttctcctatgcggggacagcggcaatcccccctgaattcctttcggcctctggggccatttggcagccgagttccctccccgggtgctcctggagctcccagggcttgaccctccggctcggacagagctgggagcggcaggggcggggaggacagtgcggggagcaaaatccgcagcccccacccaggtcccccagccgagcgccagggcacggggaggggaggggagggggtgtggccgggatgggaaggggcgggggacagggaggccggctggacgggttcggtggccccagagttgcagccgctctgggctctggggccaggttgcggttctccctgggtagcggctgctcccgggaagctcgctgccggctggggtgggggttcctggaaacgggcgccacccagcctctccccacctagctcaggaatggtgcgcctggaaactccgctggacttgcctgggcctcggggcggagtgctggggcgctgggtgcccgagtccccgggttccctgagcttagaagggcctgtctggaggaagggattccagctctagggactgggtggggcgtcctcagcccctctttcggcagctgtcccgtgttaggctgggtggggccgcctcggacccagctctgggctggttttcccacgtctttgctcctgctggagggagggggtggtgtggggcctgggcccgaagatggcacccaggacactgagggagggcgccgtccggtcctgtgactggcacccctgcaaggagctgctctgtcggggcgcccccgggctttgcctgtccgaggaaagcgcccttcaacccggccgactttgagccctgagttcctgagggtgagcgcaggaggagtccagggcagaggccggcaggactcgctggtggctg

SEQ ID NO: 7320 - DNA, 6000 bp, Homo sapiens
tgtagtttatttaaaaggtaaacaaaaatctttcattatcttttaatattacatgaaaatcttgttcaagagagaaagccaaatttcatctttgcatgagtgtactattgatgtcaaattcaattcctagtaaaactttacagacaaattttcctaacttcaatcagtttgaccataatgtaagattttcataaagcttttataaccctttacaattttttttgttaaagagtagaccaatgctctaagaaaaccctgttgtgcttttattccaatgttcaatttatggaaaaaccaaataatactcctttaactttagccaatatgttaacacagagaattgcttttacaagattagactttcacaaaccttccacgacttgcttagaccttccgctttctcctatctaagaacaactctttaaacttccaaaccaggcaaaaacaccctgccttcccatgccttcttataatcttttaccaaacacacattatactttccttacacactgtgcatgtaaaagtgttcctccagtaacctcagttacatatggtacaatgttaactcttagcaacttttatttttggcgaaaaatttggtaagtgattttatttgtgtaccaggtgtagagcttggggcaccagacaaaagtgcagataaggtctgaccccttccagcatagctaggggcatggctaactccatatgttcccaggccttacatagacgctaatggctccaaagaaggtaaattgaacaattatcaaaagtcagagaagtagtttagtaaacctagtatctgacctgcctaatttagaccaaatgtctaaatttcaaagacatttttattttaccaataatctttaaaactgccttgcttttccaaagatgactaaagtcatgtgaacaaaaaggcattagcattttaatttttctggcaaaatattttatttaagtgcttatttttatttaagccaattaaatagagctcttttatatattttggttgtaaaacatgactcacagggatggtacagaccaagagaaaatacccctccatggtcacaagtcaagctcccaaggacataaaacaagacgagggggaatcctcatccagtttttgtttcagtgacctgaagcaaagttgtcaactgaccagtttgctgggccagcttgaatagtgggcttacaggggtcctagggccacattctatcctatgataccccttttatgacagaatgacacagaaagccaaattcatagcacaaagtacaccagattcatcacagcctaagactagcctcacaaatcctttttcccattcatcaaaaccttgcagaggagacagtgatttttaccattcactcaactggtttgcatagagagagagagaccaaaggcctgactggtaagaaattcttacccttttgccagcatgccaggtttctgggatccctttccctaagcagccctcgtgaccctgctcacagcaccataactgtgggggccaagccacatcgcaaagcaaaaatcacccttttccatttcatggaaccataggaaaagcctctcaattttgcaagatgctacacaacaagttgcatggaggaatcgaatcaacattttccattctggccagaacaaagtgcacttgacaaaacacagacactagccacccccctcagcacccaatatcgacctggcaaggctcaaaacttcccccattggcccctgtagtgtttaatccattcaaagtgggggcggaatgactgccaaccaggagtttcaacaggtggtttttgggcaagatggaagagtagatcatcacccagagtgacagagaagacagacaagggaaaggcgagaacgagagagaggaaagggaagggagaagagtgttgcctgtggtgggttgcagaggtgaggagctcacagaagccagagaaagacccatccatcacagtgacactgaatcaaaagttcagacagctgcttgtcaaaaagggatcttttccagcagtcccatcagctctcaagttttcccctttgggggaggaaaaaaagctccccaggtcccatgatcctgcacatgcctaatcttgtcacccacagccatcagcaaagagggcatggcaaattaatccaaatagaatggcggttaacatcctgcagtgctgaatccatttttaaccaagagggctcttactaagggtggcctctaacattctgaagttgagccttcaacccaagtttgaacaagcattcttgttctttacaaagaggggcctctaactccctgtgtcttaggagggactctaactctcctaatttgggcctctaacccaattccatccattaccctggataaaataccccaccatgtacccaaagttggtcaactggtgctgaagtctatttcccttgggtcagaggtctctccagtgttgtcccttcatggtttctcagcaagatgttatcagaaaggggttccagtccaggccccaagagagggttcttggattttccacaagaaagaatctggggcaagtccgcagagtaaagtgaaagcaagtttatgaagaaagtaaagcaataaaagaatggctactccatgggcacagcagccacaagggctgctggttggctatttttatggttatttctcgctcatatgataaacaaggggtggattattcatgagttttctgggaaaggggaggagatttccttggaactgagggttcttccccgttagaacatctagggtaacttcctgacgttgccatggcatttgtaaatcatcatggtgctggtgggagtgtctttcagcatgctaatacattataattagggtataattagcagcaaggacagccagaggtcactttcattgccatcctggatttggagggttttgaccagcttctttactgcatcctgtttcatcagcagggtctctgtgacccgtatcttgtaacctcctatctcatcctgtgactaagaatgcctaatttcctgggaatgcagcccagcaggtctcatttacccagcccttattcaagatggtgttgctctggttcgaaggcctctgagagagccactggatctctcaattattgcatacagttttatttcattttataaaggttaaaatagacagaattaaacaatatattgtttagggatacatacctatgtgctaaaattataaagtaaggcaacagaatgattaacacaacattcagtattgtggctaccacctcttgggggtagcagggagtacagaacaggaagaacctggagagttttaaagatgcaggaataatgtgttatttcttaagctggaaggcacatgtggatcttttagaaaataaaagattcaaatataattgtcacatgcgtccatgtgaagagattccaccaacgggccttgtgtgagcaacaagactgtttatttcacctgggtgcaagtgggcggagtccgagaaaggagtcagcaaagagtagtgggattatcattagttcttataggtttgggataggtggtggagttaggagcaattttttgtgggcagggggtggatctcacaaagtacattctcaagggtgggaaaaatattacaaagtaccttcttaagggtgagggaatatcacgaagtacattatcctaagggtggggagggtgtattgtcataaggtcaattgatcagtgagggtggggcaggaacagatcacaatggtggaatgtcatcttttgtggttcttcagttgcttcaggccatctggatgtatatgtgcaggtcacaggggatatgatggcttagcttgggctcagaggcctgacaataatgagtattatgtgagacatggttgggactcagtttagcatgacaagaaacattaatgaattcaagaaaggtttgtctcctctccaaaatcaaaaaccaaaagtgcataacagtgtttagcacatttctatttagttaaaggtaatttaagatacgtgtttatgacttgtttggataccatataacatctagtgatcgcctctgggcagggaatacagaacggcaatgggaggcttatttttcattgcgtaccatttatataatttgaattcctcctcttgtgtatcttttactgaacggaaggttttgagagagctgggggaagtagctggtatcaagcaggaaagctgaaggtgcagatgggcagggggctggtgcacccttctgccaagctctcctgccagaggctccacggccaccaggcctttctcagaactttgggatggaggagggcggggccggggaagccttttaacagagtgccctaaaatatctcgggggctagggctacggaggggaaaggagaaatcagagacccttgtttggcaggtttgtcaactgcagattttttgcagggaaacaccccaccgtccccaccccaggacactacagccttagacctccctgatcctggctttggcaactggtcagcagcactctggaggcggctgttttgaagggccaaggagaggggctgcctgagaatgaggatggcagaaaggggcccacggttttccgcctcccaagactacgagggtcgggaggcccatgtaagggggccctcgctcggagaatgagaacttccctccctagtagccttcacccccctcaatgcctcccaccccaaaagatctgctgggcccacgttccagcgcaacgcggtggaagacggccctcatgtgccagtgcggaccctcgcgcccctccagcctgcagccagccggccgctcctccagcgcgcaggcgcaggacggaaaaaaaaaacacaaaaaaacaacaaaaaaaaaacccaaaaaaacacaaaccacagctcccagcagccctcgcgccgtccgcgcgcagccgcagagcagaggctgccgggaacgcgggcccagaggcggggcgagcgcgcgcggggcggaagtcggccaccttcctccgtcccggccgttagcccagccaagcccagccaagcccagccaagccccgccgatcgcgggcaccggagccagccccgcagcgggtgagtgactgcgcccgcggccgccggcgccctgccccagccacgggcccggacccccgtcccggagcctgccgccgccctccgaccctgccgcgtcccgccccctgacccgtcaggcccccttcccgtcccacccgtgcgggatctctgccccctgactcgcagactgggctgggactctgccctctgacctgtgggaaagtccccttcttccgacaggcggtggacaccaccccctctgacttttgggacacctcatccctgggactagcgtggggaccattaccctctggttagtgtgggcacccctcctctctaattagtgtggggaccattcccctctgattagtgtgggcacctcccccctctgattatgtgactcctccccgctctgattagtgtgggacaccccccttctaattagtttggggaccatccccctctgattactgtggggcacctccccgctctgattagtgtggggaccacccccctctgattcatgtggggcacctccccctctggttagtgtggggaccatccccctctgattagtgtgggacgcctccccgctctggctagtgtggggcacccctcctgggaatgaccccctcccaccaccttctgacttcaaatacccctcctctggtctatgcagggtctccttggactgataagggaattttctccctctgactggcacttggtcaaacctgtaacaggccaaccttccccaccccatcccagtccttgctctccctgccctcatccaatttggagccttcctccaggcacacagctcactctcatcttcctgcatgcaaatgattcgccctccccaccatacctgtctcacacccctactgccatccggtctggattctctcatccttggagactggtacctccttgccagtccatgttgc

SEQ ID NO: 7321 - DNA, 6000 bp, Homo sapiens
ggccgagcctgggataccctgagcatctcaatagtgagtcaggggtcctgacccacagaataagataggaaccctgagcccatactgctggaggctgaccgaaagctcactaaggcccaggatactcagcgtggaagacacccccatccccacaaagcattcaccaggtccacagaagaggtggctgcagcggtgaagcctagcccagcaggcgacaggaaactcaagagccctgggtcccacggccactgtgcaccacagatgggatgcagtgtccaaaaggcttcacttctgtgacagggacacatggcctgaatctcagcgtgacggtggccggcagcattgcggccccctaaggtgtgcacccctcataccggaacccgtgaatgtgacctcacttggcaaaagggactttgcagatgtgattaaggttagaccttgagatggcagatgatcccagattatccagatgggctccatctaatcgcacgaaaccttagggttggaaaaccttcctcagctgggccggagatgggacaggaggactggctcctctccatggggaagttagggaaaggggctgtgagccagggaacagaaggccttcagaagctggggacagcttcagggggcagccggcaagaaaacaggaaccttggtcctgcgaccctaaggggctggactcagccaacaaccaaagagcaggaagccagctgtctcccggagcttccagaaggcaggcagcctgccgacacctcgatctgtgctggacttctgacctccagagcccatgcgtaacgaatttgtgttgttgaagctgcttagtttgtggtaatttgtttaatgaaaaactacagcaatgaggagacatcaaacccgcatcgaaggacacagagttggttattatcgagcaccgaaattcctcagaacggctaaataggaaaacaagcaaaaatgagtaagcatttcacagaagaaaaatggacaataaaaatatgaataaataattcacctaatttgtaataagaacaaattagagccacaaagagattccatttcattcaccggactggccaaactgacaataaccaaatgttggagcagaggcccacaagctaagccctgaggccgcactgggccagctgctgtttttgtaaataaagttttattggaacacagagatgcccacttgtttacatattgtctctggctgcttctgatctgccatggcagaactgaatatttgtgagaccatttggcactgcgagagactaatgacacaactgaatatttgcgagagaccattaggcccgcaaagcaaaaaatatttactgtctgactcttaatagaaagtttgccaacctttgctgtaaaccaggaagagctcttatagctactttgaagagcaatttggcaagatctagtaaagtcatttaggtatgcatacgcatactctgcagttccacttgtaggtgtttaccctagagagacttgaacaaacacacgttcaggagacaaatctgttcactggatcactgtctctgaggcaagtgactggacacaactcaggtgccctcggcaggagaatggatgcggatctgggctatttaagtaacggagttccacagagcagcaagaatgagactcagagcacatgcaacatgatggcaattcttgtgaacaaagttgaactggccgggtgtggtggctcatgcctgtaatcccagctctcagggaggcagaggcaggaagacggcttgagcccaggagttcgagacctgcctgggcaatacagtgagaccccgttctccacaaaaaggaaaaaaaaaagacaaaaaaagaaatttaagtgtgacaaagttgagtgaaaaagaaagttgcagaatagcacatatatgtaattcaattcttacaatagtccaaaatgcaaaggtgccccatcccaatacactactgaactaggtaggctacagctttgggttcatgaaacagagtccaaaatcatggtgagcgcaaggagcaggtttgtctctccctcccagagcagctgggaggaggtagtcgtggatgggcatggtggcttggctccatgagttgtccagggatccaggatccttctagcttggtgctccactctgccacggtatcacccttgtctgcactgtccgagatggcttcctaccatcgtgtctaggttccaaacagcatgatgaaggagcggcagaccccctcctaagaaatgacctagaagtttctcctgtcatttctgcttcttattgtccaaaacttggtcacatagccagccctacctgcaagggacactggcaagtgtattctttttttttttttttgagacggagtctcactctgtcgccaggctggagtgctgtggcgcgatctcggctcactgcaacctccgactccctggttcaagcgattctcctgcctcagcctcctgagtggctgggattacaggcacacaccatcacgcccggctaatttttgtatttttagtagacagagtttcaccatattggccaggatggtctcgatctcctgacctcgtgatccacccaccttggcctcccaaagtgctgggattacaggcgtgtgccaccgcgcccagtcttttatttatttttttgagacaaagtcttgccctgttgcccaggctggagtgcaatggcacgctcttggctcacggcaacctctgcctcccgggttcaagcgattctcctggctcagcctcccaagaacctgggattacaggtgcgcgccaccacgcctggctaattttttgtatctttagcagagatggggtttcaccatgtttgccaggctggcctcaaattcctgacctcgtgatctgcctgcctcggcctctcaaagtgctgggattacaggtgtgagccgccatgctcggctggaagtgtattttttatcctaggcagtcatacgtgcaggccaattcctattaatttggaaaatggaataaacgaatattaagagacagagagtcagctgggcgcagtggctcacgcctgtaatcccagcactttgggaggccgaggtgagcagatcgattgaacccaggagtttgagaccagcctggacaacatgacaaaatcccatctctacaaaaaaagtgaaaattagctgggcatggtggcacacacctgtagtttcagctactgagggcctgaagtgggaggatcactttagcccaggagggaaaggctgaagcaagctgagattgtgccactgcactccagactgggtgacagagtgagactctgtctcaaaaaaaaaaaaaaaagagacaaatagtcttccccataattgtttagggatatatccatatatggtaaacctttaaagaaaagtaatgaattgatggaatctggattgtgatgtctcaggatagcagggaagaggggaagaaggtgctggaactggggaggaactgaaagggaggatctaagtcttcggtaatattttgttcttaaagctcaatagcgggtccatggtatttgctatttgtgaaaacatacatgtaaattgcccagcctacctcgcatgcataacatttgatgaaaattacataataaaaaggaggttatggaatgtgtatgccatttcatttatataaaagtaaatgggctgggtgcggtggctcatgcctgtaataccagcactttgggaggccgaggtgggcggatcacctgaggtcgggagtttgaggcaagcctggccaccatggtgaaacctggtctctactaaaaatacaaaaattagccgggtgtggtggcgggagcctgtaattccagctacttgggaggctgaggcatgagaatagcttgaacctgggaggtggaggttgcagtgagccaagatcacaccactgcatatacagcctgggcgacagagcaagactctgactgaagaaaaaaaaaaaaaagaacgcaggcatttgttattttgcctgcgtatttaattagtctttacccaggcatttcctcctgttctcctgaaggtggggcacagccttacttggtggctgcactgccagtgcctgaggaacgggcctctgttctaagacacctggtcctgcaggtgctgcagacacggcctcctttcctccgccgtcctcccccagcagcctggaatcacttgctgcttcccagccattcggtctacgcgctcattcattagactcagagtgagcagctaggtgccaggaatccacagatctatcgggacccttctctgttctctcctctccccggtctccatttctacccgaggaattctcatttgtccttcaagctccagcctagaagccacctccttctggaagccctcccgggtttccctgttcatgtaagcctccacctctcctgtcccctccaggaatgtcccttgctcttttcgtgtgaaaaggtgaagttcaacattgccactgatctgggcgcagttcggcagggcaccgcctccccttggagctgtgtggccttagcggagtggccgagcctctctgtgcccagcgtttcattcctacctcctaggtgctaattcctcacaacagactatttttcggctgaggcagtcagggcccccgcccccgtgccctggcgccaagcactcgccccagaatcggtcctgggaataaaggtcaaaaaggaacccttaaacccgctcctccccggaaggcacagcgcctccccttctctccagcccgcgactgcccatccaaaccgaggcctcgcggggcgagtcccttgtcctccagctcgttgaactggggccccgggcacaggtcggctggaccagcttggcgaaccggacagctgcgagaccctcaggtgcccaccggcccagtttccgcccgcccctccgggcccgcctctcattggctcgcgtcccaccaaaccctaccccctggccgtcacttccgggcaacggagcccgtggaaggcggaagtgtgagcgccgcggcggcagctgagttgggctgaggtgtccctagctggctctgcggctcttccgggtctgggctcggagattcacaggcggcccgcgaggccgagcgagggacgcatggccctgaggcggccgcagggcttggcggggtccggaggttgacctcgcccccgcagccggccttcgaggctgcctcctccaggcagcctctggggcccgcgcccgcgcctgctcaggctcccgtgttcaggctgcccatcccctccccaccggcgtcccggacgttgggacctgtgaccgtggcctcgggctgggcttccaaagccggccgcagcccggcgacccccgaggcctctcgccccgggcccctagacctctcactatgaccgcggccgccgcctccaactgggggctgatcacgaacatcgtgaacagcatcgtaggggtcagtgtcctcaccatgcccttctgcttcaaacaggtgagtccggtgggcccggagatcaccgccctcgcctcccccgcagagggggcgtctggctgggtcgtcctggttaaagttcccgccggggcagggcttcgctgggcgggtgcaggcggccgcgggcggggcgaccctctgggtcccggcgcagttcccgtagagaatccgtggatgagaagcgcacggcgttggccctggcagcccttgtcagcccgggccggaaagttccccacactcaaaaactcgataccgaagcaaagtgtaacaaagcaaaatgatcctccagaatcggaagggaacggtgggactccgtatttttacattttatcgtgtttttaaaaactctgacccaactgcacctgtcttcagaagcacacaactcaccactcccaggcttcgacactagatagggaccttggttgcaaggtgattaaaaacatccaccaggttatacacctaagatctgcgtttcacaaaaaccgcacatttggcagggggtggtggctcacacctgtaatcccagcactttgggaggc

SEQ ID NO: 7322 - DNA, 6000 bp, Homo sapiens
tgcagggtcagcagccgctccatcagctcccaaccagggaatcagaccctggtaaattggttcacaaccccaatcccaagagacccatgggcagccccagcgccaatctatcccccggcttgttcactgcacgaatgaaacagcgtccccccaccagatcacctccttgtttttgtttttgagactgagtttcgctcttgttgcccaggctggagtgcaatggcgcaatctcggctcactgcaacctcgcctcccgggactacagatgtacgccaccttgcctcactcatttttgaattttttttgtagagacagggttctgctgtgctgcccaggctggtcttgaacccctggactcaagtgattctcctgccttggccttccaaagtgctgggattacaggctggagccactgtgcccggactcagccaccaacactcagcagtccaaagaggtggtctgggtggtgcagcacagcaggcaatgtactgatggagcaggcagagggtttcaggcgcgcgtgagacgcctgggtgggagcacaccgggcaagttttaggaggaaaggtcacctggctgtgtggggcaagcggagatgggggtgggagggaggtccatgaggtgacagggctggatcaggtgaggccttgaaggccactctgagtcttcagatcttcctcggagaagtgggatatgctgcaggtgggaagtcggggcgaggaccagagctgcaggctgagcttctgggctccagcttcccttcacctccccaaaggtgacaaacccaacctcatgggccctgcagcagctccacagccagggtcacggtcacagggactgtccacggcctccaactcagtctgttctaaggatgggtaacctttttttttttgagacaagagtctcgctctgttgctgaggctggaatgcagtggcacgattttgactcaccgcaacctctgcctcctgggttcaagcgatgctcctgccttggcctcctgagtaactaggattgcaggcgccacacctgactgattttgtatttttagtagagatggggtttcaccatgttggccagtctggtctcgacctcctgacctcaagtgatctgcccgcctcctcctcccaaagtgctgggattacaggcgtgagccaccacgcccggccaaagtctgggtaatcttttaatgaaacgatcatcatctaccactgttatggctgaattgtgccccttacattcttatgataaagttctagccccccggacctcagaatgggacttggagacagggcctttaaaggccattaggggctgggcgcggtagctcacacctgtaattccagcacttagggaggccgaggcaggtggatcatgaggtcaggagattgagaccagcctggccaacatggtgtgaccctgtctctactaaaagtacaaaaaattagctgggcatcgtggcgcatgcctgtaatcccagctacatgggaggctgaggcaggggaattgctgggacccaggaggcagaggttgcagtgagccgagatggtgccgctgcactccagcctggtgacagagcaagactccatccctaaataaataaataagtgccattagcgtgggccctaatccaacatccttacaagaaaattgggacacacggtgggacacatggagagacacgaggaatgtgtgcacagaagaaaaaacatgtgaggtctcggggagaaggtgccatcttcgagctaaggagagaggtataagaagaaacctggctgggtacagcggcttatgcctgtaatctaagcactttgggaggctgaggtgggtggattgattgaacctagtagtagttagagaccagcctgggcaacatagcaagatcccatctctactaaaaatacaaaaagttagccaggtgtgattgtgagcacttgtggtcccagctactgaggaggctgaggtgggagtatcacctgagcctgggaagtcgaggctacagtgagccacgattgtgccactgcactccagcctcggcgatgggagtgagaccccagtcttttcttttttttttttttttgagacggagtcttgctctgtcgcccaggctggagcgcagtggcgtgatctcggctcactgcaagctctgcctcccgggttcacgccattctcctgcctcagcctcccgagtagctgggactacaggcacccgccaccacgcccggctaattttttttttatttttaatagagacagggtttcaccatattagccaggatggtctcgatctcctgacttcgtgatccacctgcctcggcctctcaaagtgctgggatgacaggcgtgagccaccgcgctgggatgacaggcatgagccaccgtgctgggatgacaggcgtgagccaccgcgctgggatgacaggcgtgagccaccgcgcccggccaagaccccagccttaaaagaaaaaaaaaagaagaaaacaaaggagaaaccacgtctactgacaccttgatctgggattctagcttccaggactgttaggaagtaattccaggccgggcatggtggctcatgcctataatcccagcactttgggaggctgaggcgggtggatcacgaggtcaggagatcgagaccagccttaccaacatggtgaaaccctgtctctactaaagatataaaaattagccgggcgtggtagcgcacgcttgtaatctcagctactcaggaggctgaggcaggagaatcgcttgaacccacgaggcggaggttgcagtgagctgggatcgcgccattgcactccaacctgggcgacagagggagatccgactcaaaaaaaaaaaaaaaaaaaaagaaaagtaattccaaaccaccacccagtctgtgagagattttgttatgttatattttcttataactgagataattattacagttaaagagatcggacttaactgaacccatcttgcttctaacctccaagctgtccttgttcattcctgggtgtaggctgaaataacttcgggaggcgcttagtttatagtttagctttgaaacaaagatggtaacagccctttgcaaaacaaactcccttcctacctggggacaagactgccttttcaggactaacaaattagccataagattagaaattatggtttaggagtcatgtagctggaggctacaagattctaaacctcccaaattgcttctcaggataacatcactattaaaaaacagatcagcgcttgagatattttgcagactctgcactccatggatcagctggcaccacccagattgataaactggctcatatcttgtggcccccacccaggaaccgactcagcacaagaggacagttttgactccctatcatttcacctctgacccaaccaatcaacactccctactttctgaccccatacccaccaaattatccttaaaaccgcggatccccagccgggcacggtggctcacgtctatagtcccagcactttggggaggcccaggtgggcggatcacctgaggtcaggagttcaagaccagcctgaccaacatggagaaactccgtctctacgaaaaatacaaaattagccaggcatggtagtgtgcgcctgtagtcccagctacccgggaggctgaggcaggagaatcactggaacccaggaggtgaaggttgcagtgagccgagatcgcgccactgcactccagtgtgggtgacagagtgagattcggactcaaaaacaaaaaaaaacaaaaaacaaaaaactctgatccctgaattctcaaggacactaattttttttgagtagtaataaaacctcagtaacctgtacaagctggctctgtgtgaattaaactctttattgcaattcccctgtcttgataaagtctaggcagtgggcagggacaatatgttgggtagttacagtggcaccctgagcaaactaatacaattactaacataatttaatcaattaatgtaatttaacatagtttaaaaaaactgtcacagtaattgtgatgttgtgaaatatgtatacatttagtcttccggtttcctggtatccaactccaaaaatccttagaatctgtgaagtgacgtcttttttttttttttttgagatgaagtctcactctgtcgcccagactggagtgcagtggcaccaactcagttcattctaacctccgcctcttcgcttcaagagattctccggcctcagactcccgagtagctgggattacaggtgcccgccaccacgcccagttaatttttgtatttttagtagagacggggtttcaccacgttggtcaggctggtcttgaactcctgacctcaggtgatccacctgcctcggcctcccaaagtgctgggattacaggcgtgagccaccgcgtatggcctaattttgtattttgagtagagacggggtttcaccattttggccaggctggtctcgaacttttgacctcaggtgatccgtccaccttggcttcccaaaatgctgggattacaggtatgagccaccgcgcccggcctgaaatgcagtttaaactcgtttgtttttcttatgttaaatttaaaaaatacttaaaaaaaaaaacatgaaggtgtgatcctgccttcctgaaattgtttctctacttacctgtgcatggagagaagtttggaatgctgtttccccaattataatacgctataatacgcagcagtagttatttttgggtgagacttcggatgctcgtctttgcttcctttttggactttcctgtgccgcttgggtttccgaggacgagcagaagtaatctcagacgcaactttccaaaatcccctcctccagttgcagggatggcgggggcgggtcagcggcgccgccctgcgcatgcgtcgagccgttggtggggccggaacctggtttcccggcctcgcgcccgaggggagcgtattgagcgaggcaccgggacgtcggcggctggcggagccgggcgggcgaagctggagcggcggtggcggcggcgtagggaggccggggccggggctgaggccgcggccgggtctgcgaggcccttggggcggcaggcggcggcggcccggggctcgagcccggaggcaggagcagccgccatggccgagagcatcgtgagtgcggcggccgggcgggagcggggacgccgggatgaggcagcagatttgccggcctcggcctgtgggggaggcgggcctgccggcgccgcgactcggcccctttctcttctctcgccagggctttctctgtagtggctgggcccctctcggggactttcacccccctcggctgcttcccgtccgtgtccctccccaggggacttacgaccccggttccccgccctgggcagggaaaggccgagcctttctaagcagggagaatggactgtggcgaagagaaaccgccctccttccccacccgtttcccggctccaggagacttcctggtctaattccagggactcccagccagtcctgcccctctcagagccagggacacctcttatcctaatctccctctgattctctcctcctgctctcccgcttcccagcaagtgccttgtcatgagtcactaaggagagcagctctgcagacggggacgttacagagctccctccccaccagaagacctgggaaaatgaaaacacagtaacttgccggctttgctccttacttggaaggacaacttgacaattcctctttaaaaggaatgttgtaaatgatgttgatttcactttttacctgaaattgaaattgtcggcccggcgcagtggctcacgcctgtgatgtcagcactttgggaggccgaggcgggtggatcacctggggtcaggagttcgagaccatcctggccaacatggcaaaatcttgtctctactaaaaatacaaaaaattagccgggcgtcatggcgcactgtaatcccagatacttgggaggctgaggcaggagaattgcttgaacgcgggaggtg

SEQ ID NO: 7323 - DNA, 6000 bp, Homo sapiens
gagggctgggagtgtgcctgggggtgggggtgtgcatgagcacgtatgcccgtgagtgtgaacgcacgccccagggcagagctgtgggcacgggggcgcgcggctcacacaggcacctccttcctccccctgcagaagaagttcttcctcctagaaccccagatgaaggtcgcagccctcagagcgggagcccagcagggcctgagcagagcctccgctgaactgtggaccccagactccgagcccaccccaaggccgctggcactggtgttcaaaccctcaccacttggagccctggagctgctgtccccccaacccttgtttccatatgccgcagacccatagccgcctgcaaggcagagaggacacaggagagccagccctgagtgccgaccttgggtggcggggcctgggtctctcgtcccacccggagggcacagacaccggcttgcttggcaggctgggcctctgtgtcacccactcctgggtgcgtgcagacccttcccctccaccccccaggtcttccaagctctgcttcctcagtttccaaaatggaaccacctcacctccgcagcacccgacttaccaggacgcatgcccctccctctgccctcatcaaacccacagacccggactccctttctgccaccccaggctggtccggccccaggtgtggggtccgctctctccactcccagggctccgcgcccaagtgagggggcccctgccggagcctcagacacactccagttcagggctgtggggggccttggccacatacctgtcccttggctatgagcaggctttgggggcccttccgcggcagccccgggggccgaggtagggtcgggggcttagaggctgggatggctcctggccccaccgccagggggcagcgcaggccgggctgggaggcggcggcggcggctcgggctggggggtcaggtggacgccgccctccggggctggacgcgcatccctcagtccctcggccacccgggggtcgctccctcgtgcccaccgcacctgccgagcctctttggacccagatctgttcatgcttttgtcttcgtcactgcggcggggccctttgatgtcttcatctgtatggggtggaaaaatcaccgggaatcccccttcagttctttgaaaaagttccatgactcgaatatctgaaatgaagaaaacaaaccgactcacaaacctccaagtagctccaaatgcaatttttaaaatggaaaacaaaaatctgaaagaaacgtctttagtggctttaagccccaaaacgtccctaaggcgtcctcgagatgaagacgggggggagcccccagccaggtggagaccccgcagggacgcggcggcgcccggtgaccgaggcctcgcacagccggccgccctgagggtcgggccggagccagggtccaagaggggcgcgtttgtgtctcgggttaaaataaggttccgtccgcgtgctgggtcagaccctgttctgtgggcacagcgcccgggacccccgcacgggggtcacacctgcctacacaggctgaagagcattggcgtgtcttcaggtcaaagtttttctttctcttttttcttttctcttttttttttttttttttttggagatagggtctagatctgccgcccaggctggagtacacggtcgcgatcacggctcgacctcctgggctcaagcgattctcccactctggcctcccaaagtgttgggattacaggcatgagcccctgagcccagcctcaaagtcactttgaaatcggtagtgcggtcgccatgtcccctgcgcacccaggcaggaaacccaggaggagagcctggggctggagtccgtgaggattttcatcttttcctggtggcttatctctgcttctgttttccctactgggatttagtgctggtcctcacgctgccttccccctccgtgtgtggaagtctgtgtctccctctgcagcccccaaccccacccggccccatgctgtcctcagacacaccaggcacgctctggcctcagggattctgccctactgatcccgctgcgtggaatgctgttccccggggccccagttggtttcacccacggcccgttcctgggttggcctttgagggccacacccacaccctgtgtcctgctggctgtccacctggcctccctgaggtcagctccaggcgggagggctcctggtccacactgccccctgctcctggcacagacgctggcataaagacgcccggtgaacgttggtgacccaatgcatgcatggagcaaaggccagaggaggggctgctccggcaagtgctgttacccaccgcctcgagccacagccttgctagggtgctccagggtctctgcgcaagattctgcccccaaaccctctgtctctcgtttatggagagcctgggggaggaaaaccggctcccccaggaccctcggcccagcagaaaacctgcaccaccccacagccccacccgtgtctccgcaccggctgctgtggctgggacttctggggaaggagctcagggctgcaggtccgtgtgtgagtcacgggcacacatctctgcacacacgcgtgagtcacgtgcacccttctctgcacacacacgtgtccacatgcacccgtttctgcacacacgcatggagtcgcgcacccgtctctgcacacacgcatggagtgacgcgcacccgtctctgcacacacgtgtgtccacacgcacccctctgcacacatgcgtggagtcacgcgcacccgtctcctcacacacgcgtgtccacacacacctgtctgcacacgagtgtccacacattcccgtctctgcacacgcatgtccacgcgctcccgtctctgcacacacacgtgtccacacgcacccctctctgcacacacacatgtccacacgctcctatctctgtacacacgcgtggtcatgcacacccgtctctgcatacatgtgtggagtcacgcgcacccgtctctgcacacacgcgagtcacgcacacccgtctctgcacacacacgtgttcacatgcacccgtctctgcaaacacgtgtggagtcacgcacacccgtctctgcacatgcgtggagccatgcgcacccgtctctgcacacacgcgtgtccacacgcacccgtctctgcacacacatgcgtggaatcacgcgcacccgtctctgcacacacgcgtggagtcatgcgcacccatctctgcacacacacgtgtccacacgcacccgtctctgcacatgcgtgtccacacacatccatctctgcacacacgcgtgtccacatgcacccgtctctgcacacatgcatggagtcacgcgcacccgtctctgcacacacaagtgtccacacacccgtctctgcacacgcacgtccacacgcacacgtctctacacacgcacgtgtccacacgcacccgtctctgcacacccgcgtgtccacacgcacccgtctctgcacacacgcatggagtcacgcgcacccgtctctgcacaaagtgtccacacacacccgtctctgcacatgcgtgtccacacacacccgtctctgcacacacgcgtgtccacacacatccgtctctgcacacacgcgtggagtcatgcgcacccatctgcacacacacgtgttcacacgcacccgtctctgcacatgcgtgtccacacacacccgtctctgcacacacgcgtgtccacacgcacccgtctctgcacacacgcatggagtcaagtgcacccgtctctgcacacacgtgtccacacacacccgtctctgcacacgcacatccacacgcacacgtctctgcacacgcacgtgtccacacgcacccatctctgcacatgcgtgtccacacacacccgtctctgcacacacgtgtccacacgcacccgtctctgcacacacgcatggagtcacacgcacccgtctctgcacacacaagtgtccacacacagccgtctctgtacacgcacgtccacacgcacacgtctctgcacacacacgtccacacgcacccgcctctgcacacgcacgtgtccacacgcatccgtctctgcacacacacgtgtccacacgcacccgtctctgcacacacacgtgtccacacgcacccgtctctgcacacacatgtccatacgcacccgtctctgcacacacacgtgtccacacactcctgctcatgtgctgcacctactggctttgggcaccaacgtcaacgcttcgtcattgtggcgggaggccctcaggacagagaagtgccccctcccagaggactcagtcaccctggggtcagagcccaggcacaggtctccctcagcccctgaagctgggcactgcggcctgacgcactcctcccagggaggtcgggaaacctcaggcctggaccatacctcagacctcccgcctccaggacatggaacgcagagccacggtcagctggtcggctgcagcgttgggtgcgggtgcaggcccaggctccttccccacggccaaaccagggggtgccaattctggcctgccctgtgctcctctgcactgtgtgggtgactcatgggtcatgggtggctccagatttctgggcataaattgggtcccagcagaaagtaccccagaggaccaggcaggctgggggccagctctgccgctcacttccagaccctgccacccgtccccagccagggagtcccttctctgtcctctggtctgccccgccccaggccttgacctcctccctgtggagatgcaggggcagtgggggatacagggacgccctgctctcagggcagctctcagggaggcagtgctggggaggggtaggtgagaccgcccctcccaccgggcccacagcaccaccctggtctgaggcaccgcctccaggaagccctctctgagctctgagcgcctgcggtctcctgtgtgctgctctctgtggggtcctgtagacccagagaggctcagctgcactcgcccggctgggagagctgggtgtggggaacatggccgggcctccgaggctcctgctgctgcccctgcttctggcgctggctcgcggcctgcctggggccctggctgcccaaggtaagagcttcccaggctctccatggccacagctccagagctctccctgccccatgagctcagagcccccagtctgagccacagcacagcccccaggaagcgggtggggtgctgagcggcctccagtgtctgaggactcatttaagagaaggaaaaagggtggaccccggtggggagtggccggggctgtccaggcagggccgctgctttgggaggaagaagcccacagtctcggaacacgaggacagcacctcccccaacaccacagccggtgcccagatctgctccatgccccgtaaggcaccgtgtctttggcgacatgtcagccctgggctgtctcagggccccaccatccccaccactgtcccctgcagggaggacattctctgtccttctggccagactgatggtgacagcccaggtcctccccagaggtgcagcagtctccccactgcacgactgtccccgtgggagcctccgtcaacatcacctgctccaccagcgggggcctgcgtgggatctacctgaggcagctcgggccacagccccaagacatcatttactacgaggacggggtggtgcccactacggacagacggttccggggccgcatcgacttctcagggtcccaggacaacctgactatcaccatgcaccgcctgcagctgtcggacactggcacctacacctgccaggccatcacggaggtcaatgtctacggctccggcaccctggtcctggtgacaggtagggaatgtgcccatcccagacccccctcccaaccccagctgctggccaggctctgctcccccagcccttgtcgtgggaccctccctcctacatgtgcctgaactgttccagctcccagcccactgcccccagcagcctcctagatagctgcccctcct

SEQ ID NO: 7324 - DNA, 6000 bp, Homo sapiens
gcactccagcctgggcaacagagcaagactccatctcaaaaaaaaaaaacattagcccattaccccggcatggtggtacatgcccatggtcccagctacttggcagggtcgaggtaggaggatcccttgagcccaggagatcgaggctgcagtgagccatgatggggccactgcactccagtttgggccacaaagaaagaccctgtctcaaaaagaaaaaaagaggctcagagaagacattacttccaattagattaatcagaaaaggtaagttttgaagggcaggaatatttaaagacagagctgaggggcatgagtggagtgttgtgagaagaaaaaagaattactagcaaaagttcacaagggtctgagtgtggcagctcacatctgtaatcccagcactttgggaggccaaggcgggcagatcacttgaggtcaggagttcaagagcagcctggccaacatggtgaaactccgtctctactaaaaatacaaaaaaattagctgggcgtggtggctcacgcctgtagctggggtcaggaggctgaggcaggagaatcacttaaagctgggtaatggaggttgcagtgagctgagatcgcaccattgcacaccagcctgggcgacagagcgagactccatctcagaaaaaagaaaaaaaaaatgtggtccccaaccagcagtagcatcacctgggaaatccaaaatttcacacccacctcagacctttctgagtcagaaactaactctgcgctcagcagcttaaccacctggttctcagtgatggtttaggacagcctcacggacctccagtaagcccagcccctcaccaggccaatactctatgaagatgaacagatgatgctattacgtgcccttcactgtggagacagaagggagggaccgacggtgctcagggctgggcctggaggaccccatccggagcctggagtgctctttatcaccggctgcccgtgggaacccacgactcacggctggaggccccacgccccctgccttgtttccatctgctgcagccagcgacgtcaagccttattccatctgtcagaccaggccagacgataaatgtcctcttgtggggaaagtgattcagagagaaaagctaagagccactccaccctcacataatccacctcacataatccaccctcacataatccaccctcacataatccacctcacataatccacctcacataatccaccctcacataatccacccctcacataatccacctcacataatccacccacactcacataatccacctcacataatccaccctcacataatccaccctcacataatccacctcacataatccaccctcacataatccaccctcacataatccaccctcacataatccacctcacataatccaccctcacataatccaccctcacataatccactctcacataatccgcctcacataatccaccctcaaataatccaccctcgcataatccacactcacataatccacctcacataatccacctcgcataatccacctcgcataatccacccaccctcacataatccacctcgcataatccaccctcacataatccaccctcacataatccacactcacataatccacctcacataatccacctcacataatccacctcacataatccaccctcacataatccacctcacataatccaccctcacataatccacctcacataatccacccctcacataatccacctcacataatccacctcacataatccacccctcacataacccaccctcacataatccacctcacataatccgccctcacataatccaccctcacataatccaccctcacgtaatccacctcacataatccacctcgcataatccacccaccctcacataatccacactcacataatccacctcacataatccacctcacataatccaccctcacataatccacctcacataatccaccctcacataatccacctcacataatccaccctcacataattcaccctcacataatccacctcacataatccaccctcacataatccaccctcacataatccaccctcacataatccaccctcacataatccacccacattcacataatccacctcacataatccacctcacataatccaccctcacataatccacccctcacataatccaccctcacataatccacctcacataatccaccctcacataagactgtgcagctgtctggtctccatttctgccgggtggggtattccatcctcatctcgggcaacatgtcccaaaagtatggtttccagtatggctccttaggtcccacccatttcttctctgggaccccaaagacccaacccccaccttttttttcttttttttgacacggagtctccgtctgtctccaggccggagtacagtggcaccatctcggctcactgcaagctccgcctcgtgggttcaagcgattctgctgcctcagcctcctgagtagctgggactacaggggtgcagccactatgcctagctaatttttgtatttttagcagagacagggtttcatcatgttggccaggatggtctcgatctcttgaccttgcttcagcctcccaaagtgctgagattacaggtgtgagccaccgcgcccagccaagacccttaaaagaaggacacttcacttcctcttacaactcagacatacctgtgaggctcctgggctatggaacaccccagccctttcgcagcccttgatggaaattgtttttcagccctctgaataaaatgaccactgtttacttaatcttttttttttcttttttttgagacagggtctcgttccctcgtccatgctggagtgcagtggcacgatcatgactcactgcagtctcaacttcccagactcaagcaattttcctgcctcagcctcccaaagtgctgggattacaggtgtgagccaccatgcccagcagaggaatcttttccgatcaacatcttctgagagtccctggcccaagtaggcagatgcttgctacggcactgccttcaggccattagcaaaaagtgtgcttaaatgcccagaggtgttcccaggccacgttttgttcatacgaggagtacaaaatgatgccaaagtgttagcattcttgggactgaaaacctctctccaacatcccctaggattttcctggatatgaccagaaatccattcccaatttctctgcctccaggccccaattctggtttcctcaaagaggaggaagtgttcttggttcccaaaatatgcttgcagtgcagtggtataatggtaaatgtttaacaacaataacaaaaaggccctaactggccgggcgcagtgactcacgcctggaatccaagcactttgggaggccgaggtgggtgggtcacctgaggtcaggagtttgagaccagcctggccaacatggtgaaaccttgtctctactaaaaatacaaaaattagccgggcatggtggcatgtgcctgtaatcccagctagtcgggaggctgaggcaggagaatcgctcaaacccgggaggtgcaggttgcagtgagcggagattgcaccactgcactccaacctgggtgacagagcaagactctgtctcaaaagagtaattttaaaaagtaaggcaacaaattatcaggagtttttgagctggttgttaagcacagttattattaaaaattacattctatacatttataataaattacactaaaaataggtaatatgtgctcaaaactcatcccctcctaaaaattttactacactgtactcctatctatgctgttgaggttatttccatagattgtatctgtgtgatagaaacaccatgtaaccacatgctgctgtacgtcttcccaattctgactgatgacctcgcttggtagtttgaaatcagccatgatggggatattaacaccacacaagtcagcaaatgctgtcagttaggatttttttttttttttttttttttttgagacggagtcttgctcttgtcgcccaggctggagtgcgatggtgcgatcttggctcactgcaacctccacctcccgggtttaagagattctcctgtctcagcctcccgagtaactgagattacaggcgcctgccgccacctggctaatttttatatttttagtagagacggggtttcctgcttcagcctcctaagtagctgagaatacaggcgtgcaccaccatgcccagctaatttttttattttttatttttttaatttttagtagagatggggtttcaccatgtttgtcagactggtctcgaactcctgacctcgtgatccaccggcctcggcctcccacagtgctggatgacaggcgtgagcccccgcgcccggtccgtgcatttacagcacaagttcacgcttatctacaaagcatccacctctcaccgcaccttccgggaccacgggatttaacgcctcaccgcccgatgacagcacgaggtggaaagggcagcgacaatgctcgcgcgtcccctcccggcgatccggagcacggcagccccggagcgcgcggccactcctcgctcccctcaggagctcgtaagagccccgcgcggggccgaggcgcgagagcacgcgcaacgcttcctgggaaatgtagttgggtgtcggattagaactacaaatcccggtactcaccgcgctgcagccccgaccgtgagggcgctttctggtgaatctgaatctcgtttgtctgtgacatggggaaagctgtccaagcccaattccattttcacaagaggctttctttttggaaacatgatagcggtctcgctggtgtgcgcaccaggagcgttgcggccgcggcttcctcctgcggcgaatctgccgttgcatcacagtggctagtctcagggcccgcaacgtgacgcttgtcgaatctgctgcggggagaaggacgcgagggttgcttgggcagcgactgtcatggcggcggccgcccccaatgccggaggctcggcccctgagacagcgggttccgccgaagctccgctgcagtacagcctgctcctgcagtacctggtgggtgacaagcgtcagccccggctcctggagcctgggagcctgggcgggatcccaagtccagccaagagtgaggagcagaagatgatcgagaaggcgatggaaagctgcgctttcaaggctgcgctggcctgcgtgggaggtgaggccgggcgatgggacccttgggaggctgagggcctggacggcagtggggatctctgccgagaagaccacgcgcctgggaggcgagggactgcgggccttgaccttgaccacaccctcgcctcgttcgtgaatcgggcgtcacctctcctgccccctcaggccggctttcctgatgaaaattgggttagagaatcggtgctgtggttggggcctgaaagttattacatgacatcctggctaacacggtgaaaccccgtctctactaaaaatacaaaaaattagctggacgtggtggtgggcgcctgtagtcccagctattcgggaggttgaggcaggagaatcgcttgaacccaggaggcggagcttgcagtgagccgagatgtgccactgctctccagcctgggcgacagagcgagactccgtctcaaaaacaacaacaaaaagttattacgtgggtgacttcattcatccgttcattcccttaaattcattctcttaaataattctttcaacaaattgttcctaagcaatatcacgtgccaggtgaaagagacaagagcctggtcttcatggggcctgtattatactatgtggagaagaatgttgagcaggaacactgcagaggaaggatgcagacatatggaaatgcacatgcagacgactctagggcagcagttgtttgaggtttgaaaaactgaaagaccattgtgactagacagccccgagcaaggagagacgaagtctgcacttgtccttctgtttttcccttaa

SEQ ID NO: 7325 - DNA, 6000 bp, Homo sapiens
cgagccatcaagcccggcttctttaatgttttttaaaaattgaggtaattacattacttaaaattgtaaccattttaaaggatataattcagtggcattgagtggattcagagtgttgtgacaccatctcctctatctagttttgaaacattttcatcactctccaaggggactgtcttcccattaagcattttcctctcctcttagcctctaggaaccatttactttctgtttctgtgactatacctgtgcaggatattttctataaatggaatcatacaatatgtggccttttgtgtctggtgtctttcacttagcataatgttttctttttttttttttccgagacggagtctcactctgtcgcccaggctggagtgcagtggcacaatctcggctcactgcaacctccacctcctaggttcaagccattgtcctgcctcagccttctgagtagctgggattacaagtgcggtgccaccacacccggattatttttgtatttttagtagagatggagtctcaccttgttgatcagcctggtctcaaactcttgacctcaggtgatctgtctgcctcgggctcccaaagtgctgggattacaggcgtgagccactgtgaccagccagcataatgtttttaaggtctatccgtgttgtagcatgaatcagtacttccttcctctttatgactggatactattccattgtatgattatgccacattttcttgacccatttatcagatgggcgtttaagctgtttccaccttttggctgttatgaacagtgctgccatgaacatttatgtacaagtatttgtttgagtctttgttttcttttcttttcttttttttttttctttttttgagacagagtgacaaagttgctctgttgccccagctagagtacagtggtcccatcttggctcattgcaacctctccctccagggttcaaacaattgtcatgcctcagcctcccgagtagctgggactacaggtgtgtgccactatgcccagctaaattttttggattttttagtaaagacggggtttcaccatgttggtcaggttgatttcaaactcttttttttttttttttgagatggaatctcaccctgtcgcccaggctggagtgcagtggcgtgatcttggctcactgtaagctccgcctcctgggttcatgccattctcatgcctcagcctcctgagcagctgggactacaggcgcccgccaccatgcgcagctaactttttgtatttttaatagaggtagggtttcaccgtgttagccaggatggtctcgatctcctgaccttgtgatctacctgcctcagcctcccaaagtgctgggattacaggtgtgagccaccgcgcccagccttgaactcttgacctcaagcgatccgtctgccttggcctcccaaagtgctgagattagaggctcaaaatagtctttgttttcaattctttttttttttttttttttttttgagacagagtcttactctgtcacccgggctggagtgcagtggtgcaatgtaggctcactgcaatctctgccacctgggttcaagtgattctcctgcctcagcctcccgagtagctgggattacaggcgcctgccaccgtgcctggataatttttttgtagttttagtagagacagggtttcactgtcttcgccaggctggtcttgaactcctgacatcgtgatccacctgcctcggcctcccaaagtgctgggattacaggtgtgagccactgtacctggcctgttttcagttcttttggatatatacctaggattggaattgcagggccatatggtaattttatgtttaacctttggaggaactgccaaactttgttccactgcggctgccttactccacattcccagcaatgcatgaggctttcaatctctccaccaacatttgttatttcctctctctctctttttaaaattatagccgtcttagtgggtacgaactgatatcttatggtggcttcaatctgccattttcctaatgacttgtgatgttgaacatttttctttctttttttttttttcccccgagatgaagtctcgctctgtcacccaggctagagtgcagtggtgtgatctcagctcaccgcaacctctgccacccgggttcaagcagttctcctgcctcagcctcctaaatagctgggattacagacacatgccaccacgcccagctaatttttgtatttttagtagatatggagtttcactatgttggccaggctggtctcgaactcccaaccttgtgatccacccacctgagcctcctaaagtgctgggattgcaggcgtgagctactgtgcccagcctgaacatctttttatgtgcttgtcggtcacctgtatatcttcagagaaatgtctgttcaactccttggcccatttttgtccccctgatgttttttttctttagagatgggatctcactctgttgcccaagctggagtacagtggcatgattatagctcactgtggcctcaacctcccaggcttaagtgatccttccacctcagcctccagagtagctgggactacaggtccatgccactatgcccggctcttcacccatttttaaattggtttgtcattttatgctttaactttttgtttagatataatttataacttatagaaagtttatcatatagcgtaaagaaactcttataatctttacccagattcatctattattaatatttgccccatttgttttcttactatacatatctaatattttttcctgaaccgtttgagaatgagtggcataaatcatggccctgtacctctagatacttcagataaggatatttacttatttacttacataaccatagttcacagatgctgatatgctatttcttcctgatccagttttatcagttgatccagtacaggagcgaggttgggatcctgtactgctcttaattgtcttattgtcttgtctctcttttttttttttttttttttgagacggagtcttgttctgtcacccaggctagagtgcagtggcacgatcttggctcactgcaacctctgcctcccgggttcacatgattctcctgcctcagcctcctgagtagctgggactacaggtgcacaccaccacacccagctacttttttgtgtatttttagtagagacagggtttcactatgttggccagactggtctcgaactcctgacctcgtgatccgcccgcctgggcctcccaaagtgctgggattacaggcatgagccaccgcgcctggcctatcttgtctctttgttgcttttaatccaaaacagtccctcagaatattttttttttttcgagacagagttttgctcttgttgcccaggctggagtgtaatggcgtgatcttggctcaccacaacctgtgcctcccgggttcaagcaattctcctgcctcagcctcccgagtagctgagattacaggcacctgccaccatgcctagttagttttgtatttttagtagagacggggtttctccacattggtcaggctgatcttgaactcccgacctcaggtgatccacctgcctcggcctcccaaagtgctgggataacaagcgtgagccaccacgcctagctccctcagtctttcttagtctttcatgactctgacatttttcaatatacagtccctttaaagaaatagtgtttctcaatttgggcttgtctgatgttttttcattttaaaaattaaaaaaaaaatttttttttttgagttggggtcttgctttgtcacccagcctggagtgcagtggcacgaacatggctcactgcagcctcgacttcccaggctaaggcgatccttcctacctcagcctcccaagtagctgggactgtggacgcacaccactacacccggctatttttttttaaaattttttatttttttggtatttttgtagcaatggggtttcaccatgttgcccaggctggtcacaaacttctgggcttggatgatcctcctgtcttggcctcccagtgttaggattacaggtgcgagccaccgcgtctggctgatgtcttctcatgatgagattccggttgtgccttcctggctggaatgccacatagatgatgctgtgacctgcgaagaccttcacatctggaggcacacgacaccctcctgcctctcacaggtgatttattttaaccccttggtcaagatgtctgattcctctactgtatagttactctttttccttttgttactaataagcaatctatcaagagatgcttcgtgaccgtgctgacaccctcccccctcactgaagtcttccccccagatttagcccccactgatgagttttgcacacaggctgtcttcttgtaggcagccccctctgctacctttgtttttccgggaaggaccttagatcctgggtaggtgctcatcctgcctggcagtcgagtgcaatgctgctgtcctggccaatgcccagccttcctcatttgccccggcttcaaggcattggttcacagtcccgtacgggcagctagaccatctcacagcaagcagcactctgggaggctcatctcatttcctgccctggaagcttcccttcctcactgcagccactgaagctgcaggctagatcaaggggaccacagagttgtccagtccccagggtgggggtgccaggagcccttgtcctccgtagcaggtctcagaggctgacgatggggaaatcgcactggtgaagctgccgtggggtcaggaggaacctgcgataagacgcccaacagttagggcaggtgctttgaggtttggagcctgggaccccacaggaagtgacttcgtgctgagctaatgttgcttcatcctggcgccagtctcaggccaagagctgcaggctggcatggctggggggatgtcagcggagtgccctgagcctgggccaggaggtctgcagggccagtccccagggccaggcaggcagtgtccccctcccatcacgcccacctcctggagcctgcccccgtggagggcctacgtggctgccgccgtcctctgctacatcaacctcctgaattacatgaactggttcatcattgcaggtgaggaggggatggctaccctgggcagtacctgctgctgtgcccaccagccaggggctgcagatccatggtggccttccagccatcacccatctttctgctcctgggcccatctctggtgttctcacctctagaggtggttttcagctgtgctcgaatcggggaggaccaactgatgttcccaatccagcctcaactaagaagggacacaggctgggcatggtggctcccgcttgtaattccagcactttgggaggctgaggcaggaagattgcttgagcccaggagtttgagaccaacctggacaacatagtgagactctgtctctatttatttatttttttttttgagacagagtctcgctctgtcgcccaggctggagtgtagtggcgcaatctcagctcactgcaacctctgtctcccaggttcaagtgattctcctgcctcagcctcccgagtagctgggattacaggcgtgcaccaccacatccggctaatttttgtattttgagtagaggaggagtagggacggggttttaccatgctagtcaggctggtctcgaactcctgacctcaggtgatccacccgcctcggcctcccaaagtgctgggattacaggcatgagccaccgtgcccggccttttttttttttcttgagacagagtctcaatctgttgcccaggctggagtgcagtggcgcgatctcggctcactgcaacttctgcctcccaggttcaagcgattcctatctcagcctcccgagtagctgggactacaggcgcataccaccatgccaggctagtttttgtatttttagtagagacggggttttgccgtgtatgccaggctgtctcgaactccagacctcaggtgatccgcctgcctc

SEQ ID NO: 7326 - DNA, 6000 bp, Homo sapiens
tttcctgaatttttttttttttttttttgagccagagtctcactctgtcacccaggctgaagcgcaatggcgtgatcttggctcactgcaatctccacctcccgggttcaagcgattctcctgcctaaacctcctgagtagcggggattacaggcacccgccaccatgcccagctaatttttgtatttttagtagagacggggtttccccatgttggtcaggctggtctcgaattcctgacctcaggtgatctgcccgcctcggcctcccaaagtgctgggattacaagcgtgacccactgagcctggaccttttttttttttttttttttgagatggagtcttgctctgttgcccatactggggtgcaatggtgcgatctcggctcactgcaacccccacctcccgggttcaagcgattctcctgcctcagcctcctgagtagctgggattacaggtgcctgccatcacacttgtctaatttttgtattttttgtgaagatggggtttcgccatgttggccaggctggtctcaaactcctgacctcaggtgattcaccgagcttggcctcccaaagtgctgggattacaggcgtgagccaccgcgcccggccagccttttctttcttaagttattctgttcctagttccaggagaattctagtgatgtcatcaaaaatcttcctggaaatctcttccaaatcctatagtaaatgttcctccagaggattctgtttctttcagtcttcaggttgatttgcccttccctggttttgagaaaatttttcagaatccctataatgttttgttaacattattaacattatttcattcatccagaattgtataaaaataatgtaatgaatgcctgtggaccaccccacccacacaactattttttttctctttattcatcctcaaaacagacaccatttggctggccgcagtggctcacacctgtaatcccagcattttgggagaccgaggtgggtggatcacctgagatcaggagttcgagagcagcctggccaacatggagaaaccctgtcttcatctccacaaaaaatacaaaaatgagccaagcgtggtggcgggcacctgtaatcccaactacttgagtctcctgaacccgggaggcggaggtggcggtgagccgagatcacgccactgcactgcagcctgggcaataagagtgaaactctgtttaaaaaaaaataaaaaagaggcaccatctctcagaatcagcttgagcaacttgtagacaaataggtggccagctcttggccctgctctctgtccatcagatcaatggctgaatcccctcttcaggtccacggttggaagggccactattcgggatatgacagttgctctggtagttcaacattagtgctggtgacaacctctcatcggccacctcctgaggaaccagagttttccagtgcctgtgcttctccctctggcgctgtttcagagtaactattctccatacacttctcttgctgtgacttctgcttatttctggtgtcagttgcctctggcttttgattgcttctttcttgcatacaactctcagtttgaagccaccccactctctgatgactgtctcagcttgtctcacagacacatttcccaatcatgaagatccagtcggtggattggtcattatccagtcagtgtacctctgttggatggagttctcacctcgagagacctcacaggtcgctggctacatgtctgcctttgggtcagctacttgttcctcaatcaaccagccctggcctagataagggggtctgtgttaggaacttgttactgggcaacaaaccatccccctcgacgaagtcttagtgtcaaataaatataagcatttatttcactgatacacacataggagttggctgggggtcaggtgatctagggtgggatccaatgtgacccttttccttgtatcttttttttttttttctagatggagtcttcctctgtcacccaggctggagtccagtggtgcaatctcggctcactgcaacctccatctcccgggttcaagcaattctcctgcctcagcctcccgactagctgggattacaggtgcctgccaccacacccagctaattttttttgtatttttagtagagacagggtttcaccacggtagccaggatggtctcgatctcctgacctcatgatctgcccaccttgtcctcccaaagtgctgggattacaggcgtgagctactgcgcccggccaaaagaaattttttaaattagttgagtgtggtggtgtgggcctgtaatcctggctactaaggaagctgaagtgggaagacagcttgagctaggaggtcatagctgcagcgagccatgattatcttaccatggcactctagtctgagtgacagagaccctgtctcaaaaaaaaaaaaaaaaggataatgtaaaatctttaaagaaaagggacagaggctgggcgcagtggttcatgcctgtaatcccagcgttttcggaggccgaggcggggatcatctgaggtcgggagttcgagactagcctggccaacatggagaaaccccgtctctactaaaaatacaaaattagctgggcgtggtgtcgcatgcctataatcccagctactcgggaggctgaggcaggagaattgcttgaacttgggaggtggaggttgcagtgagccatgatcgcaccactgcactccagcctgggcaacaagagcaaaactctgtctcaaaaaacaaaaaagaagaggaacagaaaacatcagaagcaatatggaaatgttgtttaaagcattaaacatgccaacagaagcaaaaccaaatgtatcagtcatcataattacctatgagtcagagacaaatagttggggaggttcaaagtattttctttttcaggcatcctctgattcaagaggtaaattctccatgtatttttctcaatccagttcctctgtcttataaatagcagagattctggcttttctccattttccacatttctgtagtggtctgagtgggccgcaaggaggggctgcatcaggggccactggctggtgacactttccaggtgacagcctcattgcataccctctgaagccctgcagcccttcctgctaccctcatctcttcatggcactcccacatcctacttgagctagggctcattctgtgggggccttcactctcctgtttgcttctgagacccaggaggcagaggttgcagtgagccgagatcacaccactaaactccagcctgggtgacagagcaagactccatctcaaaaaaaaaacaacaaaaaaccattagccaggtgtggtggcacacacctatagtcctagctactcgggaggctgaggtgggaggatcacttgagcccaggtggtcagggctgcagggagccatgatccactccacaccagcctgggcaacaaagggagaccctggtctcaaaaacatttttttaattaaaaaaaaaagaagtcgactgggtggcttggctcatgcttgtaatcccagcactttgggaggctgaggcaggtggatcatttgaggtgaggagtttgagaccagcctggccaacatggtgaaaccccgtctctactaaaaatacaaaaattagctgggtgtggtggtgggcgcctgtaatcccagctacttgggaggctgaggcaggagaatcgcttgaacccaggaggcggaggttgcagtgagccaagatcacgccactgctctccagcctgggcggcagagtgagactccgtctcaaaaaaaaaagaagttatcaaggaaactgcagcaccccaacaaaaacagaacttctttgacctcagaatggaaaaatggcagaagctgattctcacagagttggctcagatcgcatggctgttgctaaatcaaacaccgaggctagcaggatagaacgctctcatcaatgaggcctaggtcccgagcccaccctgagagacaggcagtggcctcaagaggaggagacatcaataatcaaataccaggaagacgaaatgcaaggacaataagagcccacaatcacctctttaatttctccctgggaagaatgctgcctgagaggctggcagaaacgaagaggccaccacacatctgctctgtgcttcctagtttacaaaatacttctcaggttgtcccatttaatcctcacaagtagcccacaaggcaagtggcatcacttatttatttatctatttatttatttatttatttatttactttttgagacagagtttcattcttgtcactttatttacttatttatttatttttcgagacagagtttcactcttgtcacccaggctggagtgcaatggcacaatctcagctcactgcaacctccaccttccaggttcaagtgatcctcctgcttcagcctctcgaatagctgggattacaggtgcccgccaccatgcacagataacttttgcatttttagtagtgacggggtttcaccacgttggccaggctggtctcaaactcctgacctcaggtgatccaccctcctcggcctcccaaagtgctgggattacaggtgtgagccaccgtgcccagacacaagtggcaactgagacttaagagacatgaaggggcttggctaagttgcaaagcaggtatggaaccaacagaggggctgtggagctgtgcagaaaaaacaggaaggcactaacccagggtaatgtgtccatagcccccaccttgtccagcaccacatcctcccttcacctcagggctgcagctcctccgcctctgcctcctcagggcccacatcctgtgcctctctcccttatcattctgatcctgccagtttctgccacgcctctgtctgaactttgctccgtgctccaggcttgttttcctctggacctgggaaccactggcttactttcactcaccgcctgtccttcctgacacctcaccatgtgtacgggaaaatgtgcccgctgtgtggggctctccctcattaccctctgcctcgtctgcattgtggccaacgccctcctgctggtacctaatggggagacctcctggaccaacaccaaccatctcagcttgcaagtctggctcatgggcggcttcattggcgggggcctaatggtgagaaggctggcaggggagcccgggccagctggctgggtgccacctaaggggttctgaacaggagggagagggagagaggaataagaatggttgcttgggagaggatggcaatggcttcgtgggggctagcagccctctggagtcagtcctggaggagccccagggtcccaagctgaatgtctgtggggcacagaaaggacgagagcctcactgctctaaagagctcccctaccgggtagggagcatgtcctgcctgtcctccctgtccccactgttgagcagatgctgggaaaacctcactacaatggtcgaggcagaaggagcagctggttgtcagagacgtcatcggggcaggataataacaggcatgagggtggggcgcagtgaaattacccagagccagggactgccctcacggatcagtcaccctcgcttgcctccacgtccattcactctcaccccacatttctggaagcccaatctgtgcggactgctaaggataaactcagaacttaggtcagtatggcagggaggatgccctcaagtcgtcttccgggagatgagaatctatttgccaggggcggaggtgggggttggtttttgtgtttgttttttgtttttttttttttttgagacagggtctctctctgttgcccaggctggagtgtggtggtgcgaacatggctcactgtagccccaacctcctgggcccaagcagtcctcccacctcagcctccgagcagctggaaccacaggtgggcatcaccacacccagctaacttttaaatattttatttatttttattattattatttttttgagacggagtctcgctctgtcgcccaggctggagtgcagt

SEQ ID NO: 7327 - DNA, 6000 bp, Homo sapiens
ctgcccacctcggcctcccaaagtgctgggattacaggcgtgagccactgcgcccggactcctaaaccataattggtaatctcttggctagtttgttagtactacaaaggcagtctagttctcaggcaagaagtaggtttgttttgggaaagggctattaccgtctttgttttaaactataaactctaggccgggtgtgatggctcacgcctgtaactataaacaataaactaagttcctctcaaagttagttcagcctatgctcaggaaggaacaagcacagcttaaagcttagaagcaagatggagttgcttaggttagatctctttcactgtctcagtcataattttgcaaaggtggcttcaataacaggaagaatattagggaaggaacttatttatttatttattttattttgagacagggtctcaccctgtcacccaggccggagtgcagtgctgcaatcatggctttctgcagcctcgacctcccgggctcaaacagtcctcctacctcagccttttgagtggctgggaggtggagagaggaggactgcttgagcccagaagttcaagaccagcctgggtaacatagtgagaccctgtctctacaaaaaatttaaaacaatagctgggcatagtggcacatgcctgaggtcccagctactcaggagactgaggtgggaagatcgcttgagcctgggaggttgaggctgcagtgagccatgatggcaccactgtattccacctgggtgacaaagtgagaccctgtctcaaatcacaccaaaccaagcacacaaaaaaacacaaaaacctatctccgaagtggcaccacatccagatggttttttttttttttttttgagacggagtcttgctctgtcgcccaggctggagtgcagtggcacgatctcggctcactgcaagctctgcctcctgggttcatgccattctcctgcctcagcctcccaagtagctgggactacaggcgcccgccaccacgcccagctaatttttttggtattttttagtagagatggggtttcaccgtgttagccaggatggtctcgatctcctgacctcatgatccgcccgcctcagcctcccaaagtgctgggattacaggcgtgagccaccgtgcccagcctccagatgggtttataggtgaactccaccaatctatgtagaacagaaaatccctatctataactgttccagagaatatagttttccaatttattttacaaggctagcataaactctgatcataaaaccaaacaaacagaaaaacagacaaagatccccaaaagagatctataagccactcctattttctaacttagaggcaaaagtcctaaataaaatatgagcaggctggacgcagtggctcatgccggtaatcccagcactttgggaggtcgaagcaggctgatcacctgaggtcggaagatcaagaccagcctgatcaacatggagaaatccagtctccactaaaaatacaaaattagttgggcgtggtggcgtatgcctgtaatcccagctacttgggaggctgaggcaggagaatcacatgaacccaggaggcggaggtcgccatgagccgagatcactccattgaactccagcctgggcaacaagagcgaaaaaagagatcaagaccatcctggccaacatggtgaaatgccctctctactaaaaatacgaaaattagcccggcgtggtggtgtgcacctgtgatcccagctgctcgggaggctgaggcgggaggatcgcatgagcaggttgcagtgagcggagatggcgccgccgcgctccagcctgggtgagggtcaaaaagaaaaaaaaaaatcaacagcctctgggctcggggtccttattcaatttcatggcttctctccagacaaactcccacctcactttctatactacctcgtcttccccacattttccaatacctttgcagcgggcaaattatataaatggcaaatctatggattaactgcatctggcttaagtgtctatcccttgtccggtcaccagctggaagcagataggggcaggctcaggcggctgcatggagctcctactggggaacagtgcagggccacattctcatcacagaaggggcagtggaccaacaggcagggcatggtgtctgactttctgtaatagacatttaacctggtcttcggaagtcagaaaaggctttccagaggaaggaattctgagctggaacttgccaaataagtaaaagttaggcagaaggggataagggttgaagaaaaagttcaggcacaggagagaatgatcaagagtaagggcagagtgggaacagatggggctggacaggcaggcaaaggggagaccttgcaggaccctgcaggccatgttgggaactttagactttctcctgagatctatgaggagccattggtgaatttatttatttatttagagacagaatttcgctctttcgcccaggctggagtgagggggtgtgatctcagctcactgcaacctatgccccctggggctcaagctgttctcctgcctcagcctccctagtagctgggattacaggtgccggccaccacgtctggctaattttttgtatatttagtagagatgggttttcaccatgttggccaggctggtctcaaacccctgacctcaggtgatccacccgcctcggcctcccaaactgctaggattacaggtgtgagccactgtgcctggcccattggtggatttcaagcagtggaaggatatgagcaaatgcgcagttctgaaagaccactccagtggagaataaagagaagaaagggaattgggaagttgggagaccagcaaggaggctgttgcagggaagcaatagcgagaagatggtgccctgggcagggcatggtggctcacgcctgtactcctagcactttgggaggccgaggtgggaggatcgcttgagcccaggagtttgagaccagcctaggcaacaaacaaatgtttttctgtctctagaaaaaaatttttaaatcagccaggtgtggtggtgcatgcctgtagtcccaactccttgggaggctgaagcaggaggatcccttgggtccaggagtttgtccttgagtgaggcatgattgcgccactgcactccagcctgggagacagagcaaaggagaccagcctggacaacatggtaaaaccccgtctctactaaagatatgaaaaattagccgggcatgatggcgggtgcctgtaatcccagctactcaggaggctgaggcaggagaattgcttgaacccaggaggcagaggtggcagtgagccgagatggagccattgcactccagcctgggagacagggcaagactccatctcaaaaaaaaaaaaaaaaaaagaagaagaagaagaaaggaggaagaggaggaagaagaagaggaggaggaggatatgaacaagaaacaacaacaaccttggactaggaatgctggcaggatggtgtggatggagagtagatttgagagagacgggagataaaatcaccaggacttggtgatggggatgaaagacgggagacgttagagatgactattagggattttgtttgtgttgactgaatggttaggtaaatgagtggatgatggtgccactcaccaggctgagcaacacaggaggagaagccatttggagagagatggtgagttcagctttgaacatattgttttggtgtctgtgggacatccaagtagagatgtccagaaggcagctggacatatgtgcttgtgtctcaggagaagggtctggactagagacatagatttgagagtcattaggttgtaggtggtggttgaaggcaagggaatggatgaggataatctcaggtggttgcatagcgtaagaaaagaagagaatgccgggcgcggtggctcatgcctctaatcccagcacttcgggaagccaatgtgggtggatcacttgagatgaggagttcgagaccaggctgaccaacatggtgaaaccccgtctctactaaaaatataaaaattagctgggaatgaagacagcctaagcacaaactctgggggcagtttaattgttcaagaaggggaatctatgaaggagactgagaaggcccaaccaaacaggtaagaagaaaaccaagaaaattacagggtcatgtgtcacagaggccaaaaggagaatcccaaggggcgagtggccatgggtatgcaggctgccgaaataaagtaagatcacagtggagaagtttcccatggatgtagaggagggagagcattaaagaccttggtaagaaccgagtcaatggagtagcaggggaaagaaatcagcatagactggggtgagaaggcagagagaaaggtgggagagaattaaaagtaggcaactctcagaatgcagctgtgaagaggaagagaagcgggcatctggagaggtttttttgtttttaagatggagttttgctcttgtcacccaggctggagtacaatggcacgatctcggctcaccgcaacctctttccacctcccggtttcaagcgattctcctgcctcagcctcccgagtagctgggattacaggcatgcgccaccacgcccggctaatgtatttttagtagagacagggtttccccgtgttggtcaggctggtctcgaactcctgacttcaggtgatccgcccgcctcagcctcccaaagttctgggattacaggcatgagccacgcgcccggccctggagaggtttttaaaagatggcagaaggctgtttggaggagtccacccccatctcccctgtgtaaaaggaaagcggaagagagaaccacaaagagggcctgggggaaagccgtggagtgaggcgataagggcttgtgtccaggggattcccggtcactggaatccctatcaggcctgcatttcctcctcacccccatccccttccttgccactggcttagtcctccatggggctagaagagagaaggacggagtcgagtggcaccctagaagacgctctgtgccttcggaggtctttctgcctgcctgtaagccggggttggtgctggggcaggagaggggtctgagggaggggaaagagccaaggacctggagctagtagttttaagttctgcaggcaagggtgggagatgggagtagggaggacaggaggtgtggatgctgtttctggaagcgaagctgcagggggaagggggctggggcctggggggatgcttcctggggatgcagggggatccactcaaggctcccttgcccacaggtcctcatgcctctcctcctcttgctgctcctgctgccaagccccttacacccccaccccatctgtgaggtctccaaagtggccagccacctagaagtgaactgtgacaagaggaatctgacagcgctgcctccagacctgccgaaagacacaaccatcctccacctgagtgagaacctcctgtacaccttctccctggcaaccctgatgccttacactcgcctcactcagctgaacctagataggtgcgagctcaccaagctccaggtcgatgggacgctgccagtgctggggaccctggatctatcccacaatcagctgcaaagcctgcccttgctagggcagacactgcctgctctcaccgtcctggacgtctccttcaaccggctgacctcgctgcctcttggtgccctgcgtggtcttggcgaactccaagagctctacctgaaaggcaatgagctgaagaccctgcccccagggctcctgacgcccacacccaagctggagaagctcagtctggctaacaacaacttgactgagctccccgctgggctcctgaatgggctggagaatctcgacacccttctcctccaagagaactcgctgtatacaataccaaagggcttttttgggtcccacctcctgccttttgcttttctccacgggaacccctggttatgcaactgtgagatcctctattttcgtcgctggctgca

SEQ ID NO: 7328 - DNA, 6000 bp, Homo sapiens
tctacagtgaaaagaaagagtaatggccgggcacggtggctcacacttgtaatccagcactttggaaggctgaggcgggcggatcacttgaggacaggagttcaagaccagcctgaccaacgtggtgaaaccctgtctctactaaaaatacaaaacaattagccaggcatggtggtgggcgcctgtaatcccacctactcaggaggctgaggcaggagaatcgctcgaacccaggagacagaggttgcagcgagttgagatcgggccattgcaatccaacccgggcaacaagggcaaaactctttctcaaaaaaaaaaaaaaaaaaagaaagaaaaaaaaaagaatgagtaacaagaagtctcttgcccttctcagaaatttaaacttgctacaaagtatcataaaaatcaacttgtgcaagaacagacaaatacatcaatggaacagaatacaaattcagagacagacccttacatcatacattagaatttgatatatgataaaagtggttcactaaagagaaaagtaaattggatccctaacacctaaaacaaggatgaattctagaggaatcaagaagacttaaatgtgaaaagtaaaactataaagttactggaagaaaatgtagaagaatgcatttatggtgcagagttgggaaagaatatatacaaattatcaaaaattgcaaaccataaggggaaaaaatggtcattttcattacacttaaattaataatttctattctggccaggagcggtggctcacacatataatcctagcactttgggaggccgaggtgggtgggtcacctgaggtcaggagctccaggccagcctcaccaacatggtgaaacaccgtctctactaaaaatacaaaaattagctgcatgtggtagctcacacctgtaatcccagctactcaggaggctaaggcaagaaaatcacttgaacccggtgggcagaggttgcagtgagccgagattgcaccactgtactccagcctgggtaacagagccagactccatatgaaaaaagaaaaaaaatctatttcatgaagttcatgaaggaaaaattaatatagagatgatagaatgggagaaggtatctgcaatgcctaaatctgacaaagtaactgatctctcttttttttttttttttttttgagatgaagtttcactcttgttgcccaggctggagtgcaatagcgcgatctcaactcaccacaacttctgcctccctggttcaagtgattctcttgcctcagcctcctgagtagctgggattacaggcatgcaccgccacacccagctaattttgtatttttagtagagacagggtttctccatgttggtcaggctggtctcgaactcccgacctcaggtgtttggccggccttggcctcccaaagtggtgggattacaggcgtgagccactgtgcccagcctgatctcattgtgtttgtttgtttgtctgtttgtttgagatggaccctcactctgtcacctaggctggagtgcagtggcatgatatcggctcacctcaacctccgccacccgggtttatgccattctcctgcctcagcctcccgagtagctgggactacaggcgcccgccaccacgtctggctaattttttgtatttttagtagagacagggtttcaccgtgttagccaggatggtctcgatctcctgaccttgtgatccgtccgcgtcagtctcccaaagtgctgggattacaggcgtgagccaccacgcctggccacgagtggattttaaaaacatcgtgattactgaaaataagatcagagtgaaatatataacaagatgctatttatggaaatttaaaatgtttgggccgggcgtggtgactcacacctgtaatcccagcactttgggaggctgaggtgggcagatcacttgaggtcgggtgttgaagaccagcctggccaacatggtgaaaccgtctctacttaaaatacaaaaattagccaggcacagtggcgcaagcctgtaatcccagccactccggaggctgagacaggagaatcacttgaacctgggaagcggaggctgcaatgagtggagatcgccccactgcactccagcctgggtgacagagcgagacactgtctcataaaaagaaaaaaaaaaaaaactttgcacacaaaatgatttatattttgtaagagcacaaagaaaaaaatgaacatttaatgcactggaataattgaatgcattggaataagcatttgggtgtggtgaatcgaacgtgtagtcttagctacttgggaggctgaggtgagaggaccgcttgagcccaggaagtctaggctgcagtgatcggtgactgtgcctctcactcgagcctgagcaacagagacctcaactcaaaaccagtaaaatcgccgggcatggtggctcacgccagtaatcccagcactttgggaggccgaggcaggtggatcacctgaggtcgggaattggagacaaacctgaccaacatggtgaaatcccccatctctactaaaaatacaaaattagctgggcccggtggcgcatgcctataatctcagctactcgggaggctgaggcgggagaatggcttgaacccggaagatggaggttgcagtgagccaaggttgtgccattgcactccagcctgggtaacaagagcgaaactctgtctcaaaacaaacaaaaacaaaaataaaaatgagacatagatcagtgaagacagtgtgctaataactgtcattcgttcaatcttctgtgctggaactcagggatcaaggtccccagaagccggaaacaaagtgaacctgtggagcaggaactgggtgaggaagctttctttgaaggatgaagaggagtcctttggaattccggatttttttttttcttcttgagacggagtcactctgtcgccaggctggagtgcaagggcacgatcttggctcactacaacctccacctcctgggttcaagccattttcctgcctcagcctcccgagtagctgggattacaggtgtgcataaccacgcccggctaatttttgtatctttagcagacatggggtttctctatgttggccaggctggtttcaaactcctgacctcagtcgatccacctgccttggcctcctaaagtgctgggattacaggcatgagccaccaggccgggccggcattccagatttttcaggggattagtgcagcaaaggaatcaagaagggatgtaaaggcacagtgtgttctgggtacaataaggacttaggcattgcccagaacaggaggcgaaggagatagaaggagaggcaggagagataggtaaggccagagatcggataagagaggcaggaggttttgttcactctgaaaagggatttgaacttggcaattggggcaacagagacagtgacttcttgcttgagagatgagattggaccttcgaaaattgttctctgccctcgtcataaaggaaataagaggagcacgaagaccagtgagggtgatggtgatctggactgaagtggcagccgccacggagaatatcggatgaatgtgagagagttttggaggtcaaagcaccaatgttggaaactaactggataaacgaggagagcggcgcaggacaggaggaatcgagcctgacttctaccataggggtgactgggcgggtaattcattgaaataaggaagttaggaggaggagcaggtttggacatgctgatcactagagctgccacatccgggcggtaacgaacacctggatctgcagctccagagaagggcctgggtcagatgtcactgaagccctatggtggcggaaaggcgagaaatagtgggttgagattccaagtgcaatccactgcggctcctcgctcgccctccaggtggcagcacaaccctgcgcttccgaagcccgttttctgagccagacactctccacgctctgggtatttcggcttctctctccccacacgccgaccctaggtcgcgcactttctgcctggcagaatttggccgaggatccaaacccggagcagcctccagagagcgtgtcgttcacgcggccagcatatgctcagagacctcagaggctcagagacctcagggctggtggtgtggtcggttgtgaccacttgtccctcggaccggctccaggaaccaacctggggaatgtgtgtaggggaagggcgggatagacagtgcccggagcagggaggcgctgaaagacaggaccaagcagcccggccaccagacccgttgtgggaacggaatttcctggcccccagggccacactcgcgtgggaagcatgtcgcggactctttaaggcgtcatctccctgtctctccgcccccgcctgggacaggccgggacgcccgggacctgacatttggaggctcccaacgtgggagctaaaaatagcagccccgggttactttggggcattgctcctctcccaacccgcgcgccggctcgcgagccgtctcaggccgctggagtttccccggggcaagtacacctggcccgtcctctcctctcagaccccactgtccagacccgcagagtttaagatgcttctgcagcccgggatcctagctggtgggcggagtcctaacacgtgggtgggcggggccttttgttccagggactcttttctcaaaacttcccagtcggaggctggcgggaacccgagaggcgtgtctcgccagccacgcggaggggcgtggcctcattggcccgccccaccaactccagccaaactctaaaccccaggcggagggggcgtggccttctggggtgtgcgggctcctggccaatgggtgctgtgaagggcgtggcccgcgggggcaggagcgaggtggcgggggcttctcgcgtcttttcccccagccccgctccaccagatccgcgggagccccactgctctccgggtccttggcttgtggctgtgggtcccatcgggcccgccctcgcacgtcactccgggacccccgcggcctccgcaggttctgcgctccaggccggagtcagagactccaggatcggttctttcatcttcgccgcccctgcgcgtccagctcttctaagacgagatgccgtcgggcttccaacagataggctccgaagtaggattcatcatgagggggcggggcgggggggcacgggtcccgcttttcttgggctggggtcgcggttggggtcagctgggggtggttcctgcgcaggcgcagggggtgaaggtagggggctggctatttatacccggcctggacaacccgtgactgtgagattccaatcctaccaaaaggcagagtgggtctggagggcctttcggggcacaggcagcaagtggattctgcgagccagggttcacccccttgcctagtaggcggcgcggcgctccggaatcggggacaccctgccctcgatccgactcgggaaagcagatccaggcgggtcttgccctccgggagctgtccgtccgtcttcgctcacgggcagtgtttcgaggaccggaggctctccgtgggcccccacccccactcctggccgccctccaggacgctgaactttcccttggccccatggttggtggaggggcagaggggactgtcagccccccctcctccagctcaggtttccgcttggagacagtctgtgccgccagcgagcggccaccactgccaccgcccctcacactaccttcctgccctcctcccctgggcatggctctcccaggcagaacccctggacggccctccctgcacggaggttagagggggagggcaggccacgacgtagatagagaaggccacccctagatgaccgggatgtcctttctggaacagcacttcttggtcctgttgggggcctcctggagctggctgacagaacccccagaggggagggaagaggacagtggctgatgataataatgcacgtgttaatttatgaaaccagcactgtcaaggatattgttaacatgtgatgtt

SEQ ID NO: 7329 - DNA, 6000 bp, Homo sapiens
aggcgcagggaaagattacccagagtggctttctgcaatggggcacccctaacagggccaggctgtgtaagaagtggtgtttgttggccttgtcaaacagctgtaagaaaaacagaaacgaagggatgtcgtaggcaatacaggtactgagatcccctgatgacacaagggaccaaagttccttcccccaccccacccttgaagtcccagcttgatcccaggcctttggcttacagagcctttggcctttgctgctccagagatccgcggctcgccccaccctctccccgcccacttcccccagggaccccagactttgtgccttcgtagacccacgagtcagggagccccagcgcagttacttcacctccttcccgtaggcatctgggaattgggcgcctgtggagaaaagaagcaaaggttagcggtcctagtgccagccctgaccgcccccaatccggggggacccaggtggacattggcgagaaagggcacccccccccccgccccaggaagcttccgattggtgggaacacgctcgggcagtactgggaaccaattggacccagctgggggactttaaaaggtttagggctccgcggactgtctgataaacgagaggccgggcacctcccataggttacgcccttgcagcagaccccagaggacgccccaagtacagtcccatcttcgtccccagccccctgaccgtgcgccccgtaggaagcgaagcctaaggccgcagctccggacaaggcgcccaagcggcggaaagctgcagctggcccggccatagctgtagaacaggacgcaccggaccaacgccgcccaggccacccaagaggccagccaatcccgaccgcccatgcaaataaggttcacaggcgcccaatccgggccgtgttcatttcagcattgcgctcttcacccgcctttgtaaaaccgctgcagagtggcgaagacgtctggcgggcggagaaaccagcaccaattaggaacagaggagctaagcagtgggggggcggggttgagggcgggactagggggatttgcgtcaaggattggcccactttccaagttgatcgcctcttcgaaccccccacccccatgctccggccaatttccaaagatcccggtcttctctcaaagttccgcccctttttccacaggctcctcctgttcagcttcaaatcaaacccactaccaaaaagaggcggcccgaaagatagcaaagccccacctattgccagtaaaccccgcccactgcacaaatggcccctcccccatgtctgaaggctccgccttctttgtatgatgccccgccccctgtagttaagatattctcccccccgccagccctccgagaccgcgagagccccgagggtgggagatccgggggaatgtctccaccctgccctggcccgctacgtccatctgtccgtctgtccgctcccgcctcttcccaccatctccaatccccccattctccggagggcgggcgggcaggcgggtgcgagcggggggtgcgagcggggggtgtgcgccgctctctcggcagggggcgggggaggcggccgcgcggtgacgcgcggggctgctgcggctgctccgccggcggatcatcactctcgggctgggatggacgcggggcgggccggccctggcgcgcggagccaggagtccgggcctcccggctgctgagcgtccctcgaagcctcccctcacccccgccttccctcctaggatccgcgctgacccccgccccggggctctggactcggctcccgccctcctctgactccccggacctccccctcacgcccgccctcgggatcgactagatccctccccctccccgaggattccggctggatccctgcccctgcaccgcggatcctgcgctcccgggccccgggcccctggggattaacgtggactcctcctccagcacccgatccttaggatcctccgcctggaccgccttctggtccctcgaagccggcccacggaaccagcggatcctcaatctagtcctgtcccgttgccccctcctttctctatcgtccctactgcggggttccctgttctcgggctccccctgatcccatcccctagctctccttttcccggggatcgactggatcccggccccgccccccggggctggggcgatccccctcccccgccgggtgaggcgctgcgggcgggggctgggcctgcggggccgcgggggctcagaggccgccgccccctcccgaaggcctttcgccccccactcggagccctggatggaggcaccacggccccagggctgagccaggtaggacctaagccgggtcggtggagggggctgcgtggcggtccactggggtctccctctccccatctccctccctgcgcctggtttcccccagcctgctctgtctgcgtgtctccgcctagggatgctctcgccgtgtctctgcgtcttggtctctttgtctctgcctctctccagtccatgaatgatcctttgaatgggcccacagaccccgtgtgttcccatctccccctccccctccttctccccttcccagccaagccattttcaccactgcaggaagggggggcctgcggcctgagcccccgtccctcaactctccccggctgggggagtcaggcctgggcaggaatggagagagaaggcagagggatagggagaaggaggagggagcaagatgtggcagacagagatgaggagagaaaatgggggagacagtgatggggaaagacaggagagagagacagaaggcttaagggggaaatttggggaaggcatttggagagagagaaagaaatgagaaacaccaaggagagagatacagaagagaaagatgtaaaaagaccgagggtgagagactgaaggcaagagctggggcaagctggaagaggcccacaaaagatgctcccagggagcactacggagaggagagagatgggggggcctccagtgggagggaaggagggagcggagctggtgggaggaggccaggggcccagagtaccctcaagaggagagggtgactgaggcagatcttgttgtggggagggggagggggcagcaaggccatggtagctgagcccagtctggcacaggaaaaggagatcctgggggaatcagccccgagccacctccaggtgatggaggaatagaggagccttagagaagctgaaaggcagggggcatgactgggtgtgtgtggtaaggattcctgtgtcctcatctctggaataaattgacacctgcagagagccacccgcgggctggcgcctggctctgaaaaccccgcgtcagcaaacagctctggcggctggtgggggggcggggggggggcttgccgaaatgacctgggtgtctgcccctccggtctgatcttctcccttggctggcccctgctgccctgagcacccaggcatcagagcagcaactgtagggggggtggcaaggggaagggtaggtgaatggatgggttgggatgggaagagaagaaagctcagtgttgcccccaggacatgggtcacaatggcttgcaaagatgaaaaggtggtggggtccaaggttgcttgaaattgctggaggggggcagtcagtaggctcctgtgatgtctcttcaagcccacctcagcaccccctctcccaagccagaggcctggtcactaaggctaggctttgattggccaacaggcagggcttttagcgttcttggtgcccccaatctccccctcctctcaacatatatacttcttcctctatgttaaggttggggggaactcttgcattctgactcacgcctttgccctccccttcatgccctgaatggaccaccaaaccaagccagccccttcccgtcttcctccagaacccccctccagggttaaagctgcagcccgttgccgaggtaacattgcggggcagcatcccgtcacccggcaaccggctgcaggatcacgcatctgtccctggatttgcccctccagcgtcccctccctactctaaccccagcctcaaggtaccccaacttctgacggaggaaatggagagagtctggggagagaggggtcgcaggcagcacaaatccttagcgaatggtgtgttgaagtggggataaggtgctaggtttgtgcagtcccaagaaaggcctgagtctggcctggggtgggggttcagcgccatgaaattacagctcaggagtaattaacacatataaacaaacctgcctcttccagctaattaatgacttggtatttttgttttctcttccttgtctacctcattccctcccagggaggtgggagctgggactcctgagtccctgaggagaacctgcctgggagggatacatcagctggaagggagcatgctgggtctggagagctgacccgcctctcctctggctgggtcctggacttgaaccacatctgggccccacccccaacctaggcgtctgctgaggggagaagggctgctgggtgggagtggggaggtgtcagggggcctgtgggtgggagaagggggcaacttggtctgaattccaggtcactaaccacttgtctcttctgtttccccattcctttctgtctgccccatccaatttcccttgccctcttccacctctgtatttttctgtctgtccgtctgtctgtatcctgcctccctgcccctctcgctccaccccccgcaggtcgggcctgccttcaccttctcccatttccttccccttccccaccccgtgccccctccatggagaggaacagaccccttctctgtccagtctaacccaggtccctccccaaccccctcctccctcctttccccccgcccctcctccctcctggggcgaggggggcctccctccctctcccccccttctctctctctccgaggggggggggtcccagggagggagggggggtcccccgatcagcatgtggctcctggcgctgtgtctggtggggctggcgggggctcaacgcgggggagggggtcccggcggcggcgccccgggcggccccggcctgggcctcggcagcctcggcgaggagcgcttcccggtggtgaacacggcctacgggcgagtgcgcggtgtgcggcgcgagctcaacaacgagatcctgggccccgtcgtgcagttcttgggcgtgccctacgccacgccgcccctgggcgcccgccgcttccagccgcctgaggcgcccgcctcgtggcccggcgtgcgcaacgccaccaccctgccgcccgcctgcccgcagaacctgcacggggcgctgcccgccatcatgctgcctgtgtggttcaccgacaacttggaggcggccgccacctacgtgcagaaccagagcgaggactgcctgtacctcaacctctacgtgcccaccgaggacggtaagggcgcgggcacaaagccgggcaccccgtggacacagcccacaaacgcacatgcagaccctcaggcactggcaccgctctagggctcagagctgggcctttgtgggggcagtgagggacggagtgtccctgcaacctctacgtgccccctgaggattgtaagggtgcctccaggcagtcccaggcacacactctgcagacagcctctccataagttctttacgcccatggggggccatggtagggatggcaggcactggactaggctcacccactgtctccccaaagaggcacagtctgccagctaatctcaacctggccacggagggggaatcaggtgatccatcctctgctcagacacccactccaaccttgccccgcctcccgccgccagacctgggcttgttcctggcagaatacccaggttagctacatctgcaccccaaggacaacgcaggctctccctctccccctggctggtgagggctgccttccatctatcacatcatgtccagagccccttgcctgagctgagcaccttggcagtggtaccgatgtccttctcttctcccttg

SEQ ID NO: 7330 - DNA, 6000 bp, Homo sapiens
ttggcttttgatccgtgcccatgcctggttcatgccttggacacataggtttcctttaaagaggtggtattgtagccagcttatatttgcatctacagccatgtttctagtccagcttggtgtgcaatactagatgagttaataactggtccttgtttctgatctggttcccattgtgtaactgtgttgattgggaaggtagtttgtgagccatgaaatgcttggttcattggttgcttattgacctcattaacctaggacttgaatatcccaaagggtatgctctttaccacattcaactcctaatttatttgtttaggttatgatgtgattgctcaagcccaatctgggactgggaaaacggccacatttgccatatcgattctgcagcagattgaattagatctaaaagccacccaggccttggtcctagcacccactcgagaattggctcagcaggtaagagtggcttctattccctccttcagggctgatttagggatgatgagtataatccaaggaccagagaagtcttctctgatcaccaccttgggaggaagacatgggtgccctaacactctcgagacctgctgggttaattaaaagctatttcttacccaaacgtaaccattgcttcctccacccatttcctgagtcaaatgggaaagctgttgggtgaagcctggctggctgggcaagtttgactgtgttctgaataagcaccttcactatgggctaagagatcccttggtgtgggggtgatcttacagtagtcagagcagatggacagtccttttcacccttgcttaatagccagagctgtttcatgcctggggcacacacaattctaatgctggactttttcctgggtcatgctgcaacactgatgtcagagcatgtttttaaatgttctgtggcaggggcagtgattattctgggtgtggataatgtaagaagttacagcagagctccattctaaggcacttggctctcagttttctcagagtgaacatgcctcgtagcttgggtcctatggcaggagtgcaataggacatggatatgcatcacctgttctataaaactggttgctggctgggtgtggtggctcaactcgtataatcccaacactttgggaggccaaggcaggcagatctcttgagatcaggagttggagaccagcctggccaacatagtgaaaccccgcttctactaaaaatacaaaaattagccaggcatggtggcgtgtgccttttatcccagctactcgggaagctcaggcaggagaatttaacccaggaggtggaggttgcagtgagctgagattgtgccattgcactccagcctgggcaacgagcaaagctctgtctcaaaaaaagaaaaaaaaaatggttgctgcgtgatgaggcagttggtcaaattagttttcagaaggttaagggttctaaatatctagagtaaagaaactgaattaattatctgagcggcctcattgtgaatcactgtacactcaggaaccagactgagttgaaatcctgtctttgccacctattgacagcacgatcttaagtggattttagcctctgcctgtttctcagctgaatgtgagtttaataatagtgcatgccccaaagttgttggttaggaatcaatacatgaaaaacatttaagaatggtgccgggcacagtggtaactgacatatgagcacctgcctctctctgctcagatacagaaggtggtcatggcactaggagactacatgggcgcctcctgtcacgcctgtatcgggggcaccaacgtgcgtgctgaggtgcagaaactgcagatggaagctccccacatcatcgtgggtacccctggccgtgtgtttgatatgcttaaccggagatacctgtgtgagtaattcggttctccaatcccctgggtcactttgctcttgtgcacgctttccagtctttcagcgtaagccagagtcattcccaaggatgctggtttctctctgggggaagagctgctctgtgatggagcccatgcgtgtcatctgagcctctggcttccctgccagtgcagccctggcagtgtcctacttcccagggctgttgtctgcctggcgggaaggtcctgggcaaaggatcagtctttgtactctgagagcagactacttggctcctctctgttttttatcagcgaagttggatatatctctcccacatttccctaatcatatgctatatattggctttttttttcttctctagcccccaaatacatcaagatgtttgtactggatgaagctgacgaaatgttaagccgtggattcaaggaccagatctatgacatattccaaaagctcaacagcaacacccaggtgagggcagtcttgcttgaatagctaatgattcttgaaaaatagtaagtgccaggggaaccatatactggattcttgagcctttttatgcatctgcttcagttttaggtgtggctagggaagggagcaggcctcaggaaggaaccagcactctaagactggcctttttttccactaggtagttttgctgtcagccacaatgccttctgatgtgcttgaggtgaccaagaagttcatgagggaccccattcggattcttgtcaagaaggaagagttgaccctggagggtatccgccagttctacatcaacgtggaacgagaggtggggcccagtgcaggaggcgggcctggtagtgagttgttgggtatagcccctgactgatttttgtcccccaacctccaggagtggaagctggacacactatgtgacttgtatgaaaccctgaccatcacccaggcagtcatcttcatcaacacccggaggaaggtggactggctcaccgagaagatgcatgctcgagatttcactgtatccgccatggtgtgtttgcccgctgccagcctgttgtgggtctgcccgtcagaagtgtcctacttgaagccagggttcctggaacccaggtgcctacctggtctgctgcatatttgttttctcttccagcatggagatatggaccaaaaggaacgagacgtgattatgagggagtttcgttctggctctagcagagttttgattaccactgacctgctggtgagtagagggaactgatagcaaaggcagaagggaggatccaaggtgattccctctccaaggggacatcagtgcctctcaggaaagtagcagcttggaatagaatctggcatgcctaaggcctttggggaactgggatgcttatttcctctgccttccttggctgcccacatggatgcctaagtgtcttccctccgggatagagtgtcctccgtgcacatgctgaagagttgtctttcttgacgtaggccagaggcattgatgtgcagcaggtttctttagtcatcaactatgaccttcccaccaacagggaaaactatatccacaggtaagcgtagatctggaacactcccctaccccttcacacctggccctccctgggcttaaagctcctgatattcctcatccccttccttgttttccagaatcggtcgaggtggacggtttggccgtaaaggtgtggctattaacatggtgacagaagaagacaagaggactcttcgagacattgagaccttctacaacacctccattgaggaaatgcccctcaatgttgctgacctcatctgaggggctgtcctgccacccagccccagccagggctcaatctctgggggctgaggagcagcaggaggggggagggaagggagccaagggatggacatcttgtcattttttttctttgaataaatgtcactttttgaggcaaaagaaggaaccgtgaacattttagacacccttttctttggggtaggctcttgccccaggcgccggctcttctcccaaaaaaaaaaaaaaaacactaatccatttccctaacctagtaacctccagatcccagaggctctcctcacctcagctgagctcctttgaaagtgattcaagggactatgtcactcagcctcatttgctggaccaaatctggagggagaacccctaaaacccctaagtgaggttgcccagggggttgtccccaggtggggggaagcaggggagagaaaatggtagccatttttacattgttttgtatagtatttattgattcaggaaacaaacacaaaattctgaataaaatgacttggaaactgcctgtttgggcttctcatttcttacctccccttccctctcccacctgctactgggtgcatctctgctccccccttccccagcagatggttacctttgggctgttgctttcttgtcaccatctgagttctcagacgctggaaagccatgttctcggctctgtgaatgacaatgctgactggagtgctgcccctctgtaaagggctgggtgtggatggtcacaagcccctcacatgcctcagccaagaggaagtagtacaggggtcagcccagaggtccaggggaaaggagtggaaaccgatttccccaccaagggaggggcctgtacctcagctgttcccatagctacttgccacaactgccaagcaagtttcgctgagtttgacacatggatccctgtggatcaactgccctaggactccgtttgcacccatgtgacactgttgactttgccctgatgaagcagggccaacagtcccctaacttaattacaaaaactaatgactaagagagaggtggctagagctgaggcccctgagtcaggctgtgggtgggatcatctccagtacaggaagtgagactttcatttcctcctttccaagagagggctgagggagcagggttgagcaactggtgcagacagcctagctggactttgggtgaggcggttcagccatgaggctggctgtgcttttctcgggggccctgctggggctactggcaggtaaggaggaaggaggctgaggggagggggcccctgggagggagcctgccctgggttgctaaccatctcctctctgccaaaagcccaggggacagggaatgactgtcctcacaaaaaatcagctactttgctgccatccttcacggtgacacccacggttacagagagcactggaacaaccagccacaggactaccaagagccacaaaaccaccactcacaggacaaccaccacaggcaccaccagccacggacccacgactgccactcacaaccccaccaccaccagccatggaaacgtcacagttcatccaacaagcaatagcactgccaccagccagggaccctcaactgccactcacagtcctgccaccactagtcatggaaatgccacggttcatccaacaagcaacagcactgccaccagcccaggattcaccagttctgcccacccagaaccacctccaccctctccgagtcctagcccaacctccaaggagaccattggagactacacgtggaccaatggttcccagccctgtgtccacctccaagcccagattcagattcgagtcatgtacacaacccagggtggaggagaggtaaagctaaaactgggggatgagaggggagggaggcaggactggatataggctcagagggaagaaggaagaggggacagggaaccttggccggcatcgcatgcagtcttgtgaccttccagtctttaacttccgcaggcctggggcatctctgtactgaaccccaacaaaaccaaggtccagggaagctgtgagggtgcccatccccacctgcttctctcattcccctatggacacctcagctttggattcatgcaggtatagccatgacctcagtctcacccctcactcagcctcccggcgcccctcccctcccaatcccacacgctactccttcctctgtggagagggataccacctgcgccttcctcttcgccccacaggacctccagcagaaggttgtctacctgagctacatggcggtggagtacaatgtgtccttcccccacgcagcacgtaagtaacctccttc

SEQ ID NO: 7331 - DNA, 6000 bp, Homo sapiens
aggttgcccagggggttgtccccaggtggggggaagcaggggagagaaaatggtagccatttttacattgttttgtatagtatttattgattcaggaaacaaacacaaaattctgaataaaatgacttggaaactgcctgtttgggcttctcatttcttacctccccttccctctcccacctgctactgggtgcatctctgctccccccttccccagcagatggttacctttgggctgttgctttcttgtcaccatctgagttctcagacgctggaaagccatgttctcggctctgtgaatgacaatgctgactggagtgctgcccctctgtaaagggctgggtgtggatggtcacaagcccctcacatgcctcagccaagaggaagtagtacaggggtcagcccagaggtccaggggaaaggagtggaaaccgatttccccaccaagggaggggcctgtacctcagctgttcccatagctacttgccacaactgccaagcaagtttcgctgagtttgacacatggatccctgtggatcaactgccctaggactccgtttgcacccatgtgacactgttgactttgccctgatgaagcagggccaacagtcccctaacttaattacaaaaactaatgactaagagagaggtggctagagctgaggcccctgagtcaggctgtgggtgggatcatctccagtacaggaagtgagactttcatttcctcctttccaagagagggctgagggagcagggttgagcaactggtgcagacagcctagctggactttgggtgaggcggttcagccatgaggctggctgtgcttttctcgggggccctgctggggctactggcaggtaaggaggaaggaggctgaggggagggggcccctgggagggagcctgccctgggttgctaaccatctcctctctgccaaaagcccaggggacagggaatgactgtcctcacaaaaaatcagctactttgctgccatccttcacggtgacacccacggttacagagagcactggaacaaccagccacaggactaccaagagccacaaaaccaccactcacaggacaaccaccacaggcaccaccagccacggacccacgactgccactcacaaccccaccaccaccagccatggaaacgtcacagttcatccaacaagcaatagcactgccaccagccagggaccctcaactgccactcacagtcctgccaccactagtcatggaaatgccacggttcatccaacaagcaacagcactgccaccagcccaggattcaccagttctgcccacccagaaccacctccaccctctccgagtcctagcccaacctccaaggagaccattggagactacacgtggaccaatggttcccagccctgtgtccacctccaagcccagattcagattcgagtcatgtacacaacccagggtggaggagaggtaaagctaaaactgggggatgagaggggagggaggcaggactggatataggctcagagggaagaaggaagaggggacagggaaccttggccggcatcgcatgcagtcttgtgaccttccagtctttaacttccgcaggcctggggcatctctgtactgaaccccaacaaaaccaaggtccagggaagctgtgagggtgcccatccccacctgcttctctcattcccctatggacacctcagctttggattcatgcaggtatagccatgacctcagtctcacccctcactcagcctcccggcgcccctcccctcccaatcccacacgctactccttcctctgtggagagggataccacctgcgccttcctcttcgccccacaggacctccagcagaaggttgtctacctgagctacatggcggtggagtacaatgtgtccttcccccacgcagcacgtaagtaacctccttccctttctcattgctaccactagacgccagggttcctgaaaggactaagctggggccagggaggtggataggatctgacccttcctcactcctccagagtggacattctcggctcagaatgcatcccttcgagatctccaagcacccctggggcagagcttcagttgcagcaactcgagcatcattctttcaccagctgtccacctcgacctgctctccctgaggctccaggctgctcagctgccccacacaggggtctttgggcaaagtaagacctacctactccttccctcctagaatcctcccactgcactgaaaaccccttccccaggcccataagccactcatctctcttcttaaccccccaaatctcgctctcccagcttgtcatggctacagggcagctttctttccatcctctacaagactctgccagtttcccccttttatcactgctgagtcactgcggtgagctcctcaccaatctcctactccccagcatccccccattccctcctcccacctttatcccaaccagcacgtcactgcaaatacctacctgccctatccttccgccaggtttctcctgccccagtgaccggtccatcttgctgcctctcatcatcggcctgatccttcttggcctcctcgccctggtgcttattgctttctgcatcatccggagacgcccatccgcctaccaggccctctgagcatttgcttcaaaccccagggcactgagggggttggggtgtggtgggggggtacccttatttcctcgacacgcaactggctcaaagacaatgttattttccttccctttcttgaagaacaaaaagaaagccgggcatgacggctcatgcctgtaatcccagcactttgggaggctgaggcaggtggatcactggaggtcaggagtttgagaccagcctggccaacatggtgaaaccctgtctctactaaaaatacaattagccaggtgtggcggcgtaatcccagctggcctgtaatcccagctacttgggaggctgaggcagaactgcttgaacccaggaggtggaggttgcagtgagccgtcatcgcgccactaagccaagatcgcgccactgcactccagcctgggcgacagagccagactgtctcaaataaataaatatgagataatgcagtcgggagaagggagggagagaattttattaaatgtgacgaactgccccccccccccccccagcaggagagcagcaaaatttatgcaaatctttgacggggttttccttgtcctgccaggattaaaagccatgagtttcttgtcacatgcctttctatgccttccatggctgggtctcagggagccggaagcagctgctgaggagggatgaaaatgtcagtgtgtgacgatgcctcatgggttcaccccccaaagcctggcacagctggtgttgggtctgccgtgcctcccttccttcctcctcttggggccactggctgctccagttccccatccgtggcaagccggtagagccattcatccccgcagccttcttcctgaccctcgtacagtttcaaatgcagcagacagccaaagcaatgagtggggggctgtggaacttcattcccaaaggcagcgccagtggctcctgagcaatgagaatgtcctgtcctgtccaccatattcaaggccagcagaagagcccgattaaaccctcgcagcacctggcatgctcctatcccacctacaaggggttgaatcaagaaggagcagtgggtactctgacctccactgggggctcctgggaacagcatgccccccacacggggccacctgccaagcctaacttcatgcccccagtacttgagatgaggagtgtcactctcaggacagccaaggtccagattccagaaaggacctcccagatggccacagcctgcaccagcagtgagcgccagtcccacccattacagctggctacggcgcaatccctgggagccaggatgagcagcaccccccagccgtaggagccccaggaggcttccggcctccaaggcccagagactgccccacaagggcagccctcacctggcagggccccagcagccccacctctgcctgcagacatccgtgtgaccttgtagactttggaggggggccgccaaagggctgatccacagcggaatgacgcacgggtgggcaccgtgggttggcgtcccggcggtcggtaacgaagcacaacgcccccaccaggtagtccaaggtgccctttcccaagcagcgctgcagggtccactcggcctcgccgaagtctctgcccagcacgtggtgcgccctcgggccagcggggagggggcgaatcccgggactgcctcgccaggcctcggctccccggagactcttgggggtctgggccccaagggtgattcaggtgctgcccttccccgacctgggctcgcctcccccacctcctcctctgcttcactgtcccgggcccagcagttgccggcgcactcatgctccgaggcctgagccaaccggaggcgagacaagcacagggccctgcgcgcaacccggcacctaaggaggcctgcccggtgcagactctcctgctcccaccggcgcccttccctctagagacgctgagagaacgggagctagtagcgcccccacccaacgccacctcggagactccggctccttctctctcaacttcgaacaatacaaagtgtgctaggagaagacaagatggcgcccagcaggaggagcggagaaaggcaggggtgtaaatctggcttccaaactggaagcgtcaacaaaggcgtgggaggtctaaccgcgcaggcgtgcagcttcggcaagctttacaattccaacagcgcgtccaaaacgtggtccctgactgagacttattttacgccactagagtgagggtgggtagcgtcagaaagagcggggcacggggcgggccagcttcgccgcgggaaaagaacgggaggcggagtgtccgcagcgcgcacgcgcaacgaaagtcaatggcggtctggagagactggcggaagctagctttgcaatatggcggccgaggcggacggaccgcttaaacggctgctcgtgccgattcttttacctgagaaatgctacgaccaacttttcgttcagtgggacttgcttcacggtgagttttattcagcatccgatccaagtcctactcgagtgaccgtgggcccttagtccaagccttgatcggcgactaagtgacggcagtgactgccgccatgccgagctggacggaagtcacttctgagaagggcggaagtgtctcgggctccttagagggaggacaccatattagtgccagtggggaagtcaccgggtggaattacttctttgtggagtttgtgctgtagcgacaatgaaaaacgaagagtcaacttttataaaacaaaataaaaattaagtcaaatcatgccaacctttattagatcgctagcagggttaaacttaattcaaagcccctgatgaatcgggccttcattgcacccccaaaggctccgccaccctgattgctttctttccagcctccaggtttgctcatagtctgatttcggaataatttgcctcccttcctttttctgattgcgagacagctccacaagggtcaccgtcagaccgtttggggagcgtcagtctgcccctgtcagttcatggtacctctcttgagctcgtggggcactttgttttagccgcattcatgacccgtgagagtcagactcccactagaccaagttccttgaggggaaggcttcaaggctagagaagttgtggatggccagggcataaaagcaagccttgaaagggtaaggtttagtccctgagtaggggccagggacagtcagagtgttcaagaaagagtggtatggggcgggcacggtggctcacgcctgtaatcccagcactttgggaggccgaagcgggtggatcacctgaggtcaggcgttcgagaccagcctggccaatagggcgaaaccccgcctctactaaaaatacaaaaaattagccgggcgttgtggcaggcgcc

SEQ ID NO: 7332 - DNA, 6000 bp, Homo sapiens
aatcagcctggccaatatggtgaaattgcgtctctactaaaactacaaaaattagccgggtgcagtggtgggagcctgtaatcccagctactcaggaggctgaggcaggagaatcgcttgaacccaggaggcggaggttgcagtaagccaagatcatgccattgtgctccagcctgggcaacagagcgagattctgtctcaagaaaaaaaaaaagaatcattatctccacctcttttaatctttcttcaaatcttgccggttttccttggagaggtttttcttctcctttcaactgtcaccttaaatccttagcccagtttctcaacacctcacatccaaactgccgtccacatcctcaaacccactccctccagtccaaggccagcctcctgacgtgcgacctgcacagtggcgcaaggcccatgctcatagttgtttggtttaaaactctgctgttgcttttttttccccccaaacattcatggagctgaatgccatcgctgtcttgaaattcttcatagttctatctttgaatttgtgctttgtaagtaacatccagtggagcactggcgcatgcgtgtgagcagaggagatacgtcccattcacacagcgttccagatgcaacatggacacagaattctggggaacctacaacgtgtgggagttcagccagactccagatgagtataaggtaagcacattatgtctgcaactgaatatgtgaggctgagcccggccagctgctgaattggacgtgaacatggaaaagctccctctgcaaggaacctcaacaacaatggctcctgcctgtaattccagcactttgagtgacccaggcgggaggatcccttgagcccaggagttcaacacaagccttggcaatatggcgagaccccatctctatgaaaaacttctttaaaaattagccaggcattttagccaggtggactagtagacaggcatttagcccggtgagactagtagccactgggctactcccagctacttaggaggctgagctgggaggattggatcaccatgatcacgccactgcactccagcctaggtgacagaataagagactatctcaaaaaaaaaaaaaaaaaaaaagagtaagtgggagtgctgacagctgagagaccacactctccactggaagcagaacttggctatgaacgtggaaaggaagcaatggcattgtaggaggcatggatgatcaccataccttaccagatcttttcttagtcatgtccctgttttggccacttacgctggcaacaatgacatagaaggaaagggaaggctgaggcaacccatagttccttttcctttcagtccttccttccttatcaggaagctgaagatagaaaaatgttaggcggggctcacacctgcaatcctagcactttgggaggccaagatggcaggattgcttgaggccaggagtttgagaccagcctcgtcaacacagagacctccatctttgttttttaagagaccccccatctctaaaaaagaaagagaaagagaccgggtgcggtggctcacgcctgtaatcccagcattttgggaggccgaggtgggcggatcacgaggtcaggagttccagaccagactgaccaacatggtgaaatcccatctctactaaaaatacaaaaattagccaggcgtggttgtgcacgcctgtaatcccagctactcaggaggctgaggcaggagaatcgcttgaacccgggaggtggaagttgcagcgagccaagatcgcgccattgcactccagcctgggcgacagagtgagactccgtctcaaaaaaagaaaaaaaaaacatgtaaacattaaatagcaaagaaaaaaacaccatgagaaagccaggtgtggtgatgtgtgcctgcagccccaactacctggaggctgagactggaaggtcgttcatggacatgctgggtacggtggctcacacttgtgatttcagcactttgggaggctgatgtgggtggatcccttgagtccaggagtccaggagttccacaccagcctggccaacacggcaaaaccctgtctctagtaaaaatacaaaaattagccgggcatggtggcctgtgcctgtaatcccagctactcaagaggctgagacagaagaattgcttgaacctgggaagtggaggttgcagtgagccaagatcgcgtcactgcactccagtctgggtgacatagcaagaccctgtctctaaaacaaaaaaccatgagaagctgaaagaactatggatgaaaggaaaatagtttaggctgggtgcggttgttcacacctgtaatcccagcactttgcgaggccaaggtaggtggatcatttgaggtcaggaactcaaaactagcctggccaacatggtgaaatcccatctctacaaaaaaatacagaaattagccgggcgtggtggtagtcccagctacccgggagactgagggaggaaccgcttgaaccctggaggcagaggctgcagtgagcagatatcatgccactgcactccagcctgggtgacacagtgagactctgtctccaaaaaaaaaaaaaaaaaaaaaaaaaaaaaaagtttatattttagtgcctctaagggcattttttcccctaggttttgaacaagggtccctgcatttccattttgcactggatcctgacaattatgcagctggccatgcttcagtctattctgcagcagattcgggattaattttctcaaaatacagctttaattaggccactcctcagctgaaagttcttcagtggcttcttattagcctgtaggatagagtcctgattcttcagtctaacctgcagggtactccgcaatccacacccatgctgtgtccccaacctcctttcccactagtctccgactagttctctcctggagccaagccagccactcctggggtagactgtgcttactcctgacttcacacctctgtgcctttcattcctttgtcctggaagactacctacccttcagaggccagccccaactcccattcattcattcattcattcaatgcataccatttttttgagatggagttttgctcttgtccaggctggagtgcagtgacacaatctcggctcactgcaacctccaccttccaggttcaagcaattctcttgcctcagcctcctgagtagctgggattacaggctcccaccaccgcacccggctaatttttttagttttagtagagacgcagtttcaccatgttggccaggctggtcttgaactcctgacctctggtctcgaactcccttgctcaggtgatccattggcctcggcctcctatagagctgggattacaggcatgagccactgggcctggccgagataatgattttttttttctctctttttttgagacgaagtctcactctattgcccaagctggagtgcaatggcgtgatctcagctcactgcaagctccgcctcccgggttcaagcaattctcctgcttcagcctcctgagtagctgggactacaggcacccaccaccatgcccagctaatttttttttttttttttattgagacggaagctctgttgcccaggctggagtgcagtggagcgatctcggctcactgcaagctccgcctcccgggttcatgccattctcctgcctcagcctcccaagtagctgggactacaagctcccgccacgacgcccagctaattttttttttttgtatttttagtagggacggggtttcactgtgttatccaggatggtctcgatctcctgacctcgtgatccacccacctcggcctcccaaagtgctgggattactggcgtgagccaccgcgcctggcctaattttgcatttttaagtagagacggggtttcaccatgtgggcaaggctagtctcgaactcctgacttcgtgatctgcccgcctcggcctcccaaaatgctgggattacaggcataagccaccgtgcccggcttgagataatgattcttaacatgtggtatgtagagcaagtgtactcccgccctagactgtgagccccgtgagagatgtggcttcagtgtaacctctctggcctccccagggctacagcacacagtctatagaggtgctcaataaatgtttgttgacccaagtagacacataaggaggtgagttccgacgtgggggtgggggtgccaggaggcagagaaccgaagtagacctggctgcagggctgggatctcagggcagtgctggggactgggaatgtggtgttgagagggcttcagggagacgtgatgggaagatggggaagcctctgcacgtggacagagccaggtggtgtggacaggggctgtgagattggagaaggaggcgtctgggggactggtagcggctcccaacaggggaacgtccctctgggggtggcctttatccatctctgcggggcctgtcctagcttccctcctggctcggccagcctcccggctggtctcttcgctctctttcttgatctctagctctttattcctctgacattctgccccatctgctcccggactcttccgccgcatctgtatcttagtctctttctaactccctgcctggggcccccacctttgagcatatatcggcttctctctctgccgttgtgtttctctggggttatctttccctctactccgcccggacacgccctctatctcttcctcccaccctgtcccagtctagtacctggggtgggggtaatggagagacagctaggtccctaagagaagtcaggggggcgggcccaacctctccatatttacatatgtatgaggtcgcctgggccagtggcgaggaggcggagcttctgggggtgggaagggggcgggcacccccagagccgcagagtataaagaccgcgctcggcgaccgcgggcctcgcactgctgaggagcggagcctccgcctggggggccccccatccctggctgtcccccagctgcgcgtccccgccccacccccgcggctgagccaccaccggtgcagtggtctccgcttggcggagcgagccttgagcttcgttccacagcttctttgcatcttggatttcggggcggccccctcccccacctctctctgcctttttgtaccccgctttttttctgcgttctgctcggtttttgtagccgtctgtttttgcaccccatttcgttttgtttctagacggtttggtggggggtgaagctgcattcataccccttcctcttgttattctcccctgctctgacagcaccccttttcatcgcagttggggggcctaggatcggtgcatcttccgccgcgctgccagcaccccgcagcgcgtggtcgtgcaccccggaatctgcagcagctgcatatctgaggggggtctcctttgcccgcgccgccttcgctccccgtgcttttgggtgtgtggagggcttcagcgcgcggcgcccccgcttctccgcaaccccccgccccgcgcccggactcgccccgcgccaccaagatggtcatccagaaagagaagaagagctgcgggcaggtggttgaggagtggaaggagttcgtgtggaacccgaggacgcaccagtttatgggccgcaccgggaccagctggggtacgcagggccggcacgcaaggggcgggggaaagccgcggggcgacgcctcgggggcgcagggtcccgccgacgcggccccagctcccctcccgggtccccggcgtccagcctccctgccgggctctgggctgggagggggccgaatcgccagtctaatctccccggctggccgtgcggaggcggagaaagtaggtcacagccgccttcccgccccccgcggagccccctcgggcggggggtcgccagctccgcctgcgtgtccgcgccggcgctcacactccctctcggggcctgtccgctccacacgggcgtcccccacctccaaagagcgccccttccctccctccggctctcactagctccgcagccccgtct

SEQ ID NO: 7333 - DNA, 6000 bp, Homo sapiens
tgtctctgggttgaggtattattatttgtttcttcctctctaagtgtttataaagaaaaagtataaggcccggcacggtggctcacacctgtaatcccagcacttttggaggctgaggcgggtggatcacctgaggtcagaagtttgagaccagcctggccaacatcatggtgaaaccctgtctctattaaaaaaaaaaacaaaaacaaaattagccaggcatggtggtgcatgctctgtctcaaaataataaaaaaaaaaaagtatgaatctatatggcttttggtggctaaatttgacattaaagtctgagctcacccttgaacattgagacagagtctgtgctccatatatacaccccatctgccacaacactgctagaggcacgcgcctcagactccttttccctccgagtgactcagccattcccccgtctctgtataggtccctgtccttcgaatggtggaaggtgataccatctatgattactgctggtattctctgatgtcctcagcccagccagacacctcctagtaagtaatgtttgcctccctgctcgccgccccaccacccagtttcaagcagggcctcttgggagagtcaagggctgccaggggtctttggaggaggaaggcttggcatgcttatcagaggggctggtcagttggcttcctccccttcctttttttttttttagattgagtctccctctgtcacccaggctggagggcggtgatgcagtctcagctcactgcaacctccgcctcccaggttgaagtgattctcctgcctcagcctcctgagtagctgggattacaggtgtgcaccaccacacccagctaattgtgtatttttcatagagatggggtttcaccacgttggccaggctggtctcgaactgacctcaggtgatccacctgccttggcctcctgaagtgcttggattacaggcatgagccaccacacccagcctcatttttgtatttttagtagagacagggtttcaccatgttggccaggctggtctcgaactcctgacctcaagtgatccacctgccttggcctcccaaagtgctgggattacaggcatgagccactgtgcccggccattcctccccttcctttgacagcaccggggtttcagtgtccatgtctctctcagcgtggccagcagcagccgggagaacccgattcatatctgggacgcattcactggagagctccgggcttcctttcgcgcctacaaccacctggtagggaccgccatactcagccccagcactcgtactggcccggctctccttccttgagggcagctgaggctttgcaagacctgttttcagccctttccttcccccaggatgagctgacggcagcccattcgctctgcttctccccggatggctcccagctcttctgtggcttcaaccggactgtgcgtgttttttccacggcccggcctggccgagactgcgaggtccgagccacatttggtaagcatctgtgcctccaagggaggaggagagggaagggcactgccacctgcacaggggccttttgtgagccgggggccacctgtgggggttcacgccgtcctctgtacggccccgggagcaggtgcagcccagtcggcagaggagcaaacaggctcagagcaggtaggaaaccttcccaaggccaaccagctggtcaaaggactgcttccttcctgaactcataccctgtcagctgtggagcttttggtctctgaaatctttctagaaaattgttgataaagctgattccgttttcctgtaggccttcaacttgcatctctccaaggaagaactgggatttgagagggatgaagtggggcttgggcatttaggtcctttgggaggatagatgtggggagcatcagaggtctttgtcctgcttgtgacagacagcatgggggggatgttgagtccaagcatgttggtgctgggacgggagacagacctctgcttagcctggttagtgccaggagccattgccccctcccccactttgttccttccctctctagcaaaaaagcagggccagagcggcatcatctcctgcatagccttcagcccagcccagcccctctatgcctgtggctcctacggccgctccctgggtctgtatgcctgggatgatggctcccctctcgccttgctgggagggcaccaagggggcatcacccacctctgctttcatcccgatggcaaccgcttcttctcaggagcccgcaaggtaggggtcacaccctgagagcccaaagcagctgggcagcggggcaggagcagggatgtagtctgcagtgtaggggaatgggtggggatggggaaaaaatcccaagctgaaggagtgcctggagaccccgagggaggcagggacatccagggctttgggggtgactccaggtcctgttccttgtctccaggatgctgagctcctgtgctgggatctccggcagtctggttacccactgtggtccctgggtcgagaggtgaccaccaatcagcgcatctacttcgatctggacccgtgagtggctgtgactccttcctacacagggccctgataagcctaggaatgccagagcccagctgtagggtcccagtccctgggtgtgaggggttcctgccccaggggtgaggcctctgccagcaaatctctcctctctctcgcaggaccgggcagttcctagtgagtggcagcacgagcggggctgtctctgtgtgggacacggacgggcctggcaatgatgggaagccggagcccgtgttgagttttctgccccagaaggactgcaccaatggcgtgaggtcctcagttcaattccagagatgttggggcttgggttggggagggaggtgaatcccagagggagcaagtgtcctcactgaaggcactgatagaccctccccatctctccctcagcctgcaccctagcctgcctctcctggccactgcctccggtcagcgtgtgtttcctgagcccacagagagtggggacgaaggagaggagctgggccttcccttgctctccacgcgccacgtccaccttgaatgtcggcttcagctctggtggtgtgggggggcgccagactccagcatccctgatgatcaccagggcgagaaagggcagggaggaacggagggaggtgtgggtgagctgatataaaaaggtttttatgatactagagtcttcgtgtctgttttgggggggcatatgagtgaggtgggggaccaggcagggggactggcgggctccctggtccagcagcagtgggtatggcatattggtcctgaaaccaggcgttgagaggtgggaccaggcaggagccaatggggcggctgagcttggtgtgaagtcaagtgggtgggggtggggcttcatgccattgactggttggttgctaggcaacttggtaaactgaagggggaaacctgtttgaaatctcactcccaaggtgggggcggcaggggtcagggtgagcggggctgagcaggagctgggtcagactgttgggtgtgaccgtgtgagactgtgcagacagtgacagggcgcctgtcgcccacactccacactgtttgccattctccagcagcatggggaccattactcagctctgaggggagcaggagcactctcctccgctccccggggctccccaggaggcagacaacccagttgccagagtcaaggacacacataaaagagtaaaggtgttgaaaaatacagtcgtcacctttgatattgctgttccatgcggggcgcggcgagggtcttattcattcagcggctgtcgctgggcttgtttctccatttgtctgctctgtctttgggggtgggggacgagtgtgtcatttgaagcagtgactcctccctcctccccccaacaccttcccaaacactgagaatggggggactttgaagaaatactgccagcaggggatgtgattttggacctcacaatcaaagggaagggacgaaaggcctggggaggcttgagagggagaggaatgtcacccctgcccagaggtgctgaaagccagggctcttacacccgaaaaggcaactcctcccttcccccaggataattggaaacagcccttcctgcgcagcgccggtttggggttgtaggtacgccccttcttctcccagccccgcttctccccccagccatctaggaaagacccaagtgtatcccctaaactcttgtttttcactaacccccaggtaacaacagcacttggtccatggagcagtgacaaaagagaccccaagagtgggaggtgcgcagcctgggtttggtttctagctttatcccagacttcctgtgtgaccttgggcaagtcacggggcctccctgagcctcagtttcctcatctctgcaatgggatcgttagctctgcccctcccacttcacacaggtagtcgtgacgatcagctccgccgcactttgtaaagcgccaagccttcaaggttattattattctctccaaacctgccgggagcagcggtgttgttttgggatggaggaggaggctgcgggagcgaaaggggtgggttcctcggggtggagagggcgagagcctttctggattcgagagaggaagattccagcagcttgggcgatcggagggcaggaggggagccgggcagaactcagccggagccagaggctcggagagacaaagggggcgtgacagcccgcgccgggggctgaggcggggcggcgggcgggaggtgcgcgaggtgagggaggtgtggggggcgtgggccgcgggatgctgccgcccgctccgcctcgagctccagctccggtttttccctccaccatcctctgcccctccccgcctctcctttaactcccccctcctgggctcgggactggtttcctcccttagcccgctgccctcaatcccagcgaggctggggctccggctcggcgcccccttcctcgctccctggtccggcgccccatgccgcccccgcccggtccccggctcccccagtcccccacttaggcgggctcacagatcccggggtgctggcgcgtgggccgggggcgcgtagggcgcctgcagacggcccctggaagggctctggtggggctgagcgctctgccgcgggggcgcgggcacagcaggaagcaggtccgcgtgggcgctgggggcatcagctaccggggtggtccgggctgaagagccaggcagccaaggcagccaccccggggggtgggcgactttgggggagttggtgccccgccccccaggccttggcggggtcatggggcccccccattctgggccggggggcgtgcgagtcggggccctgctgctgctgggggttttggggctggtgtctgggctcagcctggagcctgtctactggaactcggcgaataagaggtgagtggcctgcggctggggagatcccagaccctagggcagtgggtagggaagctctgggggcttggaggcgggcttctgtgggcagggaggaggcgggagggaaggtgctggtgctctgatgtgtgatgggttactagacaggtgatcttgggagccagactccgggtcccacgcagagctggatgcgggtggtgctatggatgtcaggagtttggagaccccaaaggggcaaggagaagaaagttcatgggtagccgggagggcagtgaggtgggtatttggatctgtgggaggcctgcgtcgggggctgggcttggagggagcctggttactgtcagctctcaggagagagctgcagattaggtgctgcgagtcgctgaggggaaggcagggcagggtgcctccctcccccagagggactgcgcatccgagatgggaggcaagggggttccgtttgggggctctggggacaacttccccaaggctccttgactctcttcacagtctgtctcccaactcttccccacagccagagggtcagtgaactgttggctgaacgatttcccagccaga

SEQ ID NO: 7334 - DNA, 6000 bp, Homo sapiens
ctcagcactttgggaggccaaggtgggtggattgcttgaggtcaggagttcgagaccagcctggccaacatggtgaaaccccgtctctaccaaaaatacaaaaattagcctggtgtggtggcgcctgcctgtagtcccagctactcgggaggctgaggcaggagaatcacttggacctggaagacggaggctgcagtgagcagaggtcaagccactgccttccagcctgggtgacagagtgaaaccctgccacaaaaaataaaattaaataaaattaaatatttatttgaaaaaagaattatatgatccagcaatcccacttctaggtgtatacccaaaacaactgaaggaagggactcagagaccaagaggtggaagcaagccaagtgtccacagaagaatgaatgggtaaataaaatgtggtatatactgtacatacaatggaatattatttaaccttaaaaaggagtgaggtggggcttggtggctcacacctgtaatcccagcactttcggaggccaaggcaagaggatcacctgaggtcaggggtttgagaccggcctggccaacatggtgaaaccccgtttctactaaaaatacaaaaattagccaggcatggtgatgcacgtctgtagtcccagctactcgggaggctgcggcacgcaaattgctttgaacccaggaggctgaggttgcagtgaaccgagattgccccactgcactccagcctggggtgacagagtgaaactctgtctcaaaaaaaaaaaaaaaaaaaaaaaaaaggaatgaacctctgatacgttacagcataggataaaccttgaaaacatcatgctaagtgaaataaacagacacaaaaggacaaatactctatgattctacttatgtgaggtagctaaagtagtcaaattcatagagacagaaagaatgatgggccgggggcaatggctcacacctgtaatcccagcacattgggaggctgaggtgggaggattacttgagcccaggagttggagaccagcctaggcaacatagtgagaccctcatctctgccaaatttcaaaaaattagccaggcatagtggcacatgcctgtgatcccagctgcttgggaggctgaggtgggaggattgtgtgagcccaggaggttgaggctatagtgagctgagatcgtgccattgtactccagcctgggcaacagtgcaagacccggtctctaaaaaataaaaaggaaaaaaaaataagaacagtggtttctgggggctggagggaggggaaatggggagctagtatttaatgggcacagagtttcaattgggtaagatggaaaagttctggagatggacagtggtgatggttgcacaacaatatgaatttacttaacaccactgaattgtacactttaaaaatgttaaagtggggagactgggcgcggtggctcacccctgtaatcccagcactttgggaggctgaggcaggcggatcacgaggtcaagagatcgagaccattctggccaacaaggtgaaaccccgtctccactaaaaatacaaaaattagctgggcgtggtggcgggtgcctgtaatcccagctactcgggaggctgaggcaggagaatcgcttgaacccggggggcggaggttgcagtgagccaagatcacaccactgcactccatcctgggcagctgagtgagactctgtctcaaaaaaaaaaaaaaaaaaaaagttaaaatggtaaattttatgttaggtatattttatgacaaaaagattttaaaaatccccccttcatcttcatctatattacccatctgtccatggaccctagaggaaaattgggagattgtcaatttaaccaaattggtctctggacctcattctcatcatgtgtgaaatgaaagagttggctggagtttccacaatttcatgtagagatgttgagtcagaagacaggagatgtggggaggtaactcttatggaaggtaagaagcacagcactgtagaaacgaatattgatgtctactggattttggaagtctgctacaggtcagacatctaaatttttgttgacaaattttttttaatttaaattagaaaacatttcaagcatacagaaaatccctacatatagcgattgtttaccaccaaaaactaacagatgttaatattttgccatatatatatatgatccgccagcctctgcctcccaaagtgctgggattacaggcatgagccaccatgcccagcctatgtgtcttgcttaataaatccattcctaccctgaattgataaagatgtcttttcaatctatgtctttttttctcttaaaaatttctgctctttttaaatttttctattttcttattttttttctttgttcttcagagcagatctactttctttgaattctataatctaaaatttttaattaactttatttggaaataatttcaaacttaaaaaatgttgcaaaaataaaaaatatgcaaagaacactcacaggctgtttacccagattcacctattgttagcattttaccctatttgtttatcatttgaaatagataatatataaaacataccatatatcatatctaatatatattttttctggactgcttgagggtcagttatatacatgatgctttaccattaaatacttcagtgtgtatttcctatgaacagggatagtctaacataactacactaccattattaactttataactttatactcttttgaatctcctgtgatattccaattttgtcaattgccaatttttttgttaatgttgatgttctttatagcatttttataaccccatgccgccctataaccatttttcttttctttttttgttttttgagatggagtctcactttgttgcttaggctggagtgcagtggcgcgatattggctcactgcaaactctgcttcccaggttcaggtgattctcttgcctcagcctcctgagcagctgggattacaggtgcactccaccacccgcggctaatttttgtatttttagtagagacgggacttcaccatgttggccaggctggtctcaaactcctgacctcaagtgatccgcctgcctcggcctcccaaagtgctgggattataggcgtgagccacggtgcccggcctcaagccctataaccttatagcactttaaaaaaatccaatgatacagaatccaaactaagggcaggtgttgcatataattgtcatgtctttttaggtttctttaatctgaaacagttcctcaacctctatttgccttctatgacattgacatttttgaagaatgcagtcctccccacctttttaaatagaacgtttctcatttagtgtttatcttatgtttccttgtgattagatttgaaataatgctggaacattgccgagacgtattgtgcagcactgcataggtgtagtattatgtccttctcagggtatcacatctggaggcaaagaatgtctctctgcccctcatggttaattttgatcacttgcttaaagtattgccccatttctccactgtacaatgactgctttttattttattccccactcccttccaactcatggcaatctggagggagatactttcagaccctgcaaaagttctgctcctcatccaacatttcccccagctttagaatccactgatgattcttacctgatccaatctttgccaccaagtctgaaaatgattcatttaaaagtttttaagttttatttttcacatataggtctttgacctggaatagattttgtgtatggtgtgagatagggattgaattctattttccccccagatggctaatcagctccatttgttgaagtttattctttcccagttggtaagaaatgtccacgtcttcacacatttgctgtgtttgtttcagtactgtatattctatttcattggtccatttgtttatccttgtgccaaaactatgaagtctttattgccatagctttataatatatatttatataaatatataattgctgtcactacataatgtggatttatataaatatataatatataattgctatagctttatagtatatatttatataattgctgttttatatatcatataattatataaatatataattgctatgttttatatattatatatttatgtagatatataattgctatgttttatatattatatatttacataaatacataattgctattgctttataataaatttgtatatcttatagggcatcttccattatactcttctctaaaattgttagctattcttgccatccgggcaattatattcattttcacaacaaccctcagattaagcaattgcccaaggtccaaaaatcagcaagagggacttggaacccaggtctgtcggaggccaaagctcttttcattacttcctgagggtggttttctaggcatggagaagcagaggtcagggaatcaagtgtggcgagagagagaagagaagtgaaagaagaaaggcaggtgtcagcttggtgtgggtttggtctctgggatatagactttgccagccaaaggatggagcttgaacttagctggcagaactggaaacagaagattgtaaggaaagggactgggatcagtgtttcttctccaggacggattacccacagctgtccacgggcaggcacttgttactttctggctgagcagggcagtgtggccgacggctgaaaggggaagctgcggctgcttttgtgcaggggtggtggtgatgagggtgatgtggggggctggaaggcatggaggggaaaggatctggctgactacctggaagccaggacagatcccaccccagaaaggcgcagtaggggctctcatcctccactagcccgcccctccctacctaattaaggaccctaatcagcttggggagattaagggctctggccggctgtacccacgcccccgccctggcctgggctggcaaggaagacctgtgggcgggcgtcaaaagggggaccggccctgtgacccctcaccgggggccgtgggcccgagcccccggacttccctgtaaatgtcagaggcccctccgctgggatagggtcggtctgagggcgcaggcgagtccctgctgacccctgacgcctccgacggggggaggggcaggccgggtgggagcgggaagccggggcggcagaagggggcttcggggcggtgtccttggccccagttagtcttcccagcctccggagggggcggtagcagcagaatcatcccatgggttactcgggcttggagaaactcggggttacggggagaaccctaggggaggccggggtctcagtcgctcagcctgctccgtctgtgttcgcagaagccggcaatgaccgcctgcgcccgccgagcgggtgggcttccggaccccgggctctgcggtcccgcgtggtgggctccgtccctgccccgcctcccccgggccctgccccggctcccgctcctgctgctcctgcttctgctgcagccccccgccctctccgccgtgttcacggtgggggtcctgggcccctgggcttgcgaccccatcttctctcgggctcgcccggacctggccgcccgcctggccgccgcccgcctgaaccgcgaccccggcctggcaggcggtccccgcttcgaggtagcgctgctgcccgagccttgccggacgccgggctcgctgggggccgtgtcctccgcgctggcccgcgtgtcgggcctcgtgggtccggtgaaccctgcggcctgccggccagccgagctgctcgccgaagaagccgggatcgcgctggtgccctggggctgcccctggacgcaggcggagggcaccacggcccctgccgtgacccccgccgcggatgccctctacgccctgcttcgcgcattcggctgggcgcgcgtggccctggtcaccgccccccaggacctgtgggtggaggcgggacgctcactgtccacggcactcagggcccgggg

SEQ ID NO: 7335 - DNA, 6000 bp, Homo sapiens
cttcttatacttggtatgtttttgtggttcatacatatcatggcatgtattggtacttcattttcattttatggccaaatattccactgtatggagatacaacattttatttatacattaatcagttgatggacacttgggttgtagccactttttggcaattatgaataatactgctatgaatattcacatataaatttttgtgtggatgtatgcttttatttgtcttgagtctattcctgggagagaaactgctggatcatacaggtccacgtttaacttattaaggaacagctaaactgttttctaaagtgactacatcattttatatccccatcagcaatctatgagggttccagtttctccatatcctcgtcaacacttgttaatatttgactctctgattacagccattgaagtggatgtgaaatgatatctcattataggtttgctttgcatttccctaatgactaatgatgttaaggtttttttcccctcatgcttcttggcatttgtaagtctgcttgggagaaagtctattcaaatcattagcctacccttaggttttgaaatctattgttttcaaatacacagctctgggtcaactggttacatcctgcatactaggttgggatttttttctccttttagctcctagagaaagctgggtctttatctattgtgggaattcagcaaggctcagaaaaagttagcatttacttcaaagtcatgtgatatggtataaattgcagattttattcagtacatgtagactttctgagaagaaatcctatttgaaagcaaaggagcagacaacctacaggacaagatggaactagagtataggttagtttccattttctaggttctcaagctttttaaatattaattttaagaaacaaggtacaaagctttacgaacactatttaaaaatatataagtaggctgagcacagtggctcacgcctataatcacagcactttgaaaggctgaggcagaaggatagcttaagcccaggagttcaagatcagcctcggcaacacagtgagacccctgtctctacaaaaaatttaaaacttagccaggcatgctggtatgtgcttatagtcccagttacttaggaggctgaagcaggaggattaactgagcctgggaggttaaggctgcagtgagctatgatcacaccactgcactcccacacaggtgacagagtgagaccctgtctcaaaaacaaaaacaaaaaaagaaaaaacataagtaagtggtaacgaccatattaacacacaattgaatgatataactcaactttctgtaattatggaataatatatataatgcttttagctaaaaataatgatttcagttatttacatctatttaatattttagttaaaaaataatgcttttgattacttatatctctttccacaagtgatactaaacatagcttgtgaaatatattttgcttgaaatgtgaaatacaaagtcaaataaataccatatctaattgtggagccctatactatttcattaacgaagatgctacaggtagactgagggacaaaaaaaaaagacaatataatgaaatggaaaaaatgctgacttggatgtctagcgtcaatgttctatcacagagtaaatcacttaacctctctggacctgtatttacaaatctagaaatgaaaaggtagagagctatatggatttctgaggcctatctctaaaagtcctatttcccgttttaatggtatttcataaaatgggttgtgttcaaaatgtttggaaagctgtgggtcaaacagttatgatactctttcagttactcatccaaaatctattccccacttcttccttggtttaacgttaatttgatttgagacagcaatatggctaggtccacagtgatgaattgagactggcctaacgaaatcattgcaaccctgttttcagctttccttgcttcccttgcagctactcatggccaagtcaatgtatatggccatggaaccctcttcattccagaagtatctccaaaggattacttttctggagagtatgatggcctaggctaactttactataaatagtagatagataagtgcatttcctggccagtaaagccagaatgtgttatctctgaggcatttcttccataaaacatttactctaattttttttttttttgagacggagtcttgctttgtcacccaggctagagtgcaggggcgcgatctcagctcactgcaacctccgcctcccaggttcaagcaattctcctgcctcagcctccagagtagctgggattacaggcgctcaccaccacggccagctaagttttgtattttcagcagagacagcgtttcaccgtgttggccaggatggtctcaaacccctgatctcaggtgatctgcccacattggcctccccaagtgctgggattacaggcatgagccaccacgcctggcctctaatttctacaaataaataaaaacctatgcattcatttgtgtacttggccttaccttgtgcccatttttggaaaaaaatttaaaacaaaggaagtatctgttggtcaagaaggtgcatgtctattaaaccccttgcctatcataagcctagagaacttgggagttagtgaaatataacattcatgttaatcaaccttttagacatggttgtgttgtgaagtaaaagctggaatccagtattctcagttctgtatatcattatcaccagcggtgctttaaagagaaaattataggtctctctacatctatcatacacctcctcagattcaatgggtctagaggtggcttagacatctataattttttaaagtcctacatttgattctgataggctgccaaggtgaaaaacactaagttttataaatcacagaagctatgactcttcaagatgcttaggtgagtaatgccttatggcatggtgaaaataacaccctcacaggtttcagggactcaggtcttggttctggcactcaacagctaggtaactttgatcagattacttaaaactctctgggccttaatgtgccagacttagagaggataacttttgctctaggtttaaacaacaagtgtttataaaagcacatggaaaattataaagagttcaaaaacttttaacgtagtacttaatgctattttcctctttatggagtgtcctttccctttcttttatgctgtaaaaatcttttttttttttttttttttttactttcagatctagggtacatgggcacaacgtgcaggtttgttacatatgtatacatgtgccatgttggtgtgctgtacccattaactcgtcatttacattaggtatatctcctaatgctatccctcccccctccccccatcccacgacaggccccagtgtgtgtgatgttccccttcctgtgtccaagtgttctcattgtgtatgctgtaaaaatcttactgttccttccagagcaccaagtttagatctctgaagctttccttaaaccaactgcacagaaatgttacctcatcagggtttctgcagcactttgtatactacccctatcacactgatagtgacaatcgacaacctcttgtcccctcattggtctagtgttaagctcctacagaatcgggtggggggggtgtcttaatctcttcagcgtcccctgtgcctagcaatgttagttgaggtgaaccaaaacggctatcctctcatcattgaaaacacagaaaaaaatggcctttttagaacccaattacctattttttctcttctttttcaaaagcggaatcttttcttcaatctactttttacttgtggaaccccaatctgaaaagaagatcgaggggttgggggatgctgagatctaccctggtaatcacaacacttatgataacacaggtaataatctattagtgcctgtacctagtaggtgtctggctacccatgaaacacatttatctaattctctcaacctcttataaaagatgtaccattactactccattgtattgctagataactgaggttcagaggacttaggtaatttgctccaacaaggtcaaaaggccagaactagaatacggatttcactccagaccaccaaatctgaacctctacatgcaatctggagatatctggatgattcagttcctttagtgtggctcagaaacaagtaacccggagttcctctgggctcccatttgatagagactacggtaaagtgtaattgattagacgtggaggtggaagcatccccacgagaaccatttcctcatgatgctcctgtcaccgggaagtgttctaattttaactttatttttattttaaaatttatttttagagacagggtctcactgtgtcgcccagactgcagtgcagtggcgcaatcaccgcaacctcgacctcccaggctcaagcgatcctcccgcctcagcctcctgagtagctgagaccacaggcacgcgccaccacacctggctaattttacattttttgtagaggcggggtctcgctttgttgcccaggctggtctcgagttcccaggatcaagcgatcctcccgcctcggtctccctaagcactgggattgcaggcgtgagccacagcgcccggccgctgtaactttaaattgcccgggaggactctgcagcccaaccctgcccacctcacccggtcaccggaggatgcctgtcaacttctgggagctgcaagcgcgggccggccagtcgtccgcgcgcggctttttcttcaggacagcggaggcacaccgtgctttgcggttcccggaagtccttcaggcctcagacctgtcagcccgccacactccagccagtcccttccgatcacctccagacaccacgctctcctttcggagcccgcccgccggaagtggcggcccggaactactcccacaggggggcggggaaggaagatggcggcgcccagcgtcccgtgaggagagaggacacagggatcccggggagcggccccagactcgtaaattatggccgcatctccgcacactctctcctcacgcctcctgacaggtactgtacccgccttgggcacgaccttgggggaaattcttctcttattaccacgtgcgaggccgtggttccggctggctgcaaccttggggagcccttggcgaggttggccggccaccggtgtggtgggggaaatgacctctggagtagcttggagtgaagaggtcacggagctagggtccagtcttgcactgtggctttagtggtccacacagcctcctccatccggcttctgcggaagagcggtgtcttcctgcttctttaggttttcagatagtggaagctggaggagagggcagagcagaaccttggggttccacagtcctccttatcagagcctcggcttctagccactggcttgcaatgacaaggaaggtgctttgcttccactcagaagccttgttccaatataaagggtcatgatgacaacgttgatgataatgacagttgcagacagcggagtgtagtccccatcagacttttgtctctgtaccgccagagtggtctttaatatcctttcactcgaagaaactagtgacaaatgtatattggagctggaatgttcttccttgactcttggtaatggctcatctcaaatgtcaccttttcagagaggcctttatagagaccaccctatataaactagggccccctacttctttcttttcacatcattccatttatttctttcattatggttagcacagtctatacttgtttatttatatactcgtttattatttgtttttcccaactagaatataaaccttgtgatggcagggacagtgtccatctctggtttacctctgtgtttccagtgcccagaacagtacttagtgtacattgtttgctcccaatagttatttgtggatggatgcaatttgtccccatggagatcttaaagaggacgttagatgattaactaatggttgtgtgaggaatgtgatgcc

SEQ ID NO: 7336 - DNA, 6000 bp, Homo sapiens
tgtttgtctcagagactgggaaagcgggtcttctggggacacttaggagagttgcagggcacgtttatatgcttatagaagtgggaaaattaaaggaggacgagtcatctctatcacattttcctccatcaactcagtggctcaggctaggaaacttgaaggcagaattgtcctggaggatttccaatgctagaagcatcatgaaggaagagaggggctggaggtatttgtaggagaagaggacaaatggaggaccacagatggctggtggtactgaggctcagaaatgttgtacagcttgagcagattcggaaaagcaatgcagctctggtgtatcatatgccagggtcctggcatgacaccctccactaggtaaatagaggagcatgggacttacaaaggagctggaggagaagaggacacccaggaacggcgtagtgccttggctctggtaagtgggagctgtccttgccatcctaggcctgaagcgggaggagagcaatcataagagaaccaagggactgtcaggctgtgcggagaggacttccgaacaggggcctggacttccaggtgggggaagcagccagcccttcaggagccagccaggagacagcgtgcggaataggggcctctccctcagactccccatccttcgattccctgtccctttctctaggagacaagggaggctccggagcaggatgccgcgtggaagaatttggaatcagcgcacacccctactcctcatgacacaagtcatcaaaccaaccagggcgtcaaaatcttatttataagctaagagcatccatccttctgtagtttgcagagggctcctcatacatggcagcgcttcctgtgacaatcccagagggtccaactggaactggaaagtgcaccattcccaaggagcagtgggagctcgctctgggaagagtttcttccctctccgcggagccttccagccactcttacaaggaatttctcatccctgcagtcggcttggccagcagcagccgcggggctgcgccagtgcccgcctctggccaggggttcccgcgcctcgagcagcgccctgggcccttctacgggaagaggggatcgcggcgcccgcgacacccaggagctcggacgaccgcagcctcaccactaacccccaacaaaggtacagcgggagtccaggccgagataaagttcccttcccagtccgctggggagacaactggccgcggctgccctctgctccgctcccggctgtcccgcagctgcgaggccggggccagagcgctcccttccgggcgggcatcggagccgctgcggcgccgaccgcccttcgcgcccgggccgctggagaaggcggagcgagctcgcagctgctaacccccgaggggccgcctcgctggcgaggggagcgggaggaaggtccggattccggtggcaggaactggggctctgggccaccggttcaggctgccccaggaaatgcctgctttgcggtgccgcagagggtatagaggagctcggccccagagggtggctgttggggaggcggagctggccgcaggctggagcagctgcggagcctcccatcccgagcctagaatcggagaaatttcaggcggaaaatactgcggggatggtttggctcaagtctcccattctacagatgtgaaattttagagtgacccgactggggtcgcacagagggctgttggcagcaggacctgggggaagagcgagaggagagggcccccgtggcggccctgccctgtcctaaaggagaggggctgcctcccagatgagagccctgagaggccctagctgcgcaccctattcggtaataccaaataaaccaaccaaaataaaacataaaccttatagacgtgctgaaatacaattctctcctttctacatttccgaatacaaacattttgaatgagtttatcagaggtaaacctttccctcggttttagtggtggcagtttgctgatgcccagggtccaagcgtggggaaccccgcactgctgagcaaaggttaagggcagaagctcaaactgggttcacggttaatttggctaccagctctgtccaggtttgagcctcgggttctgcatctgcggaatgggaagacggttgggagagatggcctttgccaagggtggaccgagagcgaccgccgcgcgtgggaatttcacggcacagcctacgactctctagagcaatgggaggatcagctaggtgggcaaaagggccaaagcgtcagttcgccgcccaggtcgtcctctggcgccgcttcccagcccgcccaggcgctgtccaggccccagacgaccctccgaccttgtgccgggaaggccccgcggcgcggtgcgcaccgcgaactcccctgtggttctcaatagttggaattgaaaggacgccgggtgggtccggcccgagacttagctgtgggagctcagctctgcgctgcagtcagagcaatttccgacgcccacatctttacctctactccctccttccgttaatccacccccggaaaaaagaaacgccaaatgtattcagctgcctcaatttgtaattgctcacttattagactttactaatcctcaggacagggaccttttatattgggattgtcaaaatccttaaaacactgaaagactcacacccaggcaagcctgaagttagccacatgggagctacagttcgcccaacacacacctatacaacatgaattttccacctaaataacataaaatttgaagacactccctacggagacactattttctcctcacatttccaaatagagtcgggctagtgctcagaaatatatttgttctcatgttttagaagtttaaaataaatggattagattatcaaattaagagcgaataagtcacttcgaagaacaaacacaacgttccagtgagacacggaaagaaaagctagaaagaagttattgctgagaatataaaagcgggagggaaatcctctgtctaatttatttctccctcaacagttttgtaagaaaacgtcttgggctcaaagtagttgcaaagaagtctcccgtagcacagccggggcgcacgggtccggtgctggcagctgtgctatctgaatcctctctggccattaccgctgctcaggcacattttcaaaccaggggtgctaacgtcaatctggctttctgcgtttgcttccgacgaggggggaccggacccagggtggggctgcgtaaactcggggacacttgggaacatttactcaggaagtgagaggggccggctgctggtggctggtcctggacagagtggtcgagggaccagggctcaggtcggttccgctgcgcccgccgtcgccgacagtgaagtaagtacagtgcgggcggcggctcccggtgagtcacttcgtgagtgacactcagccccgggggtcgcgctggggtcggagccggaaggaatgttctgtccccggaaccgcttgcagccaggagttggaggccctctggccccgcagaggctgggttgcaggcatcgaaaacttcctgaacacgaccagtaagaatttgatctcgagcttccgaactccaaacgcctgggcaagaattcagcaaagcgcagcaccgctcacccgcacttcccccagctagcggttgctgtttcttggaagacgcgtttatccgccccagtcccgggtgggtgggtcattttgccaaagaaaatgtggttgggggtgacttcgagtagactttcactattaaataagtgcacctcagtgatggatttgttccaaattgatgtttgacttttaaaaaagcggtggtgaatgacaacacgaaacaatcagtgtcacaggttagcaaatcacactgtctcctaaattaaggcaaatgttggctttatatctattcaggaaaaagggggagatggaaagttttctcaaacctaacgtctccaacaaactcatatccagataaaacttcctacacatgactcccacgcacatgtttcgaccaggaaacttttgtttaccagactctcttcctggtaatttctcctgtctcttttcccctccccaacctactttcggcagtttggaaggctggagatttttgttaaggacactttacactaatctcagttaaccggcaggccaagctaacctggcaaagaataagaaggaaagacacacacacacacacacacacacacacacacacacacacacgacagcgatttccaaacatcctttctacttaaacttcctaatcccgtgcctgtcccagaagggtctccgaatgagtccccggcgtgggttggggggggggttccagtgcctagtgcatctcctaccctgctctccctcctccaaccgcctccctactctgcaacacgtaagcatcacgaaacctcctgcgaaacatctggatggggactggtgtcccaacatctgggcaactaccgccaaggctggcttctagggaacgagtgcggaaatgcgtgcgggtgtgggagcgcaccactcagtagggtaggacctctcccagcgctaggtcactgcagcattcttcccaccatctgctcctgtcaccagcccctaactccgcccctttgggcccgccccttgttccgaagccaatagcaacccctgaccgccctacaccgcccagaagcctttccacaccccctcgtcctgggagcgggttggctgctgagctctcggagaagcgcctgtatttgcatggcgttcggggtttttggtaggtagagcagcccgtcactctggaaggccgggaccgcccactccacctcggtccacagctctcttcctgcgcagttcgcctctgcagcctctgcggggaagtgccggggctgctcgaggctcagttcttaggactgcaaggaggcagccccggcgtgcggcggtgcgcacagtctagagtggccagggcgcgagagtgcaacgtcctcctggccccgagcgcgtcgtcgcgccccgggagcagaccctcgcccagcagttaccgccgtcccgactttccgttccagttgcagctcctgccgggcaacatgtcaagagccgccgccgctacagctgccgccgccacctggggaagagcagcagcagcagcggcggccgcgggcacacgggggcaataaaccgagccacccgggcgtccagcgtgccggggaaccctctctgcgctcactgcccggcgggacccacgccatgtgctgagccatgtccctggccgcgcccgcgggcagcgcatggggcagcgcctgagtggcggcagatcttgcctcgatgtccccggccggctcctaccgcagccgccgccgcccccgccgccggtgaggaggaagctcgcgctgctcttcgccatgctctgcgtctggctctatatgttcctgtactcgtgcgccggctcctgcgccgccgcgccggggctgctgctcctgggctctgggtcccgcgccgcacacgacccgccagccctggccacagctccggacgggacgccccccaggctgccgttccgggcgccgccagccaccccactggcttcaggcaaggagatggccgagggcgctgcgagcccggaggagcagagtcccgaggtgccggactccccaagccccatctccagctttttcagtgggtctgggagcaagcagctgccgcaggccatcatcatcggcgtgaagaagggcggcacgcgggcgctgctggagtttctgcgcgtgcaccccgacgtgcgcgccgtgggcgccgagccccatttcttcgatcgcagctacgacaagggcctcgcttggtaccggtgagtttccctgccaggggcagggtctccatcgtcgattcagaccctgagctaagggagacatggcgtatgatagggaattggcagggttacagcttcggaccacccggggtagggcagggaaactacggcagattgcgcagcgcatcctgtccgggtgcggtgagggttgcgct

SEQ ID NO: 7337 - DNA, 6000 bp, Homo sapiens
cgccactgccctccagcctgggtgacaagagcgagaccctgtctcaaaggaaaaaaaaagaaaaaaaaaagataatctatagactgagttatttgtgaatataactgatctgctcgactatattttataactttctagtatttagtagtgtgccagaacataaaaagcacctcatactggttgaatataagtgagtaaacaaaaatatatgaatctctaatctacaaataagactatacacaataaattctgatcaatctttactagttgttttatatcatagtctagtaaaatccagtatcttaagtaaaagaacagatggaactaaatatgcaagagttccatcattcccaggcatcaagaagaatttgaaattacaactaagatagatcacagaatacaattaaaaccaaataaccaaaacatattttttaaaaaacaaacagcctgacactcacctacatcaacccccagtctatccaaaggcctttgccttctacagcagataacaaaggtaagaaaagaaaatttcaccaattcataacacaattttttttaatgcttttaaggccgggtgcagtggctcacccctatcatcctagcactttgggaggctgagacaggcagatcgcttgagcccaggagctcgagaccagcctagacaacatggtcaaaccctttctctacaaacaaaaaaaaaaattaaccaggcgtggtggcctgtgcctgtagtcccagcgacttgggaggctgaggtggaaggatcacctgagtccagaggtcaaggctgcagcgagccactgtatttcagcctgggcaaaagagaccctgtctccaaaaaaaaaaaaaaaaagctttaaaaaagttattaactaatctaatctttcctataagttaatttccatcatttcattcttttttgattaagaggataggcaaaacacaaattttactgttttttaaatccaacaagtattcaattaaaaataagccaggcacggtggctcacgcctgtaatcccagcactttgggaggccaaggcaggcggatcacgaggtcaggagattgagaccatcctggctaacacggtgaaaccccgtctctactcaaagtacaaaaaaattagccaggcatggtggcacgcgcctgtagtcccagctactcgggaggctgaggcagaagaattgcttgaacccggaggcggaggttgcaatgagctgagattgcgccactgcactccagcctgggtgacagagcaagactgtctcaaaaaaaaaaaaaaaaaaaagataaaatcagcgaagggcctatcctgctctcaagagataaaataggtacataaatacctacaagatagaaagtgtaaatgccgcgagagatgtgcagaaaaagcattacaggagcccagagggagctgttaccacctcacagaaatataaccccttcaatctgtttaaaacaattttataactattaactccctttaggctcacaacagccaaccctaggagagtagatgtttacctaatattcaagatgaggaaactgaagcacagaaaggttgatcaagttccaaaatcacatagttagagcaagaatcaagatactttgtattatattttctccgggggagtagttcaacatatggcaagccttttgtaaaaggaaagagtattttagtattgtaagtaatcagttcctactgtgagcattttatacatagctatatccatatatacaattaatcttgatttccattaacaggtgtgcttaaagcaaggccaagcaactgggtactataaatattaaaacaaataaataaacttccaccggatgttaacagaaaaagaaaaaaagatacaagatttctctctccagtaacttgcggttacttcttctgtaattgttacccttgtctaaataacattctaaaattggtctgctcctgagcccgggcaagtacaagttggttcatccaataaatatcttcatgaaaaggtacatcaaaacattttaaaaagctattaaaaattaaacgatgccatcaactcttcagttatccacaggacaatcacatgtgacccagcatcagcagctattgatcaagatatattgaacgaatgaatgaatctttgtaggcatttttaaatcccgggcctgttgctccttgcacagtgccatgttcagccttccatcactgcctcaccagggtgcacacaaggaatgtaaatttcaatataattaggatataattagagaagcaaatctgatgcaggtttacatactaatcccaaagattagaattacctatactactactctccaaggttaactctgtggaagaggcaccgcagcatgcaacatcacataaagaaaactgacacttcctgagcaaatagttttcgtccatatcacttattcccatccattcctttaatacatgactattcctgatccagttaatttgaagaattcagtctcctctccataaaggctgatttcacaactacagtttctcaaattcctctctccccaaaaaggggtgcacttacggacttcgcttaagaaaacaccaacaataaacggcagaaggtatagtgttcggatctttgccatctccaccagtacccagccttcgccattacaccctgaagcggtctgttagaaaggtgaactaatttactctgcacgcacttgtccatggctgtcaacctccgcagccccttctacacttccaagtcggccaccaactccgcctcagtgagcccaggcccgccacctgcgccggccccacccggggcaccggctgcccgctctccctcgcaggccctgtaggctccgcacgcccctccgcacaggacacctcggggccagccccggcccggccacagcccattcttcctccaaactccataagcctccgctagcccagcccgagctccccgccgcgcccggctctctcctgggctgccgagtggaagaggccaggcggccaggacgggtcccgacctgcccaggcctgcgacaccccccgcccggcggagaaaccgtcccagcggctgctgccccgggagccctcggaagcccccggactagcaggagcccggaggccggggttgcaggcgccagggcctactcaccgggagctggctaagcgtgggagccgacgtgcgccccggcctgaggagtgggacgcggccacggcgcgcggccctacaccgggacctcgttcggcgcggcgagtcggacgctcactccagccgccgccgccgccgcggctgctgcttcgccaccttggccgccatcttgactcaacccctctccctccccccagcccgcggagccgcggctaaggcggctccagcgccggctcctcctccttccggagagttgggagaccaactccctccgctggccgggcgcctctcctacctcggcggagcttcccgggtcgcgctgcgcccggtctcttcatgtctcctctaggcctggcagcggcggtcctctcggacggatacggggccgagcagcgcccagccggatccagcgctgctgccatcgtgccctgggcttgtgcgccccccgcctgcccgtctgttccgcgcgcccgaggccttcctcaggcgtgggaaaaggaaaaactccaggccgtggaagggaccctgcaaacccctccgcggcgtggtggggcggcggcggcctcctctggccggagctgcgtacagggaagccggtcccctcgtggctgggagctggaggggtgcatttcgacctgcccaagatactttctagggctctggctggaattcgcaccaagccctcactgaaatgctgggcgaggccgatttgtccacgatgttgctccttaaccttaagttacttgcaagaggagcctgtggccctcgcgactgttaagtgcacgctcagcctcaccctgctggggaaacgacggttcctcgtaaccgcacgcatacgttcctttagaaaagccaggcccgaccggacgcagtgggtcacgcttgtaatcccagcacttagggaggccgaggcgggccatcacttaaggtcaggagttcgagaccagcctgacgaacatggagaaaccccgtcactactaaaaatacaaaaattaagcgggcgtggtggcgcgcgccagtaatcccagctactggggagaccgaagtgggagaattgcttgaacgcgggaggctgaggtagcagcgaacctaggtcgcgccactgcactccagcctgggcgacggagccagaccgtttcaaaaaaaaaaaagaaagggccgggcgcggtggctcaggcctgtaatcccagcactttgggaggccgaggcgagcggatcacgaagtcaggagttcgagaccagcctagttaacatggtgaaaccccctctctactaaaaatacaaaaattagctgggcgtggtggcgcgcgcctatagtcccagctactcgggaggctgaggcagaagagtcgcttgaacccgggagacagaggttgcagtgagccgagatcgctccactgcactccagcctgggcgacagagcctctcaaaaaaaaaaaaaaaggtaaagaaagccatccaaaagtgagaaggaataacaaagttggtgtaactggctattttggaaaactgtcatacggataacgggctgtctaaccctataattacgagaaaggcccgagttttaagaaatgaattcgaaaatgaagaggaaggaactcttcctataagtgggagcttatatataagacgcttccttttaaaccgattgtacagtgtggtaggactagggtaggaaactggacggcatggagacttctgtgttaaaacacaagagaacccttaacgttaaaacctcaagcttccggagcatgtcggcgggagggacttaacagcggaacccaacattccccggtgaagttttccagccggagtcagggtcagaggcagcctttcctactgcgcaggctcagtgctgcttacccatcatggaagcaatgtggctcctgtgtgtggcgttggcggtcttggcatggggcttcctctgggtttgggactcctcagaacgaatgaagagtcgggagcagggaggacggctgggagccgaaagccggaccctgctggtcatagcgcaccctgacgatgaagccatgttttttgctcccacagtgctaggcttggcccgcctaaggcactgggtgtacctgctttgcttctctgcaggtaggaggccataggaggggcgatgggagccggggctttgaaagggatttaagtgctaaccgatctcagtcgccttcttctcgaagttttccgtagggagctaagtgaatacaccgaaggtcttacctctgaacccctcacagcctagggacaggagcggccggcttacctggtgggttgggggacgtcggcagctcgcgtactacgccagcaggattgaggagcagagaaacagttgcagttggttgtattcagtacctgcatttccgttgggaactccacctgtacttgttattctgtggaacttttttttatttgtagaaggagcaagaatattgaccttactatatagcacacgaaacaatctatgctgtatcgtgcctgctcaatccttaaagttaacttctaatgatagtaaaagaccttcctgctgcctttaaaatgcagcttgtgctagtaacatgcatgtgtcaaattgaagaattagacatagatgactagatagaaagtaattttgtaggtaattttagagttcaactccacccagctttcagtgaaggaacctttcaaataatagatttttgcttaccatagagaaaagatcaaatgacaaagcaaatattgaccattaagctggaatatggtgataattgaacagttgtataaatgaagtaattgaattgtacacatacaatgggtgaattttatggcatgtcaaagtatacctcaataaagctatttttttaaattgcccatgacc

SEQ ID NO: 7338 - DNA, 6000 bp, Homo sapiens
attccgtttaaaaaaaaaaaagtttctggacatcatgactcatgactgggatgtccctttgttattttttaaggacattggtaaaaatttaaaatgtctttcaaatatttttggctagtatagtagtgtttctttggaacaaactctgtgcagagactggtttgaagttgacgggaaaacaattattttatgagggctgcgctaacaatgggcatccttgtatatacctatgtcagtgtacctgtacaggtatacctgaagggtaaagtcctacgagtgaaattgctaagccaaaggataagtgcattcaaaaactagaaagatattgccaaggttgtcctgaaaaatactgtatcaatttacactcctacttgcaatatatgagagaccccactgcatttgtgccaactctgggtgttagctggcattttgtagttgcttgtataagtaaaaatggggtccgcattttcttctaggttgaccattaacaaactaaatgtccatcaatgggcaatggctaagtaataaaaaaatctattgtatggaatattatatacagctaaaaattgtatgatgaggatctgtatatactaacttggaaagagatccacaatacattatcatttgaaaaaagacaaattaataaacaatgagctcatcacaattcctttttttataaaaggagaaaaattctctttttgagtttgcaaggagaatagggaagattttgacatcttgatttcactcagtttttttttttttttttgagatggagtctcactctgttgcccaggctggagtgcagtggcgtgatctcggctcaccgcaacctctgcctcctgagttcaagcgattctcctgcctcagcctcctcagtagctaggattacaggcgcctgccaccacgcccggctaatttttttgtatttttagtacagacgggttttctccatgttggtcaggctggtctcgaactcccgacctcaggtgatctacccacctaggcctcccaaagtgctgggattacaggcatgagccaccgcacccagcctgaagacaggttttattttgggcaacattcaagattacttggagtcaaatttgattaataaggtaaagatcaaattttgcaacataattactgttgaaaaatagttatgctactataaatttataagatctgctttgtgtgaatcataaatgagatgtgaaggtcattcccaacttcacattttctttttttttttttgagactgagtcttgctctgtcgcccaggctggagtgcagtggcgcgatcttggcttactgcaagctctgcctcctgggttcatgccattctcctgcctcagcctcccgagtagctgggactacaggcgcccgccgccatgccgggctaattttttgtatttttagtagagacggggtttcaccgtgttagccaggatggtctggatctcctgacctcgtgatccaccctcctgggtctcccaaagtgtggggattacaggcgtgagccaccgcgcccggcctcaacttcacattttcaaaaatatgtgtagcattgaaatcacatctgttgcattcaaaatatgctcacttagaggctaatatactctttactcaatactagcattttattaaaaacttgttttattggccggctgcggtggctcatgcctgtaatcccagcactttgggaggccgaggcgggtggatcacgaggtcaggagatcgaggccatcctggctaacacggtgaaaccctgtctctactaaaaaaaatacaaaaaattagccaggcatggtggcggacgcctgtagtctcagctacttgggaggctgaggcaggagaacggcgtgaacccggaaggcagagcttgcagtgagcagagatcatgccactgcactccagcctgggtgacagagcgagactccgtctcaaaaacaaaaacaaacaaacaaaaaaatttgttttattaaattgtttctagtatcagcatttctaataccactcagggtgcctgcctgtatgatggcatacctgttgggcaacaaagacctcaatgtgcttcgaagtttgaatgcccaagtacttaatgcatacgtacttaatatttttcatagaacgccgattttttaaaattttcttttttttgaaaaagcagatgatgtggagaaagcacaaaaacaaggacaattggaaactcctggaaaactgcccagtcacccaaagaaaaagtcttggaaaatccctatgtcacctgaccaattcctcctgactgttagcgccctgcagcacgcccataattccggggaatttgcctatccctgtaggccccaaacagaaattactgatgtctggggaccttcaatttcatacccaaggaaggtcttgaatttcaaaggaaaatcaatccaacgtgcagttgatcggttgagattgagcaatcctcctatagatgtgaaacgaaccagtattccccttgaaatccagaaactgcagcccaacttgaagatctctttgcacagtcctagagtccagtccaccataccccagcccatgattatccgctccaggttctctggcagcttaaagggtggagaccaagtgaccagttcaattgaaagggctgtgtgcagtacgggtcccctgaccagtatgcaggtcattaaaccaaaccgcatgctagctccacaagtgggcacagccaccctgtctcttaagaaagaacggcctcgcatctatacagcccttgatccttttagagtgaacactgagttcgtgctgttgaccgtgaaggaggagaaggagcaccaggaagccaagatgaaggaatatcaggccagggagtccactggagtggttgatccaggaaaagtcagcaaagctgcatggatcaggaagatcaaaggcctgcctattgataatttcacgaagcaagggaaaacagcggcccctgaacttggacaaaatgtatttatctaaaccagccttgggaaattacaatgttttacaataaacagaaagccaagcggatgttgctatttggcctttttttttttttttttgactgtttcttcctggtaattaatgtgggaactcccagttatcttcctctgagccaaatatttgatatcatcaaaataagaaaacagaaggaggttgggcgagattagcatctgtagtcccactgaaaacaatttagtgagcattaggaaagcccagtttcgttgatgggggatggggagatgatcactggaaattagataccattcatcactaccaatttagtgctattagttcttctggcaaatgaagttatgggattatatcagggtcatgcattggtgttttctggtatttttgcacagaagcctgataaaacccattaagaatttaaaaggggaagccctcagtggggtggacctgttgcatttgacaacattgagcttttccttctcagggctaactcctaaggaagagaattagcatatttatcctctgtacaaagagggccagtaacatcaagtgcattgaggtttctgcttaaacctttggactatggtgcagggaccaggtaatttagaagagtgcagcccactacaagagctatggcccattagaaagttcaagccttgaccaggtgcggtggctcacgcctgtagtcccagcactttgggagactgaggcgggtggctcacctgagatcaggagtttgataccagcctgaccatcgtggtgaaacctcgtttctactaaaaatacaaaattagctttaaaaattagctattaaaaattaaaagacgataatgaattcaaacacaatgtcttaaaaaaccaaaaactacgaaaaacaacacaaaactccacagcactgagtggaccactgaaaacctgccatgggcaggctggacgtacaggccccaaatttgttagcttttcatctccaagggcacgaatgcaattgtgctgccgaaatgtcttgcctttagaaacgcgtgtgtgtgttttccccctttcattattagaatatcaggttttaaatggcactggcaatcagccacgtaaaatttgtgattttaatagaatcccttcaattaaggacacgtgcaaataccactatgccaacagcagtctgactcggccagacagataggatattgtcatcatcaccgcttcaaagatgacttaacgccccttaatttcacatcctttgttcaggcaagatcacagcatgagcggctggacttaaaactgtagtaagtataacgtctcccatttactagatacttacactgtaaggaaaccattatcacccccactttacaactgatgaaagaagtacataaaggttggtgatatgattggcaatagagttcccaggcgcctaagctccagggcgcaaggtctcaactcctggcgtctaagtttatacctcccataataataccgtccattagttactctagagtcctcctgccttgtttttcttaacgttttacttctctgcaagaacatattttaaaaagttgcttctacaatttaaagtacaaaagtaatactgtacaggagtaagtctttgtaaaatatttaaagaaaattatattatacaataaaaccccgcccccctgcattcggggcagcgacactgggggaacgactttagaatttgcattgggtggacagcaaatacttccgtaaaacagaccatgaagctttccacttagagcccactgtggccccaatacctttccctttcgctcctgctccaggctccgcctccgccgtgtccgggccgctcgccccgcccccgctcgccccgcccctggatttgctccctcaaagcggaagtgaggccggactgaggctcttacagtggtccctgctggcccttggtgacgggtcgcctcagttccgacccggacccgtacgctgctgcgctgacgtggctcccggaagtagggctggcgtagggccgccatgttgcagcaggtgaggggctgagggctcgctgggagggtggcggctcctgggactggctctgcaggttccgtgggactggagcccgcgtcccccgcgcccgctactcgaactcgaggaggagcggggcggccgggagtggagggctgtgggtagttgtctgaggagggctgctgggggttctgaggccgctgggggcggcgtgacccgtgcggcgcagagcaagtacttcttgcggctgtggggacgcccattgttaaccagcgcgagtgggggtctctctttcctcaacccttattgccggggtggagttgaggaggagcggcctgcgggcctcttagcttcctgacacccaggggtgcgatgctattttgtaggaatcggcgacaccgccagagcctcgctttcaaattgctgtttccaaactaatgttgttggtgattctctcctttgtgctcttagagttaattgtagtccacatgttggcaaccagagactcgtaagattaataatatttttagaaaaaactactgtttatggtcacttagattgtcttaagtgtttttttctttcggttcacacaaaatttgttgagggattactatgactcagacacggttgtaggcccagggatagggttgtgaccagtacagacaggtttcttgccccgtatttttgggttagggaagtgggttctaggagatgggggttgggtggggagacacgataaattgtataaccaaagatattttcagataattgcaaaggcagggtgatgaaataacaagtgtctgaggataggacaactaagatttatggtcaggaaagactgcttatgaggagatgccttgagtggagaaaatctaataatggttaaattcagctgtattacaggaaaggtgtcccgatccagacccgaaaagagggtccttggccgggcgtggtgactcaggcctgtaatcccagcactttgggaggacgaggtgggtggatcatgaggtcaagagatcgagaccatcc

SEQ ID NO: 7339 - DNA, 6000 bp, Homo sapiens
ttgcagtgagtcgagattgcgccactgcactccagtctgggtgacaaagcaaaactctgtctcagaaaaaaaaaaaagaaaagaaaaatgttggaataggtaatggcgatgggtgcatagtgttgtgaaggtggtggaaaccacagactggtgtactttaaggggttaaaatgatggattttatgttaaatgcattctccctcaataatgataaaaaaagaataggtttctgggattgaagggcctcaggggcctcagcatctgaagattcctcagttgcctgggctccttggacctcttgcagtgatgtggcaagggtagaccctgtgccggtcactggaggagcggggtgacgggtgggtgggggcagatactactgtgtcgtgtggcagcacagccactagcccagcagggccagggatgcacagaagagggaggagccaaggaaggcttcagagaggcagtgatgtctcagtaccgtcttgaaggatgagtagcagttcaccaagcagactgagaggtagggggacttgaggacacccagggaggaactgagggcagcagaagatggagctgggtcgggggagggccaggttccagggcccctggtgccgagcccaaggccttgcacttgatctctggagcagtaaaggctgttgaaggtaagtttgaaacaggagtgtcatgtccagggttaggcttttagggtgttctgacatactgtgcgtggtgagtagattcaaaaggataagactggaggccagggatcagtccctccccacctgtgctggacgcctggtctgcatcggttccattacctcccagcagcccttcccggctgccttcacttcccttccactctgctgctctgccggctgagctcagggtcctcccatccaggtgcccactcaaccactcccttcgagggcctgaggcttaacagtccaacctccatcactccctgcacaaacccaacctcacccaaagctcagtgggcttggctgggaccccaggggaggaggggggtcattccttcccactgaatacctgtcacgagccatgctgggtggtggagtttaatgttaaaagggcagattcgagagctggacaatttgggttcaaagtcctcctctgtctcttagttgctgtgtgactttgagcaagttcctctgtttctctgtgcctcggattttccatccctcaaggagttgggagagttgagggtggacgatgcgtgggcacatggtgactgctcggtaggtgtctgtaaccatggtaaagatgaagctgtgggctggcccctggggtcccagccgagcccactgagctttggggagggtgggtttgggtggggagtgatggagggtggactctcaaacctgaagccctcaaggggagtggtcaagagggtacctggatgagagaatgcagcgctcggccagcagagcagcggagtggagggaagtgaaggccgcctggaagggctgcggggaggtgaccaaccaatgcagatgcaggtacccagcacaggtgggcaggtgagcattcaggaaatggttgtctgggacccaccacccttcacaaagcacctggcaacactctccttgagcctctgtatcagtggaaggaaactgcttgacctggctggtgaggggagcccaggcagggtcgggggcacccctaggggccagcttgctggtctaaaccaaggccaaggccagaggtcttacaaaaaagcccagcccacaccaaagcataaaaagtgataacttgggccggacacagtggcttacgcctgtaatcccagcactttggaaggctgcttgagcccaggagtttgacaacagcctgggcaacatggtgagaccctgtcgctataaaaaaatacccacaaaactttgctggctatggtggtgcatgcctgtagtcccagctactcaggaggctgaggtaggaggatcccttgagcccaggaggctgagactgcagtgagctgtgattgtaccactgcactccagcctgggcaatagagccagacattgtctcaaaaaaataaaataaaataaagtgataattctcctttctcctctccttagcagtttggtgtgtgtccttcaaaacactgtggctgttcagccccttacattatatataatgagaggataaacatggatatgggtctatattctctagcttgcttttttcacttacaagtgtatcatccttccatgccattatataaagccacctcatctttttaatggtcatggtgttccatggtttggaggtctcataattcactcaccaccttctctgggtggttatgtaggaaatttctaaactttttggctgccctgagcacgcttgcccttgtagcttaggactcttggggagtttctccatcaggacagacaagcagacaatacttagcaggaataaatgatcagtcttgtgcttattgcaaaagcaggagcaacagataagctggaactagacttggcaggcaggcagagagaggccctggagggattcgctgcaagctgccgcagatgaccgtgggctcccttcatgggctcccttcactcatgtgcagtccgttccagtgctgcccagctcatcacatggttggtcatgccttggtcacaattctgaagcacttaagaaagaaactcataagctcatagatgccccacacacaagatacaaatggctccagtcgtcctgcttaggctctgctgacccctccacatcccgttcctggttctcatgagtctgagggacttcttccggggatggaagaggcttcaaggggtgtggtacggatgacttctcagctaggacggtcttcatgtttcttggggtgagtgaataggtgatcccgttgggtcaggtggggtgggaatgtgggtgtgactgggcttcgggtggcgtttcttctcccgcagacatggctgggcttgtttggtacttctccctccatgtcctccgctgccaccctcctcctgtccccgtccttcaggacagaaccagcaaatcagtctcagccccttaagagcacctttactggtgctttctttccctaggattttttttctcttttttcatttttttccatttaaactcagtggcaaaaatcccaaggacttttgatccaaaggcggcagttatcactaagtggtttatttccttctaagacctagccaacggtctcagagccaatgctgctggtacaactactctattaatgggatagttttggtaagtctggatcctcccagctgggtcctcctgatcagtgcaaagcagccttttgttttaaaacacattgcaagcaatggcttgggaagtaaacaccatctgaggctcgctggccagaggcaaggggagacggcaggcagttgagcctgcctgagggttctctcagcagtgacttcctttttcccttccttcttctgcctagtcctgtatgtgaggactattaattgttttttgttgttgttgttgtttgttttgtgagatggagtctccctctgttgcccaggctggactgcaatggcgcagtcttggctcactgcaatctctacctcctgagttcaagcaattctcctgcctcagcctcccaagtagctgggattacaggtgcgtaccaccatgtctggctaatttttgtatttttagtagagacgaggttttgccatgttggccaggctggtctcaaactcctgatctcaggtgatccacccgccttggcctcccaaaggcatgagcctcccaagggcatgagccactgctcctggccgaggggattaatttttacccgcacctcagggttattgagtaacaggctggctgggtttgcaggccagcgtgttcctggtggcagccgctcactcattaacacttctggaagtgctgcatgtctggttaaactgcaaatgctttgcaaagtcacgagtcatgtcactgagcagaggcgtgagactgccggccagccctgctgtgtacactgatagaattagtgagcgagcgtcccactctgatggaatccagatggaactcgtcactgtcactgcggtggagacggtggggccacatctgcactgaatcctactctgcgccttcaatggctgcgtaatggcggatggccatttccttgactaggatgagacattgcctactctgcgtggctgctgtgagcgtgaaatgggatcatgtgcggaacagccacgcatggtccgtgaaatgggatcatgtgcagaacagccacgcatggtccttggtgtgtgacagatattgggtccctctgtggtcccaggcagacattgcccggggtgggggccgaatgcatggtcaagttgaggggcctgggactgtttcacgggtctagaaaaagaaagcagaaacgctggaagcaggactttattgtccgacatggggctgcctctgagcctgggctgtgttggctggacgtgagccataatgcaggtgtccccctcccaagccctgctcagtccactcacagcccgatggccaagggaggacatggctgcccgccacggcagtatcttcagaggtgaggcggttgtccctacgctctatgcttcttatacaaattagatataggtgaagccacccattaagcaacccagcctttctgggactatttgggctgcctccgggtccactaaatgcggttcattttccccaagccccctccgagttcaaggaggctccttcctttcctcctcccacttgcttctcccaggctccctgactcctgcgctctgggatctgcaccccaccatggggtgaggaagctgaactgcatggtgaggcagctgccctgcatgcagccacatcatgggctggagatgccactgtccgcttggtttaatgatcaatgagctccctgccaggaaaccctttctgacctggtttgcccctcagtccctcgggctcatacctagtgcctgcggcaggacagccatggccgccaactccaccagcgacctccacactcccgggacgcagctgagcgtggctgacatcatcgtcatcactgtgtattttgctctgaatgtggccgtgggcatatgggtaaggggacctgtggtggtgttggccaagtgggctctcagggttggtgcttggggtgggaaccggggtccagcatgtccctgtggtgtcagcattggtcccagctggtggcctagtgatccttgtggtcctcctcccagcctggggtagacttgcttggagaccttgaccaagcccgtttctctctttgggtaatggcgtctccatctgcaaagtgaggaggaggaaattctctctaacaggtaactgggcttttgtgctgctgcccagctggagtccttgggtgtggcccatcagcctcctggtcccagtctccatggtgtcagtgactcctgtctgcttgaacaacaggctccccgggattccctggctgcaccccagagctgctggatcagaatccggaggcagggagggccctgggaactgggggtctttattttgaacaagctccctggggatttatgtcctgtggcctagccctagatcataagccggttctttctcccttcataacagtgagaaatgagcagagatctgaccccacacacagattccaggggcagcggggcccctggggacaggctgtttcatgtgcagatggagaaaccgaggctctggccctgcagcaagggaagggctcctctggtctatcgtggaggccttcctgagggaaggtggacacagcctggttcaggtcacctgctccacgcttagcgcctggggatgttgggctccacttcttaagccccagaggtccccagcctggcatccctgagccctgacagtctcctggggagaatgagtaccccttctttttttttttttttttttttaactgagacggagtctagcactgtcacctgggctggagtgcagtggcactatctcggctcactgcaacct

SEQ ID NO: 7340 - DNA, 6000 bp, Homo sapiens
tacccatagctacttaaatcaatgagtatatcatattcaaaagctgaagggagaatgtttcagcttgggagtgtagtaaaagaattcccagtcctctctttggttccataaatatatcaccttgttctattaaagcacttggatgtgatttttaaatatgcccaacaaaatgccatcagttgatttctctaactaataaagaaaatgttcaagagttggtagtaaattcttggtgattatgccattagaatcagagtacatcgtttgtaagaaatcctcagcccggcacggtggctcacgcctgtaatcccagcactttgggaggctgaggcagcggatcatgaggtcaggagtttgagaccagcctgaccaacatggtgaaaccctgtctctactagaaatacaaaaattagctgggcatggtggcacatgcctgaaatccacctattcaggaggctgacacaggagaattgcttgaacctgggaggtggaggttgcagtgagctaagattgcaccactgcactccagcctgggcgacagagcgagactctgcctcaaaaaagaaagaaagaaagaaatcctcacatcttatgctcagcaaaagcagcagctcttcgctacttagcaattaatttgccctaggtgaaaccgattcctgttctaattccacactggaattctgttcattatttacattttttttaaatggaagcatgattcatatctcaatttacctagttccttacacaatatttattagccagcatttagaactggttaccctttcagatcagataaagattattgggtacactctctggcggcctttgagctgatttaaatattgttgccacacggttctagatactgatattagttgattggcttcctatgcacaagcactcctcagttacttacataattgaattaaacactttgtatatgttggagctactgcttttgttatataagcctgcttgccttttcacctactgtctcccaactttaactatggtatttccacatgggctggatttttttgtttttgtccaaagcaggcaagcgagaagtagaagtgaagaagagtttgatggtcttgccaatttccttgcttcatcatgaatctccttaagcttcaaattacaggctgttgagaaagccacaaaagtagacagtgccaagacactaagactagagtatgtgagagtgtaccattcattcattcattcattcaataaatacttactgagcacctactgtgggccagattctattcaaggtactaacattacagtgaacatgaacaacaaagaccctgattttacaagatattccagtgaggaagacacattaaaaacaacaaacaaatagatacatttatattaagaaaaataaaacagggtcagggacagaaagtagcagagactgatattttagacatggtggtcagggaagtcttctttagggaggtaatattgaagcagcaattgaattaagtgagaatgatagctggacactacaggcaaaggaaacagaatgaatgcaaaagccccgggctgggaatgtgtttagaatgctcagtagtgtacagcaaggaaggcactctggctgaaactcactaagtgggagaatcctacaaaaagaggttgaagatgtagtcacgggccagggcatttagggcttgtagaatatgtgtagaaaaattcacattttgaattttattctaaacgtgaggggaggctattggaaagttttaagcagtgaattaacatgatcagggtaccttcggacaccaatggctaggtggagaacaggctacaacaaagtgttatcagagtccagtcacgaaagataaactatctagttatttcatgcagagggaattttaagagtaatagatgtcaaaaagaataatggagtgacatcatagataaaaaagctgctaaaaatacccttagctggaaccaatggaactgcaccagcttctgtgccatttggagacactatcactttcatcctctgtctactagagaggtgccaccttgaccatggaaggaattcctagagtaaagaataatccctcctccactttcactatagaaatggccagcaactgccacacgattgaatccagaagcagtaagttactctccacctcctgccttctgatttccttatagtgccccctactggcagaagccagcgggcacgagagcctgggaaatggggttcacacactctaggtccctgcagtagagtataaaagggcaagtgtagaactgagaaataacaatctctagagtcaagagtagaagcagggggccggcgaggtggctcacatctgtaatcccagcacttcgggaggctgagggagggggatcacttgagcccaggagtcggagaccagcctgggcaacatcgcaagccctcatctctacaaaaaatacaaaaaaatttagccaggcatggtgacacatacctgtagtcccagctacttgggaggtggaggtgggaggatcacttgagcctgggagctggaggctgcagtgagccatgatcatggccactgcactccagcctgggtgacaagagtgacaccttgtctaaaaaaaaaaaaaaaaaaaaacccgaaagagtagaagcagggaaaccatcaggatgcccggcctgttttttctttttcatttttttcccctcagctgtggtaatttagccaattcaaagaccttgttctccataatttcaactttccttcagatttgaccaagtcaagtagagctggtcaaacccaatgggaaaaagaccaaaacaacaacagaaacaaacaaagaaacagttaagcaaaagaaatgatcgcacaatttgtattattgagcgctctaatggtaaggagaaattaagaccagctggttgttaatcttaactttagtcaccaaggagagtttccaagacaaaactccaattcaggtgcttacctaggaatagggtccaggctcaagactgctctttaccattttagaaggagaaaaaaaactcagactcaccttccctgctggaagccagatgaaattccagaaaggagttgcctcccctccatcgtcatggaggcaggaaaacgcaccttctttgttgggagtaagtaaaactgcagacaaagaggtgtacagcaaaataaactttagatctcaaccaaattttgggacatcagggattctctggagtggggtgctcccaggcctcagcaaattgtcctgtttgagcaataaaaatagcccaagctggtaccaagcactgatagatttgtcaaaggtcagggccacctccactgagtcacttcctttggctgccagcttgtaaaccaaaaccagctctcaatcaatttggaagtttattttgccaaggttaaggacatgcttgggagggaggtctgtgcctttatctaaagatgattttgagggcttcaatatttaaaagggaggagcgggctggaggggaaagagggagaacatggtcattactgaatccacacattgcacaaatagaaaaaggaacaggcaggggaatagtcaattatgtatttgcctcctgctgtgtaaatcagcacttcagtaagataaggtgaggacagagcagctacctgtggggacatttaaccttttatctgtagctatctgcttagggacatagagaaaggcagtttcttgcatgactcagctttttgcttaattttttccttttggcatagtgaattgagctcccacggtttttgttgttttgtacataagtggagagttcatttgggccagggccccgagttattttcttttcacaaatataccctttagagttcagaggaaaggctgggattagagccttctgtgagcactattcatgggattacatgagggagtggctgtgaaaagagggccccggactaagccctgggcacctgaacaagtgagaggtcaggaaggggagaaaaatccagcaaaggaaccccagaggacccggccagtgagctaaaaagaaaagtgcagaagagtgcagggaaatggtaaagaaaagaaagctttccacaagacaggaccgatcagctgagccaactgctgctgagtacagtgatgagagctgaagtctctcgcccgaaaggcaataaggcgggagggggaaacctgagggcagcgggttctctcttgggagcgggaacacggaaccatgggcagcgaggcaaatgcagcctggggagaagctctgagtaacggacgtgcgaggatgatgcttgtgcaagaaggaaatgaccgctgtcccggctccgcgggagacgaaccccggcttcccgccctcagggactagctctccagggaactgggacggtcagtgccggtcgaggcagctcctcgctgaaggaaggagcaggggacagggaagcggaatggggagcgctaggcctccaactacgtccatctggccatgtttgaagagccacaaaatggaggagggaacccctcagagcgtgccagagcggagactgctctccgtcgcagtcggggcgcttccggcagggcgcccactcccagccgagcgccctccgcctgctcctccaggattcctcttcgccctttctggggccgccccggggcgctctcagcaggatggccaacaccttccctccatccctacaccccgccgccccctggcccgtggccgcgctcggctcccgcactgctcactccaccccctacatcccagcccgctgccagagccggggagagggcgggggccgcgtgggcgaggccgtgaacagcggctgtcacgtgggccgcccaggccaataggggtgaggctttgggtcgagctcagtcctcccccggcgcctccgactggcagtgggactcagcgggcgtggaggtcgcggctgagcgagcgagccctgggcgagtgaattgtggctgtgggttgacggtggagacaccccccggagggaggcggagggaagggaggcgaggcctgcacctgcatgcttcccgcctcccactccccagcgcccccggaccgtgcagttctctgcaggaccaggccatggagctcgaagtccggcgggtccgacaggcgttcctgtccggccggtcgcgacctctgcggtttcggctgcagcagctggaggccctgcggaggatggtgcaggagcgcgagaaggatatcctgacggccatcgccgccgacctgtgcaaggtacgcacgcgtgcggcggggtgtggggaaactggcccccgccgcgcacttgtggactggagcttcggctgggttttgtttttgcttttacatttcggattactccagcactgggagtatgatctccagcgatacagataaagccaaagttcccgcagactttcccggtcctctagcactcagaagggcatatgttacctagcttctgtggttccttttctgccttttctattcttgtccatttttctgttacatttgtggttcttttccttatgatgtgtaggaactctttgtatattctggatttaagtaatttgtcagtttactgtattgtggatactttctttgggtttctttcttttctttttttttaagccaaatttagcagtgggagagttgcataccaacttgaataacagtaatattaataagttctgaataacccattaccatcagaccagcctctgggtctatttcttgtcttttagctttgtttatggtttctttgttagacagagttttgtttttaagttatagttgcagtcaaatttttcttcataactttgtgtattattaggtcagttctcctcaaattttaatgcactaacagtcacctggggatcttgttaaaatgcagattatggttcagtatgtcgggggtgggatctgagattccaagtttctaacaaggtccccagtgatatcatatgcctcttttggaagcacgctttgtgtagcaaagtttttattgttttgatttgtgtgtg

SEQ ID NO: 7341 - DNA, 6000 bp, Homo sapiens; identical to SEQ ID NO: 3671

SEQ ID NO: 7342 - DNA, 6000 bp, Homo sapiens
cccaccaccacgcccagctaatttttgtatttttagtagagacagggtttcaccaggttggccaggccagtcttgaactcctgacctcagatgatccacctgcctgggcctcccaaagtgctgggattacaggcgtgagccaccgtgcccggccctggaattatttctatgatattctttgatgaaaaggccctcccattccacctccccttcttgagagagattaccttttgtctggtcatacagaagaaatctttcaaagagttcatgttggatgggaacctgatcagtggaggtgtaggggaggatgtcttcatggctgacatagtccaagcctggcacagagatgcaaaagacagtggtgaaactcacaggagaggagagagatggggttgagaagaaacattaactggccttgttccagtatgggataaccctgatatcatacctctcagcatcataatccctcccagtggatgacaggacatcagaatcctctccctgagacacaccagactccttcttgacgggcaccattcaaatgctaactactcacctgggatggcatagagggcccgactgtcatcatggttagccaagaaggtcacagcttctgtctgagatctctgagactaaggcaagaagtgaatcagtggtgaaaccatgtctctgctaaaaagtacaaaaattaggctggtgtggtggcagatgcctgtaatcccagctactcgggtggctgaggcaggagaatcacttgaacccgggaggcagaggttgcagtgagctgagatctcaccactgcactccagcctggcgacagagtgagactccatatcaaaaaaaaaaaaaaagacgtgaatcagggctttgttggccactgtgcagtccaaggccttggggaccaagactgacctgggctctgtttgacccccttccctccctttgtccccattgggatgcaggactttccatggagaggacccccaagcccagccatcttgcttacttactatatgtgggcagtcacgagcatcaatcagcacctgatagtaagtgtgagttttgcctttcacctccttggagccatggccagcagggttctctgctctatggggtgggagaaggaggccaagatcaccccaggagaaatggaagctgtggctgactcagctccctactcctcctcacctaaacaggctggtctctgatctaaaggggctttagcaccagctggacacctgctctgcagcacctcagctcagctgctcctcagttggggcaaataatagagcatggaagaccatggtatggagccatcatctgaccgtgtggatacctcttaaaagaagggggccatgttgagaaaatcaaattgccacctcagtccccagggcccagagtactcttgtcttcttatatcccagggactgtctgtgatcacttaatggggctgaaccttttctgttttaatgtattctagggatgatgtgagattgagggaaagactccagctgaacatcaagaaatcaagaagacttgtcccccaaatgccctctgggatactcataatgaaaattaggaatggcttaggaaagcattctgaggaggcctaaagggactctctgacttagactatccctggcactcagcacttttgtctccatgggtcttagtcccagagaagtactctggggatgtttccaaggcctaggaggacgctgtcttcacccctagtaccccaattacatatgtctgccatctcctcctgaggatactgtgaggcacaaccacagggaaacttacttttctggagctgcagaagccacatcccggtcatacagtctggcctgccagggaaacaggacgacacctcggtagccaaaaatgctatgaaggaaaagctggaaggaaagaggggcctcagtgagtctgcagtccagcaaatccatccaggtgggccccagaccacaaagcaacacaggtggaggcaactccagcacaaggtcttgctacctcttcccttgaagtctgtgatcaaccagaccaatgctggaacactcttatttcttctttacctggctgactctactcatcctttaggtaaaagcttaggcctccaggaagccttccctgacctcccttccacttagcacaatgtacagctattggccatttgcaaatcgttcttttctagactagaaactccacaatagcaggaatcatgtctactttgctttctgatttaaccctaatgcacaatgcctagtccattgtaggcacacagaaaaataaaatgttgaacaaacaaaaagtcttccttacctacaatatcctagaagggcctaaatctatcccagtggacccagaacaaagctgatatagaaaaagaaccacacatccagagtttaccacactgaagtcaattttattacggcaaagcatcaaaggtatacttttctgaaagctccctccacggcttcccaccatccactatgttagagaaatcttcagcaacttggctaaacctcactatagtccacaccatccctgtccacattaacttggaaagagaacccactgacacattaagtgcattcaaatccaggagaacagaaaccctatctataaaaatttgattctgggctgggtgcggtggctcacgccagtaatcccaggactttgggaggccaaggcaggtggatcacctgaggtcgggagctcgagaccagcctgaccaacatggagaaaccgcatctccactaaaagtacaaaattagccaagtgtggtggcgcatgcttgtaatcccagctactagggaggctgaggtaggagaactgcttaaacccaggaggtggagcttgcagtgagccgagaccatgccattgcactccagcctgggcaacaagactgaaactccgtctcacaaaaaataaataaataaaataaataaataaaataaaaaatgaatacaaatttgattctggaatggcaccaaacatcaaggtggaatgaatggaacaccataccatgcaggcctgtgacctaatctgacttttttcagaagcagagcactctatgaaaatgaaagatgacccagcccaatactcacctgcccggtctcatattttccattctgttttggcacctcaaacacaccaactgtctccaacactttgccctctggtcggtttctgagtaggaaggaaaagaacaagcaacagaaaagctgagaaggtaatggtagttatccataagaaaaagctcctaggatactgaggggccagggcgatgacagcagagaagggtttggggtagtgggaccagctggagcaggaaaggctttcctcctccttggtgaaaacctccacagtctcccagtgttagatgtgaccgctcccatactactgtcttctctcttcactgggcattcttcatatcatgccctcacactctgctcaaatgtacccctgcccttgtttcttccctaacccaccctcctgacctcccacagcactttaactgtcttgctcactttttcaatttttttagaaggggagtatctttttttcttcttttcttacattttctatatcacaagtcatcaaacaatatcctgctccctttacatttcagttgtgtccatgtcttatctttattaaatactgtaaattccctgggagcaatgcctgagtctgattagctggtactgccccctcagagcctagtgtacaagaggtgctcaaaaaatatttgtcctgtattataattccatgtccatctccccctctaacctgtagcccttacattgcccttgaaaagcttaaacatctctagatttcctacggcacatcgctctctcaataccgtttttgttcatattctcacaggggtcttaaattgcaaatagctatcatctctccccaatgttcagtgtctaatatcagccactaaaatgtcagtcaccactctgaacagggctgctctttctaggggcccttcaaataaaggctgtttttactgttttgaagatgtgaactttatgcttcctcccactgatccaccagcccatttgatccgcctgtcccatccgtggaaacagtttccacaccatccccatggcctcaaacccccttccccaagtcacagatagaaaatcgatctccccaaagtcacttggaaacctggggcctacgagggtccacacccaagagtctcgtttcccacctctagcatctttctgaggcagaccttcaccaaatccaaaggctgagggttcaagccaatgccctagggctgaattaaaaagcttccctctgacatcggtgctggggaccccagccggggaagtaggattcacttggggagggtaacctgttcccccccagggccagccctgtacaaccagggctctgggccgcgctggcttccctgctcctggcacatgtcccagacagcgcaggtcggctccctgctcgggaccctctcccgggtcaaactccagtcaccctcagcaggcccgggcccctggcctccgcactggctaggaacacgctctctgggctccaggcccagttcctcgcgccccctggctccgtccctcaccgggacgagaggtgcctccgcgtcgtcgtggtcgacgctggcgagaaggctccagctccggccgccgcacagagcggctttgccaccgggccccagtcagcgaccgggaccaccagcggctgcccacggccaggggccgccgggctgtacaggctgccatgtcccgcccgagcgcccgcccggctgctgacacagagcccgacccgcggccgggcggttccgccccagtcccacactgccccgcgcggcgtcccggccctcttggcccgcctggtcccaccccggagctcagagcaacttccggtgcgcttagcgttacttccggcgcgcggcgggcggaagtccgggttggggtcacctgaccggagagccggctagatatggcgtcctctttgcttgcgggcgagcgattggtgcgtgctttgggccccggcggggagctggagccagagcggctaccccgaaagctgcgggccgagcttgaggccgcgctggggaagaagcacaagggcggtgatagctccagtggcccccaacgcttggtttctttccgtctcatccgggatctgcaccagcatctgagagaaaggggtgagccccagtctccagtccggggtcccctccttgtgtccagatcgattccctcctgaggtcttttcccatcattccccttcttctacggagcactcatctagacaagtcaagagtcactccataaatcccagggccacccactttcttaactcccatgggaatttctcgtggatgacaaatttgcttgtgcagtttctgctcttttgagagccccctcttcacttccaggcacacctaggcccaattcacccttgagaaagtctaggtttttaccaaatacaaatatcacaggttttgtctcttctttttctccactttaggaatcagcttagcatagtgagcttgtaggaatccggatttctttccacctcaaaagcaagagtggtgaaatctgatactttgttttgtttgtttgtttttttaatataggatggcaaaagctgtgttgaaagatctggcctgagagtagcatgtgagttccagtcctagctctgtcactaatcctttgaaggagtcatttctcctcgctgggcctcagttcccttatgtgtaaagggaaggaacaggacaaactagcacataaggtattttgccagaagtaacatagaccagccagaagtgcaaagggtagactgctcaattattagaactagaaaggaccttagaaagagattgcctagtattagtgtcctctgagcatttagcatcactatgacctaaacttatttagggaagagctgttgtggccacagaactgatctaacccaaaggcacaagtaaatggcttacttgttagttataac

SEQ ID NO: 7343 - DNA, 6000 bp, Homo sapiens
ataaacaaaatgtggtatatacatagaatgggatgttattcagccataaaaatgttgacacatacacaaaatagatgaatcttaaggacattatgctaagtgaaatacacctttcacaaaagacaaataaccatatgatttcatttctatgaggtactgagactagtcaaactcaaggaaacataaagtaaaaaagtagttgccagggactgggggaaggaggaaatgagttgtttaatgagtatagagtttcagttttgcaaaatgaaaagttctgaagttggttgcacagcagtgtacatatacttagcagcactgagctgtacactgaaaaaggtttcaggtggtcattaaaatgtgtgttttatcacaatgtttaaagagagctgggcctggagacttagaaggagaaagaatgggccttgctacttggtgatgcaagaaggtggttcttggactgattgtgtataaatgagcctcggatctcttttaggatcagaatactccctgggtccctgcccagcctccaacagggctggctctggaagggttactccctatctcctcatcacggtcttgatggtaatgaaaatccattcacttctctgcctggtggtctgaccaatggcccctatatgtccggcctgaagctccggggactagctccagaacatgctggaaggagggcttggctctctggcgtaaaccttacaaattatcttatgggcatcccatccacccatctacccacccatccagccatccattctttcaacacgtacttgttgagtaccagctctgtgccaggtccgtccagacagtctgtgcccggagggagcctgtagtcttgtgggggacagagatgggttatcaggagaatgcaatgcagcgtgacatgtgttttgatatctagggcactttgcaggggtcctgatcctgtctgtgatgagagttcacaaagaaagttcggtcttagggcttgaaaggtaaacaagactgaaccagtagggtaaggaggaggagtcagggagaatatgcttaggagaagcaagagcgtgggaactgcctggagattttacaaactgcaggacccaactgaggatctgaaaacaattgagtctggcatattgttgactgcaggcaggagtggtgagggctgaggcgaaagaggaaagggagaactggatcttatagggacatttaggcaccttttgagcacctcgcgagttgcagaggggggtggatttgaacacgtataaaacaaattttgtggctgggcacagtggctcatgcctataatcccagcactttgggaggctgagacgggcggatcataaggtcaggagattgggaccatcctggccaacatggtgaaacccggtctctactaaaaatacaaaaaattagctgggcgtggtggcacgcatctgtagtcccagctactcgggaggctggggcaggagaatcacttgaacccaggaggaggaggttgcagtgagccgagatcgcgccactgcactccagcctgggcgacagagcaagactctgtctcaaaacaaaacaaaacaaaacaaacaaacaaaaaatttgtggacccagttggagaggcaatggaagatgaggggagtggtcagagcacctggagtcggatttggggtctgggattctcagagctgtaaacacgatgcccaacccccgagtccaccgttccccagggcatgccagccacccaggaggggcacttcttttcgagggagggtggtcttcttgaaaacagcccaggtgcctccctagcccccctatcctgtgatcctgtctgtccttgagaacatcccttcttcttcaatcaaggatttgatgactgtccctgcccacaccctatcttctctcctctaggctgggcagtctcaggtcttagaaatcattcctgatgctccctaatatgtccagccatcctggctttctaggatccctggagttgtgcccctgtgggccccaggcccagcctgcacaatgctgggttgcctcaacggcccctgtcttaaggcctgcctcacatgttcagatataaacttcctaaaagccacctttgtgacccagccccagctctatctccagcttatcagccacctgcttctgaggacaagctggctcttgcaagccagagaccatttcctctcccccaaggacttgcagccaatctccgatagccctgtccaggagaggcaatggacaaagtgcagggtaggtgtttcctggtagtgactccttcctgagatagtacagagacccatcacagggaaggccccagcaaagactgaagaagccagccaggcaactaccgtatgttactcacagttcattaggagccatgcaaaaaaccacagttatctgctgcattaattaaaggagaagggggtggggcaaaagggaatattgaataagacctggcagagtggggccctggccatgactcccaggcaaaggggaagtttttgtaatgaatatgacagctggagtcttcccgctggccttgggaattcatcactgctttgagatgaattcatcactgatggggcctggctgctggtgatgcaatagccccccagtgctgggcctcaaaaaagaatcaaagaaggtcccaaaagcctatgtcttagaagagggctgtagggggaagccagagggtctcagtaaaacattgagttttgtcccagctccatcaaaggagaccagagaatggagggctgagccaagggcacagccttcctggaaacaaatctgcattctctctgttactcacaaggtgtgtgactctagacgagtaacctcactgccctgagcctacatcacagaattggtatggagagttaggtaaactgggatgcagattttacacatggtgaagctgggcctggtttttttttttttttttttttttgtggctccttaaaagcctcaggccatgggagaggcttccaccaaggtgagatagaatcggggcattgtcctgagtgtctgaaaccctttgtctctccctgtccttcctggctcttgcttactttgccctgggcaggtggcaggccactgtgtgggagtgaaggagccatgcctgaaggggggctggggtggctagcctgtactctgttactgtagcatcccaccagcctggcctcgctccaggagccctcgaactggatccctctgacctctaggaccgccctgcagaaagcaccaggggcctttctctaaaagatccactggctccaggagtgtctcggtggcataacagcccaggccatgctatggtacacctaaaactatagttatcagctcttaatcctgtcccccgcaaatccacattccaaccacgcagaaccttctgttctctaaacgtccccacgcttctgcatctcttcccagactgtcttcgctgcctgaaacattctccctgataccccgcctccttatcctagcacacacggatcatcatactctgataacctcagaaacatgcattgaccttcaactgcgtgcagtcagggtgaggaggggtgagggcgccaggagactgagggtctggccagagataagacccacaatttcttccaaactacaacttgctccgttcaacatacatacacacacacacgcatgcacttgccaccctccaggccttcgttcactcttccctctccttgtgccccttcccctatcacctcgtgccaagtaagactgagctctcaagccttcgctcagatgccatctcttccaggagcccttgcctggtgcctttcacccagagcttctgccctggtttggacctccctcaggatacccataatgcatgtgtgaattctggctggctccatgtcctttggcctcagttcccccatctgttaaatggaatagtaacacctaacccatggtgtagttaccgagttgatgaagtacagtaactgacttgtactaagtgctgagcaaatgtcagtctttaccaccagcagcagcagcagcattttaatctctgtatctttagcactgagcacagggctgaatacataattggtactaaatacttgcttggtggagggatggatggatggatggttggatggatggatggatggatggatggatgatggataaatgagagatctagtatgtttccaaaataagagacaatctttgctggggggcgagggggctaggaagagcctgaaagaaactaaccttcatcgtacacctgccatgcatcaaagctcaacatatataagttgtctaatttgagcctcacaatagcaagatattactgcagaataaggaagtggctaattctgagaggttaagtcggtggatcagtgtcacacaagatgtagtcaggaccagggactttgatggtcctcgatacctggaaggaggaggaggaggacttgctccaggccttagctactgtcaatcttagactgaaaattcctagggcatctctgtgggcagggcagggccaccccacccaggctgtcacataaagtgctcagctgagaacctagctttggagaacagcagaaaggaaaggccgggccagcggaggtggcttgggggctgcctgtggagggtggctgggggactctccttccttctccagctcctccagcaccaccctcagcagcctccaagaacagaaggagttaacgctgggattaacttcttgaaggaacctgaagttttttaatccttgttctttcctccttccttctccctctcccttcctgatctttactccgcctgtgggtccctcctccttactctcacctccccaactccaaaaacactctgattgccagactgggtcaatggttaacactcaactggctttatataagcctgccacctgcctgcttggctgcatctttggtccttctgttacccagctcctggaggcagtggctgtagcagcccttgctgctccacaccatggccacctgctggcaggccctgtgggcctatcgctcctacctgatcgtgttcttcgtgcccattctcctgctgcctctgcccatcctcgtccccagtaaggtaaggacttggtgttctgagcacagataactccagggggcagaggagggactgtctgggccggggttgggcatccttaggatccagcataacttcctcactgcccctgccctggaagtgaggctatcgccccctgctcctcctgaggactgagggctaggaggtcaaaggggcttttgcttggcacccagttgtaggagcccagcgtgaattacttaggtgggtttgcaacctactgccctaggaaacaggaaaccagttccatcaacaagatgcaaggggggcagatggagctgatctacctactgtgtgcccacctagccctggactgggctccatggcggctgagatgggctggctgtggggaggggacggctgggtaagcagcagcagagtgaagagggttggaaggagaataggagaaagctggctgcaggcggtctgcatctttaagagcataaacaggaagagaaagagttcacctgtggattcaagggctaagtctgtggaggaggaggggtgggagttggaagaggggaccgctgcaggtagacagcacaaaaactgtgccctggatggagggggagctgggcacaaccaggcgtcactgcctcctcctccgcccccagcagaagtcataacttcatctctcattaaatcaagccgccaatgcctgccctgccctaggcacccagtaaccttttccaccatcttaagaggtcaggcctgactgtcccatttgacaaatggggaaggtgaggttaagtcacttagtcaaagtcccagggcagatccaagtttcatggaacttggatattatacacttttgggccccactctgtaagaaaaaggacacaaaagtattaatctgaaattagtttggggctttgggaagggtccagggggaaggccttgaagttcaat

SEQ ID NO: 7344 - DNA, 6000 bp, Homo sapiens
accctcacaatgcagttgcatggctggctctcccttgccttcagggtcagcagcttaacttcttctctctctgggctccggcgcgagccatgctgtggctcccatctgtctgtctgcaggatggacagctctggttctctctctctttctctgggcaccagtgtgcccaccatgttaagccatgttgagccgagccgagccccaagagccatgtctgtcatgcacagtgtcaacagggcagttatatcttttacagacaacagtggctcagggccatgtatgaacttacacaaacaggttacatagcaagtggaggggtgcccttgcgagccaaactctccaagtcatgcaggcctggatatccgccttggcctattccttgaccaaagcacatccatgtaccttacacctgtctctacaaaaaatacaaaaattagccaggtgtggtagcatgtccctgtagtcccaactacttgggaggctgaggcaagaggatcgcttgagcctgagaggtcgaggctgcagtgagctgtgattgtgccactgcactccagcctgggcaacagagtgagacctcgtcttaaacaccaacaaacacgacaacaacaaaactgttcccattatctagacatacctgccgctggatttcatacaggcatctcaaacctaaaagttcccaaaatcaacacctaatctcttttcccacacactccaagcccctccatttagcatcttttctcctgccttctttgtcttggataatggcaaagccacctacctggtcaccctcactagctcatgaagtcatcttttacttcttcttcccttttacccataaagttgctaaatcttgtcaatccaacaacctaaacatctctaatttatcttctttttatcctcactgaacttgccagaattagctcttgcctggatagcagctatcccttagccttgcccaaatggttcctggaattttcttgctaaaacacaggtgcgatccacaccattcctcctcacaaacagctctgtaagttttccatttgctttggaataaagcaaaaccccattagtgtggtattcaaagccttcatctacttctagtctttgcaggcatggcttctgctgctcttcctaacacatcttgtattccagccaccagtcacgaaatccctctctgtgcatctatccttgctggtctctctgcctggagtgctcttttctccatttttaccatttgagaatttctattattaaaaacaatagaaataacggtgatttctgaacgcttgttatatgccaagtattatattaaatgttatgtatgtattatttcttttaattttcagagaaatgaagtaacttgccctggttacaatggctgaaaagggactgatccaggatttgaacttggttctgctgttgaagagcatgatcaagcagtattggtgacgttttctctgactcttcattatttttatttttaatttcttttatttatttattttgtatttttagtagagacggggtttcaccatgttgaccgggctggtcttgaactcctgacctcaggtgacctgcccgcctcggcctcccaaagtgctgggattacaggcttgagccaccgagggaggtgactcttcattataatggcttttgtgtgttccaaaaacaggtttttgttttttgtttttttaagcttactatatagaaacagttttattacagaatttaagcacacagactctgaagtcacactccccaggtttgagtcttggatctgtggcttgccagctgtgtgacctcatgtctcctctctttatctttgaaatgggaatgataatagcaccagcctcataggactgttgtgaagatgaaatgagtcaaccaatgtaaagggttttgcacagtgcctgttatgtaactcttgtccagcagacacatccagtcctgtgttgtgtctatgttctgtgtcccttcctagattctgtcctctgggaggggagagatccccttcattcattttccaatcctcctgtacctggcacaacagacctttcgccagattgggtgctccacaaacatttgtcaaattgaatttgtaaatctgcaggtgtttgtgctggacaatgagacacttacaagttcccggtctatgctatgctttaattacctacgaatcttgtgaagaaaatggttcttgaatcaggctggtcatctaaaagcttttgccctgtttttaaaaaatccacgtcaattctttgtcatttcttggtgctagaaacatttcaaatctctttgagctaaatgaggtgatggctatccagaatgtcctggtttgatcataatatattgtatgcatgtatcaaaatatcaaatgtatcccataaatatgtacaattatcatgtatcaaatacaaaaattaaaaaaaaaaatccaagtcattgccactctgcttctgtgaacaggaagcctttttaccttcaagcctttcccaagtcccttccatttgtaaggccacaccttttccttggggaaagaggaaagaaacacctgtcataaggttcaagacttctcagacacaattggaggtattcagctgtaggtaaacacaaacctgtaggtaaacacaaaagtgactgaggtccagagctttgggtttcacttataaccataagcaactgtgtacctgctaaggaagaaggctgcagacctgaaagaggcccacggaaggcctggggatttctgagaggacaccggctcaagttacattcccatattatttcaccaccctcatgcttgtttatttacatttcaggctgcctctctaggcgaggctgcaggagtgaaggggctggaagaggtttcaaaggagagtgaacgtggtagaaaaggaaatatttgattagaagttaacatgtcctctggggcttctttgacttggattactgtaaaagtgcatggtgtaatagttgagcactcccgggaggtggtgggcggtctctctgtacagagttgtggctttgtttctgatgagttgcagctgctgtgcataatgtagactagatcaaatggggcatggagaagagccattcacaggaccggagtgacggtgctcgctctgatggcagaatactaaattaatcatcttcacctaaacctgtgctttctcctggcctgtacctcagtgaatacctgcaagttgcttaggctgtaacttgaagtcagcctacaatcctctttgtctccagatcctgtccactttcctttccgaaggtctttcagatccatttccttctttccacctccactggcactgccctcattcagagtctcatcatgtcttcctggattgcagcttccttccaggtctctcagcctcaagtcttaggcctcccattcaattttccgtgttactgtcagaggaatttttctaaactagcttaaaacccgtctgtggttctccatggccttccagatcaaatgtgctccctgaagactggcctgtgagccccttcacaccagtaatcctgaccctgcatgcaattcccagaacacaaggcatttgttctcaaatcctgcggctttctttgcttgcttctcctcctgcctgggatccttcccatcctccatggtttctctcctcctttcctcctcctcaagttcagatatttccctcacctgtaccccctctgttgtagcatttatcacaaactacactgaatctcttgactgggcagaagaatgaattgtttcccagcatctagctttgacataaaagttgctcaataaatacttgacgaatgaatgaactctattaaagtagggttcagtcatagttcagggaaggggccctgaaatagctggctctgaaagaaggtaatgccggttattgcgattatgttgttagatgggtagaatttcgcattcgattaagggatagttttgggtttcttcaagctaaagaaactaaagcctataaaaggtgatttaaaagacctcttctctagacttgatgaaacgctgtaattgccatctttggctgacactgaggagttcaggaatgccaagcaagtgtttccagaaatgtcaaacctgctgttttaaaatatgtcattccagggcacagttaaatatacaacttgctccgatgaggtgggagaagtgggccggtgagctgtgaaatgaaatctgcctaatgagggtcgaggccagcacacacagggacctatttgcagtaaaacaacgtggggtgacgcctaagaaatagacaacattaacacaaagggagcctactacgtagcacatttccgctaggcataaaagagacacctttccagaaagcaactctaaaaatgaatgcaccgcctagtgaggtgcgagccttcctccccacgaggcgtcccgtgcaaccgcacgcggacagcggggctccagcggaggcggggtggatgcggagacaaggcgcctaggagactgggctaaggctttgagtgtccgaacgaagattctttcgaacctattgattttttctagtcttatgattctttcgaaccttttgattctttccattctcggttctaagcattaaagcgcagctgagaaaggcagcaacaaagatgggaagagaactagcaggagttctcagagaaaaatgggtgataatttaggggagaagccataaagaagagactaagcgagaagcggagcacacgcagaagacgaaacaaggaggaggagaagagaagaagaaccttggcgaaggaagagagtgaccaaactcgtcccggacgggaggagggcaggcccgcccagagggaatcggctgctttaagggaagccccgccccctggtggtgacgctccaccaggcccgtccgcgattggctgcggccagagggcgggatggggttgctaggcgaggaggggatccggcgggcccccgccgcccggagcgctgagccgcgggagcggagccggggttagcggcgctgctggaagatggcgagcggccgggacgagcggccgccttggcggctagggcggctcctgttgctcatgtgcctgctgctgctggggagctcggcccgggcggctcacatcaagaaggcggaggcgactaccacaactacgagcgcgggcgccgaggcggccgagggccagttcgaccgctactaccacgaagaggagttggagtcggcgctgagggaggcggcggccgcgggcctccccggcctggcccgcctctttagcatcggccgctcggtggaaggccggccgctgtgggtgcttcgcctcaccgccggcctggggtcgctaatccctgagggcgacgcggggcctgacgctgccgggcccgacgctgcggggccgctgctgcccggccggccccaggtgaagctggtgggcaacatgcatggcgacgagaccgtgtcgcgccaggtgttgatctacttggcccgcgagctggcggccggctaccgccgcggggacccgcgcctggtccgcctgctcaacaccaccgacgtgtacctgctgcccagcctcaaccccgatggcttcgagcgtgcccgcgagggcgactgtggcttcggcgacggcggcccgtccggggccagcggccgcgacaatagtcgcggccgcgacctcaaccgaagctttcccgaccagtttagcaccggcgaaccccccgccctggacgaggtgcccgaggtgcgcgccctcatcgagtggatccgcaggaacaagtgagtgttgcctgccccctccccgtccgtgtgagcctccaagggccgaggctggttccggcacccagtaggcgctcagacaatgctggcataaggggtggcggtggtgaaggtgaagggagacaccctgtaacggggacagggcccaggccgcgtagcctcccgtcctgctaatcatcaaagaattgcctcctagaggctgtcatttgttcaagggatggctggaggggacactcctttctgacatttctggtcc

SEQ ID NO: 7345 - DNA, 6000 bp, Homo sapiens
tcacactctcagcataatttgaagtcagagaattttgaaacttcaaactgagtaagatgaggaaaatcagcagatcgcaacatggattctcacaggcccaccccagcagcatcccacaggctctgtggagcgaagccagatggagataaactgcagggaagtcaggagagggacgccagaaaaagaaagtaatgttctaatcttggcctaaaactactgccagaaagactaggtccacctaactctcaatctcaaaaacatgtccaagcagatccgggcagaaaccagaggcaagaggcttcagagtgagcacaatttaaagggggcaggtgtgacttaatgaggcagtctttgaaacacacagcttcaaaagaaaagaaaagaagagcgtctagtgaagggaaaaatgaaaaaaggagaagcacctttgacaattaggtgatgaaaagaagcaaaagaaaattaggtgatgaaaagaagaaaaggaggaaattcgagtcctgctagtcaaatgagaactgcaaaatcagagcacttacaactcctccccgaacatgccaacaaaaatacctactaaagtatttaataccttagctttgctctattatcagaacagatctcagccatgaaacatgaaaatataaatagcatatatgaatgaatattgataagatgaatttgtcattattagatgatatgcttatatatatggaaaatacaaaataatctacagataaattagaaataataaaatttagttccacttccagctgtgagtggattggcttgaaatggaaagacttctcgtcaagagcaattagaaaagctaaattttattttaaaaaaaaactgtttgaaggattggagaactactaatgtaagaaggacttataggatcaagatcccggaacaaaaagagctgagaggtgagcatgatggtaaaactttcacctccaggtatgtttcaattcataggtgacagaagagaggccaggcaagagacagagaactcaaacagaagttttaggcagtatcactgggtggaggaaaatatgaggttagcacctgtcaaggaggtggcactggtaaacagtcttccagttaggaaacctgaatggctagacattagaattaagggttaaccaaaaatagaccaattttaacaaacacagaatccctcttggtattagttccaccccatactggattaagctgatctgcccctacctgaactgcctgcaagaagaggcagtaaattctttctggagaaagacaacatcatctagatcctcaaatgattaatacaaagttgtatctataatatatagcatccaatcaaaagttcttattatcaaaagacaagattaaattgtgaatgatcaagaaaaatagaaacaatcctatgggaagtacagatttctcagttatcagaaatttttaaagaatgatgatgggccgggtgcggtggctcacgcctttgtaatcctagcactttgggaggccgaggtgggcggatcatctgaggttgggagtttgagaccagtctggccaacatggagaaacctcatctctaataaaaatacaaaattagctgggcgtggtggtgcatgcctgtaatcccagctacacgagaggctgaggcaggagaatcacttgaactcaggaggcggaggttgcagtgagctgagatcacgccattgcactccagcctgggtgacaagagcgaaactccgtctcaaaaaaaaaaaaaaaaaaaaaaaaagccgggcgcagtgtctcatacctgtaatcccagcacttttgggaggctgaggtgggaggatcacaaggtcaggagttcgagaccagcccaggtaatatggtgaaagcccatctctactaaaaatacaaaacttagccagtgtggtggcaggcacctgtaatcccagttacttgagaggctgaggcaggagaatccttgaactcaggaggtggaggttgcagtgagccgagatcgtgccactgcactccagcctgggcgacagagcaagactctgtctcaaaaaaaaaaaaaaaaaaaaaagaatgatgatgaatgaattcaagaaagtagaagacaagatgaagaattttagcaggtttttttttttaagacagggtcttactctgtcacccaggctggagtgcagtggtgtggtgatggctcactgcagccttgacctccagggctcaagcaatcctcccacttcagcctcttgagtagcgggactatagggcgcatcaccacgcctggctaatgtttaaattttttgtagagatgaggtcctactatgttgcccaggctggcctcaaactcctggactcaagcaatcctaccacctcagcctcccaaagtgctgggattagaggcatgaaccactacatccagcccgataattaaaacatttaaaaattaaatcaacaatttcacttctggacaaaatggattagctgtatttctttctatttttcccactaagcacagcaaaaaaaaaaaaaatcatatatatatatttttaaaaagactcaaaaaggtggaaagaagaaggcagaccagctaaggacctcagaatgtaaagaacatgaaggtgagttccctgggtttcctttttgtttcctatgtcctatactgggtgctggagaaactggcaacctagaaatgccaaagggtgcagacaagaaaagtccaaaggaaaatggaaagccttctctctccagacaagggatgaggaaacaggtatcctaacaagacagaatacttttggacaataatttcaccactctggacaaatgccacagaaaaaactgaggcccatcttcactccttgccatcaaaggctgagtgaggaggctaggcttccacactcacctggctctaatgaagcactccacccatcccccacttggacttctcgtccattgcacagcagcaatgaggctccctgccatggtggcagtggggaccacatgcggagcagtaacaaggcaccccctccctggggaatcagtgaaggccaagggagagcctgaacttccactgccacctggaagtagcaagcatttccctatgtcccccagcagcatagtgtcagaggaagtctgcttaaacagaagacataaataagatcagaatctcataacaaatacctgaaacatcaggatacaatttataaaaattgtcattccaatagcccagagaacttcgacttgagtgaaaaaaagacaacagaccccaacatcaagatgacacagatgttggaattatctgatgaggactttaaagcagctctaataaaaatactttagtgagcaattacaaacaaacttagaacaaatgataaaacgagtctcagcaaagaaacagaagatataatgaggaactgaacagaagttttagatacgaaaaatgcaataattgacatgaactcaacgaataggctcaacagcagaatggagggaacagaggaaagacatactttctgtcagcaaatctgaagacagaatagtagatagtaccaaatccgaatgatggaaaatagactgaaaaaaaattagcataacttcagagctatgtgggacattaacacaagatctagcattcacgtcatcagactcccagaaaaagaagagaaacagtatgagacagaaaaagtattggaagaaacaatggttgagaatcccccaaatttggcagaagacataaatgtcagaatcaagaagctgaggatatcccaaacaggataaatccaaagaaatctacaccaaggcacatcataacttctgaaaactaaagaacagttcttgaaagcagtgagagagaaaatgtattttagctacagtggaaaaacaattccaattttagtcaatttcttatctgaaactatggaggccagaaggaattggcacatttttcaagtgctgaagaaagaaattgtcaacttcagattgtatatctggcaacaatatccgatcccccaagaatgaagggaaatcaagacattctcagatgaagaaaaactaatagaatttgtcaccagctgatctactctttaaaaaaaaaatggctgagggaaattcttgaaacagaaaggaaacgattagaaaaaggaatcttgggacactaggaacgaagaagagtaaaatatgcataaatcaagtaagctttcctcttctcttgaattctctaacttatgcctgacccttgaagcaaatattgtaacactgatgtggttctcctcaatgaatgcagaggaaatacttaaaaacaactatattataaatgagtgggggaaagaactttacaggaattaaggtttctacacttcactagaattaagtcagcaccggtagactgtgataatttatgtatctataaagtgtgggtttggacagcagattttatcaggttgagggctcaggccgagagcatgtagaagcagttagctcactctttctagatgtggcggctgacaaggacaaagagggctgggactagaactgctgtagacaaggaaagcagccagtggagaagagcgcatacgccaaagaacgtggatgatggagcacaggcggggaggtaggatgaaggaaatggctctgggaagaaagggtctctatgtctgagaaaggaagaaattggctgaagatacaaattagagacaaggtgagggaaattgagggagttgcctgaggatgattctcctcccagtcaagtaggcacctgctgagagaaaggataagccgagatgagggagatgatgatggtttggggcgcagaaagcgggaatgaaagacaggagctaaagccgaagttttttctctctcgctacttaaaagctgtaagataacgaattgatcagcaggtggcagtgtccgcggaggctcgcatcccgtcggccctggctctcaaggcggaaacacgcaccatggtgactttccggcctgcatcgcctctgctcccctatcccggctgacgttggacgacaaagatggcggcagggaccagcagttactgggaaggtgagggcgagaaggcctccgggtgcgtcctacgagggtgagaggggctgagtgaggacagatcttgggagaagcagcacaggaaagaaccagactcccggagcggccgagctgagcagcggggcttgcctaagtgggatccccggggccttggggataccgaacggtctggggtaggggtctggcctggccggggcgtgtgagcgggacgtggggcaggggttgggcagagtggacagagcggggatgtagaggaagagggctctcaatcgcctgggtagaattgtgttgagggagtaatggaactcggacgaaggggcttggggtacgaactctgagaggaaacgaatgttgagggagaagatccagagccccggagactggaggagtcagcgcattggagctgaggtcactattggaaaactgagtgggaaaagagaaggaggaacttgcattccggtccgtcggaggaagtatgaagagaataggagacagaatgtctcttattgggtctccatgacaactacaggttggggacttccaggactgggtgtttgaaggaggagaaaataacttacccttctgctctagagtctagaatcggttttattgaaaaagttgagagaacctgtgtgaattgcagttacatttgctatacttctcccaccaaaaaaaccttcctgtgatttgacaaatgcatttgtttaattcctgaaactatagtcggataaagtgagcttacataaaactcattcgtggattatgatgatcaacaagagcagagaaagctcacctttttctcccaactgtctctttgctttacagccgcatagaaactactttccaaattcctttgacctgtttttattgctatacactgaagcctctagaaaccacagtattgtcactatcagccccttggtctaagaaactcaattctaaatttatccagatttgcctatc

SEQ ID NO: 7346 - DNA, 6000 bp, Homo sapiens
ctgaatgtgtgactggctaaatcttgggactgggaaagtttttttctgtgcttttctgagctcaacttctgggtgcccacgccttgctttgaaagggtttggtctgtgaacctacacatctctcagtaatgatttaagttactcagaaaactgggagccctggagtgaaaggaagagacgaaagggaaagaaatccatgtagcagtcttgctccgtttgatctggcagacagcgggcgatgatggaagaatgctggagatggaggtggagggtggtcggattctgccatcctgagccatgtctgctgtttggacttgcagacttcaaacacggctgggggattcccggaagacaaaagaattcagggccgggacttggatctcagtcaaaaataacttacgtcttcatctcaggaaggcaaacagtggtagctcagggctggtttctcagaagattagagctacaggtggggacagggtgccacgaaggtcagtttaggtttaagctggctgcagagagagaaggggctcggagggtgtgggtctggcagagggagatgtcagaatgaaccccaagtgaaagaggttctggagaaaaagtcatccctgtttgccccccttctgggcattgccattgctttgagcaataattacagcccttcatgtttcttccctggcttctcattagctcaaggtgtccacaaacaaactgctcagccccctttgccttcctctccccgcttccagcagctactcctggcttttccatggcagccaactgtcccagttcccaggaccagaacatcgggtccttaaaaaaactccttcctctcttggagggcacatttgagagactcagccctggaaaggctcttctctctctcctcccccttatcccactggactgtcattagaggatgacctcattttcccccaggaggccagggcccgggtctcatcccctttgtactatcagtacctcggccagggtctggcacataatggacactcagcacgtgtgagctgaatggcactgctgagctgtcgccaacttaatcttcctaaaatgctgctccagttagaagccatcaccgcttctctatctcccactgggcgaggtccaacctcctcagactggcactcggggactctggcgacacagtgctcctcgcctgcccggccatcctcactttgtgctcagccacttcatggttcccaacacagtcaacagctttcctatctctgtgtctttgccgcagcagttccctccacctagaaacccttccacgttctctaccacaagcttgcccctttcaaggctcatctcaacatcatgctcctgcccttctaaaccgagtttgatccacccttccccagcccttcatcctgctctgcgttgacttcaagtgtcttgttaggaaccttaaaagaggccatggtgtagcgcacttgcaaaatgaagagcaaggaagaagtgccaataggcccagttccgtgtcacttctcattagcgccaaaggttctcccagggaggggcctctgcatggcacacctccaggcatcgacgagtgcctgcctgctgcagctggtcagtgaaagtgacaccatgcctactccctcctctgcccccaaaatgccacagaatatgccagtccttaggctgtctcaggtgagagtagaacaaaaggtgtcagggtgcctagccactcctatcccctggagctttctaggcctggaccccaggccccatgtcctactgcctgctcgggagtgggttgcagattcgcctggagctgaggggcagagtggtctgaccagctgggcgtaggtgacattgaggacaacaggtaaagggtggcctcaggctcatggaggatgatggatgtaacaacttgtcctaacagtctccaagtccagacaccatcacctcccagcaagggccaaggtgagagaagctgccccgtgaagcaagaatcctggtgagagatcaggaattccttcttaggagacttttggaaacatagcctgccaaggcggggtaaatgttcctagggacagaaggaggaacaagatagccttctggatgtttcccatcttccctctcccttttattctaactgctgccgcccttgtgacctcttccttggacagcacctctcatggccctctgctcaggccaacctccctcctgtctagactctacactacagccaaagggatcttttttgtttgttttgagacggagtctcactctgtcgcccaggctggagtgcagtggcagatctcggctcactgcaagctccgcttcctgtggtcaagtgattctcctgccttagcctcccgagtagctgggattacaggcgcccaccaccacgcccggctaattttttgtatttttttagtagagacagggtttcaacgtgttagccaggacggtctcgatctcctgacctcgtgatccgcccgccttggtctcccaaagtgctgggattacagccgtgagccaccgcgcctggccagggatcttttaaatattactctactgctcacaatccttcaatggctccctattgcccttaggtaaagtccaagctcttttcccatgaaactcacagcccctcacaaccttcccgtccaggctgggctctttagattggtcatcgtgctccagtttccagccatgccaaactgcttgtcgtttgcctcccatatgatgctgctccacaagcctggtcgtgctgttccctctacctggaacacctccttcaccttttccatgttgcctagttctggaggcttatcctttgggaagccttcctggacccacagcgaccccctcctttggagttctacaccttctgggcttcccttgaatccaggacttacccttgtgttgaatgtgactgtcacccccaattatccatttctggagggcagggtctggttcttatccacctctgtattctcaaagctctgtcattggtacttagtaggagcttaatacatgttcaggaacagaactgagcctgctaagctcccttccccacgaagggatgacagagttggatatgttgataagagctgtccctgggctgatgaagaggcagctccctgggtagctggtatcagaacactgtccagggtggctgggcatcccagcagagtggccaacccttttctgtgcccttctccttccagttcccctggaaccagacttcctggcccacttctctagtcccagagatctaagtataacagagccaacacccataccggtcatgcaaatgacagcctgggatgcgggaggcagcgacacagaccccagggccccagcggtcatttgtccttctgggctcctcttcacaaaggaatcagcctctcttctgtcccctgaaggctgttttcaaaatcacaccccatgcagacagttttatttacaaggaaatcttggcaggatcttgacttgttagtagagtagggatggggaggagggtggtgagaaacaaaaatagttgaaatgatcacactttctgaaacagagatgaaaattggtgtctgtagcaaactcacctaattagaatcaagtgaattcccttctcggtgtttaaggggagcagtcattgctgggtgatggtcgcagttcggatcctgggcacggggttatgtctttgctttctgaagatgactgcattagttgcagctctcactaatggaaaggagcctgttccgtttcccagaggaaggaagagggcaaagactagtgagtgagtgggtggtgggaagaggaaagcaagaggagtggaagggcacagccttggtgtgggctggggactgactgcgagatgcctcctggagaagctcctgagcctctggggagagctggcccctgccaggccggccactagcaccatttacagccagagcctctgcttcgggagatggtctctcttgggggcgctttcctgcagggaaacagcatcgattgttttctttaaaagatcccctactccgttttggctaacttcctttctgattgctttagtttctttaccgtccctctccccagatggggcatttccctgggcttacctttgtccatgtggtcaaatgaagcctgggcatggtcacttagctctgggtgtaggaagggcaagatttaggctttggggcccacgaccccgcaatctgacttctcccatttctgggcctcccgagacctcccagaatctgagaccgcagtgaatagggcgtaaggataatggggcgggaggcaggaatcccgtccttacaacatcgcgcccccaattcactcctagttaaccctgacgtcgccaacatagtgtctccatcacatatctgccacctccaagtgatggttaagccgatggaagagccaagcccgggcccggagtgcaggccggtggtgaccgggccggggacggcgcagtccccatccccgccccgggcagcgccaccacttcctcgccagccccgccgcagccctcccgctcccgggccgcgccgctctgaccgactgggcccgggtggcggcgcccggggtggggtgcggggcgggggccggcgttccccgcgagcagccccgcccccgcccgcgcgccgcccccgaggactccgcggggaggaggagactcgggcgcagagcgggggccgcgagaagcgggaagggagcgcggggagcggcggggccggggccggcccaagggcgccctcgcctcggagccgggcgcgagggccggggcggaggcggaggccggcggggcagctagcgcagtgaagtttggcggcggaggggccgggcgtcccggggtcgcgaggaggcggcggcggcgcggggaccggggccatgggggcgggcgcgggctgcggagcgggcgcggaggcggcgcggcgcgcactgagcccctggagcggcgcggccgccgcggcgcaaagttagcccggcgccccgggacgagccccgcagccgccgccgcccccggaccccgtctcggccatgggcgagcaccccagcccgggccccgcggtggccgcctgcgccgaggcggagcgcatcgaggagctggaacccgaggccgaggagcggctgcccgcggcgccggaggacgtgagtgccccctccccgcccggcaaactttctagggggcgccggggggaaaagccgcccctgtctcgccccacgccgggcaacttggaggtttcagggtgacgcgggagcgccccggattggccgggtccccgcgggcaggagggggcggagggaccggtctccccgaaacgcgcgcgcaccgcttcccccgctctggttcccgcggcttccctgcgggacacagcaccgccactgcgccgcggacctgtcaccgccggagccccctccccgccgctggtgcagtgcccgggacacggcgttttcccgcagaggcggccgcgtcacggcggtgactccccctcccctcacgcccgcgacctgcgagctcccggagctggggaaggagcggacgccgcagagtccccgtccctggccatgcaagccggcctggcgaccccttcctccgctcccggattagctcccgcccggcacctgccttgccgcgacactgattgaaattcaagccggcccccgcctctgaccccggccggagcagggaggcaaagagtgctgggagcggctttgctcctagaaggaggcccgggagtccaagaccgtggcggtgccaggggacggtcccctgggcgaggagagggaggggctgccccgagggcttccccgccgtctgctgctcgggtctccatccctccggtcctgcgggccggccctgcgaagccctgggaactggagtttcttgggttaacctcccggggctaacctacacataggggtgaaaaaccgggcagacaccctgccctgcccactcctccctcagggtggggagatggaagtgaaaccaggcccccaacccacacaacgaaagcgggaaagtct

SEQ ID NO: 7347 - DNA, 6000 bp, Homo sapiens; identical to SEQ ID NO: 762

SEQ ID NO: 7348 - DNA, 6000 bp, Homo sapiens
atgattctcatgcctcagcctcccaagaagctgggactacaggctcatgccaccacgcccagctgatttttgtaattttagtagagatggggtttcaccatgttggctaggctggtctcgaactcctggcctcaagcaatccgcctgcctcagcctccaaaagtgctgggattagaggtgtgagccaccacacccagccctcttcgggctccatttagaaatttcaatacaacaacaagggattccagtaacccacttcactgggaaaaacaggaaatcaacttttccttctgcctcattatatttctttttcttttcttttttttttgagatggagtgtcgctttttcgcccaggctggagtgcagtggccagatctctgctcacttcaagctccgcctcctgggttcatgccattctcctgcctcagcctcctgagtagctgggactacaggcgcctgccaccgcgcccgactaattttttgtattttcagtagagatggggtttccgtgttagccaggatggtctcgatctcctgacctcgtgattcacccgcctcggcctcccaaagtgctgggattacaggcgtgagccaccgcgcccggcctgccccatcatatttcaactggaattcttcacatctgcttattgtataaataaatattggagtgtctactatgtgcaagagtgttctttgccaagactgagcccctaacaatcgattccttcctctacttgcacaatgagttctcttctcttgctcccatcatcgtgacaagatctttttatcttgctttttctgaaatgtgaattactaagattgtaggattaagaaataccctttttggctgggcacggtggctcatgcctgtaatcccagcactttaggaagatgaggcaggtggatcacctgaggtcaggagttcgacaccagcctgaccaacacggtgaaaccccatctttactaaaaatagaaaaaattagccaggcttggtggcgggcacctgtaatcccagctacttcggaggctgaggtaggagaatcacttgaacctggaggccgacgttgcagtgagccgagatcgtcccactgtacgccagcctgggcaacaaagtgaaacttcatctcaaaaaaaaaaaagaaagaaaagaaatatccttttggtgttacttctctaacagacagctcccaattttcttctctttttggttttttttttttttttggggggattgagttttgctcttgttgcccaggctagagtgcaatggcatgatctcggctcaccgcaacctccacctcccgggttcaagcaattctcctgcctcagccttccgaggagctgggattacaggcgcccgctaccacgcccggctaattttttgtatttttagtagagacggggtttctccatgttggtcaggctggtcttgagctcctgacctcaggtgatctgcctgcctcagcctcccgaagtgctgggattacacgcgtgagccactgtgcctggccagctcccaattttccatgaagctgatgaggtaggaagatatgaattttccaaaacagtagctcatcaaacaacaacaaaactaacttatagctcatctctaagcaattaaatgatattgactcccctatcattatttcatccaggctgatatggaacaagtttgtattaactgagaaactgatcagagggtgggcagagatgatctgggatgtgttggctactgtgtgaggctaacataaaactcaatggtggaggaagtaatctaagataaattatattaatgttctgcattaatcaataatcttggccaggcgcggtggctcacgcctgtaatcccagaactctgggaggccgaggcagatggatcacctgaggtcaggaattagagatcagcctggcgatgtggtgaaaccctatctctactaaaaatacaaaaattagccaggcatagtggcaggcacctgtaatcccagctactcgggggactgaggcaggagaatcgcttgaacccagggggcagaggtcgcagtgaactgagatcgagctattgcactccagcctggatgacagagtgaaactgcatctgaaaaaaaacaaaaaaacaaaaaaaaaaaacacctctcatccatggagtaaactttcctcactttggttgggaataccagtaaaaataattcatgttttggccgggcacggtggctcacccctgtaatcccagcaatttgagaggccgaggtgggcagatcacctgaggtcaggagtttgagaccatcccggccaacatggtgaaaccccatctctactaaaaatacaaaaaattagctgggcgtggtggtgggcacctgtaatcccagttacttgggaggctgaggcaggagaatcacttgaacccgagagatggaggttgcagcgagccaagattgcgctatcacattccatcctggctgacgagtgaaaactgtctcaagagaaaaaaaaaatcatgttttattttctagggattagagtaggtggacaggagtctgttaaataatcagatatagcttatttaaatgcttaataacatatattctatttttttcttttttcttgtttccctatgcttctataggcactgaatagctctgttgcccaggctggagtgcagtggtgggatcttggcttactgcaacctctgcctcctggacttaagccatcctcccacctcagcctccccagtagctggggccaccatgcccagctattttttttttttttttttttgagacggagtcttgctctgtcgctcaggctggagttcagtggcacaatctcggctcactgcaagctccgcctcccaggttcactccattctcctgtctcagcctctggagtagctgggactacaggcgtctgccaccatgcccggctaattttttttgtatttttagtagagacggggtttcaccatgttagccaggatggtctcaatctcctgacctcgtgattcgcctgcctcggcctcccaaagtgcagggattacaggtgtgagccaccgcacccggcctaattttttaatttttttgtagagatagggttttgccatattgggcaggctggtcttgaactcctggactcaagggatctaacccacttccgcctctcaaagtgctgggattacaagtgtgagccaccccacacgaccccacatactcttcaacacatacatacagcactaatttcatgtcactattaatgtgtcgtgctataggttcaatactgtggctggaacttgtagggaaatacttaccacataagaatgtacgatatagctgcgaagtcaagctttaaaaaacgcctgtaatccttgcactttgggaggccgaggtgggcggattgccggagctcaggagttggagaccagcctgggcaacacggtgaaaccttgtctctactaaactagaaaaaattagccgggcatggcagcgtgcacctgtaatcccagttactctggcggctgaggcaggagaatcgcttgaacctgggaggcagagattgcagtgagccgagattgtgccaccgcactccagcctgggtgacagagtgagactccgtctccaaaaacaacaacaacacgtgatctccaaacccaaaagtaatctttcagttcttctgatagtccccagcactttgcttcgacctttgtagcaattctacttcagcctgaaatttcttgtatgtacagcctgtagctcctaacttattgcaaaatattgtagatgagaactctgtaagctgtaattggcagaataaccaccaacggctaagtgtggaaagtgtctgcctttcagcaacgtttacactactgaatttaccagggtgatcccaacatcacgaatcctttaacaacttaacatgaagcagcacgtagcagttacctgcatgggttctggaattagactgcttagattcaaatctcggttctgccagttatcatctatctaaccttaagtaaattacgtaattgctctgtgactcttttccgaaatgacaaatcacaaatgtttttgtcaattcaagtgtcttctgctttagtaaacatagtagaagacagtagtcaatctctttttttttttttttttttgagacaaagtctttctctgtcaccgaggctggagtgcagtggcgggatctcggatcactgcagcctccgcctcctgtgttcgagggattctcctgccttagcctcccaagtagctcagactacagccgcctgccaccaagcccggcgctctcttgctggcgcatgacaaccgtgcgttccaccctacgactaattttttttttttttttttagacggagtctagctctggctggagtcagtggcgcgatctcggctcactgcaacctctgcctcctgggttcaagcgattctcctgcctcagccttacaagcagctgggactacaggcgtgtgccaccacgcccggctaatttttgtatttttagtagagacggggtttcgtcattttggccaggctggtctcgaactcctgacttcaggtgatccaccggtctcggcctcccaaagtgctgggattacaggcgtgagccaccgcgcccggcctccttttccttttttaactaatggaataaacggcaatgtgccaagcatacagcaatgcccattccccggccttcagaaagcctcgggcgcaggcgcagctcgcgttcaagcgctctctcgctggcgggggacaacagttcgttccaccctacgcccaacgttgtctccctgcgcacgcgcggccgtactccgccctccttactccaccctcccccactcccgcgagcacgtgcgcgtcctcgctgctcacatttcggcggagggcgcgctccctggaaaattccactcctgtgctagctccaccctatgcggcttttctcctacccgacgctcttcactctcagctcccttcccggcggcctttgcgggaacaagatggcagcccccatacctcaagggttctcttgtttatcgagggttttgggctggtggtctcggcaggtgggtagggacggggccgataggaccctaggggctacaggagaggacagagtcgagggaaatactctctgtgcaattgtccttggtgagctgggacaatacgagtcatacctaggccggggaagaggcttaggtggacaggacctagctgcggagctcagtggtcgaatggggatagcctagacagggccatgagagcgagtgaattaacggatattaagtttttccggattggtttgggtctgtctggcgaggagatattaaaggagagacaagtaatgggttggaaggtggactccctaatcttcgattcttataagtgaactacgttgaagagtagccgaaaatgagggcgtcccatattgtcactgccccgtctgagcaaacctcatgatcagagagaaaagatctcctgatctttcgagggtttattggtcagttgggtgctaaaacgacagaataaagtttacagcgagactcccgataggatgagcaaaatatcacgagtacatatggagcagatgcctacaagaggactttgcttatgctttaagcatagcattcagggcccggcgcggtggttcacacttgtaatcccagcactctgaaagtccgaggcagaaggatggcttgagcccaggagttcgaaatgagcctgggcaacatataagacctggtctttacaaaaaaattttaaaattagccagatgcgatggcgcactccttagtcccagcgacttgggaggctgcggtgggaggatagctagagcccaggaggtcaaggctgcagtgaaccgtgatcgtgccatcgcactccaggctagcgatctgcctcaaaaaataataaagaatagtattctgcccatttcagtattgagttggtgtttccccatcaccatcagtttttgaaacttgctttgatcaactcagtatccgtagg

SEQ ID NO: 7349 - DNA, 6000 bp, Homo sapiens
aatttttgtatttttagtagagacagggttctgccatgttggccatgctggtttcaaactcccgacctcagctgacccacctgcctcggcctcccaaagtgctgggattacaggtgtgagctactgcacccagcctaatgacacttaaattccatgaaataaggtagtttaccttattttgttgtactgctatcaaataccatgttttgtgtgatgtggtcacattacagcataacctattttattatatgtcttcaggttcatttactccaattttatgatagactatcctctaaggctgtgattgaagaaatgtatttgcttaagataggaggctatgaaatgaagtccaaaatagggacactctacatcagagatttacaatgagtagggtgagtttttaaaattacctatggccagcccggcacagtagctcacgcctgtaatcccagcactttgggaggccgaggtgggcggatcacgaggtcaggagatcgagaccatcgtggctaacagggtgaaaccccatctctactaaaaatacaaaaaaaaaacaacaattagccggatgtggtggtgggcacgtgtagtcccagcaactggtgaggctgaggcaggagaatggtgtgaactcaggaggcggagcttgcagtgagctgaggtcgcgccactacactccagcctgggcgacagagcgagattccgtctcaaaaaataaaaaataaataacctgtggccaaatccctatttacagtataaagaaccactgaactctttccaaatacaagtaaatctctacaattaatttaagctccgtctgcactgggaggaattttgtttcccattgtgcagctctttaatgatgtataagggttgatgatgcttagctttaaatatctaggaagaagtaggaacaacatgaaagctcaaaattaagaacagagactggactctggtgtcctggcttctctgatatcccaggggcctattacactttgtcaggcccctcagctcccagcagatcaggaacttgagatctggctgtggtaaccaccctcaagcttgataactattcattgcgtccgagtacttcttatatttcgaactcattagatagtaaaaatctcagaatcctgatttcagatctcatgaactaattctacatcaccgcctcaaattacccagcctgaagacacaacgggcttggtatgaagatataaagtatgttgcaaagagactgagggcactgtagatatcttgaacaaaagggtcagactaacccgcagctgataaggaaagggctccaaacttctagaaccttcttgtcaattctgctttaggattagaacaagtatgactacccacaactctgttccaaccccacttccaataatctggcctaactgttgccagaatctagagcgttctcgaaaaccactcactcagcagctcccttggctagtccgactggcaatctcgaaccactgcggctgcttcggagtgccaacagcgcccaagcagttgccctcttccttggtgcttaacttaagaaagaacagtgctgggaaggataaagatcacccaggaaggacaggggaagaggagtctgacgtagagaacacgagataagcccctcgctcttcctttttttctctgtcatctttgacttctgggataaccgggggcaaccaggtcaattatggagacacacaatcacttcgaacccagactagtgatcgctggggtataattacaagggaaaacggggtgaggagagcaaaggttttggagacggaaagtgcagacaggcaacaatgcacagaagttaacaagagaacgcgggggtcgggggcgatgtaaggaagtcgtcatcgacgccgcgccgcttcccccacctcgcaccagacctctgaaattgccctcggagactcggcctctcctataaggacgatcgtcctctcagctggagaacaaggccatgcctcagctcctacgccaggcggaagcgggagaggaaggccgacccccaagagcgccccttcagggggtccatccggccttgatctcagatgggggggtgtttgcggagggcggggcatcgcctcaacagctgggggctgcatcatggcaggaacgagtttccctgagccacggagctgcaggtcgcctcctctactaccctgctacccggttacctcttcgcctcttggtcgtcgagcagctccggctcggtcgccgccattaccacatcgcactccgcggcagccgccatcttaccgccgggaccagagagctgggtgggaggccggcggtgaagagcacttccggttggagcatagagcagctccgcggcgccgcgcccagaagggctccctcgggctcgtctaccagagagaggctccgcttggggccagagcggcctcccgcccccggatgtccacggtggtctccgcgccggggcgggagcccaggggctgtgccggtgcgtaggcggcgccactttacccgtgggtgggaaggcggggtgtaccggtggtagcctctctagggcttggctgctttcagtattccaagagcctcattgccatagcaacttccaatcctagagagtcttcctgaaaggctccgtggagtctgggttgcgtggggaccaggtgacccaagactctgtagggaaggagtccccactgctacctttccgaccttggagtgtgtccacagcttcttcccgggaaagtcaagagacactttgagctcagttcccccagctttcatcgttctctggaagccctgcccagtcaagccaggggaacgcagggcgtcttcaccctgcgcctttcatccactccggatctccaaacaccaactggttcatcaccctaatgacgctgacccttttacaaggctcctttcatgtcagccgcctgggagtgccatctcagcattaagcctaggaaagctgacacatggcgccccagaccctgccctggagtttataaggaagctcgcggggtgaggtccttgctcttgtgtccccagtactcccacctcttatataaactctctactcatcacgcttgccttgccgaatgcggtctggattgagaattcataggggacaagggcacagtttaactgtctttgttgttattccctcacccaaacgactatttgtggagctgaattaaattggagctttctggggttaaattggaggagtatgaggagtagctttacaatgtaaagctaagagtaaaataagaagagggcaaaggaattttaaaaggatttacctgtttgttccaggaaaacagcatgtgccaatgctcatactctgcctatcccagtgtggagggagctgaaaccacagcgaccactgagtagggagggataggacaagctcactaggttggaaaggaggggtcattcgttgagccaatcactcagccctttccaaaacgcctactctgtgctaggttgtgagggcacaagacttacagaccacctgccctgcctgccagtggctcatagtccagtctaatgctagccaacctgtctcaccatcttcccactttatgttctatctaaggcaactcatttattcccacagctttacttccatctgttgatgactctcaacttttcatatctccaacctagacctttcttcagcttccacagctgtatatccaactatctactggatatctcttgtatgtttcacaaatccccaaggcttaccatatttaaatttaactttttcattgtctacccacacctcaacaacagaaaaaacaaatgttggatgtaattattatctttcctaaattccgtatcttgttaaatggattaaaccattctcactcttggcttccaatttgttgccaagttttgttgattctcctaccaaatatttcccaaatctatctccacctttccatcccgattcaggcgctcatcattttttaaaatcttggaataggctgggtgtggtggcatgcatctgtagtcccagctatttgggaggctgaggcaggaggatcacttgagcccaggagttagaggctgcagtgagctatgatcacaccaatgtactccagcatggagaaaagagcaagaccctgtctcaaaaacggcaacaacaacaacaacaaaacaacagaaaaaaaaacttggaatacatcaatagtctcctaatcggtctctaatttcatctctgttcagtcttccctcttctgccagagtgaccttcctcagggactgatcatgtctcttcattggcaatggctttccattgccgtcaatttgatctctttggcctaccacacaaagcctttgattatctgtttctttttttaaataatttaatttgagtaccaatatttaggtcctttctaccaccaatattgaacccaagttctcatagtttcagaaaatgccatgacttgtagccgtttcctccaccctagaacaccctttcccccaggcccttcagtgtctgctgactcaacgttaaatgcccttttgctgtgctccacagcacctcagtagttgttagacatctagcttctctagaccgtgagttctgatgggcagccaccatgtctaactcgtccactttctctcagtatatggccctgcaccaggcacagacagatgatgctcagaaaacatttgacgaataaatgattgagtaaacgaagagttactgtactctgatcgcctttacagagagaacatctgggcctcagagacaccagaacacccagcggcccgcgtccagggagtctagaaccttgggctcccgcgcacacccaggccaggtcctggccgtcattctcccgccggcctctgggggagctgcgcggtccgcgctctctctccgctgccggaattcgtcttgcctgacggaagctggggagcgggcaggcggcgggggcggggcctggaggagcctacaccgactctggaggaagactggagcctttgcggcggcgctgcccctcccctggtccccgcgagctcggagggcccggctggtgctgcgggggccccgggaggtacggacctgggaggcgaggctcgtccggcgctaggatcggcctccgcctccgggccgctttaggtggctggtctctgcctctcattccctctgggggctcccccgtgagaaaatctgtggcggaggcacctctggcccactcttatggtgtcctttattgtggggctcgctatatggagagggggtctgtgtcaggagcttcccctggagaggtttctgttagggaccgtctttgggagtgatctatctctgctctctgggggggatctttgtctggagcttttggggggcttgtgtttggaagtttgccttcggggagatatctgtctgggacctcttagggtttctgtatctgagctttctcttttgtgtctgtcagtccaagggcagcaaaaagtatgtcctttctgaagcctttttttccgtaggtttcttcattcttttctctcttgtcttatgttcattttagccatagacttgactggagtttagagggaattgattgttgtccagatgagtcgtacaggaaagcagattgtctttttttgagacggagtcttgctctgccgcccaggctggagtgcagtggcatattcttggctcactgcaatctccgcctcctggattcaagcgattctcctgcctcagcctctcaagtagctgggattacaggcacccgccaccacgcctgactaattttttgtatgtttagtagagatgaggtttcactatgttggccagtctggtctcgaactcctgactttgtgatctgcccacctcggcctcccgaagtgctgagattacaggcgtgagccaccgtgccctgccccagattatcctttttatttgctcagtccccccagggagcagatggcttcagacagccacacaaaacactgttcctgcttaattctccatggggtcatggttaaagagag

SEQ ID NO: 7350 - DNA, 6000 bp, Homo sapiens
aacatagggcaggtgtggtggcttacgcctgtaatctcaggactttgggaggcagaggagggcaaatcacttgaggtcaggtgttagagaccagcctggccaacatggtgaaaccctgtctctactaaaaatacaaaaaaattatccgggcgtggtggcaggccctgtaatcccagctactcgggaggctgaggcaggataaatgcctgaacccaggaggcagaggttgtagtgagacgagactgcgccacggcactccagtctggatgacagagtgagactccgtctcaaaaaaaaaaaaaaaaaggaagaaaagaaaaaaaaattcatgtataacggggaacctgtgaaggtggcctcatttggaaataggatatttgcagatgtaatcaggttaagatgggatcatactggattaagtggtgccctaatctaatggctggtgcccctataagaagaggagaatttgcctacagacagagacacatagagaaggccgggtgcagtggctcactcctgtaatcccagcactttgggaggctgaggcgggtggatcacttgaggccaggagttcgagactagcctgagcagtatggcgaacccccgtctctactgaaaatacaaaaattagctgggcgtggcggtgcacacccgtaatcccagctactcaggaggctgaggcaggagaattgcttgaacctgggaggtggaggttgcagtgagctgagattgcgccactgcactcgtctgggcgacagagcaagactctatctcaaataaaaaaaaaaagacatatagaagaaagaataccatgtgacgatggaggcaacaattgaaatgatgcatctataagccaaggaacaccaaggatttctggcaaccaccagaagccaggaagagggaagaaaggattctttcccagagcctttggagataccatgctctgcagacaccttaatttcagacttctagcctccgctgtgagagaataaatttcggtgtttttgtttttttgagacagggcctcactgtgtcacccaggctgaaatgcagtggctcaatcacggctccctgcagcagcatcaacctccctggctcaggctcaagccatcctcccacttcagcctcctgagtagctgggtctacaggcacgtgccaccatgcccagctaatttttttttttttttttttttacagacgtgggtcttgctgtgttgtccaggctggtctcaaactcctgggctcaagccatccttctgccttggcctcccaaagtgctgggataacaggagtgagccaccgtgcatggccgatttctgttgttttttgtttttttgagacacagttttgctttttcatccaagctggagtgaggtggcgcaaacttggctcactgtagcctctgccccctgggttcaagtgattctcctgcctcagcctcccaagtagctgagactacaggcgcccaccaccatgtcttgctaatttttgtatttttagtagagatggggtttccccatgttggccaggctagtctcgaactcctgacctcaggtgacaggctggcctcggtctcccaaagtgctaggattacaggcgtgagccacctcggctgacctgatttctgttgttttaaatgctacccaggttgtggttatttgtatggcagccttagggaaacgaatactggaagcctgtggagaagacactggagcagatacgtatttcaaaacaccgggcttaacgttaaaactctcctctaggccccatctaggaatctaagtgggataagctaagatgagctagctgattcttcactggtggaaatttggacaattgacacgcattcattcaaactaaaaattaaagataaaaaaccacatttaataatttcactacagtgacaattcttgtaacattttgagactctatcagttagatccctacctctgttctattctttttgtggtagtgaagaactaatctttataactgtttttttttttttcagactcagttttgctcttattgcccaggttggagggcaatggcgcgatcttggccactgcaaccaccgcctcctgggttcaagtggttctcctgccttagcctcctgagtagctgggattataggcatgcaccaccatccccagctaattttttgtatttttagtagagatgagttttcaccatgttggccaggctggtctcaaactcccgacctcaggtaatccacccgcctcagccttccaaagtgctgggattacaggcgtgagccaccacacctggctttaattgttttttagccattttcacaaatgctagggaatagctcggtttagatactcggaactgtgtcactggccaagcctcatatggaattgctcatgtcttctagggctgtaggtgtggtcaacagcattttaaatttgatcttattggacatatgcctcagttttaccatatcatctgttatatggggataataatagtaactgcctcctaatgttgttgtgaggattaaatgagtttgtatttaccaagcatgtagaaaagtgcctggcacatagtaagtattaatcactgcactcctctctctcttgccatttgggaagtttctttctcactgaaccatgagctctccaaggataagaagcatgtctgtttcattttctatccccagcacctagtacccctctctggcacacagtaggccctcagcaagcatctgctgcctaaaaggcactatcaagcaggcagtatgaaattccatttctgagtcttgaagaaggaagtcaggtggaaaaacagataagagtcctacacataaacgtttaagcttgacaacactcaagaccatcaaggaagacagcatggagggaaaataaatagaacactgaggaaagattgatggcaggagatggaagcaaacagaaaaggagttctgaaacaatattctttcaaagaagccgtgaaaagagttcaagggaattgaagtaagtccacaggaaaggctgtcttaaaagtggagtatgaaaaatttgtggttagcaagcagctgactgaggttaatttttttttaagtctcagaggaaggaaatgatattgtgtaacagttttctctaacttggcaggcttttaaatgtgggtcccgatctgtcttgccagaagggttgagagctagggagcagggagaaggagggtatgggtctctccaagactctgtgtcttaagaaggttgtattgaagtcaggttatatcttcactcacaatatgagacaataaattcaaataaaacgtccatttttgtccccttattttgtttaggctggtaaagcaggtttgatgatgtttttgtcaggttgacaaaattatcagcaacaagtttttatctggaatatctccctcattacacttgaatttcaacagggttccaccacccaggaagacagaataaccggttttctgagtttttcctgatacaattctggttatcacaaacgacttgagatccctactcttctttaaaagggcaagaaaagggaatcaatatcaatatttgataatggcatttaaaaaataatagacatcacttttgcgtttaaaaaatgtttttcaatatttaatttacaagttgagtacaagccataaaaaatgtttttaaaataaatttgaggaattgaaaactcctaagtggtcaattgagcccacatgaatctaccaaacaagactgaaatgtactttcacaacatatggtctgatgaggtttttcctgttaaacagagaaaaatagacccggggaagttgctggaaggcatgaaccatgtaccatttaaagagaggttttccatacttatgcaaatgagaccccgttaaagactctactacaggatctaaagctagccgctccccagtctggggctcaaatgttctcatctgtaaaataagggaaaagagaaagggtggtatatgtgtctgcgtattaattatttgagtgtgtgtgtgaattctttggatatgaaaataaagagagaagacattaattatttgggtgcgtatgtgtgaattaattctttggatatgaaaataaagagagggccgggcgcggtggctcacacctgtaatcccagcactttgggaggccgaggcgggtggaggccaggaccagtctgggcaacatggcgaaaccccatctctacaaaaaatacaaaaatagccgggtggcgtggtgcgtgcctgtaatctcagctactagggaggctgaggcaggagaatcccctgaacccgggaggcggaggctgcagtgagccgagaacgcgccactgcattcccgcctgggaaacagaccatctaaaaaaaaaaaaaaaaaaaaaaaaaaaaggccgggcgtggtggctcacgcttgtaatcccaacactttgggaggccgaggcgggtggatcacgaggtcagaattcgagactcagcctggccaacatagtgaaaccccgtctctacttaaaaaaaaaaaaaatacaaaaattagccgggcatggtggtgcgtgcctgtagtcccagctacttgggaggctgaggcaggagaatcgcttgaacccgggaggtggaggttgcagtgggccgagatcacgccactgcactcctgcttgagcaacagaatgagacttcaaaaaaaaaaaaagaaagagaaaagacaacctaccccagtataaggggtaagaaaaaggattcagggaggctcaggaacttaaggcctcgagcacctgcacctccagccccacccgctaaccctccccagcgtggagatacagcacaggggccaacatggcgtcagcacgctgggtctcgcctgcgacccccgtgactccgcactgctgcagcccgggcgaggctgcgccccattggccaactgcaatgaggtcattgcgggggcgggggccggcggcggcgcaggggcggggctttacggacgcaagcacgtcgaagcgctgctcctggagccgcggagggtgcgggtttggctgcggtggtttctgtggcggttgctgtggcggagtttggaggtgagtgggggctgtaggtttagcgcaacagggagcggccctcgatggacgtaggaaatccttctaagagcccccttgattgtcagaggaattagcggggatctgacgtcttcgagataaaatgggggttcgccccctccttgggcacccctcctctgccctgaggaaccggaggctcactgccctttggaagccccgcatctcttccctgctttaaggggtaggcggaggaaccggaggttattggataggcagaagaatttagggggcttcttaaagggtttctcagtttgggggttttcctctccttttttcccatctcaaggtagatgagcctgagtccagagaattcctgctcattgggtagacaggaaatgaagcaggtgaataccgtgggaggaggcgaggaccggatgacaggagtgagattcttctaggcagggcgcgggggcgctgtagttggactcatcttttgcagaattgctgtttcttcatattttgttttgtgatcgtccagaactactttggcctaattagttttctgttagcctccattgctatagagatattcttgggagacctataatcattaaagagcaggaggacggaggcgactcgttggaggcttatcattatccacagctcctgaactatgctgaccaggcctaattttatgtgtttagaggttgtagaatctctctttgtttaagggtggtgccggtaacagctgatttggatgattcagatgtacagaatcttaaagtcagcctgcatattctcttgagaagtccttgcttatgtctgagcttgtgttactgtcttgaacatcacatgcacaaaggtttgttcgttcagatttctcaaaatgtctcccagccttccagaagagtaaatcttcctttgatgtcagactcatctatcagtactcagtatagatgcc

SEQ ID NO: 7351 - DNA, 6000 bp, Homo sapiens
gaggatggagacttgggggcggggtcaggtggggtggagggaagggaagggaatctcccaggtcaagctgaaataacaagtggcaagagcagggtgttccaacaccacagctctagtggcaacagggcagggactgtttgagcatattcagtgcagtgagtctggtactgggctactgggtatctggtaaaaggtgaaaagagttcccccgcccagcccctctgacttgctatgattgtgaaactagtttaaatgtaatggctgggcatgattgccttagcctcaagtgacactgggtgggtgaactggcccaatggggctggagttggagcactttgcttcttcctaattctgagggtcagtaggggtggggagggcagggtcctgagccgaggtcggaagaagtctgtccagagtcttcagggtgggggtcgacctggggcttaggaaggagagggtagcaaagctggggttgctccccaggatagggccactcctcatcgggagggccatcccattcctgtcatcacagttgactcatggcaggcacacagcttgctgcaagtatggaaagagatttctcaagcacaaagggctcaaagcacacagaggacttgctgttcctgacagactttgtcaaggacagaaaggaacttacagactcacacactgatccacaaagaaaattagaaactcaccagaccctctccattttaagggaaactaaggagggtggcgggagatgggacaggaaatgactgcccaagtataatgcaacataaactagtatttcttgtgaaatgttttcttatcctcaagtctaaagacatggcacgtgcgtgcctgcgtgtgtctctgtgcatgcacttgcacttgtgttcgcagtggtgtggagggtaggaaggactaatagcatgattgaaatgatcatattaactagattactctttgacatacttggattttgacttgtcttctgattggaagtttttcttcagcatctttggcattaaagaggcttgttttgggaagtaacatttattggacccctagcgtgtgcagcatgggctgctgctgtgggccagagaggctgtgtcaggcaccagctcacaggatggctgcagaggcaccagcttcagtgcagtgcctcccgtgccaggtaccttcatataggtctcgttgaacttacagtccagacctgcagaaagtgtatgaccaagtgctgagttaggcagtgcaggttatggatgctgtagaattccaaggaactcccagacaaaggtatgaatgtgcttgcttctgaaaaacactgacagtacttcccaccttgctgagatcaaaagtgaagtctcagagctgggaggagtatgcaggggaccatgggaagggattgggttttctttttttgaggcagtgtctcactgtcacccaggctggagtgcagcggtgcaatcacaggttactgcagccctgacctcctgggctcaagcaatcctcctgcctcagcctccttagtagctgggatgacaggcatacactaccacgcccagctttttttttttttttgaagacagagtctcactctgttgcccaggctggagcacggtggtgcaatctcagttcaccgcaacctccacctcccaggttcaagcgattcttgtgtctcggcctccagagtagcacaccaccacacctggctaatttttttaaattatttatttatttaagtagagatggggtttcaccatgttggccaggctcatcttgaactcccggtctcaagtgatccactcgcctcggcttcccaaagtgctgtgagctaccatgcccggccttttttttttttttttttttttttttaagaggcagtgtttcattccgttaccccagctggtgtccagcacctgggttcaagggatctgcatcaccctgccaccagcctcctgagttgcaagctgccacacccggctcaggagtcagtttttcagctagcttctccaagacaaatatcattatccctttcatagttaaaagaatgtcactagtcagctgcaagtgcttttctgtttattgggcacagccatagaacagctttaattatgcccagtgtagggattcagaaagtgaatcagagaagcaaattggtccagggactgtttggtagtccagtgctaatagaactttctgtagtgatagaaatattccgtatttgagctgtggctctaaacaatagtcactagccatgtgtggcaactgggcacttcaagtgtggctagtgtgacagaggaactgaatatatatatatatatatatacatatatatatatatatatattttagacagagtcttgctctgttgcccaggctagagtgcagtggtgtgacctcagctcattgcagccacaacctactgggctcaagcaatcctcctaccccagcttcccaagtaactgggaccacaggcatgtaccaccatgcctggctgatttttttattgtttgtagagtcagggtttcaccacgttgcacaggctggtctcaaactcctgggctcacatgatccacccgcctcagcctcccaaagtgctgggattgcaggtgtgagccacctcagctggccctaagttttaattttcatagccacgtgtggctagtggttaccctatcggatagggcaagttggaagaagataggagcttgctcttgcccagacctcctggctcccagcacagtgtgctctgatgctctctctgccttttgtcacaccagtgcagtggacatcatggggaagacagggacctggcccagagaccttacctggtgtggaactcatctcctttccctccccctggcagggctgaaaaactgggtggtagctgaagacgtggtgtttaaacctgtggctgccccctggaacccggagcactggctacagcgcccacagctgactcggcaggtcctgggaaaggaggacctgacagctttttccttgggaagccccctaccccgctacctctacctggctagcaaccagactaatgcgtggggtcaccagcgcgggtaccgaatccagatccacagcccccttggcatacacatacccctggagagtgacatggagagggccctcagctgggggaggtgaggagggccctggcctgggtggaaggaaaggacagcccctcccctgccccagtccttggagacaaactcccttcccacggctaccattcatccctgtacctcccctcaaacccaagttagatacacggtgggaaatggtctcacacagaatcggatctaagggactcctgggccagtaaaggcacttgacatttcccaaaaccaccttcttatgattcctggccagataccagcttgtggtgacccagagaaaggaggaggagtcacagagcagtagcatctatcaccagaatgacatctggacacccacagttacctttgctgacttcatcaacaatgaaaccctcttaggagaggttggttgccctagggacataggaaagggacacctgtgggcatggcatcttggctgcccagcctctggccaaaggttagagggaatggctgatttccagttcgcagattcagaggccatggagttttctgatgaccaacacaggtcatccctcctggggtgagattagctctgggacactggctcccccctctccccgcacagctgcttacatggattgctccacgtgttgtatgggcatgaggctggggagagtggaagccaggctgagactggaggctgggattgtgactgaagggtggttctttgggtcacgcttccatagtcctccagctcctccttcttcttgcaggatctggtggcttgggtcacagccagcttcctgcacattccccatgccgaggacatcccaaacacagtgactctggggaacagagttggcttcttgctccgaccctataacttctttgatgaggacccctccatcttctcccctggcagtgtctactttgagaagggccaggatgctgggctctgcagcatcaatcctgtggcctgcctccccgacctggcagcctgtgtcccggacttaccccctttctcttaccacggcttctagtcctgagggtgtggcgggcggcgtggttaggcacatgtacttttccctgtttctactttctattctccgtgtttttatcacacctgctccccagattcccaccccctcaatgttcctctcacacgaaacccccatcagtccctttggttaattcttacttcctgttcatctctaaagtgttaaattataaaaatgatttttaaatattcaaagaaaaatatcacaaatcctactactcagaaataggtggtcacattacatcagacatctctttatgcatgtgcattcaaaaggaagagtagatagaattttgtaaaacagatgttgtatgtaatttataataaaaagtattagaggaattttacttgaatttattgtttgacctgttaagtatctagagtcctctggagaatactaaggagtctggccagggaaattagcgctgggggccagagggcaagggggatagacctggccaaggaatgtcatttggaaagctaaaggggcagggggtgggggtctttggaaggaaaacgatagtttgaagttacaggaaaatatctggccctgactaagtgggggactggggaagaagctgggctgaggtcaggagaggctgctctgcacagatcctgctccttcccagtgctgcattatcttgaaattttccttccccttccccctagccccaactctccccaactccaaccctgacccagaaagtagagtgatttggaggctggaagacaaaaccatgtaaggtctgtggaaatcacagctgttcagacccgcctccaaccccggccaccccgcccccttgccctagccttcctgtgtccttcccacccttagtcccaggcatctgactaccgggaacctcagccagagtccgggagccccccaccccgtccaggagccaacagagcccccgtcttgctggcgtgagaatacattgctctcctttggttgaatcagctgtccctcttcgtgggaaaatgaaccagaagacaatcctcgtgctcctcattctggccgtcatcaccatctttgccttggtttgtgtcctgctggtgggcaggggtggagatgggggtgaacccagccagcttccccattgcccctctgtatctcccagtgcccagccttggacacaccctggccagagccagctgtttgcagacctgagccgagaggagctgacggctgtgatgcgctttctgacccagcggctggggccagggctggtggatgcagcccaggcccggccctcggacaactgtgtcttctcagtggagttgcagctgcctcccaaggctgcagccctggctcacttggacagggggagccccccacctgcccgggaggcactggccatcgtcttctttggcaggcaaccccagcccaacgtgagtgagctggtggtggggccactgcctcacccctcctacatgcgggacgtgactgtggagcgtcatggaggccccctgccctatcaccgacgccccgtgctgttccaagagtacctggacatagaccagatgatcttcaacagagagctgccccaggcttctgggcttctccaccactgttgcttctacaagcaccggggacggaacctggtgacaatgaccacggctccccgtggtctgcaatcaggggaccgggccacctggtttggcctctactacaacatctcgggcgctgggttcttcctgcaccacgtgggcttggagctgctagtgaaccacaaggcccttgaccctgcccgctggactatccagaaggtgttctatcaaggccgctactacgacagcctggcccagctggaggcccagtttgaggccggcctggtgaatgtggtgctgatcccagacaatggcaca

SEQ ID NO: 7352 - DNA, 6000 bp, Homo sapiens
aattacaggtgccagccacctcactgggctatttttttttttttttttgaaatagggtctctttctgtcacccaggctggagtgtaatggtgtgatctcggctcgctgcaacttccacctcctgggttcgagggattctcttgcctcagcctcctgagtagctgggattacaggcgcccaccactacacctggctaatttttgtatttttagtagagatggggtttcaccatgttggtcaggctggtcttgaactcttgaccttgggtgatccacccacctcagcctcccaaaatgcttggattacaggcgtgagccactgcacctggccaatttttgtattttttgtagagatggggtttcaccatgttggctaggctggtctcaaactcctaagctcaagtgatccaccaacctcagcctctcaaagtgctgggtttacaggtgtgagccatcgcaccaggccgtgactattttaaataaaaaacccttgagaggttttttcacccttgggagcctggaagagattttttcccctatctttcacctataaagataggactggccgggcatggtggctcatgcttgtaatctcagcactttgggaggccgaggcgggtggatcacctgaggtcaggagttcgagaccagcctggcccaacatggcaaaaccccatctctactaaaaatacaaaaattaatcgggcctggtggcacatgcctgtaatcccagctacttggggggctgaggcacaggaatcggtggatctcaggaggcagaggttgcagtgagccaagatcatcgcattgcactccagcctgggcaacaagagtgatactccgtctcaaaaaaaaaaaaaaaaaaggactgacacaaaagaacaattgttcttctccttcctttatcccattatccatcacagaaaagaagaccaaaaatgtaaccataaaaaagtctcaacagaccctttttcaagacaatgactgtctctgaggaccatttaaaatccagggagaactatttacaagttaatttctgttcctcgatccaatcattctccctctgcccttcgacagaattcctcttctcctccttcccataacctgtttttaacaggatccaagccacccattctttctgcaacctcaagatggtggatgagcttccatacctcactgggaagttggatcttcattcttaagcctcccatgtatacatgttaaatacatttgtaatctttttctcatattaattaatctgccttatgtcagtgacttttcagcgaacttgtaggtagtcactcacataaggatcctccagtttacatagttttgtaaatgtcaggtcaccctgtcccactagaccaccaaggtcctggaggacacctgggatttaacttttttttttttttttttttttgagacagtctcgctctgtcactgaggctggagtgcagtgtcaggatctccactcactgcaacctccacctcccgggtttaagtgattctcctgcttcagcctcccgagtagctgagactacaggtgcccctcatcatacccggctaatttttatatttttagtagagatggggttttgctatattggccaggctggtcttaaactcctgacctcaggtgatccaccctcctcagcctcccaaagtgctgggattacaggcgtgagccaccatgcccagcctggcttttaacttttaattcctcagagagccaggcatggtgctttgctcaggaaatgttggttgaattaaaccggagcacttcttgaaaagggaaaataacaaagagttagaaggagatggcgggaacccctctctggagatagttctttaaattagtggattctgcagggcactgttgctcatacctgtaatcccagcattttgggaggccaaggcaggaggaccacctgatgccgggagtttgagaccagtctgggcaatgtagagagacccccatctccacaaaaaataaaaagttagctgggtttggtggtgtgcgcctgtaggcccagctacccagagactgatgcaaaacgatcccttaagcccaggagactgaggctgcagtgagctgtgatggtgccaccgcactccagcctgggtaacagagtgagaccccgtctcaaataaacagataaatgagtggattctcagcaaaacttctagccactcgcctcatatatccacaagacctttgagaatccacggtgtctcgatgcagtcagctttctaacaagctggggcctcacctgttttcccacggataaaaacgtgctggaggaagcagaaaggggctggcaggtggaaagatgaggaccagctcatcgtctcatgactatgaggttgctctgatccagagggtccccctgcctggtggcccaccgccaggaagactcccactgtccctggatgcccagagtgggatgtcaactccatcacttatcaactccttatccataggggtattcttcctgaggcgtctcagaaaacagggccctccccatatgctgaccacataatagaacccctcccaactcagagaccctggctgctagctgccctggcatgacccagacagtggcctttgtatatgtttttagactcaccttgactcacctctgaccatagaaactctcatcccagaggtcactgcaatagttactccacaacagaggcttatctgggtagagggaggctccctacctatggcccagcagccctgacagtgcagatcacatataccccacgccccagcactgcctgccacgcatgggcttactttacacccacccacagtcaccaacacattacctgctctccaaggttaggcgtggcaggagaagtttgcttggaccagcagaaaccatgcagtcaaggacaactggagtcagcatgggctgggtgcgagcccttggtggggtggggaggagactccaggtcatacctcctggaggatgttttaatcatttccagcatggaatgctgtcaacttttgccacagattcattagctctgagtttcttttttctgtccccagctaccccttacatgtcaatatggacttaatgatgggaaattcaggcaagtttttaaacattttattccccctggctcttatcctcaaaaaatgcatgaatttggaggcagtggctcatgcctgtaatcccaatgctttgctaggttgaggcgggaggatcacttgaagccaggaatttgagaccagcctgggccgcatagtgagaccccgtttctacaaaaataaataaataaataataaataatagtgatatgaagcatgattaaatagccctattttttaaaatgcatgagttcgttacctgattcattccctggttcctttcacagtcctccgtgacccaagtgttagggttttggtctctctactatttgtaggctgatatatagtatacacacacacacacacacacatatacacacacacagtgtatcttgagctttcttttgtatatctacacacatatgtataagaaagctcaagatatagaagccctttttcaaaaataactgaaagtttcaaactctttaagtctccagttaccattttgctggtattcttatttggaaccatacattcatcatattgttgcacagtaagactatacattcattattttgcttaaacgtatgagttaaaacacttggccaggcatggtggttcacacctgtaatcccagagctttgggaagccaagactggcagatctcttgagctcaggaattcaagaccagcctgggcaacatggaaaaaccccatctctacaaaagatagaaaaattagccaggcatggtggcgtgtgcctgtggtcccagctactcaggaggctgaggtgggaggatcacattagcccaggaggttgaggctgcagtgagccgtgattatgccactgcactccagcctgggagacagagtgagaccctgtttcaaaaaaaagagagagaaaatttaaaaaagaaaacaacaccaagggctgtaactttaaggtcattaaatgaattaatcactgcattcaaaaacgattactttctggccctaagagacatgaggccaataccaggaagggggttgatctcccaaaccagaggcagaccctagactctaatacagttaaggaaagaccagcaagatgatagtccccaatacaatagaagttactatattttatttgttgtttttcttttgttttgttttgttttgttttgttttgttttagagactggggtcttgctcgattgcccaggctgtagtgcagcggtgggacaatagctcactgcagactccaactcctgggctcaagcaatcctcctgcctcagcctcctgaatagctgggactacaagggtacaccatcacacacaccaaaacaattttttaaatttttgtgtagaaacgagggtcttgctttgttgcccaggctggtctccaactcctggcttcaagggatcctcccacctcagcctcccaaattgctgggattacaggtgtgagccaccacaaccagccagaactttactaattttaaaattaagaacttaaaacttgaatagctagagcaccaagatttttctttgtccccaaataagtgcagttgcaggcatagaaaatctgacatctttgcaagaatcatcgtggatgtagactctgtcctgtgtctctggcctggtttcggggaccaggagggcagacccttgcactgccaagaagcatgccaaagttaatcattggccctgctgagtacatggccgatcaggctgtttttgtgtgcctgtttttctattttacgtaaatcaccctgaacatgtttgcatcaacctactggtgatgcacctttgatcaatacattttagacaaacgtggtttttgagtccaaagatcagggctgggttgacctgaatactggatacagggcatataaaacaggggcaaggcacagactcatagcagagcaatcaccaccaagcctggaataactgcaagggctctgctgacatcttcctgaggtgccaaggaaatgaggatggaggaaggaatgaatgttctccatgactttgggatccagtcaacacattacctccaggtgaattaccaagactcccaggactggttcatcttggtgtccgtgatcgcagacctcaggaatgccttctacgtcctcttccccatctggttccatcttcaggaagctgtgggcattaaactcctttgggtagctgtgattggagactggctcaacctcgtctttaagtggtaagaaccatatagagaggagatcagcaagaaaagaggctggcattcgctctcgcaatgtctgtccatcagaagttgctttccccaggctattcaggaagccacgggctactcatgcttccaacccctctctctgactttggatcatctacataaagggggaagacagaaaaaatcctaccagtgagttgaaaatacaggaaagcctatttcatatgggttaaagggtaggacagttgaatttcgtgaaaagtctgagttatataggctttgagcaaagagttttattagtatgaagcagaagaggtaacataaagaaagatgtatggggccaggcatggtggctcacacctgtaatcccagcactttgggaggccgaggtgggcgaatcactcctgggtgaactcaggagttcaagaccagcctgggcaacatggcgaaactccatctctacaaaaacattacgaaaattagctgggcgtgttggtgctgtagtcccagctactcaggaggctgaggtgagaggcggaggaggttgcagtgagtcaagatcatgccactgcactccagcctgggcaacagagtaagaccctgtctcaaaaaaaaaaaaaagatagatgatgtatgctgtatgaaaaaaggaaacacacagatgattcaacagcctgttttgtggggtaatgaaaagtcaccct

SEQ ID NO: 7353 - DNA, 6000 bp, Homo sapiens
ggactggggactgtgatcaagggagaggcaagaggtctagccgaggccgggtgccagggttcacagatgtaatctaatcccagcactttgggaggctgaggctggaggatcacttgagttcaagagttcgagactggcctgggcaacataaaaagacccccgtctctacaaaaagaaattttgttagccaagcatcggcctcatgcctggtaatcccagcactttgggaggctgctctgcctcccaggttcaccccattctcctgcctcagcctcccgagtagctgggactacaggcgcccaccaccacgcctggctaattttttgtatttttagttgagacagggtttcaccgtgttagccaggatggtctcgatctcctgacctcgtgatccacccgcctcagcatcccaaagtgctgggattacaagcttgagccaccacgcctggccttgaatggctcttgagtccaggtgttgagaacagccaggacaacatgatgaaacccaatctctacaaaaaatacaaaagtgctgggcacggtggctcacacctgtaatcccagcactttgggaggccaaggtgggcagatcacttgaggtcaggagttcaagaccagcctggccaacatggtgaaaccccatctctactaaaaatacaaaaattagccagacatggtggagcacacctgtaatcccagctacttgagaggctgaggcaggagaattgctggaacccggtgggaggaggaggttgcagtgagccgaggtcataccattgcactccagcctgggcaacagaacaagactccgtctgaaaaaaaaaaaaaaaaaaaaagccaagcttggtgacgccacctgtagtccctgctactcaggaggctgaggcaggagatgacttgagcccaagaggtcaaggttacaggaagctatgattgtgccactgttctccagcctgggcaacagagcgagaccctcaaaaaattaaaaaataaggtctattgcctgcaatcccagcactttgggaggctgaagcaggcagattgcttgaggccaggagtttgagaacagcctgaccaacatggcgaaaccccatctctactaataatacaaaaattagccaggcgtggtggtgcacacctgtaatcccagctacttgggaggctgaggcaggagagtcacttgaacccaggagaaggagattgcagtgagccgagatcatgccactgcactccagcctaagcaacagagtgagactcccatctcaaaaaaaaaaaaaaaaaaaaaaaaaaagatcggctgggtgcggtgggctcacgcctgtaatcccagcactttaggaggccgaggtgggtggatcacctgaagtcaggagttcgagaccagcctgaccaacatggagaaaccacatctctactaaaaatacaaaattagctgggcatggtggcacatgtctgtaatcccagctactcgggaggctgaggcaggagaattgcttgaacctgggaggtggaggttgcggtgagccgagatcatgccattgcaacaagagcgaaactccagctgggggtggtggctcaccctgtaatcccaccagcaccctgggaggccgaggcgggtggatcacgaggtcaggagatcgagactatcctggctaacacagtgaaaccccgtctctactaaaaacacaaaaaaattagctgggcatggtgttgggcacctgtagtcccagctactcgggagactgaggcaggagaatggcatgaacccgggaggcggagcttgcagtgagccgagatggcgccactgcactccagcctgggtgacacagcgagactccatctcaaaaaaaaaaaaagagcgaaactcaatctcaaaaaaaaaaaaaaagaaagttctaggccaggcatggtggctcacacctgtaatcctagcactttgggaggcaggcagattgcctgaatttaggaggttgaggacagcctggacaacatggtgaatttaggagggtgagaacagcccgggcaacatggtgagatcccatctctactaaaaatacaaaaaattagccaggtatggtgacacatgcctgttgtcctagctgctcgggaggctgaggcaagagaatcacttgaccccagaggtggaggttgaagtgagccgcgatcttgccactttactccagcctgggtgacagagcgagactctccaaaagaaaaaaaaaaaatagtaagttctagccgggtgcggtggctcacgcctgtaatctcagcactttgggaggccgaggcgggtggatcacgaggccaggagatcgagaccatgctggctaacatgtgaaaccccgtcgctactaaaaatacaaaaaaaaaaaaaaaatagctgggcgtggtggcgagcacctgtagtcccaactattcaggaggctgaggcaggagaatggcgtgaacccgggaggcggagcttgcagtgagccgagatcgtgccactgcactccagcctgggcgacagagccagactctgtctcaaaaaaaaaaaaaaaaaaaaagtaagttctagccagatctgctgggagccggggaacccaggaatataagtggctatgggggccagggagccatatgaccgagtctccactggaactagcccagggtgccaccagggagagtcactcttagggctcatcaggtctccccaacaggaagtctagggtcccagggccaccgatgtggtaggaacatgcctctggtgaagaggcctggaccacagattgggcttgctctgtggtcttgaacatgttggaggacccagactctcccagccccgggctcgcactgtgaaatgacaaacctcacccagcctactggggggcactcctgatcgggacttgctgatgtggccctgggacatgggcaggctggagcaggacagccaccttcgtgtctggggtgtgtggtgagggtgcatgggaccagatataccagtcccctctggtcccaaatggagggcagagatggaagtaggactaggggtggctaagaggagtggggccatggagtatgggatgtgcctttcaccagctgtgtgactttgagaagctcacataacctctcagagcctcagtttccccatctgtaaaatggggagcacaatctctccctctgggctcatgatgagtttccaggaataccacctagtaggccctcattcccaggagcctcctcatgcctacatcttggaggaggttctcaagatgtctccagagcgaaggaagaattggctcagccttactgagcatctgggcctggcatggcaggtggttgggggtggggggagtcacttggttccctacattgatgtcagcgcctcctgggaaatcgccttctcacctctcctgggcctaaaatagagcggggggtgggggtgtcacaagctagaggcagttccctcatccccagcagaggccctgggtccttgcggaagcagaggacccaggaaggggtttcctgcctccaatcttgttcttcagcaacctgtggtcccctagcatgggtaccaaaaaggtcagggtggggactcagcggcccacccaccatgccctaccacaccccacaccatctcaggtatctggccttcagcacccctagcagaagtctgaggtcccagccctggtattgggacccaacatccccaggagctgggtggagggcacagctgggaatgtaggttgggaggtcaagtattttgcagacagggcagcctagtctgaccagagagggaatgctggggggctccagaggtgtcttctgctcctaaggattgggactagcaagggagggggagccatggggcatgctagcagcatataagtgacctggctagtttatattttatctaggaggaaggacaggacgcctgtgagagactcaggaacccagacggacatgccagcccttcctgatggttggagtgacagcgatccctgaagccctcctggaggccggggcatctttggcggggagaaggagccgatgggaaggggtctgtaccgcgggcgtgagaggactccgcagtgacacgacccgtagcgaaggtgcaagaaatcccagaggcgtagagcccggcgttcgccaagagcctttgcccaccccaaccccagcttccacagcctggggtcaagcggggcgctccaagctggggctggggcagcctctctggggtaccacgacagaggggcgaacgtgggcgccgcagccacgcccctgcccccgggccccagacaggcagtcgccgggtcgaccccgggggtaccccgtcccctgcttccctcccctacaaatctacgagtcctcggagatgctcaggcagaggtggccgaggagaggccgcgggataagtacgcggagcgccaccgccccgcacctgccgaggagacttcgaggtgcgaggagggaccccggggcggcgcctcttttgtcctgccgcggcggcggcccgggccctgcggggctgggggggccggggggcggcgggagagcggagggcgggccctgggctcacgtgctcgctgctcagctcttaacccggccccgccgccccgccgggatggccgcggccggagcgcgctgagccccggcgccgtccctgccgcccccacctctccgcgacccccgcccggccccgcgcccccgccccggctccgcagctggcgcctccccacccccgtccctgctcccgccctccccgcgccgctggcagccgcagcccccggaccgggaggaatgagcgagccatgaggctgctgcggcgctgggcgttcgcggctctgctgctgtcgctgctccccacgcccggtgagtgacccccgcccggccccggcgccccctccctgcccccgccccgggatgtgcggcgcttgctgctgcagccaccttttcctgcagtgctcggggtgacagccggtccggagcgcgggagggtaggggagcgggagaggagggaaggtgcgtccacccacctgtccccagctggccgggcccaccgcgtccctgcccctgccgccgaccggccagctctgcaggtctctgcgggtttgggcggatgggggggcagtcgtgacggttgggcgggagtgaagctcctggccccctccccgcgggctcttgcctctgcagggcagccagatcctcccacccggatcgccctagggctccaggggccacaccagagtgggggatgaggcatgcccaccccattcccaagtcttctgccccagggtgggcagctgcctgcagccatggccttgtttccccaggtcttgggacccaaggtcctgctggagctctgcgatgggggggcttaccccagctgggaggcccaggagcccctgaggtcacggaacccagccgtctggttagggagagctccgggggagaggtccgaaagcagcagctggacacaagggtccgccaggagccaccagggggcccggtgagtggggctgggtggtgaggccaggggctgaagcaggcctcagagccccaggaagcccacggggtaaccagggttggagtccccctcagcagctgccccgcagggtccccttctgtacagtgggctatccggtgggtgctggagcccactggtggggagcaccaggcctgcccagccccagggcccccttccattattgtagggtcccctgccctcagtgtacagggaccactaatgcctaggtctcaggtctgctttgggtcagccttccaatggccccctgctctgctctggccaaagctagttgttctgttcaaaacagggcttggatggggcaagttgggggcagggagaggcagcccagattccagtcagggattagggctctcaggttctcaccacagccaccttagtgggctttcttggaacaacttagtgcttgctcctgcctcagtttccacacagtgcccagataggcttgttgttcttcctgtcctggctgaaggtgg

SEQ ID NO: 7354 - DNA, 6000 bp, Homo sapiens
gggggaagggaatgagaaaagctgtgctgaattcggaaccacacagaatatggtaactttgccatctgttgtcagggactctccgcttttcccccagcctgctacccattccctgccacttgctcctggaggaagaggagcagcaggagttagcagaattctaacaattctcttttaacccttgcgatcatcctatgggcaggtgctatcttgattttaccaatgaagccaaagactctaagagattaaatggcataacccaatatttagagtggttggtctgtgggctaactgatcccacgtctgacttttgcctatgctaagtctgtccgcatcattgatttaggcccctctaaatcagaatttctattgatgtgacctgatttggaagaaaaagaggtctcctaaacaaattactaatgtagcaatgcataaatggaaaacattaaagactcggcatgttcacaaaaatgatgctatcataattttatcttatctgtttactaaagcaggactctacaaaaatctgttccttgaagttttttttagttactgtatgttctcagaagtttttgaaatacaaagcaattttacttcttctatttcaagatttgccctccactttacattctctcaagttagtcctgagtagtgagttagaagtctggtcttttttctgtcacttactgttgggcaaaacgcttaatggagccccagttttttgcctgtgaagtgcggataataatagcacctacctcattgctatcgtgagaattaatctacacaaaggaggccgggcatggtggctcacgcctatattcccagcactttgggaggccgaggtgggtggatcactttgaggccaggagttcgacaccagcctagccaacagggtgaaaccccatctttactaaaaatacaaaaattagccaggcgtggtggcatgtgcctgtaatcccagctactcaggaagctgaggctggaggatcccttgagcccaagagttcaaggctgcagtgtgctttgattaccaccacactccagcctgggtgacagagtgagactctgtctcaaaacaaaacaaaacaaaaacaaagcaattagcacactgcttggcccatagaaggtgctcagtaaatcacagcaattattattatttctcagctgtgggaattattattattcccacagctgagatgctgtgggaacatcaccatcatttcagtagggagaagctgaacttcactatccgtggtttggctcctgttcttcaaaggacttggagttgatcctgtttcctgccctgtcttatccagacattttcatccccctttttctggcctagaccagtaagggaatataccatccatctcctgagaattcaggccactgctggaacctggagaggcagcaaaggagggtgtgtgtgaaaggctgggaggagagttcccatggacactggggacatgtgaaggccctggggagttgctgtgaccctgggtctctgcctagagcagtgaatgctggggagaaaaaaggacatcatctgccaaacaaatttccagtgctgcagagcccctttaggataaacacacagggctgagtaatctagggaagaaacaaaggcctgggatagagtgggatctccctagcacaccctatctttttccatttgcttagcacatactttttcttctcctaaacaagggtgccaggatatactagcattcctaagcttcagtattcatctggaaagggcttccgtttaaccagccccctggaggttagtattgcagttaggagtgcaaacacttgagccagcctgacctgggttcagatgacaaaactgccatgtactagctgtgtatcctcaggtaagtcattaagcctctctgaagctccattcctttgtgaacaaactgctacttaccatatagaatagctgagagttttgaaatatgctgagtacagggctgggcacagtggcttatgcctgtaatcccagcactttgggaggccgaggtgggcggatcacctgaggtcaggagttggagaccagcctggccaacatgatgaaaccccatctctactaaaaacacaaaaattagctgggcatggtggcaggcgcctgtaatcccagctactcgggaggctgaagcaggacaatcacttgaacccgggaggcagagattgcagtgagctgagatcatgccattgcactccagcctgggcaacaagagtgaaactccgtctcaaaaaaaaaaaaaaaaagaaagaaatatactgagtacagaagagccctaatcctgatcactgtcatccctgcaacctgagtgagcatcaccccataggtagtataaagagttctggaagctgggccctgtagcttccacctttaatcccagtactttgggaggccagttctgagaccagccagggtaacatggtaaaactgtctctaccaaaaatacaaaaatgagccaagtgtggtggtatgtgcccgtggtcccagctatttaggaggctgagatgggagggttgcttgagcctgggagtatgaggctgcagtgagccaagatcacacagcctgggtgacagagggagaccccatctcaaaaacaaaacaaaacaaaaaaccccaaaaactagctgggtgtggtggctcatgcttgtaatcccagcactttgggaggctgagccgggtggatcacaaggtcaggatttcgagaccagcccggccaacatggtgaaaccccgcctctactaaaaataaaaaaattagctgggtatggtggcacatgcctgtaatcccagctactcgggaggctgaggcaggagaatcacttgaacctgggagcggaggttacagtgagccgagatcgtgccactgcactccagcctaggtgacagagcaagactccatctcggaaaaaaaaaaaaatcccaaaccaaaagacagcctagagagtctgtctctcacaactagggtattttatttacatcccacattgttcataagagtatccgagggagtgtaacttgggggacccaggctttctactcatccttgttcctgtatctccatctccgttctcctcatcaagcctgtctctgatccagccacttaattccatgggaattaaaagactgaatctagttaggggctcccctccatttggtctttccttactttccagtgcctggagctttggcttgggactcagcagactgggggttaagaccgatcccctgtcctttcccctcccctctccatccctgacttcaaagttttcataaagcccaagtcactgcttccctgaccccatagtggcagctccatctcagcttttggtcggttcaaaacagcagacgctgagccctggcctggccgcccgttctcctcgttctagccatctcttagggtaagcaccagcatgccaacgacctggggggccaccagtccttgctcctccaggagaggagggctaactaggatagaagctgactcaagggcaggcacagtggttcatgcctgtaatcccagaactttgggaggctgaggtgggcagatcgcctgagaccaggagttcaagattggctgggcgacatggcaaaactgtctctacaaaaaatacaaaaattagctgagcgtggtagcatgcacctgtagtcccagctacttgagaggctgaggtggaaggactgcttgagtctggagggtcaagcttgcagggattgacactgcactccagcctgagtgacaaagtgagaccctgcctaaaaaaaaaaaaaaagaagaaaaagaaaagagagtttgccgtatggttaggcttagaaggtatcccattggacagggcacggtggctcatacctgtaatccctgcactttgggaagccgaggtgggcggatcaagaggtcaggagttcaagaccagcctggctatcagggtaagaccccgtctctactaaaaaaatacaaaaaattagctgggcatggtacacacctgtaatcccagctacttgggaggctgaggcagaattgcttcaaccaggacctgggaggcggaggttgcagtgagccgagatggcaccactgcactccagcctgggctacagagcgaaactccgtctcaaaaaaacaaaaaagggccgggcgcggtggctcacgcctgtaatcccagcactttgggaggccgaggcaggtggatcatgaggtcaggagatcgagaccatcctggctaacaaggtgaaaccccgtctctactaaaaatacaaaaaattagccgggcgcggtggcgggcgcctgtagtcccagctactcgggaggctgaggcaggagaatggcgtgaacccgggaagcggagcttgcagtgagccgagattgcgccactgcagtccgcagtccggcctgggcgacagagcgagactccgtctcaaaaagaaggcatcccattggcagaacccttgtttccagcccagggatgaaggtagccagttggtaattgtgaagaacctgcctggaaagagatggacctggaaaaacaggagcagctcaggaaccagaatgtgttccttagtactcatgtgcaaaatatatgctaaattacatgcaaatcaatgtccaatcattataatctctggcaatttggtaactaatgctgttacactatctggtctaggacatttctggctccctggggccagatcctgctctgtagctcccacaggagaaaccatcacagaccaaaggccagcgggggccccagcactcaaggactgtttctcccaccaccatctgtggacttttccagctgtttttcttggcccaaggatcacacccatagggatgcagatgggggaaggggaagctgagaaagcagtgaagacagaatgagctggggaagaggcagatggtaggaaatggagacggagaaatggcactaatggcccagccacctgagatgggatacctgggagggacatcttttcaagtagaggctgtgttggggcatggtgagagagggtcttagcaggtaaccttcctttcctctccagactgaggaatcagagttctgattgtggagtgcctctctctaggacggggctgcagcataggagtctcagctgcttacatccaggtccaggattatgtctgctaacagacgctggtgggtaccacctgacgacgaagactgtgtgtctgagaagctcctgaggaagactcgggaatctccactggtgcctataggtaagtgaagaaaggaatggggtgccgagtaggaggccttctctgtcatgtctcctggtaccctccaaagagaatgaagcagaggtcagaaaactcaagtggtcctactcacggaacaagggaaacaacagcaaaggtgccaaggggcaaacccttacaatgaaatcaggacgtctggatgggtggaggtggcagccaactgagtacatgggatatgaggaacctggagcaccaacaccaaagtgggaagggtcagaagaacaccttggggtcccccagggcttccttccttatggccctggtagagtaggaaaacagctgtaccaggaggtgggagccagcagtgtggctcaagggcccagggcggagcaaattggtggggaggggctgtgtcgtggtgatcagctatttgtatctgggggaggggcatcactggtggtgatcagctatttgtatatgggggaggggtgtcacgggagggaggcagccactttgaaaatgccattgaagggcaacaactcaatatatatatatatatttttgagatggagtttcactcgttgcccaggctggagtgcaatggcacagtctcggttcaccacaacccctgcctcctgggttcaagtggttctcctgcatcagcctcctgagtagttgggattataggcatgcaccaccacgcccggctaattttgtacttttagtagagactgggtttctccattttggtcaggctggtctcaaactcccaa

SEQ ID NO: 7355 - DNA, 6000 bp, Homo sapiens
ctccgcctcccgggttcaagcaattctcctgcctcagcctcccgagtagctgggactacaggcacgtgccaccatgcccagctagtttttgtatttttagtagagaagaggtttcaccatgttggccaggaaggtcttgatctcttgacctcgtgatccgcccaccttggcctcactaagtgctgggattacaggcgtgaaccgccgcccccggcctataacacagtttttaatcaaattgcatatacagactgggcccacaaaaacatttgcttggggctccacaaaacctagatacagtcctgtcaacgtgatagataaataggtaggtatgtaggtattaggttggtgcaaaagtaattatggtttgccattaaaagtaattgcaaaaccacaattatttttgcaccaacctgatagagatatagcaggcagacacacacacacacacacacacacacacacacacacacacacatacaatttcccagagcactactcaccaatgaagtactaatgaaatagctccccctgaaccacaagggtcattggactgcagctccctccctcctacagaatgaagtccaagctccttagactgacttggccacaagctacctttctggccttgtcctttgtctttttgtgcattatgttctagtaacttcaaactgcttgtagtttcccctgcacatcatatatctttgcttttgtgtacgctgtttcctcttcctgggatgttttccccactggccttatcttccaagattcagtttaggtatcatctcctctttgaatctctcttgagtcaccaaactgggctaagtgttccctccttgtcatcccacagttcccaattactgtaccccacactcaccacataggattctaattatctgtatagatgtttacctcccagtatattaaagagcttctatggtaaggtggtgtcttactcatctttgtatatcagcccttgcattgtgcttgacacacagttatcagctcaatgaatctataatgtaggatgatttatggaaggagaccaatggactaagtcaagtggactctggtgagcctagaaaacgttctagtaaaatgaaggagaggctggagggtaagtcatgccaagagaatatcagcagtatatatcaattatccaagtggtttagccatacaagaaaaagaaaaaatgggatataagttaaaaatgcagtaagctggagagtggcattttcttctatttagaggaaggcctaaatacgtataaagacttaagagactgagaggcagaagggagatcttctggacttcaatttccttatctgccttatccacctcccagggatgccatgagacccaaaggaaaacaagacataggcatgaaaattatttgagaaattttttacattactatcctctgatagatttttctgatagcttccaactacccgcagaataaaaatctataaagaaaaacccaatctgacatttaagatttcctggccaggcgcagtggctcacgcctgtaaccccagcactttggaggccaaagcgggtggatcatctgaggtcgggagttcgagaccagcctgaccaacatggtgaaaccctgtctctactaaaaatacaaaaattagctgggcgtggtggtgggtgcctgtaatcctagctactcgggaggctgaggcaggagaattgcttgaacccaggaggcggaggttgcagtgaaccaagattgcaccattgcattccagcctgagcaacagagcgagactccatctcaaaaaaaagaaagaaagaaagaaaaaaaaattcctatgatctcgttctaacctttcttcgactactattattgccccaaacaccctgaatccagccagaggagattcatgttctttccttctgtttgcctttgctcaagctattccctcagcctcaaatgccctcctcttcatctctaccaggcagacacaataaacattttcagagtggttagtatatacaagacactgttaaaattctattgattcttgaaggtcttattcatatgctattttgtccatgaaccgttcttgcccttcccacggaaatggtactttgtatcaattgtagcatgtattctacttaataatgtagcttgagggtatgattagttctcccaacagaccatgagagatatgggaggttttagggctgtgtcttgcttgtgttcctatctccagtatctgtgcatggtacattgtagatgctcaattatagaaaaagtgaaaaaaataattttaggaaaagaatgtacatgggtggacagtctcttgggacacaaaactgggtgggatccaggatccaggaaaagagaagtatcaacttgtccaagaaaagaatgtctcctgccttgggaggaatagtagataagcttggaggatggaaacgggatagcctatgtggagacagagaagtgtccaaacccagtcccagctcaaatgccaccccttcattaagtctctcctaaatctcctcctagagacgacccccagctcagctcaatctctttggattttctaccttctagaatgtttgtcttgataaataaaattcatagaaagccattggtttggactgagctcctgcactaggcgcaacaggccaaaccaaaatagagtcactcatgctaaagttccaagccacaaagccaaaattaagctgctcatctgaccttaggagaaatcagaagagagggaaaatagccatatccccatgataaaggaagtcccttctgccttaaccaatacaagtaaaataactttgaaacttgttctttgtttctgcttttttttttcagcccttttctgtctataaagataatctcctctgctcagctcatcagaatactcattctattttatagaataaggtgttgcctggtgctagaatcgcaaatagccagttaagatctgtaactgtgttgtattaaaggagagaaggttagcactccctttgacaaggatggaagaggcccttgggcctgacaacacgcatacggttaaggcattaccacctacttcgtgggatctaaccatcgtttttgaaatggtgctgggaaaactagctagccatatgtagaaagctgaaactggatcccttccttacaccttatacaaaaatcaattcaagatggattaaagacttacatgttagacctaaaaccataaaaaccctagaagaaaacctaggcaataccattcaggacataggcatgggcaaggacttcatgtctaaaacaccaaaagcaatgacaacgaaagccaaaattgacaaatgggatctaattaaactaaagagcttctgcacagcaaaagaaactaccatcagagtgaacaggcaacctacagaatgggagaaaatttttgcaatctactcatctgacaaagagctaatatccagaatctacaatgaactcaaacaaatttacaagaaaaaaacaaacaaccccatcaacaagtgggcgaaggatatgaacagacacttctcaaaagaagacatttatgcagccaacagacacatgaaaaaatgctcatcatcactggccatcagagaaatgcaaatcaaaaccacaatgagataccatctcacaccagttagaatggcgaccattaaaaagtcaggaaacaacagctgctggagaggatgtggagaaataagaacacttttacactgttggtgggactgttaactggttcaaccattgtggaagacagtgtggagatttctcagggatctagaactagaaataccatttgacccagccatcccattactgggtatatacccaaaggattataaatcatgctgctataaagacacatttacatgtatgtttattgcagcactattcacaatagcaaagacctggaaccaacccaaatgtccaacaatgacagactggattaagaaaatgtggcatatatacaccatggaatactatgcagccataaaaaatgatgagttcatgtcctttgtagggacacggatgaagctggaaaccaacattctcagcaaactatcgcaaggacaaaaaaacaaacattacatgttctcactcataggtgggaactgaacgatgagaacacttggacacaggaagggggacatcacacttcggggcctgttgtggggtggggagagggggaagggatagcattaggagatatacctaatgtaaatgacgagttaatgggtgcagcacaccaacatggcacatgtatacatatgtaacaaccctgcacgttgtgcacatgtaccctagaacttaaagtataataataaaaaataataaaataaagaaaaaaaatctataactacatttcttgtaattttgtcttttgagagtatacatatcttatttcctttcccagaccagaacctctttgagggcaggaggaacccggttttccctactttacacatgacacataataaccactcattcaatgtaggtttactggatggataaataggaatggggggtagataggcgggagagtgagtagacaaatgcgaaacaggaaaagcttgcgccaggaaaaacagtgaagagcgaaatctccagacccccgattaaatggtttaaagtgaagccaagcaagaacctccagtcctctctgcggcagagaacagcagatgatagcggctcgccttcaactttgctctgaggacctctcgttagtatcccgcgattgtccttcctaacgcctgactgaatcctgaggctagccttcagcgaacatgtacaccgccttgcccttcacgtgaagccgagcctgtgactacacttatccttccgtcgccggcctcatttctccttccccttctccgatctcgcaaccactgctagtaaggcgcgcgtgcgggcagccctggccggcaggggagggagggtcctgcgaccggaagccggaaaccggaaggggggctgtgaggacgtgttccgaggaagccagagccggagccgtggcctgcggggccggcgacatggatcccctgttccagcaaacgcacaagtgagggccggtcggggagcgggcaggggctagacgaggcgaggccaggtgagcctggcttctggggctgaggcctcggacgtcagccagggtagaggccgagtttttccgccagggcactgctggggatgcctccgaagtgcttaatccttggcgggactcccaggtcagccacagacagtgggttcaggctggggcctggagacgtggggcagatgactcctggggtctgcaagttcgtgactacctgctgggtagactgggtgacgggaaactggcacctgcaggttataaaactttgtccagcacttgtcaactcggtgctcctggttggtagacctcgagaggagacacggagtaggagacacggcccctggccgtaggagtgtactgtttaattggagagtcagggcacgtacgggaaagtatttgtattcttattcgatttatactaaagaccacatttttatggtacaaagaaattgctgtccacgtagcattcactattattacttgttaatcgtatctggttacaggttatcgctaagaaaatcaaattgtaatttagtttctcataacttaaattccttggtagtgtcctttattcgcatcgtcctgcactttcggaattgctgagatacgtagttgagtattaatggggccatacttaccctatttttgggggcggggggcagaattatgatttttaccctgttttggagggacggaattttatgatttttattttttattgtaaaatatacacaacataagatttactgttttaacaatttttaagtgtacaattcagtgacattgagtacattcacaacttacatcactacgatccatttccagaactttttcatcatcccagtgtgcctgttaatcagtagcacttcatttcttccttccagaacacctagtaacctctgtttta

SEQ ID NO: 7356 - DNA, 6000 bp, Homo sapiens
tgacctgaggtcaggagtttgagtccagcctggccaacacggcgaaaccctgtctctactaaaaatacaaaaattagctgggcgtggcagcgggtgcctgtaatcccagctacttgggaggctgaggcaggagaattgcttgaacctgggaggcagaggttgcagtgagcagagattgcaccactgtactccagcctgggtgacagagcaagactccatctcaaaaaaaaaaaaaagataaagaacttaaaagtaactggagaaggctaggcatagtgtctcatgcctgtaatcccaggactttaagaggccaaggcaggaagatcacttgaggccaggagtttgagacaagcctgggcaacataggaagactctgtctctacaaagaatttaaaaattatctggatgtggtggtgtgtgcctatagtcctagatactgaggaggctggagtaggaggattgctttagcccaggagttcaaggctacaatcagctatgatcatgtcactgcactctagcctgggcaacagagcaagatcctgtgtcaaaaatgaaatgaaatgaaataaaataaaataaaataaaataaaataaattggggtcatatcacctagagaacataaatcttagaaaggatttgaaaactgtctccaaatagatagacgacatctagatgatgttgaatagagtagctagagaaaaacctgggacaatttgagcagcataataatgatagtactggattatcagtcctgcaataaaataaatatctgtgagtttatactgacataaataaacaaattttaaagtggaagagaagggacagctcttctttactgttgaatgttaattaataactgtataagaaaaaggaaaatagaaaatcactgtgaatcaaatgccacagtaataattgttgcagttaagaatcatcaatggatgataaaattagtgggtgaaattatgaaaccattatgatatttgcataaaattaaagtatcctcccattaaatatgtattgattacaaagagaaaaatggtagctttttttttgtatttttttactttttattatccatctgctaaggccctgtcattcacagaaatggtagctttatagtgaataaacctggcagacaccaccttaacaatgtgatcaaagtaataagccatatcaacatcatatactccttgatatgatgtactgagaaggcacaacatcatttttgtggtattattgtccaaaatgagaaaacaacagacaagccccaaataaacaaaatactacaaaaaactggcctagacttttcttttctttttttttctttttgagatggagtcttcctctgtcacccaggctggagtgcagcggtgcaatctcggctcacagcaacctctgcctcccaggttcaagtgattctcctgcctcagcctcccaagtagctgggactacaggcacgtaccaccatgcccagctaatttgtgtgtatgtgtgtgtatgacggagtcttgctctgtcaccgaggctgatgtgcagtggtgtgatcttggctcactgcaactccgcctcccaggttcaagcgattctcctgtctcagcctcctaagtagctgggattacaagtgcctgccatgatgcctggctaattttttgtatttttggtagagatagggtttcaccatgttggccaggctgacctcaaactcctgacctcaggtgatctgcccatcttggcctcccaaagtgctgggattacaggtatgagccaccacgcctggcccttttttgtatttttagtagggatagcgtttcgccatcttggccaggctggtcttgaactcctgacctcaagtgatccacctgccttggcctcccaaagtgctgggattataggcattagctaccacacccggctggcctagacttttcaaaagtgtcaaagtgatgaatgagaaagactgagaaaatgtcacagattgaggccaactaaggagacatgatgactaaatacaatggattagatcctggaccagaaaaagaacattaatgggaaaaaaaatggtaaaattcaaattctgtagctagatgaattgatagtattatatcgatgttaatttcctgtgtttgataattatgatgtagaaatgtaagatgtgaacgttaggggaagctgggtgaaggacataagaaaactctctttagtattttgtaactcttctgtaagtattaatgatttcaaaataaaaagttagggaaaaaaatccaggaggagaagaaagagaaacaagaatataaaggatggcagacttctcaccagagatgatggagacagcaaacagcagaccatctttaatgtacttgaagagacaagtctcaatcaatttagaagtttatttggccaaggttaagcacatgcccatgacatagcctcaggaagtcctgaagacacgtgcccaaggtggtcaggctacagctcagttttatacattttagggagacaaaagacatcaatcaatacatgtacattgaacattggttcagtccagaaaggcaggacatctgacacagggacttccaggttagagacggattcaaagattttttcattggcaattggttgtaagtgttattatctaaagacctagaaccaacagaaaggaatgtctgagttaggataaagggttgtggagaccaaacttttatcatgcagatgaagccagaggcttcagacagaatagactgttaatgtttcttatcagacttagagagtctattctatcagccttaaggtctttgtgttgatgctaatgctggtcagctgtgaggcatattcaaccaccaccccccctccaccttccccaaacctgcttcacatcatggtctgaactagtttttcagattaactttggaatgcccttggctgagaggaagggttagttcagacagttgtgggggggcttataatgttatttttagtttacaggttcttacaatttacatagaattgttcaatattaattcaacataggctactgtatgataagttaaggaggaatattgtaatacctagagcaaacacacacacacacacacacacacacacacacacatgcaaacgaggtgtagctaggaagccagtagagaaaaaaaaattatcccaaaagaaagcagaaaaagagaaacagagaaaccagccaaaaagatagaacgaataacaagatagtaaatgtaaacacaaccatcaattactatactaaatgtgaatggactagctcctttgccttccctggggctgggagtgcaggatggactcacttgcacaattatgtcatgtttgctagggcttgggctagggttgtggacttagcatacttgctgaggccagtgcccaccccaagtggttgctgacagcagggataggctaaggagacacctaagtggctggagattggttttatatatatgggaatggagcagataactaaatacttaggcagagatgtaaccaggccatgtgacctgaactttgctccagggcattgacactgctgttaaaatgcttctggcctagaggccctctgcagccaggggaggtagatggagcttcagcctgaaaacccaggtcagagggcccaagtaccctttgcagagctggcttttccccttgcaaattgctagtgacgcttcagctgatgtgtgttactattaaggtcctagtgtttgggagggtggggcaggaggtggaggattgtcagaaaaaaattacatggaaaaagatggcatctgagatgttttgaaagataagtggaattttccaagtggaaaaaggaaggaaaatcagtcagataggaaggcatggagcattggggaatgacaagtatcttcttggactagggtgggagatgggctggagagatgggtcagggccagttgtctggcatcttgtgtgtctcagaagagggtgggcacgctgcgtagggaagcccagggccactctgaaagccctaaaggggaactgatgcctctggccttgtttttatcaccatcaggactacccattgaggcaggctgcactaccagctacttcctggtgccctcttgctcatagccatagtattttgcctctctgagcttccagaggttttaagtctggggaagacccagggactcaaagaaagattggggtgggagataaggggccacagtttgggggagtcaggcaggaggcctttgaggaaaatagataaagtcccaaagcctgtgagtgtgaatttggaggcaatatgctgtgttctgaaacgttttcagacactggctaggtgcaagcaagtgtttgtagggcgaggctcttcatggacctatcactgcttacgcaagcttgggatgtggtcttgccctcaacaggtaggtagtctaccggaaaaccaaactaaggcaagaaaaaaattagtgaataataaaggactgaaccggttcagagaaggcattcagcagatgtttgccagtcaaatgaattaaagtgtgaatgaatgaaactcgaggtagtgggtgaatgtgtcccaagaatccagcgaaacagggtctcccaggaggcgggactggaagggtccggagaggggccacaggctcctggcctttctaagcacaccaagtgcccagtcgcggacccccgggaccaggatgcgctgacgacccggctggcaggcgggtcctcgtgggcgaggcgagggaggcggcgagagaggagcaatagtttcccaccgctccctctcaggcgcagggtctagagaagcgcgaggggatctagagaagccggaggggaggaagcgcgagtccgcggcccgccccgttgcgtcccacccaccgcgtcccctcccctcccctcccgctgcgggaaaagcggccgcgggcggcggcgcccactgtggggcgggcggagcgccgcgggaggcggacgagatgcgagcgcggccgcggccccggccgctctgggcgactgtgctggcgctgggggcgctggcgggcgttggcgtaggaggtgagtgaggctccggctcggcagcgtcgcagctgccccaggatctgcgccccggtcaagttgcggacttggagccggcaaacgcggagggctggtcccgcgcgtctgcgctgggaatgcgcgtgtcctggctggcgcggtcggagccgggagctggggaccttcctggcccggcggtggcggggctgagaggtgcctggtgcctgggagcgggtcctccgagacgccgaagccatcagccaggctgagcgccttcccggccgccgcggcgcgcacggtgcggtgggcgcatctctgagccccgcgctcacccggggctgcgcgcgtcgcgggtggtcctggtcgggccaaggacgactggcccaggagccaaggcgaggtggggcttccgggggttgttcccgcgccttggcagagggatgccgctgtagcttcctgggtgagagcgtgcgcgcgcgcgggtttgccagtttccccacatttccaatttctcctgttacgctttctccagaaggttttttcttttccttttttctttctttctttcttttttttaccttcaacttggcttcctgcggggttgttttggagcaggatgagggctttgcctcctccagtgtccccaggtggcagcggtgcctctgctcccagggcagaccctgcacccgaaaaatctctagtgtattcggggagccatgaaaaggctcccttgggccggtgggatccttggctttgtctctggctgctgcgcacaccgtcagccgtcagggcaattggcattcggcctctttggtactggggacacaggtggagggatggagcgggcacagcccggggttgctgcccgtggtcctctctgagtccttggtgattttgcctgggctggagagaaaccctggctcctggtctgctggggccgcctctgcctcagaggatgacacaagagtgcatgtaagtatttt

SEQ ID NO: 7357 - DNA, 6000 bp, Homo sapiens
tcccacctaggcctcccaaagtactgggattacaggtgtgagtcattgtgctggcctcacattttttaattttttaaatcagaagagagggagaaggaacttggaagttagtgcaaagataatgactgagaaccatagactgaaggtctaagttgttgaaaaaatggaatgcaggctgggcacggtggctcacgcctgtaatcccagcactttgggaggccgaggcgtgtggatcacgaggtcaggagatcaagaccatcctggccaacacggtgaaacccatctctactaaaaatacaaaaaaaaaaaaaaattagctggacatggtggcaggcgcctgtagtcccagctactcgggaggctgaggcaggagaatggcgtgaacccaggaggtggagcttgcagtgagccgagatcgcgccactgcactctagcctgggcaacagagcaagactccgtctcaaaaaaaaattatttatctatctacctatctatctatctatctatctatctatctatctatctatctatctataaattagctgggcgtggtagtgggtgcctgtaatcccagctactggggaagctgaggcaggagaatcgcttgaacccaggaggtggaggttgcagggaactgagactgcgccactgcactccagcctagtgacagagcaagactctgtctcaaaaaaaaaaaaaaaaaaaattaggcaggcgtggtggcaggcacctgtaataccagctacttgggaggctgaggtaggcgaactgcttgaacccaggaggcggaggttgcagtgagccgagattgcgccattgcactccagcctggcaacaagagcaaaactccatctcaaacaaaaaagagaggccgggtgcagtggctcaagcctgtaacaccagctctttgggaggccgaggcgggcagatcacgaggtcaggagatcaagaccatcctggctaacacggtgaaaccccgtctctactaaaaatacaaaaaaaattagccgggcgtggtggcgggcgcctgtggtcccagctactcgggaggctgaggcaggagaatggcgtgaacccgggaggcggagcttgcggtgagccgagatcgcgccactgcactccagcctgggcgacagagcgagactccgtctcaaaaaaaaaaaaaaaaagaaagaaaaaaaaaaagaacttttgctttggacccagacagacctgggttcaaagcacctagcacagtatttgtcatataatgaggtatcgataaatgatagcttataacactaacacaaagaaagactggataatctgctcagaagataccagttatgtgttgtagccatggtagtgagctcaaaactccactctcctttttgttgttgttgttgtcgttgttgtttttgagatacggtctcgctttgttgcccaggccagtgcagtggtgcaatcagagttcactgaagccttgacctcctgagctcaagtgatcctcccacttcagccccctgagtagctgggactacaggtacctgccatcacaccgagctaattttttttttttttttttttttttggagagatgaggtttcgctatgttgcccaggctggtctccaattcctgggctcaaatgatctgcccaccttggcctcccacacactttcaattataccatgctagcaggatattttaaatctccacatgatatgaaaatgtgctggcccagcacagtggctcacgcctgtaatcccagcactttgggaggctgaggcaggtggatcacctgaggtcaggagttcgagaccagcctggccaacatggtgaaaccttgtctctactaaaaaaaaaaatttttaaattagctgggcgtggtggcccgcacgctgcggtctcagctactcgggaagctgaggcaggagaatggcttgaacccaggaggcggaggttgcagtgagccgagatctcgccactgcactccagtctgggcgaaagagtgacactcagtctcacaaaaaaagaaaaaagaaaaaaaaagaaaatgtgctgggcacggtggttcatgcctgtaatcccagcactttgggaggccaaggcgggcagatcacgaggtcaggagttcaagaccagcctggccaacagagtgaaaccccatctctactaaagatacaaaaaaattagccaggcatagtggtgcgcacctgtaatcccagctactcaggaggctgaggcagagaattgcttgaacccgggaggcagaggttgcagtaagccgaaatcacgtcattgcactccagcctgggtgacagagcaagactctatctcaaaaagaaaagaaaagaaaagaaaagaaaagaaaatgtttttctggccaggtgcaggtagctcacatctgtaatcccaacacttccagaggctgaagtgggaggatccttgaggccaggagtttgagaccagcctggacaacatagcaagatcccacctgtagtcctagatacttgggagagtgaggagggagggttacttgagcccaggagattaaggctataatagtgagggatgattgcaccactgcactccagcctgggcaacagagtgagaccctgtttctaaaaacaaaaaaattattaaaaaaaaaaaagttttcttaagagtccagacttgtgaattgccagattagtgtaatttttaaaatatgtttctattataaagtacccatactcataaaaatataaatcaatttattacaccctctagaattcactattaattttcaacatttttttcattctttttccatgcatattttttcacaattctatgcatagttttgcattataaaatatttctcaatataaaatcttcttcaaggccaggcgcagtggctcatgcctgcaatcccagcactttagaaggccaaggcgagcagatcacttgaggtcaggaattcaagaccagcctgaccaacatggtgaaaccccttctctactaaaaatacaaaaattagccgggcatggtggtgcgcgcctgtaatcccagctacttgggaggctgaggcaggagaattgcttgaaccggggaggcaaaggttgcagtgagcagagaccgcaccaccgcactacagtgtgtgaaacagagtgagactccgtctcaaaaaataataataataaaaataaaatattcttcaaaaacatggccgggcgcgctggctcacgcctgtaatcccaacactttgggaggctgaggcgggcggatcacgaggtcaggagatcgagaccatcccggctaacacggtgaaaccccgtctctactaaaaatacaaaaaattagccgggcgtggtggcgggcgcctatagtcccagctactccggaggctgaggcaggagaatggcgtgaacccgggaggcggagcttgcagtgagccgagatagcgccgctgcactccagcttggcaacagagcgagactccgtctcaaaaaaaacacatgattttatttcctgttttatttctgcttatttcatcaagtgaaaatatcataacttatttcaccttttactgtcagtggaacatttacttgtttccaatttcgacaaactctgcaaatgcacatctttttaaaagaatctgcatttctgattcttcaaaataaattcctagaagtgatattactggatgaaaagtggatggagagcttaaaggctcttagttactcaagaattactgggtcaaagaggatggcccattcacagcctttgaataaaaataaatattgccaaactgctttcaaggaaggttttctaattcatcctctcaccagcaatataggagagcgtgtggctcacattaataaaaagaactctgctgttttgagcagtactaagcggagcgtttaaacttatatttctttgattaggaaggctgacattcgttcctgcaattcatatttcttccttactgaattgcctgttcctatcctttgctcgtttttctatagggatattatttcattctttcagtgttgtttttacaaaataaacaatttttttgtttgttttttcccccgagacggaatcctgctcagttgcccaggctggagtgcagtggcgcgatctcggctccctgcaacctcggcctcccgggttcaagcgattctcctgcctcagcctcccaagtagctgggattacaggcacgcgccaccaccatgcccggctaatttttgtattcttagtagagacggggtttcaccatgctggtcaggctgatctcgaactcctgacctcaggtgatccgcccgcctcggcctcccaaagtgctgggattacaggcgtgagccactgcacccggcccaacaaatgttttagaaagccatctggatgatagtccatgactgctgaacaccggctgaggtccacaaaactgcgctcaccgcttggggactttccagccggcctttactctccatggaaagcggtctttccacaaacctccacggtgggaattactgcaaaggcatcggctctcccggcctagaatatctcgcgggatctcagctgtccttgggccccccccctcagcgcaactaccaatcccaacatgcaacgcgccccgtggcccaagcgcccgaatgaaggctcggggccaaagtcatgtgtctgactgcgtcacacgtcccgtcatctctcccacgcctttttcttcagcgtacaccttggtcgccatcttgtgcgcgaggttatggaacctctgagtcccgccaactctatggtcgagcgtttcagggatcggccaatcgtaatccagatctcgtaggaaagccccgcctctatccgcatggaggcgggaattgccacgaagctcctgtggagggagaggaagcagctgcggaaagccaataagagtggggaatcgatgacgtcaaccaatggggacgcggggatattacggccaatgagaatggagaaggtccaggacacgtgggtgggggaagctgagcgctgagaccaagggctaaagctgggaggtgagtctgtcaccttgagccgggcgagcgctgtgggccaagcaggggttgcagggtagtaggagtgcaggtgacttggggccgggagccagcaataggcagggttgtgggctgggcagtgtggaggggtatttccccccagtgctgggagaggctatggcaatctagatatggccttatcaatgaatgttaattaccaacggtaatgaacgattgactgcctcggctggggcgggtcggggactgctgtgtaagatgggcaggatcctgcgcgacacctgcccagtatccgcctccagtcttcccgagagaccattccctttcgcaacatttccttcctggggcttgggcacatttccttgacttccgatctccatgactttgctttgaagacccactgctctgtccctctgacctctaatgccctcctcagctggggcacggtgcaaggaagagcgtggtctagggaggacggacgggggtgaaggggacgaccaaaggtcgtcattataagcaaacaaccagggtctcagtgggattattattactattttttccccctctgcagactgaaaaaatgcagaccgccggggcattattcatttctccagctctggtaaggtgccgcgccgcagtgctctgtagtaccaggtgtatggtgtggacgccatcagtgtttaatgaatgaacccaggggagcttggcgtcctgatgatgtaggctctttgaggtggctgtaggatgtgatgaaggtaacccctgtttatctgggcctgtgaaccaagctatcttggctttggaatgtggtcagagagtctggatttgatttttatccccagtctgtcctggccatagagacagcccactaaaacagtggttttcaacagtggctgcacgttagaatcatccagggaactttttaaaatcctgatgcctaggctgcaccttagaccatttgcatcagactttgggaatgggggtggaac

SEQ ID NO: 7358 - DNA, 6000 bp, Homo sapiens
aagatttatgaagagacaaaacataaaggccttttgaatatactcatagcttggatatccattttaattaagctgagcactcttttttttatcaggggtgagggtgaaggttagaattatataaatgtcaggccaggttaaaggattgggttatgtgcgggaattccctgcggtaatgagagggattttcatagaaagatcctaggtatgtttgatttgcaacaaatcagacatggagaaagggcataaacacaagcaatgccttcacccccagccactttccagagagggagaatggcagagatgatttgactggatggagcagtttttgaacgggtcacaggtggagaaggaggggaagcggggtttggggctgaaggcttgcgggcaggaggggctgccagggcagagggttcagatgggtgaggagcagatgcagagggatgagaatgcagagggggttcatctgcagggtcaaaaggagttttggaggaaggagttttgaaggaaggagtttcaggggaaggagagacctggggaaggttttcattaagaaggatttcatgaagggtgcaagcttgagacagagagggtcgggatctaaagtagaagaaagcctggcctgaatagagagaacctcttggcgtttgccattcctggttataaagttgtcattgtccctgagaatttgaaagtaaaaggtgccatatttgggccttcggctcgaaattttaacttgccattatttaatttgtacccgggccaggccatgttgcaataaaaatctgaacactttggctttatatttcctgtaagccaagttggtgaggttgtgaaggagacagcccagtggagaggatgtgggaatgcaggattgtttggtacccatgtggactggtaagaggaagccaagggtgtctgttttagttctaggcatccccagtcaaaaggcagagacccagaatcctctttataaagaggatggtcaagttgagaagaaactgggcatccccaagatttcttctagcttagtcccactggttctctgaagaccgggatggcagacctgactgtcccgagtaccatgagaaagaaaggggaaggcagatcttaccagttagctggattagtgtctgatgttggatgttccagctggaattggcaaagggcctcttggactggagccacaagaagtggggtggtggggagagaaagagagagacagagagagagagagagagatagagaggaggatgagggaggaggaggggagaaagcgaaatacctgatacccattgcaggcagtcagaggtggattcctgagacctgagggttttgagggctcactggagagtagccccagcccgagccttgcaggccctttcaggttagttgtcctcctcatgcaaattgctcaaaaagtaaagtgagagacaagatgggatgggtggccagagactctcaggatccagtgggatgagcagctgctgtccactgcttccttggttgcaagagagcctctatccccaacacccatcctggctttcagcaccaaatgtaagagttaaagaaagaggaaagaaacacaaaaagtggctcaacagtcaaaggtttattttggagaataaacctgagaggggcttctggccgattttttggtcagaagcattctgtcttacagactaggagtatttattggttttagggtgagacagcttatcacaagcttggaatatttctgtgtggggggggaagtttattgcagggttggaatgtctctggtcagaggagaggttatctcagggctggcatgtctctggttggggagggatttatcttatggttggaatgtttctggtccgagatgtcatttgtggtttatggtcatgctaaccttagccattaggctgatgccctttggatttaggtggtttttgatcaaggtgaactttaaaatggtggtgcttgtccaagatggtgatgctcctgtctgtcactcagggtagcagcagggcagctgcttggctgtggtctagacagtcagggaccacagctagctctgccaggcagaaaccctgatcaagctgaaaaagagtaaatattctcctttaatccactctgccttcctgcagtcatccctagagcagggagagaggatctacaaccatagagggttcaccttggaaccacaatcaccaatcacaacactaatgtgaagcaagagttatgcctgaactatcctcttccctgcttccaaaccacagatctgatggaaaagagctttcctacttaaatagagctggtgtggggaaaagagccactttatttcgaatgcgaatctgcctggttaaccccaagtcccaggagtgcctctaaaatgtctagttgggccaggcccagtggctaatgcctgtaatcccagcactttgggaggctgaggtgggtggatcacctgaggtcaggagttcaagaccagcctgaccaacatggtgaaaccctcgtctctactaaaaatacaaaattagccaggtgtggtggtgcatgcctataatcccagctacttaggaggcaggggcaggagaattgcttgaacccgggaggcagaggttgcagtgagccaagatcacaccactgcactccagcttgggcaatagagtgagactccatcttcaaagaaaaaaatgtctagttgtgtattactctttatgtatgaacacttattcattgtaagttttcttcttattgttgcagaaaccatagtttctgcctgtagcccctatgtattccttctagggtacatatgctttttgcccaagatatatgctctgggttgaggggttgtagtatagagatctacctgccttgtggtgtccaggaccacacttctaagttcccttaataaatcacccaataccaacaaactggatttgtctacctcctcctttggtttctcatcttcttcagcatttgggggtctctttgtgtatacaaccctttcacagaacagctggtgatacagggggtttgagggagccagcactggctttagagacacaactcctaggtgaaaatcctagccccattactggccacataagcttgaatgagtcatgaaagatctcataggctcagtcttcacatctgagaagtgcctgacagtgttattacaagagctgaatgaaggacgggaatgaatatggaagctctttgtaagcaaggaggtgttatacaaatgtctttttttacccccctacatgcacgtagtcggtacaacacttttctgattggtcttgtcaaagaggatctcttttccagtctggagctagaaaatagttatctacatttgttacattaaaactcccttctgagagactccctttctctgctggctgccaaggagctcagacctgaacttgggactcacctgcatcaaagttgtagatcacgctggcatttccttctactcttttccaagactcactttcccagactccgaaaaaaaaaaaaaaaaaaaaaaaaagcactggccatttttctttttttccctttttttgagatggagtcactctctgtcacctagactggagtgcagtgccatgatcccggctcactgcaacctctgccacctgggttcaagagattctcgtgttctcgtgccttagcctcccaagtagctgggattacaggtgtgtgcaatcaccccgggctaatttttgtatttttagtagagatggggtttcactatgttgcccaggctggtctcaaactcctggcctcaagtgatccacttgcctcagtttcccaaagtgctgggattacacacatgagacaccgcacccggccccattttgcatgcattttgcacgccatatttaaagattcttgccggtcgtggtggctcacacccgtaatcctagcactttgggaggccgagacaggacgattgcttgagcttaggagttcaaggccagcctgggcaacagagtgagacctcctctctacaaattattattattattttttaattagccaggtgcggtcgtgggtgcctgtagtcctagctactcggatggctgaggtgggagaatcatttgagcgctggaggtcgaggctatgagctatgattacactattgcactccaggctgggtgacagtttcaaaaaataaattcttgtatttgtggcagctgggtcattagaatacaatataatcatgcgtgagaggagccatgggaaacactgagcctggcttatgaaaaaggtcctgcaaatctaatttcatctgaagttcaacagactctttcttccaggcacacaggcgttatgtggccgcacgggtccctgcccgttagaaggattcagccacaccccagctttccagttcctggggtcttttgccaggacagtaggtgtggagtgcgtggtgaagtggagggtggaggtgggaccaaggccgaatttagggacccccagcatgagctgcgggtgggtcaaggccgcgaggttggagggcacggggacacagcatagcgaggaaggaacggtagggaccgtggtgatagactaggggtggacgcggggattgtgtttttctttaagcgggagagagaagcccgatcaccggcagcggaggagaaaagtccagggtagagatgggggcgctggtgtgggggcggtcaggagagaagggcgggggccgtcccaagcgtcctgcacctgccctactcgccgagaatttgcccgggtcggtgccagggcggggcagtcggcggcctggctgctaggctccgtgacatccggcagtctgagggcggcgggattcgggatgacttcgggcgggtgagtgtccccggggcagagcagagcgagaggtgaaacttcgggagcagggagcgccgcgggtcctttctggcgtctgcagagcgggcaggtgctggggacgcagacgccggagccagggagcgggcggttggagtcttaagtccaaccggttccccgcataggtggctgcagaggcgaggtgacggcgcgtgcggaacgaactctgcacccccaggaatggggagcgctggcttttccgtgggaaaattccacgtggaagtggcctctcgcggccgggaatgtgtctcggggacgcccgagtgtgggaatcggctcgggagtgcgggcttcggggctctctgcttggaactcagaggcgctgacccagcctggggcccgtttgctgcccacgggaggagccgccgtcaggggtatgtgagtgcccgggcgcggggactgcgggctgtggacagtcggggagcccggcggcttggtctcctccacagtccgcgcggagtcagggaaaagtcggttttcaaatccaggcgcccaccgcagggcagagtgagctgcggttgtgtggccccgcgtgctaaagagcctctacggagtgatataataattaacggggtaaagtacatttgaaagtctaaattaatttttataagctacgaagaaggatcagacatacatttggtattcttttatccgcaaagtttattttgtttgtattttccaaaactctaaaacaatcgctaaacattgacaaagaagtcatctcacaaaaatgcaataacatgtttgtgacatgacatcttgtaagcatgaaaaagaacacgtttggccgggcgcagtggctctcatctgtaatcccagcactttgggaggccgaggtgggcggatcacttgaggtcaggagttcaagaccagcctggccaacatggtgaaaccccgtctctactaaaaatacaaaaattagccgggtgtggtggcaagtgcctgtaatcccagctacttgggaggccgaagcaggagaatgacttgaacctggaagcagaggttgcagtgagccgagattgctccattgcactccagcctgggcgacagagggagactctgtctcaaaaacaaacaaacaaacaaaacaaacaaacaaacaaacaaaaagcagcaacacac

SEQ ID NO: 7359 - DNA, 6000 bp, Homo sapiens; identical to SEQ ID NO: 771

SEQ ID NO: 7360 - DNA, 6000 bp, Homo sapiens
tcacttccagcatccctctcgccccacacctgtccctgaagtcccagtcaaatcagtaccctgggcctttcttactcattccctctctccctccctcagccctgctcctgctcagcccacttcttggccaaattattacagtagctgccttcccccacaacccagtctgtcctggcaaagtcaacttcatgtggcagccagaatgttctgacagccccctttgtcccacaagcaccacccctaacatacaatgcaaagtgggtttagcctgtttaaatgtgagagcaaccagaacatgaggccacatcctggcctcctctaagtcatccccgggttgggactcagcccaggattggtacatagtaggctgtcaatgaatgcttgagcctggcagattctgagccaggggaatcgcctggactaggcctgcatctgggccataggagaaggaaatctgataaatccattcaatcttcagcactcctccctccctccctcttcagtaatttgcattttcaattcaagtcagatagacccctgagtctcagtccaatagctgagatttggtacacttcgttgaacagatattagaaggtttgggatacaatgaatgtagattggggaatagtgagagatttctctccagccctttcatttcacacatggagaaaccgaggcctggaacggaaggtaacttgcccaaggtgagaaggcagaagagagcttgcattcaacggaggggcacaccattgcaattccttgttatttttccagcagctgcctgtgtgcttcacgtctctgtgctgatctgcccgagaggtgatggtgtccattggtgtgctctggggctctgggagagtgagatgagggctggggagagggcaggtagaggaagacttgtgggaacacagcaagcgctaaataaacagaagccgcctttgtgggatattgacattgtcattgttccagctgggaaaacttcacctgaaccaggacccaatttttctgcctctcttctccagctcctttctttccctgttgtccagatacacctcctccagggagcttccatgaccccccagcagaactcaccatttgcatgttgttacggtcacctgcagaggcagatggatcccatccaaggtttggtttgaatgaagactgacgacaccacccaaacaccaagagagtatgaaaaggtttattatttacataattgaggtctccagggggagcaggggcagtctttcaagcaggtcccagatgtgttgggagagccaggaaggagactggcctgggtttttattgtggttgaggggtgagggttccctcaggaaggggcttgtgaatattccccctcaaacaccaaaggagggtgcacccagactttcttatcagcttgtccaggtgtagggcacagagaagagggaagggtgaggcttaaaatctgtcagcaaacatcaacaaatggacttagactcctcattacacatattattcctgtgtccttgtttctctgtctgtctgtgtgtttctaggtgggtctcttccccatgggggagggttgacagataaagagttgacatgataaagtcaactgagggatgagatgatcctacagacgacggtgccactgaaaccaaagaaccctgagatttctctttctccatctctccagctgagatccttctagtctccatgtctccctccactcccactccatctccccagactggtctgacactcccccacattctttagctcaggccctccccctaccagtcgcccctgctctgctccacattccctctggacactcccctggagtggaaaaaccatccctcatccctttccggctcccagtcccaggatcggacatgctggtcattcctgtttgggatgtccaaagagataaggcctggcatggggccaatctgtcatcgcaggactctcaaagctgtttcaggcaggatcctcacccacatggcgtttccaccctaagcccctgcccttcttaccctggctggctcctcttctccaggaacatggcagaggactcaggagccaggcagagagcaaagatcactgttcaacttccatccaggtcagcttcctgttccttgaccccacatgtcttctaatccctgcaggccctgggccacaaagcagaccatgagagaggctgggtggctctggaagtcagaggtcaggaacaaatcctgttctaagggccgttagagacaagtgtcttctccccaaacaccacagagaaagctgttatcacagctgcttttgtttaggcatgtctagctgtctgacaaccatctgcctggagtttgtcttcttaaagacacggttgtggtcagcggcttcagtcctagctctgcctcccataaaattcagatcttggacaggcaggtaacctcctgaggctctgttttctcctaagtcaaatgaatatcataatccccacctcacagggaggccaggaggataaaatgagcctgcttgtgaaatgatttgtaaactgtaaagctaggccaggaccctttcccaggctctgaatctaattttgtactcataattcttatgagtacaaaataattttattcttaaagagcaccccagattgcacaagcttcaggacccaccaaacttggacacgcccaaagtagtgtataaatgttcattattagcataagtagttaagggctccagggtcagataacacaggatgaaaatcctagttgtgtgacctctgccaaattgcctaacctccctgagcctcatttttctcgttttaaaacagagataacacttcaaagattgttgtgaggatttaacatttgtgaagcatttagcatagttcctgctgcgtatgtgcttaatacatggtgttttgttcttattattttaagaatagatggagaaaagaatgctcggggaggccaggcagggtggctcacgcctgtaatcccagcactttgggaggcggcggggtggatcacgaggtcaggagttcgagaccagcctgaccaacacggcgaaaccccgtctctactaaaaatacaaaaattagccgggcatggtggtgggcgcctgtaatcccagctactcaggaggctgaggcaggagaatcgcttgaaccccggaggcagaggttgcagtgagcggagatcgcgccactgcactccagcctgggagacagagcgagactccgtcgtctcaaaaacaaaacaaaacaaaacaaaaaaacaatgttccggggaaaatgggtctctgagctgcaataagagaaatgtgagttagatccaagaaagtacatagtaacctcttttttttttttgagacgacgtctcactctgtcacccaggctggagtgcagtggcgcgatctcggctcactgcaacctgcgcctcccgggttcaagcgattctcctgccccagcctcccaaatagctggaactacaggcgcccgccaccacgaccggctaatttttgtatttttttagtagagacagggtttccccacattggccaggctggtctcgaactcctgacttcgtgatccgccctccccgggttcccaaagtgctgggattacaggcgtgaaccactgcgcctggccagagtaacctcttgaagttccctttcgatttgattccttggtggaggagacctttagtctccgcccacttactgccacctggccctacccaccaaacacctgatgggtgctgacgtccgagcccagtctccaaacactctgttcgagcttgggtgggaagagggagcctctgggattctgctgggctgggccctgaaggcaggagtggacgagaaatggatacggtctaggctcagcttcccggctacgcagtgcgttctgtgaaggacggactcatttctacattgacagtcttagcctttgataccagaagtcgcagcacttagggggaaaaatgctttttggtaattataattagcgacatttggttgttaccactgctaaatatgtctgtctttgctgaggagccaatctcagctcggatcagggtgagtggataggagaaataaatctcggcaaagacagcgaggggcctgagtgcgaggaagaactcccagagaccgccagccacctcttggggactcacagcgctgcggaggcgagtccagcattctagccagccgcgcacggacgtcggttcccagatgcgccaatgccaggtctctccagcccggctggccttttcagcagcagcagcagcagccgcaggaaagcggccagacaaatcccacccccggccccgcccgtcacatccatcttgctccccaggcgacgctttctcggagaagcgaggggcggggaggggaaatctaagcctttgggggttgccgacaggtgtttgggggagaaggcggagctggggtagggaggatgaggagggaggggcggtgctgcccctttaagaggaggcggccgagccgggatctttttctctttccccggaaggaaagcgcagcccgggctgggctcgcaaggtggggaggtgcgggactgggcgtggggaggcggggcgcgcgccgggggacccctccctcctgtcctccttgcggtcgaccggtgcgcttgccagatccgccgcgaagccgggatcgaaggcgacagcgcggccaagggggcgcggccgggacaagctgggggccggttgcccggggcagggacggcggcgacccggccgctggggaggcaggaagatagacccacggatcttaggaagggatccgagagcgcagctgtgaaactggctggggctgggggcacgaaaccgatcagcgctacggagcgcagcggccggcgggttccagtgtcctccggcggcgcggggagcaggtgaacaggtcctcacgcccagctccgcgccctcacgcgctctcgccgggaccccgcttccgctggcagccatgggccccggccccagccgcgcgccccgcgccccacgcctgatgctctgtgcgctcgccttgatggtggcggccggcggctgcgtcgtctccgccttcaacctggatacccgattcctggtagtgaaggaggccgggaacccgggcagcctcttcggctactcggtcgccctccatcggcagacagagcggcagcagcgctacctgtaagtgaagctggagggtgtggggtgggagcgagagagtgtgcgagcgcgggatgcgggtccggagctgagtcggagcccagggcagctggcccttgggagccaggattaaggggcggccctctggctgctgggggttggcgggaagtggaggattgggtgtggggtcgggcagtaatcattggcaagtgctgacggggccagaacctgtctggacgccacccctccgccctttagatctctcatgagagcggaagtggggtcccggtggctgagtcctctcccattctgtgaaccgagtacccagcactagcctgttctctccagggctgggagctggggtaaactgcaagataaacacccagcggactccccccttcccgtacgcttgggggaaaaatgagcatatacatttaagcacctcgctggtagtctgcggccacgccagccacaccctctgcagagccagactggatggccttctcaaccgctggcttggcggatggagggtgaggcgatgggtgagtctgggcgtttggagctgtccatacgctccctctgacgccttgaggataggggcggtgaaagagagaggaggacttgtcccaactctggctgggtctcctcctgcccacccgcaagcagtggcactctccccgcagacatcttccctgcattccacagattcgtgttggatcttcaaccctgagtgtgtttgttttggtttgaagagggaaacagtgtttttctctttcttctgttctccttccccaacagctgcaaggaggaggggaagagctatgcacagtggaggaaggaggaggaggtt

SEQ ID NO: 7361 - DNA, 6000 bp, Homo sapiens
gatgagtgaacatcaggttacttcaggctaactttgtaatgtaaggattaaagcagagggaacttatgccaattaaaattttaaactggcctgtttgggaaattggccattatttctctctcttgatttctcacaaggtcagatagtgactccattttgatttttagtctggtatgttggggtctagcacaggaaattagccatatatatatacttttttttttttttatacaggatctccttctgttgcccaagctggagtgcagtggcacaatcatagctcactacactctcaaccttctgggctcaaatgattctcctgcctcagcctccctagtagctaggactataggcgtgcaccaccatgcctggctaatttttttttatttttatagagacagggtctcactatgttgcccaggctagtctcaaactcctaggctcaagcaatcctcctgcctcagtttcccaaagtgctgggattgcaggtgtgagtcaccatgcctggccctcctataatttttatttaacagaagttaccaaagaattagctctcaaagggctcctgttagatgcttttgctagcaagacttttcaaatgcttaaggaatagcagtgtctactgttacataaattatttcaaaaacagaatttaaaaaatgctcttcaacttatgttgtagactggaataactgattcccaaatctaccaaagctttaacaacgagaaaagaaaaccacaaactgggggtgtctacaagagccagaaaataacataaatgggtgcagctgattgggtatgaaatgaaaggaaaaggtgggagctgcaggcactggtgagtgtgcaccccttcttcaggaattcaaactcaaatgcttcaaaaccctgtgctggtcaaataaacaaggcctacaagttacctctgattttgcagcttctggtatatctccattacaaacatagatgtaaacattcttaggccgggcatggtggctcatgcctgtaatcccagcactttgggaggttgaggtggatcccttgagcccaggagttcgagaccagcctgtgcaacatagtgagaccctgtgtctacagaaaattttttaaaaattagctgagcatggtggtgcacctgtggtctcagcttctcaggaagctgaagcgggggatcacttgagtccaggagttcaatgttacagtgagctataatcatgccactgtactccagtccaagagacagagtgagaccctgtctcaaaataataaataaataaataagaccaggtgcggtggctcacacctgtaatcccagcactttgagaggcccaggccagcggatcatgaggtcaagagattgagaccatcctggccaacatggtgaaatcccatctctactaaaaacagaaaaattagctgggtgtggtgatgtgtgcctgtagtcccagttactcgggaggctgaggcaggagaatcgcttgaacccgggaggcagaggttgcagtgagccaagattgtgccactgaactccagcctggcaacagagcgagattccatctcaaataaataaataaataaataaataaataaataaataaataaaatattagtaaatccaattgaacttatactacaacttaaagaaaaaaaacagctgctaataccaagtaacattcattctagggatgcaaaaatgttttaatatgtggaaattatttttaaaatatttcataatctcattaggtcatgctagaaaaacccatatgatcctttcactaggtgttagaacttcctgacaagcagggacccagggatccagagctggcgtgggtgtggactggcagagggtacacgcaaaggtagcatccagagggaaagccaggatcagggccagcagacagcctagtaaagtgtcaatcagaaggaactggatggataagcagaaagcagataaaggccacgggacagagcccgaggagatgcttggaggcacagcctggaggttttcctgcagggacctccatgcctgctggtgttggaccaaattcggactctagctgctgcaaatgcatttgaaaacattcagcatacatgcctcataaagtagccctaaaaatgaagactataaggatcatttcttcacataagaaagaatatatcatgcaggcagcccaattatgactaaagactgctttcctattctgcttttctgaaaaccattttgtattttcaagactttttacaataaaagaaaaaagcacaatggaacctattagagaacccgaagaggagacagagggaaacaatgattcttgcaatttatatggtgaaatctaagccagtctatgcatgctatacctcaataatctgggattttatttttaattattttttagagacaacttgccatgttgcccaggctggtctcaaattcctgggctcaagcgatcctcctatctcagcctcctgagtagctgggaattacaggcaccacaataaccagataacgaatttgtttaaaaaaaaaaaaaaaaaacaacagtgggctgggctcggcggctcatgcttgtaatcccagcactttgggaggccgagacaggtggatcacaaggtcaggagtttgagaatagcctggccaacatggtgaaaccccgtctctactaaaaatacaaaaataagccgggcatggtggcgcgcacctataaccccagctactcgggagaccaaggcaggagaatttcttgaatccgggaggcagaggttgcagtgagccgggattgtaccactgcactccaccctgggtggcagaacgagactcaaaaaaaaaaaaaaaaaaaaaaaaaaaaaaaaaaagccaggcgcggtggccacgcctgtaatcccaacactttgggaggctgaggtgggcagatcatgaggtcaggagattgagaccatcctggctaacacggtgaaaccccgtctctcctaagaatacaaaaaaaaaaaaaattagccagtcgtggtggtgggcgcctgtagtcccagctactacttgggaggctgaggcaggagaatggcgtgaacctgggaggcagagcatgcagtgagccgagatcgcgccactgcactccagcctgggcaacagagcagactccgtctcaaaaaaaaaaaaaaaaaaaagagagaaatgggggaaaggaaaggaaaggatagccactaaaatgttaatgatgatcatcttaaggggtgggattgtaggtgacttttactttttttcttattcgtttagtgtttaaatgttatataatggatatttattacttatataatcagtgaaaaataaagctattttcattgttgtggggggaattcttggcaggtagaagtccctagaggatctgatttaatgagcacacaagatcaatatttaattaacatatcaattgccgggatgtcaactgatgttttccaaaatcattgaagtgtaggctctcttaagtagccaaactgtcgtcggaaacatagtttacaattctcccatttaacaaacgcggaggaacagaatgattacaaatgctaaagcgcagaagacgattaaaggaggttatttatgtaccatcaaatgcttgtgtatcctgtacacatcagtttagaattctctcatcaacccaaccttgtggcaacttccaaacccctccatcatggccttctaacttttcaaacttttttttttgtaagccacttctctttccagacctctctgtagtggttcctaacgtcttccctttaaaccttctaacttgtgtttgctatttttatgacttcctcctcccagtgcctggcttccccagctggggattcaccttgctttggtggccactgttttgctcttctcgccttccctctctccatgggcctgccaggcttagggaaggccgcaggtgcttagaccttgtccaatgcggtgctcattgaacacgccgggttctcaaacaaatgttagggacagctggttagacgggaatctgggcctcccctgcttgctttccgcaacatttcttgagcattgctgggtgtccaaggcagggcgagatcccagagcagtcacgaccggatgtatgattggtgctcactgcacagtgctggggacgcacagggaggatgccactgatggtgtagggggtggggacttggcagagggagcagcatgtgtcgaggtctactggttctccaagtttggtcccagagcaaaggcatcagcatcacctgggaacctgctgaaaattctaatgcttaggcctcactaccgacctaccaaagcagacactctgggggagggaggaggggcactaaaaatctgttttatcaagacctccaagagactccaacacacgctagagtagtttgagaaccacgactctgggagcggcctgaggatgcttaggatgagcgcagagcggaaaggaggattcgtgaaggctctctgatgccagtcaaggggttagactttgccccgcaggtgcggcctccaggtttttaagcagacgcctgtggctctcacacgccctctcccaaggcggcgtctctgggagccctggcgttccctgggcccccgggaccgagagcttacccgcgtgggactgaactcgcccacgacccccgacaccaggcaagagaggttgtgccgcagaccctccactccccagcaccaggcgctcgccgtccaggtggaggggagcacacgtgggagccaggggcaccggcggagacacgagcgcagaaggcacgcgctcaagcccacgcccgcgactgccgggactgaaggtgttgcgagccccggctccacccctagcctgcggtgcgccgtgctttggccccgcaggccccgcccccggccccgccccggcgcgcgcccggcccgcctccctaggcgtggaggagggggggcggctcagccccgcgcccgtgcgcgcgctcgcggccgggttgcagggctgggcgcgcgccccgcgtcccgggcaggaagatggtggcgagcgcgcgagtgcagaagctggtgcggcgctacaagctggcgattgccacggcgctggccatcctgctgctgcagggcctggtagtgtggagcttcagcggcctggaggaggacgaggcgggcgaggtgctccgacggccgggcgggcgggcaggccgggcgcgggggcgcgcggggtcctggcggggctgcgggcggccccagccggggaagtggggcacgggccgcgtgcgtgcgtgcggggcgccggcggtcgcccagagcggagcatccggcccccggcactcccttccccagcaggcctagggagctgcgcgcgggggcagtgcgtgacctggagacccgggccctggtggattgggagtcgggcggggggagcaggtcatgctagggtggtctccggccaagggagcgatgaaggtcaggcgcggcgagcggggctgggaggcggggctgggcccgaacctgctcggaggtggggagccccaggccaaactttctgaagttgggagggggcggggatatgcgcgccgtgggcggaggagtagggccaagggactcagggcgtccttccccagctgagcccgaggggcagcggccggtgaggaaggggagctcgggggtggaattcaggcctgggacaaagtgtgtacccgggaactgaaggaacagggagtgacgccgaaggagagaactggagtattcccgaggtgtggcttcctcagccgggggtttgaagaacctggatgggtctccggagggcagggagaggaggaactgagctggtgagttggcctcaggaccttagggaattagggaggggccctctggctttaagggaatggggactgtaacagagccccagccgcagagcaggggcaaccaacagccgtctcagcccccaagtccctgcctcgagggtctttctccctcttccccgatgtggtttcagcgggaggctcagacacctcagcggtgtggtgagg

SEQ ID NO: 7362 - DNA, 6000 bp, Homo sapiens
caagactccaggaaaaggtctgtgtgggggtggggactgggaagaggagtgagctgagctggggataaaaacaaatctgaggctcatatgcagtctctcactcctcaacacaccctagcaagggaagtctgattgctatttctccatgaggcagcggggttcagagaggttaagtgaattgcccgtggtcacacagccaggagatggcagagctgagatttgaccctacgtctggccaacctccagcccacactactcctgtctcttctcagtgtggaggaaatggggcacgatgggaagaatcctgctcaaaaaatgacttgctggtgggcgcttttccaaagtagtcacattcacgttcatacaaatatgcacacgtgttccccgcatggcaaactcagaggcttagagaggcccccagcctcccacctggtgggccaccagcttttggccatagggaatggtggtgagaggagttcaatcacaggagaaggcatccctcagctccaggcgcttgtccaagagctggccaagggtagctctgcaatcactgtgggttcccaggctccacccttccgcagcataacgctgcccttgaaccccatggtacctgttcttttccccatcccgccttcttctctcttcctctcctctaaccctgccctacctaaacctcacccactttccaaacagctttcactcctatctccaccctagtccccacctgccacagcctggtgccccatggcctattttctcttcccttgggccagctgagcagcccgtggagtggggctggcaacagcagtgcaatgagggcatcagacaccaggtggcggcacagggcaccctcacctggtgccacctggtgcccctcctgcaaagggaccaagccagggagagggcaccaacaccgatggacaccttctagggacaggtgccctgtataacctcagaaggaggaagcaggcctgcagggcccagtgaaggactttgtgtatggagaagcccaaacaggaatccccgccatctgagtgctgagcccacggtgttcaatatcccttggctaaagctaggagactcagggctaatccaggacaatggttgccaggagggaaacgaactctcaaagcaagttgagttgtggcctggagtcccactccagggcacagcaaggcaggtcaaggaggcagctgctccagctaagccccaaaagggaattctgctaagaattttgaaactgtgtgtcttagccttggttccaggtgtgggatctgcgaactgtggcccacagagctaattaattcttcttgctttgaaaactccagaattgggcacagcagccagcactctcccctgcatgccaaatcagatcaagtgcaggttggcggcagaggggcagcctcactgagggccatgagtggggccagtggggccaccattaggctggggtctggaggaagcagaccccacttcaggggagaggacaagggggaggctggggcgtgggagctgcagcctggtttgggggtgctccaagcctccaaggagccgcaaggggctaaaaggaatcaggcagtgcttggaggggaagctttgctattccacaccctgcccctctgtcttgtcagttccaacctgcctctctcccttcggagcatttcctgtgcctgggtctccccattgcccccattctgctttcttctctctgctgtcatgcttgctctgagctgtaccttgcaattattttatctttccatctccttgccaggaaatccttgacgccgggttcccctgggacactcactgcgggggaggcaccgcacatgctccatccatcctgcctggagcagcagtcagttggggagggaggatggggcttgggccatgaaggctgggggaggtttggtccatttctctgctgcagcccaacccacaaggccgttactgcttctccggagcccttccagcaagaaccatcttggttctgaacactcaaaagcaaagtgggcagtgcccactgctgggactgtacttaatgccacagtggccttgttacctatgactccttcttaggaaatgaggtgtttgcttaatcagtcaacaacacttcctgaggaccaacttctccaggcactgtcctgggtgctgaggatacagtgataaacaaacttcagtccctaccctcaaggtgtccacagtcctctgggggaggtaagcaagacatcagtgattacaagtgggggaagcctcctagcccaggactgggttggggaggtccaaggaaggctttgacggggaggggggcttgagcgaactcttgaagaagtttgccacttgcagaaagggaggtagggtgtaggtaggagagtgcaccaagcagccttgaagacagatacaggaagtgcatcccgctcaaggagactgcgcagaaacagtctcctcggcagacgtggggcgcctcctgcgtgtgctgggataagctctgtggcgctgagcaagctgtagggtgtctcagggcctcagatttcttgctctggtgagaacaaccaaaacaataacatcctagaaatattgtggttattattcaagggctctgtgaaaggggacacacttcctgagtggcctggaggggtaaagccccaatacctcaagagagatgggggaaggtgaggatcgctaagggcccccaccacgccctcagagtgcccaacccagtgctatagccttgggaaagcaatagcgatagaaaagcctggggctgcaagggatggtgcttcagctccgatgctgaagccagaacccaagggtcctagcccaaaactagagctccagccagtgcactgcctggccaactgtggggctggaaagtcccggacggaagctcaggctagttctgggctctccatctcagaaaggaggtctgattggggagctcacctcccaaagggccctaaaggaaagtccccaggtctcctcaagcccagagcaatctggtgcctatgaccccacaagccctagaaaaggaatgggagaggagggagagttggaggaagccggtgggtagacaaggtcaaaacacaggggcagtgggtgctgatgaagccatgaccagggtcatggaaggggtggaggaaggttcccagctgcctaggccatagaagcctggcccaccagggctggaagagagcttagatatcaccctgtccacgtttctcaagaaatgaagtcccagaggcatcaaggagcttattgagatcacacagtgtataaaaggtatggagggggattggaggggactgagttagtccctgcccttggggacctctcagattagcagggaagacagactcttcataactaaatataatccaaggcacgccgtaacaaggtgtaaagctctgtaaagtattttgcccagagatgaaggtagggggacaggagagggagggtatgtgtggatgagtggaaaggaagagggcagacaaagaaggggctgaaagaacttgcccagtggaggggtagaagtccctggtctgactgcctgggaaaggggaatcttctccactcccacccctatcccatgcccagccagatcttggttctgatagcctatagccaaggagacttcccttctagtgacctcctggctgcccagagagataggaggtggcttgccccttctgcactcttactggctcccacccacacctgccgctgagcagccaaggaaggaaacaccttctcttgagaacaagggccagaaaaggggtcaccggggtgaaactggacagacctgtgggcaaaggcagggaagagaagggccagggaaagatttgccagggagaattccttctgagccccaacaagcggtgctgagttggcgtctgggattgtgttaaggaagacagggcaacagcgggattgagagatggagggatccccgcatctgaggggataccgggagaaggagagctgaggcaagcaggagaaggagagcactgacaagcccattttacagatcaggaatgtagagtttcagccttaggaggaggacgaggacgaggacactcacgtggggctcctcctggggcttcacctgtccttccccccccaaccctgatcaggctgaagcagagggaattcacacatgttgggtgcccactaagtgtgccaggaaatacgctttgcctaccctttccattcaatcctcagagaaccctgggaggaagattctcttctatgattgtctctattttacggatgtgaaagtagaggcccagagacgtgccgaggtgatgtggcaaggtcagggagccacagagcctaagagggcagcagtttaagaggacataagaggcccccgctggacgatgctgcggcccccacccccgcctcacgggtacacacccgcggagcacaccccgtgtgctccccgtgtggcgcctgccagtggtctctggaacctgatggggaagaggtcagcttcctgattgagcacagaagcccttcccattttacagatgaggaaactgacctccggagaggaacgtgaccttctcaaagattccttttttactaggaaagattgttaaatccctctccctacgtcccctactcaatgactcatcggccccacggacttgttcgggagtgggagcgcctgtgtatcccagttcccccttggaaatagactcgactcctggactgttagcctcggtatttagagagacatccccctggcttggcccaggggccgctcgcaggggctgtcgccgtgccaagggcccccccacctctgccccaaagtccctcccagggaggcgctgtcgcaacccgcgggacgggggcagggagaccggacccagaggcactggggtagggctcggcagggcgggtccgggcggagcgcggggtgcggagggcggaggcggctccggcgcccgctctgcccgccgctgggtccgaccgcgctcgccttccttgcagccgcgcctcggccccatggacgccctgtgcggttccggggagctcggctccaagttctgggtaaggcgcggggctccggggtcactgcgcgggggccagggtcggccggcttcgcccggtccccgccgcctgccttcccgcggggccggcaggtatcccgggacggagcccctgagacggcctgggcgcccgggagggggcgatgggctcgggagggaggttggctgcgccgcccggagccgggtcccacgcggtgtcggggacctgccctgctctgcccttcccggctgcagcactggggagcccgggaaagtgaggaagagtgcgcggctggggcgcaaaggcacagtgcgtggctgggtgagtcggctccatcccagcccctccgtcgggtgcggaaggggcgtttcgcaatcagccgcgggttcctgatggagggtcttccctcagcatctgcctcaggttaggactcggttgcccacctgggcatggattgcccccagggcatccagagcacctgctcaaccaggtgttttgggaggccggctgtgcagtgtcccacccttcttaggaaggtttcctgccaccttcttttctctaggtaagactgaggtctgagagcaggccatccccaccactccggactcagaagggagaagcagaccccagtctggagacaggtgcagggtgtcaggattcctgtagtccaactcccttctcacagatggagaaagggaggcccagagagaggaagggacttgcccaaagttacccagttcaatgaaggcagagctgggatagaaaaacaggctacaggccaggtgcagtggttcacgcctgtaatcccaccctttgggaggcagaggtgggaggatcacttcagcccaggagttttagattactgtgagctatgatcgcaccactgcactgtggcctgggcgaaagagtgagaccctgtctctaaaaaaataaataaataagaaaagaaaatcaagcctttggtgactctca

SEQ ID NO: 7363 - DNA, 6000 bp, Homo sapiens
cttgaacctgggaggtggagattgcagtgagctgagatcgcaccattacactccagcctgggcaacaagagcaagactccattgcaaaaaaataaaataaaataaaaatcacatccctggttcaagaactcaaagaagagaggtttaaagaagaaaagaaaaaagaagagagatccagactctctaagcaacaagaagggctggcagagacgttatctatgctggagtccctggaagaggccatgggagtcaccccatcacaaggagcttttccacaccagccaggcagccaagagccaagccctgctgctcccttccccaggagggcttgggtcttagggcagcgctgttctctcccctccactcaggcctccagagctgccaggccaggttctcccatgttgactccatccgagggtccctgaggccagtggatctaggggagcccctttttgtgttgaagtttccaccttccccttctgacactgcagccagctccttcatggttgattcctccaaatctaaagaatacaggagaccctggagcacatcagcaaagtctggattctctctcattagcagcaaaagaaatgccatactttagagcctcatcttttgctcaaactgaaacatcatcaaactgcatttctcaagacaatgctctgtaaatattatttatgtattaatctcctaggtgaacaatttctattttatcctctacaaaattattgcactttgaaaacagatttcatttatcaatactttcggtactcaactgcaatattttttctagagttatagtcccaacaattttaagtcataagttaaagcaccattttttggcttgagtatgtatttgttgaaaaatttggccgggcgtggtggctcacacctgtaatcccagcactttgggaggctgaggcaggcggatcatgaggtcaggagatcaggaccatcctcgctaacatggtgaaatcccgtctccactaaaaacacaaaaaaaattagccgggcgtggtggcgggcacctgtagtcccagctactcgggaggctgaggcaagagaatggcgtgaacctgggaggcggagcttgcagtgagccaagatcgcaccactgcactccagtctgggtgacagagcgagactccgtctcaaaaaaaaaaaaagaaaaagaaaaaatttatgcaaagggagatttattttgggataaagtaaaagggaatgtttaaagagaaatttctataatatttagattcaaatagtggatatttttcaaaaaacaaaattaataaattacatggagatggttttatttcactacaagagtgatgtagggagagatttctaagaagaaatccccttggacaacattggggaaccccacatcacttttccccatctcctctcaattagccaccacgcctggctaattttttttttgtatttatacatttttattttggtatgtaagagagatacctgacaaaagtaacctgaattaaactttccatttaaacttcctctgtgtctttatgttgagtcaggcactgtatttagataactgtaaattatttatcaagtatgaatggaggtcactcaccctaatagttaaacagactggatttacataaatgtggggcaatcttggtaggggtggtcagcaaggcctctgtcgggagggagcacctgggcaacgaagacatagggaagaactttgtaggaaaagggggtagaactgacaatagccctgaagggggcatgagtctggtgggcgtgaggaccatgcagaggccagagtggcctgaactcagtgaacgatggccagagtggtaaatgagtgaagggtaccaggggtctgagaatggaggggttttccccacagtaagagtttcatttcaatataaaagttcagaggcagcctgcagggaacatagtaaagcaggaagaccaggtgggaggctgtgacagtcattcaagggtgagaatggtgacagctggaccaggggagtagtggagggggggatggagagatgggctcgagtccaggacctgtgctgctgccagagaccgagagactcactgaggcctgcgggtgccagagaaaaggggagtcaggatgaggacaaggagtccactgtgagcatctccctgaggggtggtgtcctttgctggaacagagagggatggcaaaggacgggcatctggatgataaattggaataaatgtttgggaggagacttgggaacaggaccttttgacactagagtagaaataccaagtgctcagatggacataggtggagaacttggaggagcaatcacagcatcagcaaggaacgtggaggatcattggggcgtgaagttactattacacagaagtccaagtcctgggcagattccaaggggtgaatgaaatgagtctgctagtgaccagaaccctcctcaggtctcccagtagccacaataccacaaaaagcctcaagagtgacctccccaagtctgttcccattaggggacttgagttgtgcagaatccgtataagacagcctccaccaaacacgtgtctatgcaggtccacgtgccatgtacatacgtacgactgatgaagatcccctccttgaccaagctctagccaggcttccctgagcccccttttcaactaggcctccaccttggcctatgaaatctgcagacttcagcaaaaaggatcgggtccatccttccccctatatcaaaacgcttaaacacacagtttctttttctttctttttttttgagacggagtttcgctctgtcgccccggctggaatacattggtgcgatctcagctcactgcaacctccgcctcctgggttaagcaattctctgcctcaagcctcccaagtagctgggactacaggcactcaccacgatgcccagctaattttttgtatttttagtagagacggggtttcaccatcttgaccaggctgatcttgaattcctgaccccgtgatgcacctgcctcggcctcccaaagtgttggggttacaggcgtgagccacagcgcccggcctaaacacatagtttttaactgctcaaagctgcatccataggatgaccccagaccccctaaagtatcttcctgggaaagctgccaaaagaactcactgttggctattgccaacaccttacaagcagcccctgatgtccctttcttaaagagttaacaacaacaacaaaaaactaaacaattgtgaatccttcctctgtctctctgggatgtaatgtctcctacacatcaggagtatccttctcaagaacctgaaagccattcctccaacatgcaatcaccaggaagcaaagggcctatctcccagttactgtgggaggataggaccctgactcccataacagccatctaacaggcactgtcgcctaaccttacttacactgacccacccttcacaagtttcactttcctgactactgagttcctgctcatccccttcacattccctcctcctccctcttaaacacctagtcacttctgcacaaagttcagttccgttcacgaggtaccttcttccctattacaatagtatattattaaaatctgctttaccacttttactagtgtctagctttatcttctacagttaatacaaatatacgcacatacacatgcatatatatgcacacataataatatatacatacacacatacacgtatatatacatctatatgtgtattcttaatgaatgttatgtcttctctaatcgtttggaagatattatcaagtatttctttgcagttttcctatgatctctgcgtttcttttctgttcctttggtcccttgcttcggtgtgtgttttctttccatcttttatgctagaggaagtccgcaagcaacaagtggtcctcggctcccactcctatgtatgtatgtagtaggaaggaagccgctgagtgcagctgtgcgcgccggggcggtgcctgtgcctctctggattccgtgtttcttcgggggtgctgagcagcggtgcttccgcgtccgcgttctccgggtagctgatgtgctgcaggctgcagcccgcgtggtcgcggctcaggtccgtgttgggctggtaggactccagcggggagcgagcattcctccggaacctggggctggacgacagcagcaggaggcgtgctcccatctccggtagtccccggctcccgctgctcccctttctccccggcctcgggcgctggcgggcgcgggcgagggggtagcgcaggggaggcccgcccgccacggcagggggcggaaaccgcggccgggctcggggtcagcggcgacgagcgggcggctgccccgctcgccctcggcctccgcgcccgcccgccgctccgcagcggaggagccctcaggtttgcgttactgcggccgccacacctacctcagcccgccgcggccaggtcgggcggtgccgcgcaggccgcctccccccctcgcttcccagtcggcttacgcatccccggcggcggcggcgccggcatcggctagaggttcggctcaagtcgggggcactcgtgtctgcgccgagcggcgggcgtgagcgcggcccctgggccccgcgcggcgcggtgctgcgaggaggatcctcgtggccttgccccgccggcggctttccagaattttctacgattacgaagttttggcattcaaccctccatcctctcaaacgccccactgttactccgcccccttcccctaggccccgcccccagccgcagtgccctgcctcttccatccgtctccagcctcctccacggccccgccccctcaggccggtccgtctcccctcccacctcacacctccgccccgcccgtcagccctggctccgcccagccacggggctcgccgccacaggccccgcctccagctcgcggccccgcgcgccggatcggcgtgcgtgcggctggagccttaagcgtttcccccgcccggcttcatccctgctggcggcccagcgtcgttctcctcctgcgcgaggcggccaaggcctgctggcccggagccgcgcctccacccgcgcgaggtagggcttcgaggaccggcgcggcgcaggtctccggaggcctcccgagaggggctagggtcgccgggccgcgcgtgggagcgggtggggcccgggaggagacggcgccccggaggggagtgcgaggcctgggccgacggttacgggcgccgaccggcgttgcctggcctgaacgcccggcctttcggtggagggcagcttgcccctgtatgttgcgcccttccgtgggtcagaccggcggcaaggtgaggcggcggcggcagcagcagccgccttgggctcctggacgcgctcccgaggtggggcgggttggggagtggggattggagcgtgatggctggacgtcgccttctcggcgcggcaggtcccgggagacggggggacgaggcgcagtcccgccctcgggagagcggagccaccttcactgagggcgcccggtttggccccggaaaggcaggaagggggcggggaagggatggcgagctcggggtgcaccgcctgtttcttttctggttaggtatcgtccttggagaagatggaagcggagaggcggccggcgccgggctcgccctccgagggcctgtttgcggacgggcacctgatcttgtggacgctgtgctcggtcctgctgccggtgttcatcaccttctggtgtagcctccagcggtcgcgccggcagctgcaccgcagggacatcttccgcaagagcaagcacgggtggcgcgacacggacctgttcagccagcccacctactgctgcgtgtgcgcgcagcacattctgcagggcgccttctgcgactgctgcgggctccgcgtggacgagggctgcctcaggaaggccgacaagcgcttccagtgcaaggagattatgctcaagaatgacaccaaggtcctggacgccatgccccaccactggatccggggcaacgtg

SEQ ID NO: 7364 - DNA, 6000 bp, Homo sapiens
cgcacctggccacgtatcgagctaatttctaaaattttcttgtagatatacggtcttgctacattgcccatgctgctcttgaactcctagcctcaagagatcttcctgccttgcctctcaaagctctgggattatataggtatgagccactgcacccggctcattaactagctaactgttttttgtttttgttttttctttttttgagacagagtctcactttgttgcctgggctacagtgcagtggtgtgatgatagctcattacagcctcaacctcctgggctcaagcaatcctcccacctcagctctgcaagtagcaaggattaaaggcaagtaccagcctgtttagctaatttttaaaatttttgtagagatggggttttgccattttgtccaggctggtcttgaactcctgggctcaagcgatccttctgccttgggctctcaaagtgctgggattacatgcatgagaattaactaccttttaaaaagagactcacaaggtggcatttaccttgatggattttcccatggtcctgtgtcaagccctcacttagctttaaaacaggttcagaaacttcaccatgttcaagtcccagaactgaaagctgactcatactaaaaatattcacatgatgtacaagatacagaaaatgagagagggtaggttatgtaatttataatgataaaaatgtcattggtggaccagtgcctttcatcagtccgatcatggcttctctccttagtgagaatgatcagaaggctgctgggtgggtacagagtcagagtgaggggcttgggtcatagaatttaaatgaataatagcattgggttcagatctgactggtttgacttctcagagagcccagcttcttgattaaatgagattggacaccttcttcctttcacagacacttactacttcttctatttttatttttatttttatttttttggtctccttcgaatacttttattttttaccttcttattctgactgacatactcctttctggataaaatgttttgctctattcaccagattctaatttgttgttgttgttgttaaggtcaggattagagtctgatagaaatgatccataactaatctgtaccgaaaaaaatgccgtatttataagatcatgcaaatgatttcagggtgttgtggacaaccttgatgtcccaggttaaattcctatgcatcctaggttaaaattcctgccttaggcagaccttgcccatttttgagctgacaaagctgaagcctaacaaccttatcttattttcctcatggccaagttcttaggatcaccttccaccctcacctctcttctcattcctctactttctaatcttatattagggccaccgtggtgaccttggaactgttcagaccttgtggatacttcctcagccacaggtactgggttgaggtctaatggtgattgtagtcaatcctattttctcacctttccccctttgacttgtatcttgcactttctctagtattccagttaacacactcctcttttcttccctcattccttttttctggcaggctgtgcccatgtccccttgcatcgggtatgactgacatatttctctcattcaccgccggtctttgtccttctttctcataaccatattcatagccccatctcgctgttttactccttccatcttcctgtttttctttcctaccaatgcttccagggcttacatccctggacatcattttctcagtttctttctattcctacctccactactgctaagcattgccttttttttttttcctttttttttttttttttccccgagatggaatcttgctctgtcacccaggctggagtgcagtgatgcgatctcagctcactgcaacctctgacccccaggttcaagtgattctcctgcctcagcctcccgagtagctgggattacaggtgcacaacatgcctggctaacttttgtatttttagtagagacaggatttcaccatgttggccaggctagtcttgaactcctgacctcgtgatccaccggcctcagcctcccaaagtgctgtgattataggtgtgagccaccgtgcccggcctagcattgtctttaatatatctttttaaacatgattttcaaaccatatttgtatttcccattcagaccactcctctgagctccagacttgcatatccaacctaattactatttatactttgatgtcacaaaaacaatgggtcaaaaatgaaaccaacacttctctgccttcagatttctccttctcaggaaattgcaccccagttcacattgtaactcaagccagaagaatcatcattcattgcattcattgttcctttttctttaccaccaacaacatgagtaagtctgctcctctttcaaaatatatcttaagtccaaagcagtgtcttcatccccagagccataatccttagctcaaactagcatcatttcttacctgaaccacgtccagcatcctctttcactactctccctgattcgacactgatctctctctaatctgttcttcccacagcagctacagcttgcttttaaaaacagaaattatgtcactctctacttaaccctctttaatagcttcctattcattcacgaaacacatttttactgaacaccctctatgtaccaggccctcaaaaatccctgccctcatgaaataaatgaagtctagacaggggtaagggttatgaaggaaagatggggtgagggatggggagagagagagagagagagagtgtgtgtgtgtgtgtgtgtgtgtgtgtgtgtgtgtgtttacaatttaaaagagagtccaggccaggcacggtggctcacgtctgtaatcccagcactttgggaggccgaggcggacagatcacctaaggttaggagtatgagaccagcctgaccaacatggtgaaaccctgtctctactaaaaatacaaaaaattttagctgggcatggtgccacgtgcctgtagtgggactactctggcggctgagggaggagaatcgcttgaacctggtaggtggaggttgcagtgagctgagatcgcaccactgcactccagcctgggtgacagagactcctcaaaaaataaaaaataaaataaaacagagagtccagggaagacttcactgagtctgagtaggtgacctttgagcaaaggacttgaaagaggtgaagacagtgagctttgcagaatattccatgtggagggaggccctgaggtagagtcatgactggctttgggactgaacagaatagaataaaatccaagcttcactatttactatggcaaatactaagtatttactaaggcagcccaggcccctattcccccaaaaaacaaagacaagaaacgatcctctttatctcctttcctgacactccctccctcaatacataccatccacactggtcttccagtttaccagaagttgtttcctgctttttcctgtgttgtgcatctgctaggaatactcctccaacccttatgcccgtatacaatttgcaaggctggttccttctcatccaatgggtctcagtttaaatttcattttaggccttttctgaccacaggacctaaaacatttgggctctttttggccgggcgcggtggctcacgcctgtaatcccagcactttgggaggccaaggcgggcggatcacgacgtcaggagatcgaaaccatcctagctaacacggtgaaaccccatctctactaaaaatacaaaaaattagccgggcgtggtggcaggcgcctgtagtcccagctactcgggaggctgaggcaggagaatggcgtgaacctgggaggcggagcttgcagtgagccgagatcgtgccactgcactccagcctgggcgacagagcaagactccgtctcacaaaaaaaaaaaaataaaaaatagggctctttttctttctttcctatgtcagtttcctatttgtttccttcctgacatctaccacaccatgcaattgggattcatatatatatgaatttgacttaaatctcattaggtatagtaaatggcatctgtcatttaaacttgcatttgatcactagtgaagattaagcattttcccaagtaattgttagttcttagcatgatctattttctatattttggccaaacaaatgttcatttaaagtcactttgttttaaggatgacagcagggctggacagccaaaaccctaccctctccatttattttggaggaatttattttcccaaggtcctggcagagatagtgactcaccgtgactatctctgcaaaaatcattccaaaacccacaccaattcagagaaaagtgcttcatttcgataacatcgacttgtgaaaacgagcaagaaagttgcatttgagtggtaccaggtttcaccattatgcagttatcgagcaattattaatggccaacccaattatacgctacaaggaaatgacggtcacagggaagctcaaagccccgaagcgagggaagccctgctcctcaccggcccctccgccttttccagggcgctctccgtcccgaggcaggagatggcctggttgacccttcgagacaaggcggcaaaaccggtgctgggcttgcggggcagggaatcaaggttcctccggttgctgtaccgtcccgcccggcccctctcccgggcaccggagagatgacggctctctcgcgagagcgcgagcaagacccggctccgggcggcggcgggatgttagcccagcgctgtagaccgcgccccctctggcgcagctgggagaggcgcggcggaggcactgccgggagcggccggcggcgcgcacgcgcaggtgagcggggcgggctcgggagcgcgcgggcacaagggcgaggggcggggcctgcgtcgcgctgcgggcacgtcgccgcgcgtcttcagtatttaatgtctctgtgttccacccgcctgggctagcacgtgggggagctgcggaagcgcggcgctgcgggccgggccgcggggcacagccgggggccggcggcggcgcgcggactccgcatcccgcaccccgatggtagccgaggagctggtaggtcgggggcagctgcgccggggaccccctgccggagacccgaaggcggcggggtcggggcgatggggagcctgaggtgcaggtgcagggtgcgacgcgccctccaggtaccccgggggcgggacgctccggacgcagaggtgtcctgggggctctcggccgccgcgcgctgtcaggcaggcccatctttccctccctcgtctgcgccccctctcgtccttccccgccggttgtctgcccgcgggctcctgacagatcgcgtgtgcgcggctctgggcggcgctctgcggccgcgccgtcctccccacgcgcgtcactgtcctcgggggcggggggcgagggcgcgacgcccgggtcgcctctctgcacctcaacttaaccggagcgtgcacacccgcctgcgaggctgacccgagcgcgtcccacccaaggtcgcccagccccgcgggcgtttacttttcaaaggtcgtgtgtacacagtctgagccggagctgccccttcacttctggagcctcgcccaacttctcaccctcggctcgcccgccggcgcagcccctgggagttccgtgcggcgagccaggggaactgggaagatgggccgggacatcggccggttgtgatccaaccgtgtttcgggctgagggaccgttcgaaccgaattggggtctggaggtcggaggctcaggggcgtctcggggggaatttgcattcgtagcccctgcaggcgtgtccggaggggtggaggccgtccagcctggggtgtctgccgacctcacgcccgggggccccgacggtcacgtgtccggccccgcctgcggcccagggcccggggtctgcgatctggagggaccgcgccagttttggggttacgatgtgctaggagaggcagtggctggatgcctcgaacgcgggctttct

SEQ ID NO: 7365 - DNA, 6000 bp, Homo sapiens
ggtgcgagccaccgccaagccacccgcgagcctgttttcttaatgttgtcacaatgttaattaaggaaggaccattcctttccccaccaaagttgctcgtgtggctcttcttctccccaacccaattccccctcatcaccctctttaggggatccctccaccacaaaaccagaatgtaaatgaacacacttgcaaaatctgacctcgctctgatcccagtgtcctgctggtgtgagcctgggctgttgtggccaagatgctgagaggggaggggacgaccacgggggagtattcctgagttttctgcaggagaggaacagaacatatgtcacctctatcactgggtttttccacacgtattactgctattgttatttcaaaatgttcggggccagaagtttctgccaactcctgtaccaaaaaggctcctgtccttccctagtgacagtctccagctctctctgccggccccctccctcccctccctcccctcccccagattctctgcacagtccagagaaatagggcaggcatagagggtgggaagagggcacgcagcctccacaggtgctggcaggaaaggagttttttcgtctttgctggaatacagcagagatccaggctggggagaggtggagcccaggctattgactaacccttcttttgtgtggatttaatctcactctctgggaacacaaaagctggaatctctgcaaacctttccctgaataatctgcgagtcagcggagaatctgcgggtgaggaaagccagggcagatggaggctgggactcccagcgggagggaagtatgtggtgttgggaggaggtgagatggcacagaaagagcactgggaagtggagcaggagaccaaagttctaatcccacctgtactcctctctccttgctgtgaatttgggcaaaccactgccctctctgagccgcagcttcctcttctgtaactcatagaagtaacagaggatccctacctgcttctggggtcgagtgaccctctctgagaatgttccccagtctataaaattaagatcttgatatctatcccgcaccaaaggaaagatcagtccaaccttccaatcctaacagacaagccctgtctggtcccaaacccctctccagcctcacctccatgccttttctcattctgtttccttcacctgcatctcccttccctttttaagttaaagtctacttttctttgaagactcagtgcgggtctgatctcttgagggaggcttccccagtctctttcctacaggctgggttaggggctgctcctctgggctcctgtgctgttctgggcataaggccactgtggccttaacaactaagaattacagctgaggtttactgagcactcagtaagtgtccagacaggcccttcacccagcattaccttgtggaattttaaccacgctcttgtgaaggtattgctggttttctttttttctttttttttttttctttttgagatagagtcttgctctattgcccaggctggagtgcagtgacacaatctcagctcactacaacctctgcctcctgggttcaagtgattctcctgcctccacttcccatgtagctgggattacaggcacccgccaccacacctggctaatttttgtgtttttagtgagacgggggtttctccatcttggccaggctggtctcgaactcctgacctcaagtgatctgcccacctcggcctcccaaagtgttgagattacaggcatgagccactgtgcccggcagctgctgtttttatttctgctgtgttttttgttattttggtttttttttaaaatcatggtcgaaggctggtgattttcctgatcaggacactgagcctgacgggggtgaaagctgagtgtcgggtctgggatgtagaccccgggcagtgtggctcctactcctattctgaccctctgcctgatattctctctgccctcctgcgacgctgagcataaggtatgataggtttctgtttagggcaatgtatttgaccttcccctgagctgtgaacccaggggtgcagggtctcagctccctttgtgcctccactccatggctctcacagttccagcgggagctgcatctgaacctcatgttcccaggtttacagtcagggctctcctccttgcccttgggagcccaggaagagcctggatgtgccagggcccctctccagtgctaactcaatgttccatcccacccaatgctgcctccacacctgcctagggtcagatttaatccagctaaggggactctgcttagaggtcatggccacatgtgccaatgtgccaagccgtgggcccagcctcctcagactttagctcactgaggcctcagggcaatctttgagagagattgggggatgatttccatttcatagatgaggaaaactgaggctcagctgccatcacagagcaagtggatggagccagaagtgactccagggttatgtgtctcaaagccccttagctttcccatggcctcccttctgttcctgacagggccatgcgtgcaaacatccccagaggacaagagtgtgattaatctttgcatccgccatgggccagtggctacacccaggcactgagaggccggttgtgagagtctgggctgggcaggccctggttcacagcagactccaaataactgtttattggtggaggtcagccgggcagggattaccatctccagtttatagatgaggaagttgcaatcagccgggtgcaggaaagttgcccaaggtcatccgtgagtcagaagaagagcaaagacttgaactcagaacactgggggcctctgcagagtaagaggaaggaggctggggctgctgggctgggctctcccactcaggtggcctgggctggcagctttatgggccctgtaagtcgctgggacatgtcagcactcattccagctctaacgaccctaaatcaggccttgtcccctacaggtaagcagggccccaggtagtctaaatagtgacaggtgactggtttatggcaggccaggactggggtcagggctggagataaggctgagaatgttaagaccaggaacaggaagagagggccactcaccctgtgtaaccttgaagttagagatggcagatggagcaggaaccagtccaccaccccatcgccaatgtgcaggctctgtggtgcccataattaagatgcacccataagagagtgtatagctttacccctcccgcattcctcagaggggatgccctaccagggactcgttctcctcacccatctttatggtcccaaaatgcacccagggcccccctctctcctggggggcctgaatgcaatgaactttaaagtggatcattgatcaacagtcccttaaccccaccaaagtttcccaagcctctcccctgctcatcagggggctggccagaggtcacagggactccctgggggtggtttttattcccaggaacaggcttcctcagtcctgaaagggacatttttatagccctgtgaacacaaatgcactccccagaataggctctgggtgtggaatccctcctgtggctgtcatggtcgcaggctggtgattacattatacagtggtgttgacaatagagccctaagcctggcatggacaccccctcacctccctcctgcctctctgtaggatcaaagctgctctgtgaggctgtgtgatcctgggccaggagcggggagtcagcctcaaccctaagcaaggaggaagcatctttgcctgaatccttctgggggaggcaatcccccttcagaagtccctagcccaggttcgaaggtcggtagggactgagaggttggcagcggatggggagtggctaaaccagaaaaagggggcttcctgttgatggattgatggaggaggtccaggtccactgcctggttccccgtccctctcccgcaccccagcctgagcttcccaaactcccacagaagcccccaccccatgtgggacacagaggacctgcagtagcaggagggcacagctaagagaggagacaagaggcagcttgggggcatgggggggaccccatttccccaaatgttggagccgcccttaagggaacttcccctggactcctctggaggtcttgccagatgggagaaccaggggtccattcagaccccagtctcttctcttcccatctcatctctccacctggggggctcaaagaacctagctcctcccctttgaccccatcagcttctccctcaccgaatcctcttacaatccatttcttaattctgccccatcaaccctccctggtcatcacataaacaccagcaagggcagtagtttagggacagctttgctctgtattcgaagaaaggtctttggtctgcttagaaattaagtttggagcagcctgggaggaaatagaagagatgagacccagagaatcaatggccactgccaaagagagataggagagcctttctgcggccactgattcaacaaacggcatcacacgcccctcagcctctcatctcttcgaggccatctccacccccacccccacccccaccccaaggccattccaaggtcccattcaagaccactgcgcaggggtggcgccagaatgatcaaagtcatcatggggcactcatctttgtgtgggtcaagcactttgtggtgtcgtgtccctgttcccaaaccagggaccaggagtaggatgggggaggggcagggcgccgctgctgagtggagaggacgcggagtgggtgagggggccttgcgcacagggcaagaggtggccaggcagggcgggggaccggggagagcggaggatttcagatgagggacaggggaaggtggagaggggagggcaggccccgccagggggaggagccgcctcccgcgtccagctgtcggggctccctcccgtcgcggctccgctataaaacccaggccggcaggatcgctgcacccgcggcggcctcctcggtgcgcgacccccggctcagaggactctttgctgtcccgcaagatgcggatgctgctggcgctcctggccctctccgcggcgcggccatcggccagtgcaggtgagctcccgggctccggccccaggtgcccctcggcggtcccctccgtgcccccagctcccgcccctgcagaggatccccccgcgggcgaccggtgagcgtcggtggcgctggggtcccgggttgcgtgtgcgccgggggccgcgagggtgcgggaggactgggcagcgcgcgagcttgtgtgtgcacacgcgtgtcagcaccggctgggggagcgtgtgcacgggtgtgcgcggtgagggtgtgtgcgcgtggcccggcgagacgagttgggagtccctgataaggatgcgtctcaggccgggcgcgggtgctccagcctgaaatgccagcacgttgggaggcagaggcgggtggatcacctgagcccaggagttcgagaccagcatggccaacatggtgaaatcccatctctaccaaaaatacaaacattagccggacgtggtggcacacgcctgtaatcccagctactcgggaggctgaggcccgagaatcgcttgaacccaggaggtggaggttgcagtgagatcacgccactgcactccagcctggtgctccgtttaaaaaaaaaaaaaaaaaaaaaaaaaaaaaaaaaaaaggatgcttctcggacccgcctcaacgcacgccttcttttctcacccagcctcctccgtctgcccgtgggtttccgtccgtcccgctgggactcagcgctgggtgactgccccgcggccagagcaagggcggtctggcagggtcctggaagccgcgcttcccacacgggttccttgcccctgagggtcgcaagctcccctggcctccctaacctccagcgctgaattgggagcctggcgggggcggggggtgggggacccggagccccaaggcctctgcggagccggtctttccggacagggtgattttcgtttaaa

SEQ ID NO: 7366 - DNA, 6000 bp, Homo sapiens
ctgagtagttgggactacaggcgcccgccaccacacccggctaatttttgtatttttagtagagaaggggtttcaccatattggccaggctggtctcaaactcctgaccttgtgatccgcccgtctcagcctcccaaagtgctgggatgacaggcgtgagccaccgcacccggcccaagtctttctttatagcctcctaccctaccaagccatccagttgcattttccctccctgtcttgagttcttctttcctaagcttctgttgtagacctggcctgctggagtgctctgctcccctgggaaccctctggctggagaggctcctgagccacagaaccagagaagaggagagtaatgccagaggatccctaagcacagtgagtaatgacaccaaaacttacacctcacagggcacctgagactcagggaagggaaatgacttgctcgaggacatgtggctagtgaatggcagagccggaactccactcacctccactccccaggcctggactcaccccactgccccatgccgagctgtttatggacacacatttattagccaaagtgagcatgcttcttattagattactttacactttagggtaccatttttgtacacaattaaatatggagatgttcagaaaatgcagggatgttgtattgttttcccaggcaaagtaaaactcaatgttacaatccgataaaactgatatgtgcagatttcatgggcagggtagggtgggagggtaggggagagacaggcagggtgaagggtaaggaccctgatgtccaaatggcaaaggaagatgggagatggaggagaccacattccctgaacatccccattcatccagcggccatgccattgctttacacttaacatttaactcccaaggtaggaaacatctcaagttgccccatttacaagtaagaattattgtgagctcagagttaaagcattaataacttgctgcaggttacaaagctgggaaatggcgaagtcaggatttgaactcaggtttctctggatccaaagtctgtactccttccactaaactgtttgattgattgattgattaaagacaggatctcgctctgttgctcaggctggagtccagtggtgattatagattcactccagtctcaaatcccggggctcaagtacttcccctgtcttagcctcccaagtagctaggactacaggtgcataccaccatgaccacgcccagctaattttaaaaatttttgtagaagtgtggtcttgctatgttgcccaggctgattgttaactcctggcctcaagtgatcctcccaccttggcttcccaaagagctgggattacaagacctgaaccgccacacctggcgtaaactggttttgatgaaattagcagacccacagggggtgatgctaatacaggattagaccattctctcattgctataaagaaatacctgagaccaggccgggtgtggtggctcacacctgtaatcccagcactttaggaggctgaagcaggtggatcacctgaggtcaggagtttgagaccagcctggctaacatggtgaaacccctctctactaattagctgggcatggtggcacgtgcctgtaatcccagctactcaggaggctgaggcaggagaatcgcttggacctaggaggtggaggttgcagtgagccaagattgcaccactgcactccagcctgggcaatggagtgagacttgatctcaaaaaaaaaaaaaaagaaaagaaatatctgaggctgggtaattataaagaaaagaggtttaatttgctcatggttccacaggttgtacaggaagcatgatgctggcatctgctcagcttctagggaggcctcaggaaacttaaaatcatggcggaagggatgcagcagttcacatggctggagcaggagcgagacagagagtggagaggtgctgcacacttttaaatgaccagttctcgtgagaactcactgtcatgagaacagcatcaagaggatggtgctaaaccattcatgagaaatccacccccgtgatccaatcacctcccaccagggcccacctccaacactggggattacaatttgacatgagatttgggcggggacacagatcccaaaccatatcaccctcagtacctgttgctggctgacagttggtcagtgtctaggggagaaccattctcagcttcagttccacgatagcgaataccatcttggcaaaaatcccctggacaagtcagagacctcactaagtctccagcatctagcctgatgcctgacacatactgaccctcaataaacggctgttcaactgtgggcacaggaatggtgaggaggctgtgggcacagaggacgctggcccttctttggaagcagatgaaggtctgggtgttgatgaggggttcctcgaaagtcccatgctgctcacaacacccaacactcctacagactgtgaccatgttctgttgacaactgagcctgcacaggatctttatgcagtagggaaccggcccggattctccacagggagaatctcccagatgtttccccgctttctgccccaaagtcaagatcaaaagcagttggcagctgcagacatcagcagaagtcagtggaacacagtgtggaaccatgtcgcgctggaggaggaagtctcgcgctggaggaggaagtctcacccttgacagagactagaactgggccttagaagcttgaaccaacctctgtccctgcgagagcagcacacttttgtgctcctcagcccttgcgtcttctttgcctggaatatggcaaaacgtttattttcccccactaaatgaggctcctctagggctgcaactgtgtttgcccatctctctttctctagcagctagcacagggctagcagtcggtgcttgttgagccggtgggtgaagagacgagagcacacctcctgtgtgcccggcatggcgggacctggtgccggcaagtggtgggctctctggcctcatgctctgcgctggtgatgtcaaggggtgggcttctgtcctgccactgatagtaggagggaaggccagcaggaaacgccgaaacctactcaagctgctggagaagggggaatccagccctgtttcaggggaaggagtatcctgtgttctgagagcgagagagcagcttagccggcaaatccttaaatccttcagagattacaggattgtgcaagagggaaggccaagagggggacctctgaggcagctccagcatggcctgttgtgtgcagaggactgagatcccagaacatgccacaccaagaagacatgtcccaaggggcagtggagccacagccaccagaagggacctggccctgtcggacctgctgaagctagccgtggagtgcaggggctttgttggtctggctgctaaccaaagggtggctaatgggaccctttccaggggcctctaggggatttcagtgggggcttgcttcgaggctctattaccactggactgtttaccaagagcctcagcctgacagagatgggaagagacgagtgagcatttctgacccaacacccccactgcagagttggggaaacatttacccaagataggaggaataaaaaggaaaaaaattgaatttatttccaaaaaacataccaaggtggacaagataggaaacaatacaatttatattacagttttattattatttaaaaattttatattaacaaaatgagatgggatctgcctatgttgcccaggctggtcttcaactcctgggctcaatctcctcggcctccgaaagtgtgattacaggcgtgagccaccgcacccggcccatattacagtttcatagtgtttttgattactcgtggtaggagaaatgtgtcttctttgcacttggggtctcaacgtctcagtcctgccctatgccccgagaccccaagaggctttcccaaggtcaggcagggaatccgcagagaggcagggctggactccagcatcctgactccccagttcgtgctctgtgctgcagagacctgttgcgtaacactgagtaactgtggattgtctaaccttttatgaaatttccagctggtcttttgctaccggccagcagtccagttggtgggagtgatgatgccggtcttctgagacgtccagtggacagattttccccaggtttctggatgcagccccaacaagcaaaagtgctacactcctgcaccgggaacactgacacaggggtcacgaaaatgctaaaacaagacgtgcaagaattgttgcgctccgcacacgtaacaagggctctgcctccccctcccccaatcttcgccctggtggccaggccctgggctccgccccttccccaccagaccgggggaggggtcctcctcggcatggaggtaggggatgctaggctgctggagacgcccgcagaaagaggcgggatggcggggcggatgctggcggcccgggtctggccacctgggtcagctgcacgcccccgccccgggctggccggacctcgtagcccaggtcccaccacgccgtgaagtttgcggaaagttttgcagttgcttccccgcccgcgccagcgggggagttgtgacgcagcgtctggggatcctggccgggacagaagagagggaaggcgaggcggggagagactgggaaacagagcagcaagagaaagggcgcacgctggggtcctcctggacccggcgtgtcctcctctccgccacccctttctctccctcccgacgctctagccccagacccgcgcctcctccccttcccctcccacgctgcccacttcccttcccctctacccctcgaaccctcctccccggttctgcgctcctccctccgccctccctccgcccgggctgcctcctccctcctcctccccgggaggcatcacttcgtcccgacccggaggaggacgcgagccccttgcgggcggtcatcacagcccagcctcggggctgccacagcgcgttgcgcctgtgcgccctcggtccccgcgtccactgagcgccgcgctcggggatggggcccggccggccggcccccgcgccctggcctcgtcacctgctgcgctgcgtcctgctcctcgggtgcctgcacctcggccgtcccggcgcccctggggacgccgccctcccgggtaaggcgctgccaacttggccaacttcagggcccgggcggggggagcgccgaggcgcgggccgctctcgacttttccctccttttcccccctcttttctccagaagcgtgtgtgcgtgtgtgtgtgactgggtttttaaaactcgtctccgcttttctgaaagcgggggaggagaggggaggaggagcgcgcctagaggtgggggaggacctgagtggaaccagatgtggcgggcggcgggggaggggagcccgggggactccagcagcctaggaggaagcgggtgggctcttgaggacccccgcgcaccgcgctcccggaccacccggcgccggcccgtcctcggcaggggacctgcagggcgcgcccggggagccagggctctctgtccgggagttcccgggcccagtctcctcgctctgccccaggactgatgcgttaggacggctttccaactatccgcgagggttcgtttcccccaccttccccccgccccctgcatctcgtgggcgttgatattttcttttccacacttagtcttcaaggaggcttgtggcgcgcggcatccgccccgcgtgagctcggcagccctgtgaggaggctcctgccactgggacgcagcaacaggctgggcgccgccgtgctgtgatgttgcgtagcgtgggcagctctgggcacactagtggccctccagaggggacagaccttgagcggcaaaagagctgctaaagattttaaaacccaacgaacaggaaacaaaacaaaaatcagaaaaccccaaaactgtgccattctcttcctgctccttattcaggggtaacagtgaagtgtggggaca

SEQ ID NO: 7367 - DNA, 6000 bp, Homo sapiens
acgctgcgggcatcccgctgaaaccgctgtacgaggatttcactgccctcagcaatgaagcctacaagcaggacggtgagcaggcctctccctgtccaggaaccacgccaggtgtcctctctcagctgtctccccagagtcccagcccagagtcaggcagagcagctggtatgacaattccagcaggccctgagtttcccagaaagtggaggtgggaccggcctgcacccagtgtgcctggactttgctgctggcctgccccacgtggccatcctgctgtcactcctggccctgatgctcctctttgcctctgggaacctccaggatctgtttagctggctgtagctaattagaaattgtagagtggcaacccccaagccaattttccagctagctgcagatccacgggcctcgagccagtggaagagccgacttacagctgagaggctgaggtccgagcctttggcctgagctacatacctcacccccacgcccccaggcttcacagacacgggggcctactggcgctcctggtacaactcccccaccttcgaggacgatctggaacacctctaccaacagctagagcccctctacctgaacctccatgccttcgtccgccgcgcactgcatcgccgatacggagacagatacatcaacctcaggggacccatccctgctcatctgctgggtaaggacctggcctcgcctccacatgagtcccacggaagtgtgggtcccgaggtaggggtgggggatgtccagggtaagggaaggtgggttgtgaccctcacatctcacatgtgtggggcatcatactgtttgcttcacatgcaggagaccattcgtgttcccactttacaggtggggaccctgaggcttagggtcgtgagggacttagtggtcagagagctaggggccaaaccaaaggctctggccctgggtccagtgggggagccatcagcctagctcatgcccaaggaaacaagcactgtggccctgcctcaggattgagtggctggggcctggcacagccagaaatgacagtggcagcatcttgcagccccaggacatgtggccctcggaggagtgtgggtgggactgatgtgtgagatttctggccctaagccaggcctgcagcccttgagggccccagggtacaggtgccggccccagggtgccactcagcgatgcatgaagaagcaggcacagccaggcagggagccaagctgtccccttccttccttatctaggagacatgtgggcccagagctgggaaaacatctacgacatggtggtgcctttcccagacaagcccaacctcgatgtcaccagtactatgctgcagcaggtaagctctgggctcaagcctggggtggtgggggtcgggggtggggcgcaaaaaaagggagtcacagatgggcacaggggcgggaaggtttcgggtactgagcagcagcctggtgtgtctgtaggagcagtgagctggggtcggccccctcagtgaggtgccagctcctccctccaggctccacagtggcaggatgagagcaacaacgcactttcactcatctgctgtgggagtgagggccctgcctctgggaatggtggccacagagcagagaagctttcatgcacagggagttgacccgagatggggaccccagccctgtccccaggccagccagagtgggctccccctgacctggctccacacccctcctccagggctggaacgccacgcacatgttccgggtggcagaggagttcttcacctccctggagctctcccccatgcctcccgagttctgggaagggtcgatgctggagaagccggccgacgggcgggaagtggtgtgccacgcctcggcttgggacttctacaacaggaaagacttcaggttcagacatgggaagagcacgttctggggttccccggttctggggcccggggaaaggcaggcagcccaggcgcagggaagctggttcccaggcctgcctctaccctaccccagcactggttggaggctgggtctgttccagggctagggggtataggaggcctattagtccaccttctctggcagctttgacaaatagtcacttctataccttggaatggaggaagaaggcccaagtggtggtgagccagggcagggtaaagaatttgcttgtttctgccaggcacggtggtcacacctgtaatcccagcactttgggaggtcaaggcgggtggatcacctgaggccaggagttcgagaccagcctggccaacatggcgaaaccccgtctctactaaaaatacaaaaataaattagccaggggtgatggcgggcgcctgtaatcccagctactcaggaggctgaggcaggagaatctcttgaacccgggaggcggaggttgcagtgagctgagattgtgccactacaggccagcctgtgcaaaagagtgagacgctgtctcaaaaaaaaaaaagaaaaaaagaagttacttgtttctactgcggcttcatgccccagggcagctccctcctcattcctgtctttcaggtgccaatctgccctgtgccctggccctgccctgttctgtccatccgtcactctcaccctcgccctctctacgccccaggatcaagcagtgcacacgggtcacgatggaccagctctccacagtgcaccatgagatgggccatatacagtactacctgcagtacaaggatctgcccgtctccctgcgtcggggggccaaccccggcttccatgaggccattggggacgtgctggcgctctcggtctccactcctgaacatctgcacaaaatcggcctgctggaccgtgtcaccaatgacacgggtatgggagggctgagaggcccccacccagcctcacctaaaccccgctccaccccacagcaggacctcacttgccccactcagctctgcccttctttctgcctcccggccccaggtcaggcagggttcgggatcctcctagagcctcacggtgcacactgcgcccagctcagcacacctgggggtcctcttccaagcagggcccagggtctcgagggccagccataccttctctgcatctccctggcctcactttctgctgccccgccagcccacactcttaggggaccctcttctccctctgacctcttccctctcctttcatctcatctcccaacagaaagtgacatcaattacttgctaaaaatggcactggaaaaaattgccttcctgccctttggctacttggtggaccagtggcgctggggggtctttagtgggcgtacccccccttcccgctacaacttcgactggtggtatcttcggtgagaggagggatagaaaagccttcgccccagctagccctccccagcctcctggacagccaggcgcctcctgccccagccagttctagcctctcctctctaatgatgtcccccgctgtgacccaccgccttctcctttcctgcctgaaactccctcttccaggaagtcttccccagttcctcaggatggggaagggttgccgggtggaaatgccttttctacaaaagttaaatccatctgtttgcaacctctaggccctaagacaatttaaccatccttttccagaaccaagtatcaggggatctgtcctcctgttacccgaaacgaaacccactttgatgctggagctaagtttcatgttccaaatgtgacaccatacatcaggtattagcgcccccaccccacccacccccagtactgtcacaccctcaatccacttctcctcctgtgatcctagctgcctcatccccagggcttgtccccatgctcctccagacctcaaaggcctggagttagagtggcccactctcctgagcctgtcttgggtctcccttctcccccaagatagcttctggtccagcctctgccctgcaggaagctggatggtgcctgggtaaggaacccctgttcctggccccccatgatcttccctgactcccaccctgtgcctgcaggtactttgtgagttttgtcctgcagttccagttccatgaagccctgtgcaaggaggcaggctatgagggcccactgcaccagtgtgacatctaccggtccaccaaggcaggggccaagctccggtgtgtggtgggaagccgggggaagtgggaggcagagaggagcggctggcaaagggtgtggcaggaggtgtctggctgctctgatggggtggggggcaccaaccacagagctggactgatgtggatgcctgtctcctcgctatgtcatcaaatatttattgagtgggccttctggctggcatggggcgacacaaatgccccctgccaccatcagagagatcccaggccccagggtcttattgccacagtttctgcagtccattggggggcggaagtggccaggggcatgtgggccggggtccaggagcagactccagcctgagtcccctgtgcccatggtacccactctgcccaccaggaaggtgctgcaggctggctcctccaggccctggcaggaggtgctgaaggacatggtcggcttagatgccctggatgcccagccgctgctcaagtacttccagccagtcacccagtggctgcaggagcagaaccagcagaacggcgaggtcctgggctggcccgagtaccagtggcacccgccgttgcctgacaactacccggagggcataggtaaagccctgagtgaggatggtgtggggctaaggtgggtcctcaactctgggcttggcccaggccccaggttcctggtcagctcctaccagctgagccctggtaccctgtcctggagggccaggcagccccccaagctcatcagcagggcctgcgagtggggacaggcatgtctttcccccagcatcctagagagggtgtgctcagacctgagggcccctccccttccagaggaagccagacacaaggctctgtgaggtcacactgcgggctccgctcttattggccaggggacggtagctgcaggactctgctctcctgcggccatgggccagggttgggctactgcaggacttcccagcctcctcttcctgctgctctgctacgggcaccctctgctggtccccagccaggaggcatcccaacaggtgacagtcacccatgggacaagcagccaggcaacaaccagcagccagacaaccacccaccaggcgacggcccaccagacatcagcccagagcccaagtgggaccatgcaggggaggggcagggtgccaggggtgggagaggcggggccgggtagggacagggcagggtacaagggagtgcgagagggataatggcttctggtgagaccacaaacctggagaggggaggcagaggtttgtctgtttccctgcactctgtcccacagacctggtgactgatgaggctgaggccagcaagtttgtggaggaatatgaccggacatcccaggtggtgtggaacgagtatgccgaggccaactggaactacaacaccaacatcaccacagagaccagcaagattctggtgggagccacctccccacccccaaacctgagcatgtgcatacacacagagatgctgtcccgctcaccacacagtggggctgccaccacattttaaattgaatatttaaaacaatactcaatttcgggccgggcgcggtggctcacgcctgtaatcccagcactttgggagggggaggcgggcggatcacgaggtcagatcaagaccatcctggctaacacggtgaaaccccatctctagtaaaaatacaaaaattagccgggtgtggtggcgagcacctgtagtcccagtactcaggaggctgaggcaggagaatggcatgaacccgggaggcagagcttgcagtgagccgagatggcaccactgcactccagcctgggcgacagagcgagactccatcaaaaaaaaaaaaaaaaaaaactcaatttcagattttgatgaacatttactcaatgcctgagcaat

SEQ ID NO: 7368 - DNA, 6000 bp, Homo sapiens
aggtggtgtgcggagcacctcccatgctcatgatgtttctaatcctcccaaaccctccctgaaaccagaaaggggtgaagagctgccactatctaccaacaccgagcacctcacgggaaacagtgtctcaggactttatgcctatttgagtccaggagaataataatcatcacagtattaccagtagtactaggaatcatcatcatcatcagtagttaacgtgtattgcctgcatgctatgctcccagcaccgtgtttatttaatcattacaatggctcttcgaggtagataccattatcatctccgttttatggatatggaaactgaggctcagaaaggttacttgcccaaggccccacagctactaaatggcagagctgagattcaaacccagattaatcttctttcaaacttgtgattgtatccactatgccaagctctgcgggaaagttctggctggccaatcgctggggctgggattgggtgcactgggggtctcagctgcaccagctgatgccctcacacagcctcacagctgcacccactcccctagggatgctctaaagctgggctcaagcaagccctggccagaggtcctaaagatgctgactggggagtctgaggtgtctacaaatgtcttcatgacctacttcaaacccctactgacctggctggtgacagaacatgcagcaaggggacatcttaggctggccagacttcagctgttcctttgaaggtttgataatctgaccctggttccagctctgggccagccccaggctccaccttaccctgctctgtcctagtacctacccctacccagccttaacccctggctcattcatgacctggcttgaatcaacagcactgctgctgtgggaccctgtctgtaccaggcctgatgcagcttcagccaagaccaccgctcccaccacagcccctggctcagttgcttccttgcacactgtccagctaggttgccaggctgacatctgagcaaaggatcagcatcttgcctctggtcccttgcatgcaggggcatgtagtccaatcagatctcctctgacagccacaggagaccccaggggtccctctccagttctacccaccctatgagactcctatgtcttccacagaaaaagacacagacaaagtgacattcctgagtctgaagctggaccccaaccaggctaaatttgggtactgggtgctgttggccctgggctttgtcatgtctctggtggtgctggggctggcctgcaggctgcagtccctggaaaaacagtcactgactcaagacactgagatattcagcccactgcccaatgcctgcttcctgggcatagccatggaaccctgccaggctgctaaaggacagtggatgctgctgggcctctgccttgtcctgatgctgtgctcaatcagcctggccatctggattttcacacagtaaagcaggaagcctccaagggtaagagctgaatggtgaagttgggactagacaccagtgaactggtgaggctggggggcaggaggagggaggctgagccagagagttggggggcagaggaggggacagcctgcatgcatagtgcccaattataattgggttcagctgtggcagatctgggtacatgtgatattgtaattgtgtgtttgcaaactcatgtatgtgaggctgtgtgcacaaacaactggctctatgtgattctatgtgtgtcctgggtttcaggccaaactccttcccctggtggctcaggacctaaggttttattgacccagtggctgtgtccctgcaaaccagcccccaccccaagtcatgcccagaattggttctgcacacagccttgtttttttcagtaacccggctatgggactgcagtgcccaaggaatttctgctctggttagaaaaaggactctgcttcagtccacttctgctctggttagaaaaaggactctgcttcagtccacagtacataaaatgtactcaggtaggacaggacattcctttacgaatcaccagtgcccagtttatgagcactgtgcttttataccaaccagcacatctttctgctaatccttgggccagccctgtgttggactacataatccagcccccaaaagctctttgttgaccagttgagatgtaagtagcctcacaaactgccccatggctctctctgccccagcccaagcccttccaaatggagacagtgggttgctgggcattgagccaggcttgattaatgattgacttctttaatatttaaacaaagctcatctccaaccactctgctctggagatggccttgttcaacacacacacacctgctgcctggcccgttgccctggggagcgagcataggacaaacagcaccttttcaggctcagtgggggatggggaggacaggaaggagggaactgtaggagaatacttgggaaattagtgctctagaaacaagcctggggaaagaacgggaaggcctctgcctctgcctttcctagttcattatcctcagcctgggtctgcctgccatgaggatcctacattcaatattggggattcagagcgtctggatggaggttgcatgggctcctggggaggctgggagtcagtgtctgtcagagaatagggaaaacttgaggggaaagggcattatagccagtaactacagagaaggggtaccccggctgcaactgagctggtgggagggtggccaaaagaggagaccaggtctctctgaattaagaatctgagccccaaactcaggtgttcaggggacagagatactaggctgagatctccatggaccctgcccctgtccaggtttcaaaaggtctttctgagatctggctgagcccaagcacttgctccagccccaggctccacagcacccttgtttgatgactctgtccctgctcttacttttctgtgccataatgtccttatttgtccctattactagctatcagctctataagagctggatgcacatcaggagtgtgcccctctgtaacaactctagtcagcacaggccatggtgcacaaaagggacttggaaaatgatggaatgagtaagtgaatgaatgaatgaatgaatgtcccactgcccaagtccctcctcagagctcagcaccccatgtactgagctcatgagaaatagccccttcttttcctccacagccagcctgtccaacagaggggcagccaggacatctctgccctcttctcatcccccagccacagtggccaaagaggcccccactaggcactgtggctctgcatgacaaacacacatccagcccaggactctaagcctctcacctggactccagtaaaaaccttgctgagcctccttgtctatccttcctcccccacccaccattgtaaagtttatgtcaccagaatatttctttcatgtctaattgcttaagaacttggttgttcatcaattaaatctagatgttcaaaatggcatctgagggtctttattaattacctccttcctccaaactcacctctcccacacccccttgttccccccaccccagcccctctgcactgacatcacctttggcctttgcctaaggtgcatgccccatttgaatgcttgccctccaagatcaggctcaaaattgctcaccaaaccctctgcagcactacaagcccacccagatgctcagtgaacagtagtccccttctccccttcctctccaggaagcctctttcaataaacctattcccacccccatttgctttttctagtgtgttcattttcagtcagtactcagtactcagacacttttatcagtggtcacttgctaataggtggttttaaatctgttctccttccaagatgtacctgtatgctaagagctctcaggcctctgaagaaggcatcttattgcatacttctttctttctttctttttattttcagatggagtctcgcgtctcgctctgtctaccaggctggagtacagtggcgcaatctcggctcactgcaacctccgcctcccgggtacaagcgattctcccacttcagcctcccaagtagctgggattataggtttgcgccaccactcagctaatttttgttttttcagtagagacagggcttcgccatgttggccaggctggtctcaaactcctgacctcaggtaatctgcccacctctgcctcccaaagtgctgggattacaggcgtgagccaccgcgcctggcccttattgcatatttcttgcacgtcttcatgtgtactcctaccccctcctctcaggaccaggccctggctggacttggcggcaggagctctgcatgggacctaggtctcagctgagctggagatcacttgctataagagcaggccagaggcctaatggtatcattgccagggtcgggcccagtggtcagacccggaagaaagctttcagccaaagaccacctgaggcccctaacaaccccatctgtagcccccctcctgcctgggaaactccctgcactgggaggggagactgccctttggtactgggagggaatcggagaggtgctgaggccattggcccttaggacaggaacagaagcagctcctcagagaacacctgccctattccagggccaggaccccagccccgccccgccccgccccgccccgccccgtaggatgcaaggccccgccccagccccgtcgggtcccagagaaactgccccgcccagcggccccctccccgccgccggcgcgcggcttctttcagcaccaaggcgtggacagctcccgggccggcgcagaggagaggaggccaggagggcgcgggccagggaggcgaggggagggcaggggagcgcaggaaaggaaaggagaggtggggcaggggtggggaggggagggcagacgcaggctggcgggcggggcgcggagcccggcggccctccccgggggcggcgcccaccggagccggacgctgctgagcccgaggacagacggagacgccgggagccagtggcgcctgtggctccgggcaggggccgcggccgaaagatgccggtccgcaggggccacgtcgctccccaaaacacttacctggacaccatcatccgcaagttcgagggccaaagtgagtgtgtgtatgttggggcggggggacgatctggagtcctggttccgtgaaagggggggctggacccctttactaacttctaaccgggcaaggtggtgagtgccgggtgctgaatgaaaaatccttcttttgatgtccccaacaccttctcctccagggggacccgcttgccttaaatgctgtcctcttttctggaacacaaggagcagcgtgcaggccttccctccctactgccagctgtttccttggtgccccaagttcgaacctccccttccagccactgcctgccccctcatccgcgtcctccagaggcttctctgagtccttcttttccttccttttcatatcctggttctggtcttcccaggagctttcccaggcctgacccccatctggtcacatccctgcctcccttccccacacttttcctgtttccaggaggccttgggccttccttccacctcaagaccctcactgccctagtcttcccacaatccccaggcctgactccctccctcattccggtcactgccctgctcctctgcctaaattccccttactgccaccaagagtccttatgatctttccctcccagccgctggatcctggctcccatggactttttgcctcccacctcccaccccaggtcggaagttcctgattgccaatgctcagatggagaactgcgccatcatttactgcaacgacggcttctgcgaactcttcggctactcccgagtggaggtgatgcagcaaccctgcacctgcgacttcctcacaggccccaacacaccaagcagcgccgtgtcccgcctagcgcaggccctgctgggggctgaggagtgcaaggtggacatcctctactaccgcaaggatggtga

SEQ ID NO: 7369 - DNA, 6000 bp, Homo sapiens
gatagagaaggaaccatgtaaaagcagaagctcgaacaagggtctaggaatacagttcagactagggtgtcttcaagggccttcctgtccctactgaagacactgggtgagagaatatgtacacacatgcacaactacgtagaaaaaaagactaaaaggcaatgaactaagatattaatgatgatggtgttctaagagtgggaaagtgcaggtaattttcattttctgtgttatataattttctgcgcaatacagaaggaaaaagcactgggtcaggatctaaactattgctggtgcacacttttatcttttcaagtaactgtttgggttatcccaggcacttctcccctctggatcttgatttcctgtgtgtgctttgaggaaagtattagtcctgccaccccactaggtgggtttcagaagtagaaatcctgggtcagagtgcacctccaagaagctaccagaagatatgactggatgactcccaacaatatgccctatagtatcaaacgagaagcctttatgtgacacttggccacttctaaagaaacatttctgaatactgtgtctcgtacatttctagatagcctgagtgacctactttggattattttccttcttcccaacactctttgagcccatatttcttcagtagcgagatgatgtagtccaagcatagactttggagttagacctgggtttaaagccagcctacggctcacctgtgctttcctgtaggctactccacatctctaaccctgagtttctccatccacaaagtggggctgatcccacctactcacagggttatcgtgaggtcctgatgaaaccctgtacctgaaggattttgcacagtgcctgggagctaaacctactcagtcaataatatgatttatttataaataaataggattacataatagaagcatagatataattttgtaatgaataagattgctattttccaccccaggtagcattccataaatgtattacatactctggaaatagatgaaactttttggttttcctaggtatattccaggctttaggatctgctattgtagagtttggcaggcaaggtcactttcagcctcttttatttctcgcttttgtagattaagatccaatctcctctccactttcatctttccaaatctccaaacatgaatctttttcatctccctgccaagcttaacattaagattggctgctcagcttcgaccaggcaacagcagtcgtgcttcagaagctctgatccattctctctgcaagactcaggggcttagtccactgttgcttaataacaataccttataccaggatcatgctttagacttttttcaaagcatagtcatatctgctgtcgtgtttaatcacaccagcaattttgtggagtgagcaaggcaggtcttcctattcttcctggcaggcagtgtggttcccaaagtgggtttcacagaacatgatgtcttttttttttctttgctcaaataagtttggaaaatacagaaataagcaaagctaagcaggcttttcaaagcctttaccataatgtgcaatgcggttcttcaagagctaggtgcagtgcttctcacaagctgttttttttttttttttccttttaaccagagtcactttttctagaatattccatggaattattgctccatggaccccactttggataaactcatggggtgggagtttgagaacgcaagccttgaaaaagggcttgggagtggggcaaggtaaggttcaaatgcaggcaccaacatttgccagctgagtgctcttgtgcaagcttcttaacctcactgatcatcagtttgctcacctgtaaaatgggtgtggtaatagaatagccaggattaaaatggggagtaaggtgcttaacaggatgcctaacaatgataaacgttcaatgtactttggtgtttattattagtctcttcctccatgttatccaggagaaaatcagtcttcagagagtgtcttagtttgttctgtgttgctataacagaatacctgagactggataatttataaagaaaagaggtttatttagctcttggttctgcaggctgagacgttcaaggccatatccctggcctgtgatgagggctttcatagggcatcacgacagagcagagaagggcaagaaggaaacggagaaaacctgaggctttataacaactgtctcaagggaactaattcattccttcaaactaatccagtcttcgagggtgagaactcaccaccatgaaaacagcaccaagccattcctgagggattccatgaccccagacaccttctgctaggcacacctcccaacactaccacattgaggatcaaatttcaacatgagctttggtgggggcaaacaaaccaccttatccgaaccatagcagagaggttaatttcccaagcttacatggatctttagtggcacggttgagtgtaagttcaaggctctgttcgcctttgggagccatatccctttgttctccactgctccccttactcctgctaaccatccttggtgtttcaattccatttcctttggcagatgttgggactttgtgagcttcaagtgtaaatgacagggtttggctaactactattaatataaaaatactatcagtacaacgtcactagcacttcccaccagtcggcagcagccttgccctggacctctgctaggagttggcttctcttccccaggacctgggttctgcctgttatgatgctaccccaccttcagtcagaatgggatgctgtggtttcccatttttccagctcgcaaactctgcaagcggcagcacctctgattttgttgcctcttcctcagctgcaagcacagggcttataggcgctttactagatactcatgctagatacaaactgtcctgctcccctctgcccacgctgttgcatggagaatgatttggctgggtggagagggctgtttggtgtttcatttctccctcctttgtcaaagccaacacaggaaggatcattgtggcttaaagccctgtgctcttcagccttgcaaacatggacatagactcacacatgcctccaggaagccaatatatggctcactctgtagatcaatcaactttcccatgatcaactgctagagcagggccggcgctgtggaatcagggccagcgtgcacccctcaaccccttctcacaaagaggctctaaactctgccactctcctcctacagtcaactcagactctgcagacaaatctggcttctgtccattttcagctgcctcaatacccacctgtgcctcaaatctcaactggaacatgataccatccctggggcagggccctaggactccactggagccctgatattggtggactgcaccgaagcactgctgcacctctttcccaaacatcactaacatccagtttcaaaagttctgactttgcaatattgcaaggtgccagtgaaagatgccgacaggatagcaaacttgcagccaagggtggcttgggtgacacaacctttctgagttgccccaggcctcattctcttctagagatggctctgcctgccccctccagccccactggatgaccccttctgggcccttgtcatatcctgggctttccccatcatagcagttgctacattacaatgccatcaactgtttgcttggcacagcacttctcagattttagtaggcagacaactcaccgggatcctgttaaaatgcagatttcaatttaggatgttggagaggccagagagtctacttttctaaccagctgcatggtgatgcctacatggctggtccatggaccatactttgagtagcgaagatcagttgttttgaactttggctacacattagaatcacctggcagaatttaaaaaataccattgtccaggccccacttgagctcaattgtatcagaatctcttggagcagcaccagggtatcagggatttttagacacttcctaggtgattctagattacagccagagcacagaagccctgagactggctatgggctccacgggggctggcatccatctgccttgctctccactgttttccagctccaagtccagtgcctgaccctggcagatatcagcaggtggggcttgtggttgaccttgcttagacacttagcttctctttttctcgttcattgctggcccctgccgatacagcgtgctgagcaggtaagagtcagcccatttctgattaggtggatttaggaggctgttgcacttggactgtggtatggcttctttacttgtgttgaccaagtgctgcaacttattagagtcacatgaggaggacactttcctccaagaaatcttccctgcctctctactccttcccaaggctgctgccattttcctgtctggagctggcatctctcacagagactatttgagcctcagaatccttttcaacacagagaagctcacccagcagagttgtctcctccattcttcctctctacttcctggacaggtctctaccacagccctcaataggtcgcatttaattgctttgggggtgcctttgttcttctagatgggaaacccttcaatggcaaggatagtgtcatgttcatttttgtatctcccatgtctggcacaatgggttgctgaatgaatgaatgaatgaatgaatgaatgaatgaatggcagtacccagcaaggggactcccagagaggacaagggggtccttgcagtggcatgccaagaacgctctgaattgctgcggggttagggggagggtggcacctctgttgcagtgacctggtgtccagggggttgcctggtggtctttacccatccattgagccaggttggggtttgactttagttactggctcctcatcttcgtcttctcagagccgtgggtactgccacctgctcacccactctccctagccccagagcgcagtccgtgctggtgggagcgtggcgactagttgcacagcaacggtccaggaagatgagtgcctgcgggaggaaggccctgaccctgctgagcagtgtctttgctgtctgtggcttgggcctcctgggtatcgcggtcagcaccgactactggctgtacctggaggagggtgtgattgtgccccagaaccagagcaccgagatcaagatgtccctgcactcaggcctctggcgggtctgcttccttgcaggtaagggtgcccagggttggggacagccctgccccctgacatcacctgccccaagaggtccctccctgggaagagatggccaagagatgctggaaggagaccattcaccacggatgatccctatatatggcgggtggtgctccctgcagtgactgggaccccattccaaactcaagtcctgattctcgatgtccatttgagccagtcttttcacctcccaggtcttccttcctgaaagatgaatgtaactatgccttccccacactctgctcccaggactggatgccaatgacactgcacagatctcaaatgttcatgcatgctttagctcattgaagtattgatcccatataattctcccaacagtactgcaagacaggacttgttatttccactttgcaaatgcagaaatgaagattcaaagaggttaagtctccttaactcagcttccttgcatccactagtttatagattagaaaatacttggcagtttctctgttcctcactccataaaatggcacagaggaaacacatgagcaggtccctccagctctgcagcatggtagaggttttgaccccacttatctgggcctacctttttactcactagggcttccctgtaacccttcaagttaccactccaagaattctatcctttatccctttatcatgacccaagaccagcctgcacaagaaaagcatttccaagtcatacaagaatagctgcaagctgggctggcctggattgccacagtgtggtcactgggcttttcttggtaggggcttgtaacttatgtgtgcact

SEQ ID NO: 7370 - DNA, 6000 bp, Homo sapiens
cctgagatctcacccaggctcctcaaatcccctcactaagccttctgaaatcaccagaaccatctgctttgggttcagaaatgagatactacaaaagttgacacacaaaggtcattatttctggaggacaaaggggtaaaacaaagcttttcctaaaggctttgggagctactgcagaaagcgactgcgttcccctggctggtggagggcctctcccgtcttctcgcccgggctgcagatggcagccagcttggccacttggacgtgcaggttatgcaatgtgagcatcctaataccgtcttcccctcccacagccgccacccggctgcctcaccctggagctgggattgtccagggctctgggctcattaagactctgtcttcacagccaaagtaaagtgaagaattgaggtaattacctaaatgattcagtaaggaggaaagacaccaccacgggtggaaaaagatagtttgggagactggtccaagtgactggcaaatatcgccacctcctcagctggcaagggaggtaataatacacgtttacttgttcacacccccagcagtaacatttatatgggcggtggggggcagttcatggtgggagaggatgccaagtgtccagtctctccagaacaagaccagtccaggacctcctcctaggcaagaggagagcacatccctcccttgattctggaagcgtcacatgggagaaactccagggtcctcaggcagcagttaaatactgtcatttagagttctgtaatctggctgagcagaaatttccagatttaaattgtgctcacccaggcatgatgaatggtctcagccagtcttgggtttgctccagctccctgtgccggcggtcaagtccttatgcgactccacagtctacaccctcatcaccgcaggaccaagtgcagctgccagtgggtgtccgcaaacagaaaggcaaactgcggagctcccgttggggtccccctgaattaataggtaataataatgacacagcccagcagtacttaacaatggcaaagaggctgtttagcgtccttggaaaaactctggccttgaagtcactgagatttgagctaagatctgaccccaccatcctccaggtgtgaaacctggggcaagttactcaggtctctgcacctcagattcctctggtgttgtcagggggtgataagtgagaattaacagtgaatgtaggccgggcacggtggctcacacctgtaatcccagcactttgggagtctgaggcaggtggatcatttgaggccaggagttcgaaaccagcctggacagcatggcaaaaccccgtctctactaaaaatacaaaagttagcccggcatggtggcacacacctgtggtcctggctactcaagaagctgaggcaggaggattgcttgaacccaggaggtacaggttgcagtgagccaaaatcgtgccactgcactccagcctgggtgacagagtgagactccatctcaaaaaaaaaaaccacaacaaattttttaaagtggatgtaatatatgcttcctagacagtgttgggcttactgtctctaaaaaaaggcagaaaagccagaatttactgcccagtccacaaacggtggctaagcgtacaccacacgaaaaggggctttttttttttttttgagacagtctcactctgtcgccaggctggagtgcagtggcgtgatctcggcacactgcaacctccacctcctgggttcaagtgattctcctgcctcagcctgcggagtggctgggaatacaggcgtgtgccaccacgcccagctaatttttgtatttttagtagagacaggatttcaccatgttggccacaatggtctcgatctcctgacctcgtgatctgcctgcctcagcctcccaaagtgctgggattacagccatgaaccaccacgcccggcccaaggttgcttttttttgacccttgaaacaacttttttttttttttttttgagacagagtctcactctatcacccagactggagtgcagtggcatgacgttggctcactgaaacctccgcctcccgagttcaagcaaatctcctgcctcagcctcccgagtagctgggattacaagtgagcaccaccacgtccagctaattttttttttagtagagacggggttccaccatgttggccaggctggtctggaactcctgacctcaagtgatccccctgccttggcctcccaaagtgctgggattacagacgtgagccaccgtgcccaaccaacccttgaaaaactcggcaagttgcactagagaggtatccttttcccaggtggtttcggctcatccagatcaccttgctaattagtcccggagccagcatgaggtggtgactgacttggcttctggtccagtgcattctcaactctcccacacacttttctgcaagtggaggagtgagagctggtctaccaaggttctgatgaaggaagattttggttttgtctcccttgggatgaacatgaggactgcttgcttggaggagggacccaccacctgtcatctctgccatctaataggtgattgggggaagctgctgctctccacccccgaagatcaggttcatgcaacttacattcatttgtttctcccaaagtccctgaggaaggctgcaagtaggacagggtggagggggatgttcctgagtaacccagtggctggctcaggatatggattttcacaccatgctttgtggaacccggggtctagagaggtgctttgggggctgcagtgcgtgtgtgggtgggtgagtaccagtgccctgggcccctcattcaaccagagccatgccagcccttacctacaaggctaattggtaggagacctggtttgtttacattgcgcttccatttatgatttaatttgaaacaatgatttgttagaagaggaagaagaagaagaagagatggaggaagatgaagaggaagaggaggaggaggaggggaggaggaggaggaggagagaagaacttgggattcattttcctggagtttctgagaacagaacctagacttaatcctagtggctgttagggttggaggtgggtaaccctgttctgggtcagagcaaaccatctcacaccttctggtccacttagacatacattgggcacctgctgggtgcagaactccagatccggtggcaggtgggttaaagtaaattagagatgatgaccctcgtcctttgtgacttggaaagcagaatagacaccccaagggcagaaggggccaacaatcactgtcacagccagcctggtcctcaggctctgtcaccttgtgatgtttgttttttccctttatgtatatgatctattcctcccaatcagactataattttccaagtggcaagaaacaactctcactcagcaaacatttgctaagcccttaccatgtatgccagtcacaggaaaggctcacaatcttgtgggacagagaacagtgatttcaacacggggagtggggaccagggaaggtgccacaaagaaagttaagcttcgtcttgcaagaatagcagcactccctatacctttttccatatcctggggtccagtgcagccagggatgccaacaacaggaccacctggacatgtcaaagggtgctgcacctcctgatgctgggctctgagaacctcctggagggaggggtttggagctgggtctggaaggaggagtccggaccggctccctggagaagggagtgtgtccaggttgggatcacggccagcagcaaaggcaattaagtgaagccagcaggggttggggtcagaggctgacaataaaggccaggggagggaaagccggttaagctcgagcagagcaaaaggcaaaacgaaataaaggcattgcgaaaggttgggagagaaagggaaaaggctggcgggtggagtgttggaatctaacacaactggagtgtccctggactctagcagtaatagaccctcagaaatgtgagcacagaggaacgccccatcttcaatctcagccttgccaccactctagaaagcagagaccctgtgttctccccaaaggacttctcgctgtcatcgcccttctccctcaaccccaagtcagggtccttccaggccctgcaaggggatctggaggagcaggaaccacctgggttggggtggggcctggcccgggcctggcgtggcttgcagggtctggcagctgtgtcccacatctggggtttcaggaattctgacctgaacacgcactcccacactcaccttcatcaccaggtgaacaggcacagaggggaaaggagggacacacccacccacgccctcctccacaaattaaagaatccgcagggccgtcggaggggaggctggatgtcctgggcgggtaagagaggtggctggagacgcgctttcccttcggtcctcctggggaacacttccctcggcttccttcactccaataatgtgaatgaactctgggagagagagagagcgcgcgcgggcgcggggaggggaggggaagggaggggaggggaggcgaggggaagggaggcgagggggagaaaatcctggctggggagagaggggagctcagaggagcgcacagccgggcgggggccgaggctcgaggggcggcgccgagagaaacggggcgcggacccggagcgcggcggcggcgggggaggcgcggagggcgcagggcggaggcgcgggccgaggggggagggcgagcggagagggaggagcccccggccgccgccgccagcccgcccggcggccgcgcagcccgcactcgtcgccgcgcctcggagtttgagccccagcgctgccggagcgcaggcacgcccggggcgcggggtcggagcgcgcagcgcggcgccgccccccggccctcggccccccaaccccggcgcccccggagcggcgcgcggagggaggagggcgggcgggcgcggcgggccgggccggcgggcggcggactatgaggcgcccaccatggtgcgatgcgaccgcgggctgcagatgctgctgaccacggccggagccttcgccgccttctcgctcatggccatcgccatcggcaccgactactggctgtactccagcgcgcacatctgcaacggcaccaacctgaccatggacgacgggcccccgccccgccgcgcccgcggcgacctcacccactctggtctgtggcgggtgtgctgcatcgaaggtacggccagccccgacccctcgccgccccacacacacacacacacacacacacatatacacacgcgcgcgcgcgcgcgcgcacacacacacacgcgcacacactgcccggcgcgcgggccggggagagggtgggcgcggcgctggctccgcgcgagacacaaaggagccggagctggcgggcgggtcccttcgcggccagctgtacatcagctctggtccctctcggctggggacctccccagcacaccgatcccacaaactctccacgcgcacaccccctcgcccacagacacaatgaaacacaccgaaactcaagcacgcgcgcgtagcccgggacccgagcgatccccaggggccgcgccggcacccccgggggaggtggaggctggcgagggggcgggaggaggctggggttggggggagcggacgggagggggggaggggttgcttggcaaccggtgtctgtgctattgctatgggaactggccatcctggggcggggccggccgggggcggggcgcgtcggtgccgctgggcgctttctacaggctcgggctgaggggtgggggcagaagtaggggcagaagtaggggcgggggcgcggtcggagccggggtaggggctgagttcctagcggatctagggtagctgggtaggcccagcccgacgcccgcctcgtctcccacggagtcaccggcccgctcctcgctgtgcggtggggtggtaaggggagcgacaccgagtctcccccaacggagacagcgacctcggtcgcg

SEQ ID NO: 7371 - DNA, 6000 bp, Homo sapiens
catcatcattatcttttgactctgacctgctcaataagatgtttcctgctgctgcccaagccatgggcaccaacactgcaggtgcccagccctctcagagtcccatgaagcttcttgtgaagtaacatacatcacagtcttcatgtgcgtgttacatgtgcacacatgcattaccgcatttaattctcgctataaccctacaaggtagttatgatcctcccttctttgtgagcaagaaacaggctcagaaaggtgacccatctctcacaaggcacacacacagtcaacagcaaagctggggctccaggctatgactgtcacttccagaaaggatatgcgctttccctaacagctgcgtgctccacacagcagccaccccgggacactggcatgatgcttaccacatcctaggcaccacctgtacaattacttgcttcatctttttctttaaattgtcacttttaatttgaccttggcctaaagaaattatattaataatataactcagatcctcatgaaaagaaatatgaaaatctttaggccaggcatggtggctcacacctgtaattgcagcactttgggaggccgaggcggatggatcacttgaggtcaggaatttgagaccagcctggccaacatggtgacaccctgtctctactaaaaatacagaaattagctgggcatgatagcacatgcctataattccagctacttgagaagctgaggcaggagaattgcttgaaccctggaggcggagattgcagtgagctgcgatcacaccactgcactccagcctgggtgacagagggagactgcatctcaaaaaaagaaacataaaagtctttaaatcacgggctgcctgctctcctcctgcaggggtgtacagggcgcactttgagaaccccagctgcgggctcaagtctcccgaggggcccatgtcctgcctggagctcctattctccacacctctccacgtaggctgagttctgtcccaggagaccccacagcccctcccagtatgatctcagctgccctaacagtttgtggactcctcaaggggagggagtgggtcttctgcttggcaggacagaaatcccagcgtgggccttattgtgccccaacttaactatggcccaagccctggctggcctgtatgttctggagtcctcaggagggtcctggatcaatggggagggaaatggccaccgtggcagggcagccagaaaaagctgccagaagtggaggctagcagaggggggttgcgaaacaaagggagttggactggtgcagataggataaaaacatctcaggggtacaagtaagcatcaacatctggagaacagaacaggaaagagccccccaaatttcccacaacactgtgagtaccaggcatccagggcgattgatttcttaccattacgtccttcgctgaatcaagtactcagtactctattaaatgcatgacggccactctctggtctcctcttatgagaacactgctacagttgggctctgtgtccccatccaaatctcaccttgaattgtaataattctgtgtcatgggaaggacccagtaggaggtaattgaatcatgagggtgagtctttcctctgctattctcacgatagtgaataaatctcacaagatctgatggttttataaagggcagttccctgcacgtgctctcttgcctaacgccatgtaagacgtgcctttgctccttcttcaccttccgccatgattgtgaggcctccccagccatgtggaactgtgagtccattcaacctctttcctttataaattaccagtcttgggcatgtctttattagcagtgtgagaacagactaatacagacactgctcccatcacaagggccccacttccatgagctcatttcattatctcccaaagatcccacctctacacaccatcacactgggggttaggcttcaacatatgaacttgggggaaacatgattcagcccatagcgcctactatggctaagctggtccaacgcactccctccagcccttccacctgctccgcagccaggcccgttgccttcattttacaagaggcagcttagaaaggctaatgacttactggaacgtgcacagctggagccaagcagtgcagggatttgctcggggctggccagctccatcaccctctagcttggtccccctctcgcatgctgcctccctgagatgctcctctccctgttgccctggaaagggtgagatcttgggggaggacatggatgttgccctgcccaactttcagcaaatgcctgtggctactgaagtcccttcctggcccttccaggcccctggggaaccaggcaggcagcgcggcagcacctctgtgagcagaaaaggtgtatttgagggagctttcagtaaacagggaagagaaagtggacctgcccgcagtagctgcagctgcgggtctcctggtgcgacttacacaaagatgacttcaaaaggcagaggccatcaatctttaatgctttcactgcactggggcggaggactctggacccctgcatggggcacaaacctgccccccatggagggaaagagcagcagaagttcctggttgctgtcctcaccaaggcctggcatctttgaagggcctgcaatgtcatcatggctggcgctgggtgcaccctctgggctgggccctttcagggtgctttccaaggccgtcagaggctcttggcaccgaagagcttagggcatccacccccaccacaccaggaaattcaaaagacactttcatttttccaatgacactgtatttacttgtaatgctaaaattaaatagcttctttctagattttctgtcttaaaacactggaaccctcttctggctccccagctactgctttgctgggtgcctggcactcagtaggtctaatcaagctgtacagcacctcctgagatccccaggtgccaggatcctgaagctgggcccccacaaacaacaagagagggctcagaggctgcagccatgtcccagcttctgggaattccccatggagatggtctacccacctggtgacaggcagtttctccacgagctgaagcaggggcggtggcatatgtcaacagtcagtcagtgatcagtcagttgtgatggattagcacccacagggaacacagaggtggggggacagggaggaagggaagcagagatgagaacagtggggagataagctctcaggagattgtaatatgtatgagagactgattttaaaaatatggaagtttggatggaactgcaataagcacaagccagtggctggagatgcgagggttcagctcagccctggggctgttcaccaggtagtcctggctcctcacatctcctctctgggctgcagattcctaatctgtcacaatagatcatgaagtttcttcccagttccaaccattcgttatgactttgggctctgggtcctgaaacctggattcctcattttctcgctgtgtgaccttggacaagtgacttcatgtctctgagcttccatgtccttgtctgtgaaatggcagtaaccgttgtagtccccttgtggattggtgtgaagagtaactgtgacaatggatgaaggcttagcagggtacctggtagatagtaagcactcactgaagatgagccactgttctgattatcatcatcatgaactttctgtgattctaaggctggaggccgaaacatttctgtccacatgggcagagtctctgtaaatcgtgtcaatctgaggccaggattttgaagctcaaggccccacccagctcaggaggctattcctggtcatgcgtcagcctctcggctacacccaaaaagggccaccctgtgagccgagaaggaagagatgacacaacccaggagagatgtagaggctggagcctcggagaccagcctgggggccaggcgggtgcacaggaccgtcggagggtggtcgatcccgggctttctgtgttctctgcacgcccatgagctcctaatgatcccctataaatcaacctattcattcttttttactcacacacttatttttcaaattcaaacataactggaaagtcgttatcacctgctgttaatagaaggcaaaaccaaacagtgccctgaaaaacagaatgaccaagtccagcaggattcctcgtcctcttcgggccgttctcgctttgtttcaaaggacactttacaggcaataatgacactgacctcgaacagagctttgctctggacccagttttggggatggaaagagaattgaaaaggaagtaatgttctcgtggagggatcagagttgggtaaggccagacctgggaaccacctaaaaccttcctatggtttgggggatgccgtggggtttgtggctaaaacgcttgcctaagaggtggactccacaggccctggactgggttcccgggatgtcattagacagaatcctagcccctcagatcccaggatgagaacctactcactgccctgccggtaacaggcttaccccgtgggagcccgggacagccgtgcagcccgcagctcctggtctcctcccctggcctgggctgccctttcccatcagcccagagcaggcagatccccacccccggggccctgctgcccacctctcgccctctcccaactcaggcaccctgagctgctactcacagaggcctcaatctaccatccagagccttctctccttgccaccctgccccgccgcactggggtatttctggctcccagaggggcagaaaaccctgaaacccgagcagaagctgtcctcggtgccacgcctggagatgggcattaatagcagcctccctcaggcccctgacgcgtctgggcagctgctcagcacgtcccgcgtccctcggccccaaggccagcccactctggctcagccaggcacactaaacttagtggccactcccagctcgacaaccactgccaccccccaagctcggcttgtcacctgccctaggagacgcagccgccggaccctgcccagggcacccacgcctcggcgaccaccatgtcccagaccaaaatgctgaaggtccgcgtgaccctcttctgcatcctggcaggcatcgtgctggccatgacagccgtggtaaccgaccactgggctgtgctgagcccccacatggagcaccacaacactacctgcgaggcggcccacttcggcctctggcggatttgtaccaagcgcatccccatggacgacagcaagacctgcgggcccatcaccctgcccgggggtaacgtacccaccctccgtcccgatccccacctcctgctcttccccgtcatccccctggcaaagttgcccttgcgaaggaaggcaggtttctctgcctagaaatagggcagccgcccagccttttctgcccagggaagaagatatgaattgcatgtgtggtgctggtggctggggctgggttgtaagacgagggcgtttgtcccagctatttctgtctggctggaccttggggctttttgcccagagcagagagctgggcaggctcaagaaaggaactgcagctctaccagcccagggacttctgggccccacctgctcactctctccctgcaaagaaaagctaggtggctctgtgtcctcaggctagggggacccatggggctggcaggtttgttcctggcctcaaggcaggagaggagagagcataggcgatggaatttgcagggtcctgtgcagaatgaaaatgcagggttccttgctccaaattaccaaggatttcaaggcagtgacagcagcacatgaaaccacacatgggcccttgtgggctctgggcctggagcagctgcacaggttgaatgtctgtgaagcaggacatggctgtaggctgtaggtgagccacctgcccccaccttctttttttttttttttttttttttgagacaactttgtcgctcaggctggagtgcagtggcatgatcttggctccctgcaacttctgcct

SEQ ID NO: 7372 - DNA, 6000 bp, Homo sapiens
gattctagacttgtttgggggtggtttccaaagagcttctaatgcctactcactcacttggccaatgtattccctgagggtcgaggttgctaatagagaaaaatggtgacacgccatgccagactcatagctgttgagggctaggggacagagagaggaagaaaggtcctcatttgaattctttgtgtatttgaagagactattaaatcgactatgccaaatgcccccccaacctccttttttttttttttttttgaaacagggtcttgctctatcacccaggcgggagtgtagtggcatgatcttggctcactacaacctccacctctcgagctcacgagatcctcccatctcagcccctcaagtagctggaactacaggtgtgcaccaccatgcttggctaattttttttttttttttttttttgtagagatgaggtctcactatattgcccaggatggtctcaaactcctgggctcaagtgatcctccttcctcagccttccaaaatgctgggattacaggcatgagccactgtgcccagccctcaagtttttaaacagtgatatggtgactgtactctatattttccaaactaaacatcaggacccatggtatcagaaaggcttttacatgctgacatttccattttcgtaaaatgcggatggtttgtgggggacaagggaaataacagctaaaaacaggagtgtcccaggaagccaaggtactacgatcaccatgccgagtatcttctcccccgccccctcaaaccaccggatatctgatgttctccacggcagaagcattgctcttttctcatcaatagaaatggcagacctcaccctggcattcccgtaaagatgataaaaaccacattggatgctcagactggtatctaacactctcaaacacatccaatcctcccctcagggctctcttgctttcctccaggcttaattgcaatacttactttcaccaaattgattgcagactaacaatttcccccatttaatttattaagccactcagagacataatgacctatttgggagttgtgtcttccctgtggagctcctagacgatgaactcctcttggcaagagtgaaccgagcagcccctccccatggaaggggctggacactggcctggccctttgtcctcctccttttcttaatttcctgccacctattgtctctctgataactgctgacagagggaagggtgctatttaattgctttaaagatatcaaacaagccagttagaaggttatctcctccccaacccctctatttttctggctcaaggttttgttacttagttactagccaagctgcagaggaagaagaggtagccccatgtggattacagctcagacttcattcagcagatggagggcagagtcaaaatagcctgggggagccaaaggtggaataggaactcgaggttggcccctgagtgctgctggcagcccaaactgctctttggaggccttcaaaggtggggaggggagaagagaggaggcattcattttctggacaaaatcaacaatcatcctagatgacacatttctgctgtcaaggtccatgttgttcagagcccactcagccagctgcagtaagacaggtgtgcctaacgtgggtgcatcagtactttttccaggctgggtctgccctatgtgataaggaggggaaggctcgacaaggaaagtgcatgaaggggaatgttgctttatttggtcatccacattaaagagcatacagggctacatgtggtggctcacacctgtaatcccagcattttgggattattcagcctattcaggaggctgaggtgggcgattacctgaagtcagtagttcaagaccggcctggccaacatggtgaaaccctgtctctactaaaattacaaaaattagccaggcatggtggcaaccgcccggagtcccagctacgcaggaggctgaggcagcagaatcacttgagcctgggaggcagaggttgctgtgagctgacatcacgccactgcactccaccttggacaacagagtgagactccgtctcaaaaaaaataaaaattaggccaggcgtggtggctcatgcctgtaatcccagcactttgggagcccgaggcgggtggatcacttgaggtcaggagtttgagactagcctgggcaacatagtgaaaccccgtctctactaaaaatacaaaacttagcagggcatggtggcgcacacctgtaatcccagctcctcgggacgctgaggtacaagaatcgcttgaacctgggaggtggaggttgcagtgggccaagatcgcaccactgcactccagcctgggcaacaagagcgaaactccatctcaaaaaaaaaaaaaaaaaaaaaaaaaagaggtcaggcacggtggctcacacctgtaatcccagcactttgggaggccgaggtgggtgaatcacgaggtcaggagatcaagatcatactgggtaacacagtgaaaccgcatctctactaaaactacaaaaaattagccaggcacggtggcacgtgcctgtagccccagctactcgggaggctgaggcaggagaacggtgtgaacccgggaggtggggcttgcagtgagccaagatcgtgccactgcactccagcctgggcgacagagcgagactccgtctcaaaaaagaaagaaagaaagaaggaaagaaagaaagaaagaaagaaaggaaggaaggaaggaagaaagaacaggacttcaaacagagcatacttagttatgggtcccctccccacacagaaaaactccctggacatcaatgacttcatccattcggactggcagataggccacatttcctgacaccctgtctcttcaccttaaaagggttagctttccaccacaccagcaaagaccctcaggacacacgattcatattcccagctgagcatctacccggaggtaagcagacgctcaggcacctgggccgtccttgccctaatccctccagtggtgtccacactgagtcctgcagcactggtagaaggtggtcttcggctcatctgcagagtgggtctgaagctacatgtagtaagcacaaggaggttctcattgaggacatggctctgcagtagagtcaacatcctcccaggcagctgctcccccaagcccatcatccacttctttcagctttgagtacttccaatttgttaccttgtgggtgaagtgcacacagaggcacgtgttgcaggcgagggagtggcagcggcagcgctgtccctcctccacgatcagcccatccctgcagccagggtagaacagcagcatcatctcggactctgctggctccagttattattttttttaatgaaacgtaaatctggtattaacagtttgagaacttttaggaaaggaatttgagggcagagtgggcacttcctggctcttccttcttttcctggaaaccagtcagattactggttttaaactggaggtggcaacaggcattgtagcaactgtgtggccagaggatgccgagttcccctgagcacaattccacgatgccctcctgatattactattacctctctgcctctccctcttcccactgacggtgagcagacacagccctcttccagtgagctagccaccccagcccttccacttgcatacacatgtctaaaagagatgctggctcccagattgactcctggaacttaaggcaattgcagctcaatttccatctcaccctgagctccaggatgccaagatttaagccctatcatgaccaacgtctcagagagagatggaaactcctgatccccatctcacagtgggtaccccaagatacagcttggcccagatagaagagagagctggctgctgctgtacctggtggttgcttttccatgtcactcatctatctctaaggctcaccccacctgccacacagcttctggacttttacttttccctggtgaattggaaatcagataataggatggacaaatcaaggcagctcagctcacagagaaagctagttggggtttgctttctgttttcacatcctctaaaactgtactgaggatggtgtgtgtgtgtgtgtgtgtgtgtgtgtgtgtgtatacctatgtacttggaggagggtgaggaaggggaggctgcaggattgattatgacttattaaactattggaaaagaggctgaatcatcacagtcaaaaataaacagctgcaactccatgcgactcccacttcttgcctgctcccctttgctccctcacagcatgtaggagagactgtgctgggtcagaccagcaggtgctgactgacgtggctacagcaaggggaccacctgtatggccgctgcacctccaagctgtgggacgcagggacagctgggaccagtcgacgtccactggccctctgatggctcctaggactgaatcttggactccaggtgcgggtttacactccctgcgctcattgggaactgcatggagaagcgctatcccctgagccctttttctccctactcttagcctggccctgcgccctgcgcccggggctggcccacggtaaacacagctttgctaacttgtttggctaaggaaatcacagaggtcccggtataagtctgggtcaccccggccgccactccagctgcctagaatatatgggtggaagggaatcgactctgtgaaatcagagggaaaatagcgcttgtccttgccatgagtcttgaggagaccgaaaacgcttaaccttttacgcccccgcaggcgggtcccctctctccccgctccccggctgtctgtaagctctgcctgcggccacccgcaggcgtttcagccggtctcacccctgtccttctgcaggacccgggaggaggggttgggggggcggagcgaagccgctgtgacgtagcgggaggggggcgtggggaaatgtgccgaggggcccgggctggctgggccagtcccagcggcgcagccacccatgcgcgcgcgctcgcaagaccaccagcgcccagagccccagtctgaggcttggcgccgggggtctgcgggcgaggggagctctctacgtgcgaggggctagcgggagccggcacaagagggtcgaggagccaggaaccccaaacgtccggcgccaggcgctagccaagctgctgcgcgccccggcgcccagctggctcggggacagccgctgggtgtcggagaccggagctagcggattgcagcggaaaagcaaaggtgaggggtgtgtgtgtgtgtgtgtgtgtgtgtgtgtgtgtgtgtgtgataagagagatggagggagcgagaagcgcacttgggcacctgtgtgcatctgcgctgatggtggtgtgcccatccgagtgcctgagcttaggtcccggtgcgtgattctccgctcttgtgccttttggggtgattgtagtaggaatgaacgacaacgggtacccttgcctgagtaagggggctgtgggtagagtgtgctggaacggacgtgtcctcgcagcctcatgcccgtgtgcgtggcgtgtgccctttagcccgagatttcaggtagctgcgacgggtgacaacttctctcccagccccctacaaaagagacctggcgcgaggggagcgaggccgtgagatgccagctggggctcctgcgggagcgcacccggagatccgagcctgccagaggcaggcggcgggcgcagagcggagaaagaggggcttctctccctagacgctgaacgatctaggatccgtccccgtcccccacctcgggacagaaaggacagtttgtctaggtttggagagaaaaaaccactgcataggccgtgcccaaaagccgctggccaagtcccccaagcgactgtcttctgcgccccgatgtctctgtcctcagcgccccccccccacacccggcacccctgctgtgcgtttcgatactgggcgtgctggcgccacaatctccgctcttgcctcgtcttcctggaaatggcacagagttc

SEQ ID NO: 7373 - DNA, 6000 bp, Homo sapiens
ccctgtttcctctcactttgcaagaaggagggagttagctctttgaaaaactaacaactaattagtgccaggaagggtctaagggggtctggcagcggaggtgacagaaaaaaaaaaaacaaggggaaaggctagcagaggtccccccctagggagttactgcacagtgggctggagtttggggttcaatatggtggacaaatgtgggttcttacaggcaagtgacctcatctctctgagctgtgaggcatatagattcacgtgtgtacatggtgggagttcaacaaacaccttcaaacagccctgaaggttgcacaggtgcattcacatctctgatctcattttaggcctcccagcagcctgaggagtacagggcaggctggagcgctgtgttcccatttcacggccaggaaactggctccaagcaaggacgcacctgcagctcagggctctgaccttccccgccgtgcggcaccattgtcatggtcgtggggcttccctgaggcaggcaccctttacccgcctcccaccccatcctgatccatgatgctatccctgataattacctgggattcatcggagacaccaaagggcagtgccagacagaggccgccctcttcccaccaccacctctatacatccctggagatgggcgtggggtgaggttgagaagtggcttgatgctgtactgatttttttatttttcctttcttttctttcttttttttttttttgagatggagtctcgctgttgttgcccaggctgcagtgctgtcgtgtgatctcggctcaccgcaacctccacctcccggttcaagcgattctcctgcctcagcctcccgagtagctgggattacaggcagctgccaccgtgcccagctaatttttgtatttttagtagagacgggggtttcaccatgttggccaggctggtctcgaactcctgacctcaggtgatctacccgcctcagcctcccaaagtgctgggattacaggcgtgagccaccacgcccagcctgattctttttccaggtatgcagaccactggcctctcgttgaatctgttttttgttgagttgtaactttgttgaaatgcacaaatcttaagcgcttctggtgccttgctgagctccacaggcccccggctattgagccaggtcccgtgccaggctcctctctccaaagcagagaagttatttccaggccaggcccctgtgattgggtttggggcctgcatggagcagtggcaccgtggacaggaaaccctgggggacgctgaggctcccaggcctctgactgtgaccaccacacatctgcctacagcttcctctttctcttcctcttgaccacggtacacccaggaccaagcaggagagcaggtaaccagtcatcgtgaccagctggtgtggactgtgtatggcccggggaccgtgggacatgctggggcatggggtgctgaagctgcctcagcctctggggggtgcaggaggagtggggaagcttccccagagatgggcaggaggccagggcatggtcagtccccaggcagcgtcaggctcttgcagctggtctcacccaggctcctggggaaaggaagcgagatcttcctagtcccaaacctctgtcctttcctaatgcccctccccctgcaaatctcattcagaccctgagtacacaactcaaagtacacacagcaagagtaccaagaggcagtaagttccccccagaggtcagcctacccccactctccatcctgtgctcagcagctgacaagctgttcatcccaatgagggggccacagtcacgccgccctgatcccgcctctcagctctgcgtgcccagcctctgggctgcccttgagtggcacccatggggccaaggccctccttgcttcaagctcagggggaggaaggaacagagtggatggggaacagcccaggctgccctggcgggagggtggctctagagattgggctgctttcaaaagggaagttctgctgagaaactacagcccatccactccccacatcttttctgaggactgggtggttcacaggactcaatgctgctgctgcaggtcttcccagaaagcacccctcattggcctctgagcacgtgtgtccacaccaggaagagactccagagctgatcagaagttttgtggctgctgtgggaccacttctcaccctcacccctgggaaatgggcctcagccctgtggcctcatctcctcctccccctgagtcatgtcacctgatggttatcgggacacagccggaatgtgcaacttccggcaaaaaactctcatgttttgtggttattttgcaccattttgtttcttcctttgggtttgtggacaggatggggtgagcaggatgggcgtggcagggtctaagtcccctgatcccttctcctttgcagtaagtcaggtgtttctctatgtgcctaaggagaattgcatcccatagattaaagtgtaaagcgcacttcctgtggaatccaattttcctattacctttcatcaaaagtagagatatattccctcagaaaaaactgacctgaggatgttaaggaacactgacatttcagtatttgtataatcataataatatttattcccacagaggagctgtcattattgacgttttacagaagccacaggctttgctcaagttcattcggtggtaagtggacaagccacgccagaacttagccttctgcttctctgtctggcctggacgttcaagattgcagcagcgcctttttggtcatggttgaatcaaaaaataatttttgagaaactttgcaatgatcaggccacataagccaccgaatatgacacatctcctgcatttttatgttcagctcaacagtgtcatgatccaaagtgtcttggatctttttttttttgagacggagtcttgctcttgtcacccaggctggggtgcaatggcacgatcttggctcaccgcaacctttgcctctcgagttcaagcgattctcctgcctcagcctcccgagtagctgggattgcaggtgcccgccacattttttttatttttagtagagacagggttttgccacgttggcccggctggtctcgaactcctgacctcgtgatccgcctgcctcggcctcccaaagtgctgggattacaggagtgagccaccgcgcccggcccgaagtgtcttggatcttaatgaggtttagttaatctatgactgcatcatcatgaaaatttccacaatgtccaccaggctttgtcattgaatcttccagcagcagagcccataggtctccttggcttcctgacaccttcgtgggcaaggcgcccctgtgttcagaaggaagaggaaagtgacaaattccaaaaagggccagagggaaggatattcttgggatcccatagctggcacagggctccatgtgggtggacactctgagcttggggactgcaagctcccaggtgacgcattacacattaggagtggcatttcctgtgcccacctggtcattctgtgcaagctggggcacctactcaaggcacgtgtgtgagactgtgtgtgtgtgagtgtatgtcactgtgtgtgaatgtgtcagtgtgtgagtttgtgtgtgaatgtgtgagtgtatttcagttgtatatgtaagtgcgttgtgtgaatttgagtgtttcaatgtgtgaatgtgtatgtgtgtttgtatcagtgtgtgtgaatttgtgtttgtgtgtgaatgtgagtttgtgaatgtgtgtgggtgagagtgcctgtgtgtttgtgtgtgtgtatatgtgtgtgtgcatgaacgtgtgtttgtgaatgtgtgcgtatgtgtgtgtttgtgaatgtgtgtgggtgtgtgaatgtgtttgtgtgagtgtatgtgtgtgggtgtgtgtgaatgtgtgtgtatgtgagtgtgtttgggtgagtgtgtgtgtatgtgagagtgtgagtgtgtttgtgtgtgtttgtgtgtgggtgtgtgaatgtttgtgtgtgtgtgtgtatgtgcatgaacgtgtttgtgaatgtgtgtatgtgtttgtgtgtacgtgtgtgtatgtgtttgtgaaagtgtttgtgaatgtgtgtgtgagtgtgtatatgtgagtgtatgtgcatgaacgtgtttgtttgtgaatgtgtttgtgtgtatgtgtgagtgtgaatgtgtgggtgtgtgtgaatatgtgtgcatgtgagtgtgtatgtgagtgtgtgtttgtgaatgtgtgtgggtgtgtgaatgtgtgtttgtgtgtatgcgagtgtgtttgtgaatgtgtgggtgtgtttgtgtgtttgtgaatgtgtgtggctgagtgtgtttgtgtgtgtttgtgaatgtgtgtgggtgagtgtttgtgtgagtgtgtatgtgagtgtgtttgtgaatgtgtgtgggtgagtgtgtttgtgtgagtgtgtatgtgagtgtgtgtttgtgaatgtgtgtgggtgagtgtgagtgtgtgtatgtgagtgtgtgtttgtgaatgtgtgtgggtgagtgtgtgtgggtgtgagtgtgtatgtgagtgtgagcgtgtgtgtgtttagagtctgcactctgtgtggatcaggaaaggggtccttgcaggctcgctgagtccctgctctgtgcccagccccgagttggctccaatggggctatatagaaaggaaggcatggccggaggacctctgtgtcaagttgaggacacatttccaagactaggaaccattcagggactctggagtcacgatgacaactccccttccctcagccccgaagcccaggcctggacctccaagggactcagggaagggactcaggaaaggggagttccccctggcagcctcctcgtgggcaccaccgagggtgagaggagccagctcagcgggtcccacccccagggttgcccaccttgaccacaaggaaaggagggaggagttattgggccttccactaggaggagacccggggaagtgagagtcggggatcagtcctgcaagctacggagtcactacagggagaggtctcatcactagaaatagccgaagaacctgcagcctcaaccagcgttaaggaggacgtgccgtttctagggagtcttagtcggggctcaccagcttcctgcattttctgaccggctccaggaatagaaccaaaagaagctgaacaaggaagcagcgcggcaccaagaaaagcagaagtcggggccttggaggcgtgactttcccctcgggtccaggtagggcctggagctgctgcaagtgccgcctgtgctggggaagggaccatgtggctgccttgggctctgttgcttctctgggtcccaggtgagagtttcccttcccgggaaagtctgcggcagggagggagggtgcgaggggcagggccgcagggcaggtatcacacgagacgccccgagtctggactccgtgcagaacgcagaatgcggtgcgctctgtctaccacataagatggacagatgaaggtccacacccctgggagaggaaggagccagggcctctcccggctctgcacccacgtaccttggctgaaccacagcggggcaagtgataaggggtgggtgcagaaaagggaccttttaggttttcagttgaattcttacaggaagggggacgagaggcaggatgtgtcagggtgggtggagagtggcagccactgactgcgaggggcatgtggtgagggtgggggagatgccgggctcactgggtgcagggtatggaggaggggggtgtggggagggtgggggagatgccggcctcactaggtgcagggtacggaggagggggtggggcggtgagggagatagggtcggggtggggagcagatcgatagtctctggaatgcggagatttaaccagggcagcccagcggctggggcctgagcagggggaagtcccgaggcagccttggctggggttagcccctgcatgggcctgagaaccaggggtcagtcctctccaagaaggggatatgggacaga

SEQ ID NO: 7374 - DNA, 6000 bp, Homo sapiens
aagttaggattgttcataagcagtagaaaattcacatggtaattttcctatcccttcttcctatggcctggagggtcaccacactttcctctcctaagatcatcatgaaaatgcaaggatttctttatatgttgtcataagggcatcaagaattcatatgtaattccttaatactgttttgtttctagattcagtggcaagtatggggttccctctcagaaacatactgacctggaggtgagggtctcattccaggatttcagggaactagcaatggccttttggttctggggtatgatctctgcaaaagctacccagtcaatggtttttagagcaagttttcgcccagccattttgggatcctgaaaaataagtcaaataaaaacaaggcttttttatgaggtgaattttcagttgggaaaaatgataaataacaaaataagagctcttagagagaatcctttaaatcttagaaacatgcaagtcttcacaagaatcacttgaacccaggaggtggaggttgcagtgagtcgagactgcatcactgcactccagcctgggagacacagcaagactccaactcaaaaaaaaagaaaaaaagacagtgtagcttttcaaattcaaggtaattcaaggtgtgcggccaggcgcagtgggctcacgcctgtaatcccagcactttgggaggccaagacggttggatcacctgaggtcaggagttcgagaccagcatggccaacatggcaaaaccccatctctattaaaaatacaataattagccagccgtggtggcccgcgccataatcccagctactccagaggctgaggcataagaatcacttgaacccaggaggcagaggttgtaatgagctgagatggcatcagtgcaccctagcctgggcaacacagcaagagtccgtctcaaaaagaaaaggaaaggacagtgtagcttttcaaattcaaagtgtgcaatgtggcatacaaatacattctctcccaactcctatttagccttaaaagcccagctctcttggccgggcgcagtggctcatttctgtaatcccagcactttgggaggctgaggtgggtggatcacttgaggtcaggagttcaagaccagcctgagcaatagggtgaaaccctgcctctactaaaaaatacaaaaattagccgggcgtgatggcatgcacctgtagtcccaggtactcaagaggcttagacaggacaatcacttgaacctgggcggcggaggttgcagtgagctgagatagcgccattgcactccagcctggacacagagtgagactctgtctcaaaaaaaaaaaaaaaaacaaaccccagctctctttatcccctccatgtgcctctggaaaaattactaaaaataacactcttattgcataaaagttaataaagacatttccacccagattgtgttttattcactgattctccagtagacagaaactgacacacacctaagtttcaacaagccttaaatagagcactctctaggctaaaatttacttatgtgtacaatgggcattatcagtcctgcttgccccagagggctgctaaaagtgtcacatgaaattgtgcacagcaacttgctccagagttttacaaacttaaaagggctatccccttccaactagattggtaatacacctgcaccttcttattcacatcggattataccctagcagcaccagcacacgttgtgcactttttttttttttttttttgagatggagtttcactctgtcccccgggctggagtgcagtggcatcatcttggctcactgcaacctccacctcccaggctcaagcgattctcctgcctcagcctccggagtagctgggattacaggcacccaccaccacacccagctaatttttgtatttttttttttttttttgagacggagtctcgctctgtcgcccaggccggactgcggactgcagtggcgcaatctcggctcactgcaaactccgcttcccgggttcacgccattctcctgcctcagcctcccgagtagctgggactacaggcgcccgccaccgcgcccggctaattttttgtatttttagtagagacggggtttcaccttgttagccaggatggtctcgatctcctgacctcatgatccacccgcctcggcctcccaaagtgctgggattataggcgtgagccaccgcgcccggccctaatttttgtatttttagtagagacagggtttctccacgttggccaggatgggctgaaactccagacctcaggtgatccacccacctcagccttgcaaagtgctggaattacaggcatgagccaccgcgcccggcctgcattttaagaggtattcaacacatgtgaaaatgtgagaaaaatacagaaaacgactacagccacttaaaaaaaaagtcagaatataggaaaatagtcctctttaagtaagatcagggtcagatattaaaagactgcaaagtcaaaaatctctataagcttggagtggaatgcaagggaggcggaagcagtctttctcaggatcttcaagaaagttgtcaaacacctgtcctgtccttcctttctttctcaggacagcctgtttcctgttgtggaggggaggtgttaaggcaattggcatgtgattttaaagttaccagggaaccaagcacccttacagactttcccaaacatcagtgtatcggggaacttgccccgatagtcacataggttcttttctattttcctaagcgtcgactggcttgacagagtacaaaagagagaaattttaaagctgggcgtccgggggagacatcacacgttggtaggatccgtgatgccccacaagccacaaaaaccagcaagtttttattagggagtttcaaaaggggagggagtatacgaataggtgtgggtgacagacatcaagtacttaacagggtaatagaatatcacaaggcaagtggaggcagggtgagatcacaagaccacaggaccagagcgaaattaaaattgctaatgaagttttgggcaccattgtcattgataacatcttatcaggagacagggttttcagatcaaccggtctgaccaaaatttattaggtgggaatttccttttcctaataagcctgggatcgctatgggagactggagtttatttcacccctgcagtctcaaccataagagacaggtacgccccaggggggccagttcagagacctacccctaggtgcgcattctctttctcagggatatcccatgctgagaaaaagaattcagcgatatttctcccatttgcttttgaaggaagagaaatatggctctgttctgcccggctcaccggcggtcagagtttaaggttctctcttgttccctgaacaattgctgttatcctgttcttttttcagggtgcccacatttcatattgctcaaacacacatgctgtacaatttttgtagttaacacaattattacagggtcctggaacgatatacatcctcaactgacaggattaagagattaaagacaagacaggcataggaaatcagaagagtattgactggggaagtgataagtgtccatgaaatctctacaatttatgtttagagattgcagtaaagacaggcataagaaattacaaaagtattaatttggggaactaataaatgtccataaaatcttcacaatccacgttcttctgccatggtttcagccggtctctctgtttggggtccctgatttcccgcaacatcagtggaaaatggaagtcacaaataactttgtgtgtgtgtgtgagtgagacggagtctcgcactgtcgcctgggctggagtgtagtggcgtggtctcggctcactgcaacctccgcctcccgggttcaagcgattctcctgcctcagcctcccgagcagctgggattataggggccttccaccacgcccagctaattttttgtatttttagtagaggcggggtttcactacgttggccaggctggtctcgaactcctgacctcgcgattcgcccgccttggcctcctaaaattctgggattacaggcgtgagccaccgcgcccggcgaaattttttttaattcttaaaaatctattgcttaatccccagcgcctagaacagatcatgcgcataggaggtgctcaatgaatctttcttgaatgagtaaccgaactctgcacccgaggagccctgaacgctctatacgttcgaatcctggaagctgccgaaggggaagggcgcagccccgcagccagctgagcgtccctcggcaggttaacactgtctgcgtaatgtttccccagtccccccaccaaactattgaagtctgccgcgctgggagcggactgcacgagacacggcttgtggcagcgcctacatcagcggcgcctgggacacagccgggcccccctgaccccgcgcgccaaggagggctgaggaagggatcgcggggcgaggagcggcagctacacaagggacactctgccagcggggcaagccgagggcccagcgtccttgacgggggcgtgacaagggtcggcgtgaggtttggagagggcagagcagaggagccctccagggatcggatccaatgccccaagccccactcaccttcaccgaccctggctgcccacggtcctccgcagcaagtaacggaagtgggtcacgggaagatctttcctcagccaaccccaaagccaagggggtgggccttgcttcgcagatcagccaatagagatgagggctggttccggaagtatcttcccgggggcgggcacagcgcctcccccgcgcgggtccccgggcgctggttgggggcgctcccgtccctctcccctctgccccacccccgccgatgggccggcccggctctccctgccgagaaatgggccggcccggctgcgcgcgggcagcagcggtggcggcggcggtccaagatggcggaactgcagctggacccggcgatggcggggctgggagggggcggcgggagtggggtgggcgacgggggtggcccagtccgcgggccccccagcccacgcccggctggccccacgccccgcgggcacggccgcccggctgccgccgtcgcgcagccgctggagccgggtcccggaccacccgagcgggcagggggcggcggcgcggcccgctgggtcaggctgaacgtgggaggcacctacttcgtgaccaccagacagaccttaggccgggagcccaagtcatttctctgccgcctctgctgccaggaggacccggagctggactcagacaaggtgtgccccgccctcgggcgcgcccccgggccttcgaaccccctggtttctcgtagatcggtccccagagtcctgagacacgctcctcacaggcagccccctcaggccgggaccccatcctccccctccctcccacactactcgcaggggcctcagagggacctcccactccccttcttccatgctgaggcatactctggctttctccccgaccccgcccttcgttctctgagactccttcccacactgcgcccacctgcacccacgagaacgcactccacaccccttctccatattctctgcccctgacatcccactgagatctgcatgagttttccctggctcctcttcagtccccccactgccggtgccagatgcatccagaactgggtcagggttagctcaggcatccttgtagctttctcagactccctctcggacccctctgccaagttgggcttccacagctgcaggaagcgctccttgtgatatcacactgcttttctatagtcctggtcgcagaacttttatctgttaacagtcactggtttaggtccatatttagatcaaatgcgttttttggaaagaggttactgtttgccgctgcaaatctaggctaagacagaaggaaaatgaaaattttcccgggaaaattttgggcaggatgcatggctgctaaccaaagggttgagaggtgacaagacactt

SEQ ID NO: 7375 - DNA, 6000 bp, Homo sapiens
gcaacatttaagggaaggcatcaaaaacttagcaatcaagataaattaaataatattggccaggcgtggtggctcatgcctgtaatcctagcactttgggaggccgaggcaggcagatctcctgaggtcaggagtttgagaccagcctggccaacatggtgaaaccctgtctttactaaaaatacaaaaattagggaggctgagacaggagactcacttgaacctggaaggcagaggttgcagtgagccaagatcacgtcattgcactccagcctgggcaacaggagtgaaactccctctaaaaaaaaaaaagaaaaaattagccagatgtggtggcgcatgcctgtaattccagctactggggagtttgagacaggagaattgcttgaatccaggaggtggaggttgcagtgagccaagatcgtgccacttcactccagccagggcaacggagcaaaactcggtctcaaaaacataaataaaaaaaaaaataaaataaaataaaataagaacagatcgctgggcgcagtggctcacgcctgtaatcccagcactttgggaggctgaggcgggtggatcacaaggtcaggagatcgagaccatcctggctaacacactgaaaccccgtctctactaaaaaatacaaaaaattagccgggcgtggtggcaggcgcttgtagtcccagctactcgggaggctgaggcaggagaatggcgtgaacctgggaggcggagcttgcagtgaacggagatcgcaccactgcactccagcctgggcaacagagcgagaatctgtctcaaaaaaaaaaaaagaacagatctgacctgacctggcactccctgccaaactcctctcaaaggaattcactcgctggttccaatgaaattttattcacaaagccaggtaactgccccaaggcccatggattgctgatgggattttctaacaatattgcattaactttttgtcttaattactgagcttttttggtgtcccctaatattctgagccggaggtgagtggctcagtcacctcatcctagcaggggatgtcacagacaaggagggggtgtcagggatgccaaatgttctgcaatgctcaagtcctgcccccaacacagatagcgcccctgttgttggtaatgtgttggtatagcaacactgcgtgaaaagtgatgaaaagtgaaataacattcctggagccagttgctcactcttgccaaagtaaattagaatcaaagtgtcagaagtcagtgtcaggggcactggttagaaggcttttgggtccttgccaagtgtttctggaagctgcatctttctcgttgacatttcctgtctggaggtcaaaggccttgttgcctttgagtttcacacagcgaaccacacagctggagatggttcaatttctgcccggtttgcttcagtgctctgtaagtgtcccgtgagtggctcctgtgggccaggcacaaggctccgcagggtgggtgcggtggggagcaacgtagatccattccctgcccccaccgcagctcaggggtttgggggaacagaccctaaggttggtcacagtggtgcccacactaagctacacactgagataaaggcttttcagggctgggcgtggtggctcacacctgcaatctcagcactttgggaggccgaggcaggcggatcacttgaggccaggagttcgagaccagactgaccaacatggtgaaaccctgtctctactaaaaatacaaaaattagccaggtgtggaggcgggcgcctgtaattccagctacttgggaggctgaggcaggagaattgcttgaacctgggaggtagaggttgcagtgagctgagatcgtgtggttccactccagcctgggcgactgaccgagactccatctcaaaaaatatatatatatatatatttccatccttaaagtaaacaaagataggacacaaaaagaatgaactgtaggaaaaaaatatataaactggacttcatcaaaactaaaaacttttgctcttcaaaagatactgttaagataattgtgctggtgccgtggctcacacctgtaatcccagcactctgggaggccaaggcaggcggatcatgaggtcaagagatcgagaccatcctggccaacatggtgaaaccctgtctctactaaaaatacaaacattagctgggcatggtggcacgcacctgtagtcccagctactcaggaggctgaggcaggagaatcgcttgaaccttggaggcagaggttgcagtgagctgagattgtgccactgcactccagcctggtgacggagcaggactccatctcaaaaaaaaaaaaaaaaaaaaaattggttgggcgcagtggctcacacctgtaatcccagcactttgggaggctgaggtcggtggatcacttgaggtcagcagttcaagatcagcctggccaacacggtgaaaccctgtctctactaaaaatacaaaaattagccgggcatggtggcatgagcctgtaatcccagctactcaggaggctgaggcaggagaatcgcttgaacctgggacacgaaggttgcagtgagctgagattgtgccacggcactccagcctgagtgacagagtgagactctgtctcaaaaaaaaaaaaaaaagaaagaaagaaattgcggtttaggggtcatgcagcccctggctgcaggagtctgaatcttcccagattgctcctggggataacatcattattgcaaaatctaagatcagtgcttgagatattttgtagactctgaactccatggatcagctgacaccacccagactggtaatctgactcagccacttctgccatccaacccaggaacagaggacagcaagaaaacctcacttcaaccccttatgagtccatctccaacctgaccaatcagcactccccacttccccagcacctacccaccaaattatctttaaaaactctgatccccaaatactcagggagactgatttgagtagtaataaaactcccgtcttccacgcagccagctctgcatgaattagtctttctctattgcaatcccccgttttgataaatcgggtttgtctaggcagcgggcaaggtgaacccactgggtggttacagtggctgaggtcagtgagtgaggaagaatgatttgaggccagaaaggtgggtaagcgccaggcttggaagggccctgtagccaccccaggggctcaccttcatctccaaggcctgcagggtttcagttttttgtttttttgttgttttttttttgagaccaagtttcactctcatcacccaggctggagtgcaatggcacgatctcagctcactgcaacctccacctcctgggttcaagtgattctcttgcctcagtctcccaagtagctgggattacaggcatgcgccaccacacccggctaatttttgtatttttggtagagaccgagtttcaccatgttagccaggctggtctcgaacttctgacctcagacgcccctcccgcctcagcctcccaaagtgctgagattacaggcatgagccaccgcgcctggccaaggcctgcagggttttaagcagggttggcagtagggcaagatcaggcttaatggatccgaaagatcagtcacctacagtgttgaaaaggaatctgaggtctgagctggacaacgggtggcggtggatggtgtggggatggagatgagggtaaatggtcaggtttgagaaacagtaagggggtaaagtgagtgggacgtcgttgtggattggttgtgaaagaggcaaaggtcaaagagactcatgggatttggcccaggcacctaagtagatgtggtgctgtaatttgctcaagcatggagcacataaggtatcccaggtttagcagggggcggcagaggacagtgtcaatggcaagttccggtcagtgttgagttttaaaggcctttgaggcacacaaggataggttccaggttgaatatctggactggacataaaaggcaccggatcctgagtatacagggtgtggttggagtcaccatgtggagtgagaagagggagggtgaaggtctgaggctgtgaaactccatcgtccacagatcaaaaataaacaaggccgggtgcggtgctcatgcctgtaatcccagcactttgagaagccgaggcgggtggatcacctgaggtcaggagttcaagaccagcctggccaacatggtgaaaccccatctctactaaaaatacaaaaattacccgggtgccgtggcgtgcacttgcaatcctagctactcaggaggctgaggcaggagaattgcttgaacccagaaggcggaggctgcagtgagctgaggtcgcgccgctgcactccagcgtgggcaacagagcgagactcccggccaactgagtacatttcaactaatgcacatcaaggactacccaggtaggggaagagggaaaaacctgaaaagggcctgtagttctgagggccacatgcagaagtggtgggtgtcctctcacctgctcccagggctgaggggtctgcctgctcccctacaagggactgcctggactcccaccggcaggcgcagccctcaaagctcgaggctttcattggaagggctcctgggcagggaaaacgcagaaagaagggatcctcaacctcgggctctgcgccttccccaccccacttcctgggaggtgtggtctctttatggcatgttatctccgccccaagcccggggccctagaccctgagccgggaaaaccagaagctagaaagagggcatccgggttgtgcaaatttcagacacacggatatcccgtggcgcctgcgtccggagcccggccctgctgctggactgtccccggccacgcccgccgcccctcccgcatcctggccccttccccacccgacggaatcccggggaggctggaaggtgggtccccgcccacaccgccctgggcccgccctgcctggccgcggcgcttggcccagtcccgcggtcctcgtcgcgaccggcccgggccgcaggacgccgcgctcgggggagctgagccacctctccgccaggcccgtgcgagcgggtgagcgggccccccgggccccactgcctcggacgcgtcccctcctcgcccagtcccctctagcgctgtcgcagacctcctgccagggccccaggtctcctcccgcctgggcgggctcagtggcggtgaggatctagaaaagtcttcctgtcctggttctgggctgccccggggcctggggtgatgacccgcaagcccaagggcgctcggactcctggcccgaaattccagggcggacacagcccgggatcccagcagccccaactcggaggagctctgccccggggagggagggacagcggagtggaaaccagattccggggcagcactgcggggatgggcagggcgagagtacggcatgaggtcccagttgcctgtcccaaacccttgctggttttgcagtgaatatggggggataaggggaagggagagagtgatttgccccagccaccccacctctggggctgcctccctcctccctaggccaaccacagggttgagggttcctcagccccaagctcaagcctgcccttgctgctctctgctggacgggagcccttctgctgcctgcctgggtccagggctccagcccaggagcctacttgatatgggaaggagggaggggtccccagggcctgcctcatttccagcccggggctctcccaccatgggagaagagctgggaagaagaagaggaggccccctcgactctggacaccaggcccctaacacgagacccctggatgagagcatccgctctcccgtgaccaggcgttcgagctccaggggcagggaaaggattcccagggcctagtgaggcccctgttatcagatgaggcgccctgaaaacataggctgggcttgtgtgagatgggagaaagaccagaagtatcgtctaaacttctccctgcccacacatcc

SEQ ID NO: 7376 - DNA, 6000 bp, Homo sapiens
atttacaacaatgttcttcagtgggacctcttggttgaatcaaagggcccaagaggagcctattgtcagtgagatatcactactacacgatgcagggattaaaggagcagcttctcctaaaaatatcactcacaacttagaggcaaaaggctcttttttttttttttttctgagacggagtcttgctctgtcacccaggctggagtgcagtggcgtgacctcagctcactgcaagctccgcctcctgggttgacaccattctcctgtctcagcctcccaagtagctgggactacaggcactcgccaccacgcccggctaattttttttttgtatttttagtagagacgaggtttcaccgtgttagccaggatggtctcgatctcctgacctcgtgatccgctcgcctcggcctcccaaagtgctgggattataggcgggagccaccgcgcccggcctaggcagaaggctcttgccgatggagcaagctgaacatgggaactacctgttcaagaatcaacggctcagataatttcaccaggcctcacattgcaagtatcctcagtcccgaccccgaatgccagcctctgtcttcatccattgctatctccctccaaacctttcccctgtgtgattcgaagcccattatttcttttttattatatacttttttctcttttgaaaaattttttaatagagaaggcatctcgctatgttccccaggtgggtcttgaactcctaggctcaagcaatctgcccacctctgcctcccaaagtgctggaattacaggcatgcaggcatgagccaccggacccagctccctttttttcttttctttttttttgagatggagtcttgctttgtcacccaggctgcagtgcagtggagctatctcggctcactgcaacctccacatcccagcttcaagtgagtttcccacctcagcctccggagtagctgggattacaggtgcccaccaccacgcccagctaatttttgtatttttgtacagacagggtttcaccatgttggccaggctagtcttgaatccctgaactcaggtgatacacccacctcagcctcccaaaggactgggcttacagaagtgagccactgcacccagcctactcctgttacttttaaacaaatgactaggttgaaaagatggctgccaggtgcggtggctcacgcctgtaatcccatcacttcggaaggccaaggtgggtggatcacgaggtcaggagttcaagaccagcctgaccaacatggtgaaaccccatctttactaaaaatacaaaaattagccgggcatggtggcacatgcctgtaatcccagctactggggaggctgaggctggagaatcacttgaaccctggaggcggaggttgcagtgagccaagatcgcgccactgcactccagcctgggtgatagagcgagactcagtctcaaaaaaaaaaaaaaaaaaaagaaaggtgcaatgaggaaggatgctcaggtcagggtgtgggaggaccttgccctgcttgtgtgtgattctgcacgtcattcctggctcaacagcctgaatgagtcctgctggatcactctcgtttctgactcacttctcatatctctgtttagatgaagggaaatcttatagataaacaagagtgttttctcgctgatgctttgtccagtactatgctctaaattggccttgaccaggtaatctggagctggcagaggtagcttctgtcattgtaactcagatgatatgagatctgaggtgcagaaatcgagttatcccttcctccttcaccctaaaccttaagtccagccactagactgtgcctgttctacctgctaactatctcttgaacacatttcttcttctttttttttttttttttttttttgtgagacggagtcttgctctgtcacccaggctgcagtgcagtggcgcgatcttggctcactgcaacctccgcctcctggattcaagtgattctcctgtctcagcctcccgagtagctgggactacaggcatgcaccaccatgccctgctaatttttgtattttttggtagaaacagggtttcaccatattggccgggctggtctcgaactcctgacctcagatgatctgcccgcctcagccccctaaagtgctgtgattacaggcgtgagccaccgtgcccagcagtgttagtgtagtttatgtgtggcccaagacaattcttcttccaacatggcccagggaagcctaaagattgaacactcctgagctaagggaaatggcatgtaaggctggagggggagggactgagaacacagatggggaaaaggaggaaaaggctgtcttcctgcaggaacatagaaagggaaagagaagtggatgaagtagatgagaaatctccaagggaaggccttggtcttcttctcaatagactcatcttggtactcatctgaagacacgggaagcttcagaaaaatgaagaaggattggtatagctgcttggggttgctagacaaccaacaagacttggttaagggacctcagatctgcaaagctaattcagggtgaatttagagtgggcacattggcatgttctggcttgagtgatttgatttactcatgtagcaaaattttatggctgaggggactgacagaggaagtggtcaggcagatggagagttgcagagcccttgaaactagcaggcattcagtgcaatttcattgagtgatattcataaaacccagtggagctgaaaaaccagtgtggccagagggggctgagaggttcaaagtgaagtgactgtgctacatttgttaatcttccaaaggcagccaactagatcttaaggggtcaagtggaaagatgtaatatataggtagcctgctagctcaattcaacaaatgttaatggatacaaggcagcaagtaaggtgctgtggaaactgctaagataagccagctgcccgcagggagtttgaggtcttacaaaaagagcaatgctgtataaagcagacttttgcaaaggtggcaatgcagacacagagaaggaggcccagcattatatatagagagagtcaatgactaaaacccagggagaggctgggagtggtggctcacacttgcgatcccagcattttgggaggctgaggcaggaggattgcttgaggccaggagtttgagactaacctgggcaacatagcaagaccccatctctataaaaaataaaaaaattagctgggtgtggtggttcgcacctgtagtcctagctactcaggaggctgaggtgggaggattgcttgagcccaggtgttcgaggctgcagtgagctatgatggcaccactgcacttgccagactgggtgacagagtgataccctgctctaaaaataaataaatatgtacatacatacaagaaaaaataaaagtcaagaaaggtagcatttgaggtgggcctttaggttgattaagtatttatttgcatgctggctttactgataagaaagaaccgtcaggctgggtgcggtggctcacgcctgtaatcacagcactttggcaggccgaggcaggtggatcacctgagctcaggagtttgagaccagcctggccaacatgttcaaaccctgtctctactaaaaatacaaaaattagctgggtatggtggcaggcacctgtaatcccagctactccggaggccgtggcaagagaatcacttgaacccgggaggtgaaggttgcagtgagccgagatcaagccattgccctccagcctaggcgacaagagcgaaactccgtctcaaaaaaaaaaagaaaaaaagaacctttaaagcaaagcgtagggaaccaaccatgtgacgaaggagcagaggtggaaaggtctctgtcacgtttaaagaatggtggttaatctatgtggctgcaggaatagtttagcctgtggggacttagacctggaaacgtatgtctgagtcaatttatgaaggactttgaacatcaggcagaaagatttggacctatttgcaaaggtgaactatcagtttttgtgtgcaggttagtgacatgattcttatggcgttttaggcaacagctaaactgggtcatacaagattaggtactaaaatgccatcttcttgtccagctgagaaagggattttaattacgtaattaaactcatgaatgtgggaaggggctcttacttcacaaggccaacctcagctctttcccaattatataaacaagtttttgtttgtttttttgtttttgttttttttaaacaagccttccagacttagatctctgggaaaagagaagtaaatactgacacaggcttgctttgttttcccaagagaggtctcccaggcgatttatctaattacctagaaaaaaaatttaacttgtttttccctttagatttcagccgagctggaagcgggaggggggaattgcagtattgccttagattttctagatttggtttggacgcaatattcgtcctgagggagtccctccaaggcctctcggagcgggcagcctctaggcatttgttcaaggcaacaaggagggagcttagaagaacttaagagaggcggggagctctgcaaagggcttattttaaaaagaaagggaaaaaaggtggggcgcgccgtctatctttttagaataattctgtaggaaaacgaatcggaggtaaagccatgccctctggtcagggtttctggactagaaactgcctgagctttacgcacaggaaaggacagtggctcttcactctcccggccgcatcactcggcacctaattccgccaggctcccagaggggcggttgcagctacagcctagcacgccgcgtagccaataagaagccagaattccccctattctcaaatcctgaccaatcggtggcctgaactttagctctctggccggcgcctctgttgcccggaagggaggcaagcccccttagagttgccagtaacggacatggctgcggcccccggaggaggggacgtgaagtgaggagggggttgggaggggagaggacgcgggcgaggaagaccagccccggggccccggtaagtacgagaaggcccgtggcccgaaagtggggagcaagggggcgtggggctcggccttgcgcgtcctttggattcttggccaaggaaaggggagtctggggtctgcacccagagaacggcttaaggggatgcctcctgagggggagtccagggactggctctagtctccagctcttgaccattgccttcccccgagtcttcagactcttgctctcagccctggattggtccattgtggggtctctcgccagaaataaagcctctcgccaacaaagaatccctgccccaggtctgtcgtgcctaggccctggcccagagggctcccaacgccgacgccctgagtatttatttcgaggcccctgggagtcctcatccccgacctaaataaagaccgttgtcccgcctgcgcgcgctctccgcagccgcccggggtcctcgcgcggccgtccccagctggatggagccggccgaggggctcctggcagccatccctgatcttgcagtttggagcgggcttttttttctttccgcctttccagaagcgttttcaggctcctcggaagctcaccatccatgccatcggataaagtgactcctgtggaatgccctcgttcctgtaccgcacacccctggagcccaggtctcctggttcctagcatgccacgatgcggcccctgcccgctgcccagcgccagatgcaagcaaagccccgctctttcattggtgtgtcaccgcgggctaaactttggcgttgccttggtcacgtgctgctacatcccaccctctctcctgagtttttcggtggctcttgagggaaaaaaggagggagctcgttatggaatctgttttccttctgctatgtgggtgtatgcattggagagaaggatctttttctcatgatttatccaagacgctcagctttagtgacatagttgt

SEQ ID NO: 7377 - DNA, 6000 bp, Homo sapiens
tgggctgggcgcggtggctcatgcctgtaatcccagcactttgggaggacgaggcaggcggatcacgaggtcaggagatcgagaccatcctggctaacatggtgaaaccccatctctactaaaaatacaaaaaaaaaaaaaatttgccaggggtggtggcgggtgcctgtagtcccagctactccggaggctgaggcaggagaatggggtgaacctgggaggcggagcttgcagtgagctgagatcgtgccactgcactacagcttgggcgacagagcgagactctgtctcaaaaaaaaaaaaaaagtaatgtagggcaggggatgggatggtgagggttctattttagaatgacaaagagacaaaacaatcaaatgcaataggtggcatggattggactcaaattcaaaaggaaacctttataatagacattttggagtcaactaagaaaatttgaatatggactgaatcacacatcatttaatggagacattatttccttaggtgtgaaaaggggccgggctcagtggctcacacctgtaatcccagcattttgggaggccaaggcgggcagatcacctgaggtcaggagttcaagaccagcctggccaacacggcgaaaccccgtctctacaaaaaatacaaaaatttagctgggcgtggtggcatgcacctgtagtcccagctactcgggaggctgaggtagaattgcttgaacccagaagacagaggctgcagtgagccgagattgcaccattgtactccagcctgggcaacaagagcaaaattctgtctcaaaaaaataaaggggggtattgaggttacgtgggggactgttcttgagagatacatgctggagtgtttaggatgaaatggcaggataagtgcaacttcaaatttaaaaatatacaaatgtttaacaaatatataaataaatacagcaaaatattattcttgagtctagttggtaaaaatacgggtgatttttgtattctttcaactttttggggcatggtggctcacgcctgcaatccttgcactttgggaggctgaaacgggaggattgcttgagcccaggagttcaagaccaacctgagcaacatggtgaaactctgtctctacaaaataaaaattaaaaacttatccaggatttgtggcacacacctgtagtctcagctactcaggaagctgaggtgggaggatcactggagcccaggaggttgaggctgcagggagcctcgatcgtggcactgccctccagcctaggcagcagagtaagaccctgtctcaaaaaagagggggcctattgagcaaccccttggctctgaggagaaaacaaaccccaggattctgcaccggagaggcctctgcccccagtctgaacatgtggttgatgcgggctctccagacaggtcactggactctttccaccacacatcccctgtctatttattctttaacttgttcttttataaaacaggtgccaatctaccaataagtaatgtacattctcaagtataagaataggggctcagggctgggcgcaatgactcacgcctgtaatcccaacactttgggaggacaaggcagacggatcacctgaagtcaggagttcaagaccagcctggtcaacatggtgaaaccccatgtctactaaaaatacaaaaattagctgggcatggtggtgcgtgcctgtaatcccagctactcaggaggctgaggcaggagaatcgcttgaacccaggaggcagagttgcagtgagccgagattgcaccactgcactccagcctggacgacagagtgagactccatctcaaaagaaaaaaaaaaaaaaagaatagggtctcagctagcacctacctcgagaatactcagcctactttggagacccctggtttgaactgggagtgaaggaagcaggccgtagttctcgttcatcttggtatccccagcatttggcataggagctcattaactgctcataaaatgaataaataattgaactaatgaatgaacaagtctgacctactggaggccacatgaggagtgcaggggagtggaggagcaacaatccaaggtccttgggctcggtcctgttccaggggcctcacctctcttgcagagcctaggaagccccctatgagccaacctcactctggccctaaggctgcagagatagtggggtttattttagttttataaaattcacatgcaggctgggagcagtggctcacgcctgtaatcccagcactttgggaggctgaggtgggtggatcacttgacatcaagaatttgaaaccagcgtggccaacatggtgaaaccccaactctgctaataatacaaaattagctaggcgtggtggtgtgcacctgtgatcccagctactcgggaggctgaggcaggagaatcgcttgaacccaggaggcaggggttgcagtgagccaggatcgcaccactgcactctagcctgggcaatagagtaagactccatctcaatgacaacaacaaaaaaaatcacatgcaatatttaaacttctggggccagtaacctatttgggaatccagtgtaagctaaggctcccctcccagcaaacccacattctgaaatcagatactcctcaaagtttgcacaagatctgagatggttcagggactccccactgccaagtccacatgcgggctccaggtaatgaaccccaggactccgagaagccaaggaagctcatggcttatcttacttagtgagacctccctgggttgacatctcgcctctcagctgctacagggctccaggccccctagtcattttcagaagggtttgcaatgaagagaggaaggggctgctgagcccagtggcctggggcatcgccagctctggacctgggtcttctctaggaagaagcctcagcccccacccacagtggggtgtatatgaccccctagttctctaatgggtgctgctggcagacccaggcccctcaggcaagctgtttttggccgttctctgagctcctgctccatgtttctgttttttggggtggataggtacctgctggagtgactcaggtccacagggcacttgtgctggcctgacacacacagatctgagtgcttcaaccaaactgggactccttccacattgttcccaaatccaggagcaagcctctctgaacactttctctgtgcagaacagctctcagatgaccaggaaaggtggcgactcacacatttgcaaccagcacccctgcaatcactctgagaggtagcagtggaggaatctgtttacagatgacagcatggaggctcagggaggctgtgtgaccatcccattcactcaaccacccttttattgagcacctgctatgcaccaggcatggtgctaggtgctagagagtagctgcccttggagtcacagtccaacagtgtggcgagattcctaaacatcatttcaaaccaatgtggcaaatgccatgtaaaagccatggcccaagggttatggggacacataaaccaacttggggtgtggagaggtcaaggaaggctctctagcacgtggttggtgcaacgtcttcaaggacaagaaggataaactgggctcaatgtcatgggaagggaccagcctgttgaaaaagcacggtggcttgaaaccgcatggtttggacagtgctgtgccagcagtctggtgttgtttggcattgctggccagtaagcctagagaaaaatggagccctggctgggcatggtggttcacgcctataatcccagcactttggaaggccaagacgggtggatcacctgaggtcaggagttcgagaccagcctggccaacatgatgtactaaaaatacaaaaattagccgggcgtggtggcgggcacctgtaatcccagctactcgggaaacaggcaggagaagcgcttgaacccgggaggcagaggttgcagtgagccaagattgcaccactgcactccagcctcggcgacagagtgagactccatctaaaaaaaaaaagagagagaaaacaaaaagaaaaagaaaaatgaagcccttctctgacctgaacacccgtggtaagcagtggcaatggagagactgctctcagaggactgacgggagggaggggccagctctgtaaccagcttgttaagaacaactgtaacaaggcatcgagtgccaatccatgccaggtcggcactgacctctccagggtatcactgttcacactgtaaggagatttaagtagcttgttgaagggtgcaccgaggacccgacccttcctcggctctccctctggatacaacgtgaggttaggggttggaggctgagaggaccccgtgaactgcagagcagagctgggacggggagtcaggcctcccgaccgggccgggggcactccctgggcccatgcctcgcgctggcacggagagcggggaggggggtacgcggctgacgaccgtcggggcagcagcagcagcacagcccggcgttggctagcggcccagagtcggggcagggagggttcccgtgcggacgggggctaagaggccgcctccagcccggggcagtccgcgcacccgagcctggagcccggagcctggaggggtggggaggccccgcgcccagggccggaccggagggagagggagagcggtggctcctcccccggcccccgccgctagccgatcggggcgctgggcgggcgccgcgggagccgcagccctttccggggggcggacccggctccggcggcggcacccagctcctgccccgacaggtgcgcgccgcgcgaaggaatgcagccggtctgactcaccagcgcctccttcctacctgcgcgcccgccccataaagcgctgcccgcctcgtccccacccccccaacccccgcgcccgccctcggacagtccctgctcgcccgcgcgctgcagccccatctcctagcggcagcccaggcgcggagggagcgagtccgccccgaggtaggtccaggacgggcgcacagcagcagccgaggctggccgggagagggtgagtgcccgccccagctgggcagccgcgcaggggagctggtcgggcagggccggtggcttttgtctccccttcccctccctgaaggctgacaggccccggtccctctgtccacgctgcgcaggacaggtgcccagcctccccggggtgcgccgggggcagctggcagccaaggggcagggcagctagagaagggtggtgcccatcagacctccaggccagaggagcgccttgggtgcgcctgcgggagaagtgggcagaggccagtggctggtagccctctggggctgggcccctccagggtttgcaaagaaggtggagtagacaccagcctgagtgctgggcccagcccatcatggcgcatctaatgataaaccaacattcctgacttttatgtgaaatttcgttctttctaacattggctcctacttttaaaagccaccctgagaggcagacgccatcccggctccaggcagggcttgctctatgcggtgccacagtccatctggggctggggagtccctgattttccttttctcttggccaagcacaggcctgccttcctcccaaagtcagccccaggcgccttccttcaggaagctctacaggcctcacccaccagccccagggctgtgcccaacactgccacctcctgcagcatccgccctctttcccatggctcagcctctggggtggccctctggctgggactggggctctggggctcctggtgactcccaggagcagggacagggcttctcctctgcccccatggccttgccacaccctgaggacaaggaccaggcacaggtggcatggttgttgctgtccgaaacagagctggcagtgaaggcttggagtctccatcctgggggctgagggaaggacagcaggagggacaggaggggaggtatgtctgtctactcgaccctgatttctcagggagacagaacagccaagggcctggggtccc

SEQ ID NO: 7378 - DNA, 6000 bp, Homo sapiens
tgctcctgcaccgaagctgcaccgtgcggttgtagtactgggagatgatggcacctcggctgcggcctatggaggcagctgggcagggccgggccgggcagggccaggcctccctcccctcaggatgggctcaccacaggcctctgcgtccctcaccccttcccaggacccaggaaaatcctttcaacaaagacttcaggcaccactgcattccgaaagcctatttttaccccgtgatgactctggagtcatttttggagcccagcgagggccacatggggctgtgctgggcccccaggcagcagatgggatgggctaggagcccgccctgggcctggctctgagctacgggagcagccactacccagggagatgcctggcaggaagcccagcccagccccagggactggggtcaactcggggccggggccgaggccgaggctgagggtcccactcaccaatggtgcggctgggcatgctggccaggatgcggagtgtggccgtgctctgggtgccctcgggccgccagagtgtctgctggctacttcctacaaagcaagaaagactcaccaggggtcctggagatgccattggccacagtatctcccaccccatcccaggcctgcagagctgggaggcccgtcctgaggggctggggcacccaagtcttggtccacaccacccagcatccaggcctgagctcacctgtcacctcccgctctctctgctgcagctccagcccctcctgggccgtgcactggctctgctcctggatgagctgctggaaggagtcgtgcacttcgctttcatcataggggctggggccctggctgcagagggggttggcgggggggtcaggctccagccacctctctccttccagcagcccctgctcaggtgacctctccgtggggggtggaacattccagcctccagcccccagccccagagcgcttacccctggtcccctggggtctcagggacatcgaggatgaaggccagtggctgggccatgtctctggccaatgcccgctagtctgcagacctagggtagctcagagcctgggcgccacctccggagcccccatctgatgagacaggggcacagagccaggggtggtcttcaacgcctggcagctgtccacaccacccattcctgggggaaccacaggaggtgccactcacagcccagacagtcccgcccacccccctatcaccccaggtacataaatggtgaggcaccgaataagcctcatgccagaatggaatggggggccccctccagtgtcaggggaggggagagaggaaggaagggtgtggggtctgcagttccacatctgtttcctcgatgtcgccagtccctgggaaatggggaagaggtagggtgcctgtagacacagcccctttcaggatctccatgcccagggttctggcacagagacacctcctttttggagagaaaggtcagagtaggctgtaggccttctctgcgtctgccctgtgacctcaaagaacttcctctagcaggaaattagctgctggagccctcacccccaaccagccccaggcggaagcagcacagggggctcctcccccacacacagaggtcactccatgccaccgccgtcagggcgccaaggtcctcatgttctcagaagacccactgccctgcattccatcatcccagggcggccggctgggggtggccaggacctcaacaggcctcctttgtcctggctctgccgtcacccggcacaactggaaccagagcagccttgtctggggccctgggctcggggcccgttcatctgtgagagtggagccaggactcagctcccagccaccagcgagtcctgccggcctctgccctggactcctcctgcgctcaccctcaggaactcagggctcaaagtcggccgggttgaagggcgctttcctcggacaggcaaagcccgggggcgccccgacagagcagctccttgcaggggtgccagtcacaggaccggacggcgccctccctcagtgtcctgggtgccatcttcgggcccaggccccacaccaccccctccctccagcaggagcaaagacgtgggaaaaccagcccagagctgggtccgaggcggccccacccagcctaacacgggacagctgccgaaagaggggctgaggacgccccacccagtccctagagctggaatcccttcctccagacaggcccttctaagctcagggaacccggggactcgggcacccagcgccccagcactccgccccgaggcccaggcaagtccagcggagtttccaggcgcaccattcctgagctaggtggggagaggctgggtggcgcccgtttccaggaacccccaccccagccggcagcgagcttcccgggagcagccgctacccagggagaaccgcaacctggccccagagcccagagcggctgcaactctggggccaccgaacccgtccagccggcctccctgtcccccgccccttcccatcccggccacaccccctcccctcccctccccgtgccctggcgctcggctgggggacctgggtgggggctgcggattttgctccccgcactgtcctccccgcccctgccgctcccagctctgtccgagccggagggtcaagccctgggagctccaggagcacccggggagggaactcggctgccaaatggccccagaggccgaaaggaattcaggggggattgccgctgtccccgcataggagaagcagctggggctggcgggacccgggaccgggatcgcggccgctcacctgggaggcgccggggaggaggggccgcgcgcgcagccagggctcacctgtgccccgcaagagccgccgggaactgaggtctcggctctccttgccaagggagtggcaaagggccccaggggcgactgggccagtcgcaggtctgccggggccgggggagtagccgcacctcccggcccacgtgggcggggggggggggggcgggcctcggctatcacgtgacccggcccggcccgcggcgcccccgccctcctccgggcgccccgcggcgactatgccttcctcccctgccaacttccgacccctcctcctgaggtctgagctgggctggattcattccagcccctggttgaagtccccaatttttctgacgctcagtttccccaagttccaaaaaggggcaatatttccagactcatctgcttcccatggttagggatcgtccaagtaagatgccgccgaaagccccagggacacagagtatctcactccagattgggcagcgcccccccccccgccgcccccgcaagcctcctgctgactctccccgaccccggcggggggagcctggttatctcccactcctgacacctgggcggggttcattgtttatctagcaagagttctggctcacttcctgtgtgctgtgtggagaggaggggatgaaaaggaggacacgctgacacttaggtgactgtccccaggtgctgtacccgttgccctgttttctgttattccccatgagccaggaaggtatgcactgatattcccatttcacagatgaggaaactgaggctgagagaagttaatcaccctttagggtgcccccagccaaagcaggagacttagtggtccacctgggaactctatggaggaaactgcctttgagattgtaccccccaccccaagcccatttggaagggagggtcattcctggcggggagaagccatgaagcaggcagggtgaatgtgagctggggcccaggagggcaggagagggcactgctgcaggggagagcaggcaagcaaaagcgaggaccaggcaggggtcaaggctggggccttttggagctgccagtgtggtcctcagatggctaccccaagctggttcttggcaagtggcaccctggcatggagacccagcccctgcctctcctcccactgcttccccctccctgcatacccacactgaatttgcatgaatgccacctcctctggggagcctccccagattgaaccctggtggagcacctaccacttcctattgacatgtacatctgtggttctgtgccccctcctaccccagcccactgtgtgcccagcaccagcacatagcttgcgcctgacacacagaaaggactctggaaaccaggaaggaggtgggcagagaggcagaaaagctatgaacattcagacctgagatgactgggccctatagcaggtagagagggagcagagaggaagggctgcgggcttcccaggggcccaaggacagagaattggcaaagatatgtcttaaacatctagcctgggagagcatgaatggagccaattcctgagcacttactaccggccaggtgctaggcctgggtcttggcacaaccataacgccaatgacaggggctggaagtacagcagtaacaccaagagtatctggaaacccagcagccaggttctggggagcccaccatcctgtcattatcacaccctccagggtgaggccggcagataaagagtttggcccctgtgcccccaccgttcccatccccacccatgtcaggctcccagctcaggcctcgaggtcaagtcctgcctatccaggctggaaggagttgaacagagagggcctcagctgcaggctggacatccctggaggcagccaggcggcagacccggaccagtggaccctagggctgcaggagaccaggccctgactcctgtgcagaggggaagggtgggccacccgcagcccagcatgcacagagctccctgggaggccaagtggcctacgcctgtcaccttcacctctgcatctcaggggcccacaggaagtgcctgcttggcctcagtttaaagcagaggaaaccatggggtgagaggggaggagggaggtagtggagagggaagctgggtttcctgtcatatgacccctcctctgggctccctcaccaccctgcctggcttggcaggagtcgtctgagaaggggactcctccagggacttggtccctaggtccccaggtgagctggatgtccagtggagggagaatgcagagggtgaggggctgtgggggccagctagagccctgcaagggtagcagtgggtccctgctcctgtccccacggctggggctgtagccacaggtcctcatcaggggctcgcggggtacctgggactggaggctggaccacaagaaggaagacagaagggggtcccccgacatccagagtcagatgtggcagatgccgagtcccaggaactgtggggtttgggacacaggctcttccggaagggcaaactgccacgtggagaagagagggaattgtctctccttggggtgacggtgggcccaggcacaggtggatgcggggtgcagcaggtcttggctttctttgcctgtgccggtccagactttctgtgccctttggatctttcaccccatttgacagatggggagactgaggccgtggctgtgtgtccctctgagagttggagcggggctgggcccgaattcgaccgcagcaggattctctctcatttctgagccccggaggtggcagagcggcagacccgggcaagtgaaccctagggctgcaggagcccaggccccgacgccggcgcagaggggacggaagggcccgcccccagcccagcgtgcacagaggccatagccaaggccttaaggctcatccaaccggggactcatatcccccccaccggcagcccggcgccccagcctctacccgtgcccgccgagatgctgctgccgcggtcggtgtcatcggagcgggcccctggggtgccggagccggaggagctgtgggaggcagagatggagcggctgcgcggctctgggacgcccgtgcgcgggctgccctatgccatgatggacaagcgcctcatctggtgggtgccacgcgggcgccagacggtgcgtggggggggtgctgcgaggctgccccgtcggatggtgtgggagcaccccgt

SEQ ID NO: 7379 - DNA, 6000 bp, Homo sapiens
ctaaaatcccagcactttgggaggctgaggcagaagattgcttgagcccaggagtttgagaccagcctggccaacatggtgaaaccccatctctgcaaaaaatacaaaaattagctggatgtggtggtgcacacctgtagtcctagctactcgggaggctgagatgggagaattgctcgagctggggaggcggaggttgcagtgagcctagatcgcgccattgcactccagcctgggcgacagagcaagaccctgtctcaaaataaagtaagaataagataaaaaccaaatgtgaaattgtgtggtacacacggcaggtagggcagcagcccagacacaaggtggagggcaaactctagaaggcggcctggaggaggcggcagccacagctaagctcattaggcattttgtaatgaggagaacttactgaggaggaggggtttaaaaccgctcagccatgcctgtgctaccttctcccaccctgccagagccagtgtctgagctgcgggccaacttcactctgcaggacagaggggcaggccccagggtggagatgatctgccaggcgtcctcgggcagcccacctatcaccaacagcctgatcgggaaggatgggcaggtccacctgcagcagagaccatgccacaggcagcctgccaacttctccttcctgccgagccagacatcggactggttctggtgccaggctgcaaacaacgccaatgtccagcacagcgccctcacagtggtgcccccaggtgagagggcccttggatttccagaggggcagctggcgcttctgtgccgggagggtgctagtgtccaagacacaggtcgatgggaagtgggacagctctacccggccactgctgagagcagagagggcacaggaggcaaccatgcccaccctggcccctgcctaaaggaagcccaacccagctgcctccgccccctcccaggagggttgcccagggcacccaccatcgtgctggttggcagccttgcctccactgcggccatcacctccaggatgctgggctggaccacgtgggccaggtaggaaatgggtgctcgatgcagggaggagggagagctgctgatggcctgagaggtccaaccgggccctggctgcagagctcaggtggtggggcttgcagggcagggctgtggccagggcaaagagcggccatcaccgcttacgcatgactcgaaggtgtttatgaggacctactgtgtgccatgtgcctactgaggcttacacattcaaggcgttatcggaccctgaccagtgctcccaggtgccctgtaacacagtctgctggcctctgggagggcagtctcctaagttctttatggggtctgagcagggattgcagggatgatgcctccaggagaccaaggtggaccaggagctcctgccttctgtgagaaccaccttgggcagtctttccgaggtggtggcaagagcctggggcccagcctcccagggtcccctctccaaggccatggctttactaacatgtaaagtgaccaaggcctttgtagtgtctgagtgcaggcaccacaggcctgtgtgctctgcctgtctggctttggtggtggccagccctgcctctgtgaactcatctctctttgtttgggagacactgccgtgtcctggttctcatcctctgcccgtggcccaggcccttacgtggctctaccaggagtctgtccttggcactttcccatctcacttctaccaagtctgttctttccagaagccagactcgtgggtgagccatgtcacctcgccgagcctcagtttttccttctgtaaaatggggtacagccttcatttagtggggtgagtaagcctcatgtctcttctgctggggcactgatgtgcttggcaccataaaactcccagaggcaggccgggcacagtggctcatgcctggaatctcagcactttgggaggctgaggcaggcgaatcacctgaggtcaggagttcgagaccagcctggccaacatgaagaaaccccgtctctactaaaaatacaaaattagccgggcgtggtggtgcgcacctgtagtcccagctactcgggagactgaggcaggagaatcacttgaacccaggaggtggaggttgcagtgagccgagatcgtgccattgcactccagcctggacaaaaagagcaaaactccgtctcaaaacaaacgaacactctcagacgcctcgggaggggatggctgggaggtgagcctgcctgacttgagtctccactgctttgtcaaggtggtgaccagaagatggaggactggcagggtcccctggagagccccatccttgccttgccgctctacaggagcacccgccgtctgagtgaagaggagtttggggggttcaggatagggaatggggaggtcagaggacgcaaagcagcagccatgtagaatgaaccgtccagagagccaagcacggcagaggactgcaggccatcagcgtgcactgttcgtatttggagttcatgcaaaatgagtgtgttttagctgctcttgccacaaaaaaaaaaaaaaaaaaaaaagggtaactatgagagatggtggatatgttaacttgcttcgctataggaacctttgtgctatctatattatctatatgaatcccatcatatcaggttgtctaccttaaatatacacaaaaacatttatttaaaaaaaagaaaaaagcctgccagctgggattcttggagtgctggtggccttcagcaaacacagacactgttggtgtgagggcttcaggagggtcacagaaataagggggtctgtgtggccctgtcctcgcctctcaggtgctgtcacatctctctgggtgtagggagagggaggggggcacactgcgaaaaggcccagcccctcccccccacctgctcccctcttccctggagaggcaccccacctcctggtggcccagtcctatggttcaactctcacgtggtccagctcacctgggttgactgtgagccccacctggcacacctgctgttgttaatctgcacctgcaactagcaaaggggggtctggaattcttccgggttcagtcagcctgtgatcccacacctctgtctgtacaacctccgctccccactccaacacacacagagcctgccccagcctaccctgcaccagaccctctgtaccggtttttcttgggatggaggtagagagggacggaggcgagagggggctgaactggaactggattaaactttgccatctgcctgtcgccctgaaaacttcatttctgtttgcatgccatatatatatttttttatatgtggtcttttctttttttttttttttgagatggagtctcgctctgtcgcaatggtgcaatctcggctcactgcaacctccgcctcccgggttcaagcgattctcctgcctcagcctgccaagtagctgggactacaggcacgcgccaccatgcccagctaatttttgtatttttagtggagacggggtttcaccatgttggccagggtgttctcgatctcctgacctcgtgatccgcctgcttcagcctcccaaagtgctggaattacaggcgtgagccaccacgcccggccgatatgtggtcttactctgtcacccaggctggggtgcaaaggcgtgatcttggttcactgcaaactccgcctcctgggctcagacaattctcccacctcagcctctggaatagctgggactgctagtagctgccaccacgcctcgctaactttcgtttttggttttgtttgtttgtttgtttgtttgtttgttttgtttgttttgagatggactcttgctctgttgcccaggctggggtgtagtggctcgatctcagcacacggccacctctgcctaccggtttcaagcaattatcctgcctcagcctcccaagtagctgggattacaggcgcttaccacaacgcccagctaatttttttgttgttgttgtatttttagtagagacggggtttcaccatgttggccaggctggtctcaaactcctgacctcaggtgatccaaccgcctcggcctcccaaagtgctgggattacaggtgtgagccactgcgcccggccttgcacaccatctttttttttttttttttttttttttttgacacagagttttgctcttgttgcccaggctggagtgcaatggcacaatctcggctcaccgcaacctccacctcccaggttcaagcgattctcctgcctcagcctcccgagtagctgggattacaggcatgcaccaccacaccaggctaatttttgtatttttagtagagacggggtttctccatgttggtcaggctggtctcgaactcctgacctcaggtgatccaaccgcctcggcctcccaaagtgctgggattacaggtgtgagccaccgctcccggccttgcacaccatcttaagtgtgacgccacactgcccttcacagccttggggctctgcccagaccaggaggaatggggagggggtctttgaccctaccccaggcttagccccagagaggaggaaagagtggcaggccaggcagggaggggctccagggtgtggcctgggtttttcagtgggatgggggaggggttgcttatgagcctgggtgggttcttggtaggtggtgggcttcctagaggaggcggtgggagggcaggggcaaagagggtgagcggtcctcagttcgtccgtcttcccgggggactctctgaccctttctggtccgtgctgcggccggcgtggcccggagactagcccctcaaccccgaggtggggtggacccgggtgctccgcggccacagcccctccccgcctctagaagcgcagtcccgcggctcgcccgccgctcgcgagggccgcactttgccctcggtccctagcggcgcctggccacgcccccggcgggtggagtcgggcggggcgccgggcaggttcctctgcgttccgcggcggcggcagcggcggcgacggcgacatggagagcggggcctacggcgcggccaaggcgggcggctccttcgacctgcggcgcttcctgacgcagccgcaggtggtggcgcgcgccgtgtgcttggtgagcccggggagggcgggccgagggcaccctggggaccccctctccgtcgccaggcccggcggggcccctagcccacgagcgcgacaggtggcggcggccgcgtccggggcctggcggcgagcggggccggcgtccagcgtcccgggccccgccttcccgccctccacagtctgtcccgctgtcccctcccggtcccgggtcccgccacccaccccacccccagcctcgcgccccgacgcggggtgtccggatctccgcagggagcgggcccctgcctcgctggcagtgggaggagtttgggggcggctcccggacaggtggcccgcacgccgcgactcccagattggggagttcaccgggacggggttttccgaagccacgtggggtaagggagggggcggggggcgacccaacgcccggaaacagggtgtccttcccactcggggcaggccacgggtccgccttcccacccgaagttgagggaccccaagatgtaccccctccctgtaaggtgggcaatacctccaaaaccaggttttgtgtgtgtgtgtgtgtggcggggagggggcctgttcttggacagccagccctgaaagctggagggggtggcatgagggggcaggcagaggtgggcctgctgtgcccagaccatgcctgggcctggagcttctgaggtcctccagggcgcccacaccagctcccagccaggctgtgggatctgatcgcctctgtcctgggctgtgtccaagaatcaggtgcccagtgggtcgggatggcagtgccaggagtcctggatgggcaccctgctcccatcatcccggagatccggcttcatctccatctgggggcggggcctgtgactgccagctccagagccctatggagagc

SEQ ID NO: 7380 - DNA, 6000 bp, Homo sapiens
accctgtctcacacacacacacacaaaattcagtgctgaagaacccacttaatcagtggtcgaggataataaaagtcctcacatggggagttagagacaagaaatcatgacatggaaaatctcccagtttctctggcttgatactttaagatatctttacacgcctatgacactatcgaaaaggaataaaaagataaaacccaataaaggtagcacggggtggggcagaggggatatttacattaactcgtggctgctggtgctatcaactgcttcaacctttcctgtgttaaagaaaaaacatttggccgggagtcatggctcgcacctgtaatcccaacactgtgggaggctgaagtgggaggatcgcttgagtccaggagttcaagaccagcctgagcaacatagcaagaccccatctctattaaaaataataatcatatggccgggtgcggtggctcatgcctgtaatcctagcactttggaaggccgaggtgggtggatcatgaggtcaggagttcaagaccagcctggtcaagatggtgaaaccctgtctctactaaaaatacaagagttagccaggcgtggtgtcagtgagctgagatcatgccactgcactccagcctgggcaaaagagtgagactccgtctcaaaaaataataataataataatttttaaaataaagaaaaaaagtattcatgactcttgttaaagacaggtaggaagaccttattccaggggggctaccacaatggggtttagctgtaggagagccagattgggctcagtctcactctaccaaggacgagtaggacatgcagtccaggagcaagtgtgccgggtgggtggaaaatgactaagaggagacattgaggagacgggatgcttactcggccaactcagcagaaatcttcctgaaagcaggccagggtaacaagatatcgagagtggaggatgaggaatctgatcaaatactgagggtgatcacataggatttccactaaactgactcagcaggactcttgctaaacccgaactaaagaagccgaggacagagcccaaggtcagcgccttgaaggcttagtggagtagagttaggtcgagaagagggtctgtcacctgatagccatctgatcataacagccaagtagcttttccatcctttgtccaataacctttctctaagcactgtaccccaaggaaagaaggcaaaggttaaaaaagaaagaaaaggaaaaagtcagtggtgtcaagatactcacagctgcattatttttgtttgtttgttttgttctgttttttgagacagagtctcgctctgttgcccaggctagagtgcagtagtgtgatcttgcctcactgcaatctcctcctcccaggttcgagcaattcccatgcctcagcctcccaagtagctgggattacaggtgcgcaccaccatgcccagctaatttttgtatttttagtagagatgtgttttcagcacgttggccaggctggactacaccattttttaaataaaatgttgtcaatagacccaaagcctgacagtagaatcccaagtgaacaaaggctggtaaattgctgccttttgaagcagctgaagctgaacactggggctcggaagccagaacgcttgggttccagctcagctcctccagtcactaagtgattttaaccgctctctgcctcagtttccaaactgtaaactgaggattgtactaagtcctacctcaagaactacctccaagcttcagtgagatcgtggctattgcccagtgcccacggactgaaggaaatgtcctgtagccacgagctacaatcaaccaccgcacaccctttccatccaagtgctctatgagatcgcagagaaaatggaaacatacgtggggtgacccaaggagctccccagcaaagcgggattgaggtacagagccaaaaaccaaaggaagagttacccaagcatggctgggatgtcctgagaggagcaggagcagacctttcatgccatctccagaccaggcccaggcaggtaagagggtgaacaggaccaggaattcgcacaaccccaggggccgacaggagaacctgcagaaccacggaccccagacctgcgagccaccaagatctgcgccggcctcaagcacaccccaaatgcactccagccgaggcctggccaggcccctggaccactgcctcggctcctcactcaggccctgcctccctggcggcgctctcgagccccaccccacagccagctcctgcttaaacctagcaatgccccccaggcctggaattctattatcagcttgaactaggtcccgctgagagtgacaggaaacccaaataatggaaattgcaacgaggcagagtgtgttgaattctccccgggaggatgcagcctggagctgagctacacaggacgctggggaccaggccccttctgcgcaccccggccatccccggggagcccctcatcaggcggcttagggtggcttgccagccagaggcatcagatggaggaaaaaatcaaaaaagaagagaagcaaagctagcttccggcaagaggctgggactgctacaagacattctccttttgccccattggtcaaaatgtggtcacgtggccctgctttgctgcaaggaatgctgggaaatgtagtctttcttctagcagccatcttatcatggaaagaggggagaacagatattaggggacaactaaccagctctgccacagcggaaaatccagattccgccacggcctacaggctcctcctggtcgaccctctcgggagccccggtgcctcccttcctccatgcctggtccctctgcctgaagccttcccgccctctctcctggctccatgcatcctgtgggcctcccacaacgctggtgccagcaaagcccgatctcctctcccgaggccgcctgcattccccctgtgcgtgcatcgtaacctgtgtccctgactcacagggatccttaccctccccaaggtctgtgctccccagggaggagccaaacctctgggtgccctgagccccagccctgcagagcaggcaccccacgcggtggttgcaggcaccgggcagtcgctccatcctggttttcagcttttggtgcacagaagcatgaagaagaggggtcactggcacggagtcctccttgagagtgtgttccagtcggccaggcaggggcagccggggatccgtaccagtggtccctgcccacctgggttaggaaaggctggctggcctggggaggctgtagacggcgtctgcggtgtcatctgagtgccacggccatcgcttcgagacggcgtctgcttgctgcagccagccaaaggtcttaaggaaggccggggccactgtcggcaggtgtgtggctccagattgaaattgtgacaatacctccaaccatgcccttccgtcttcccaccgcgcaatccagtgcaccacctcccaccatgcaatccagcgcaccacctcccagcaaaacctccaggatccgcctcaaacccagccccatcccacagccaccaccctggtccgggccaccaatagctcttgctcagacacaggcagtcacctctccagggagcacccagtgtccattctgccctcgttctggtctatccttcacccacaaatggagagtatattttagcattagatcagttcatgtcactctcttgcttaaaacccgcgcctggcttccactgcctggcatgagaatcaccgccacctgccctacgggactggccctgccacccctgccacctgccccatgcccgctcccctagctcatggtcccccagagtcactggcctccaccatcctctcagcgagaccccaccagccaccactgcgtgccgcccacccaccccgccagcctctccatcacgtcttcctgccttcccttcttttgggaaactctttttttcttgtttgttcattttatcttctgtgtccccaactcgaatggaggccacgaggaacattgtctgtctcattcacttctgtgtccccagaacctagaaccatgcctggcacacagaacgtgcttaataggaactgagacagagacatacagggaaggaaagagggagagagacagagaaagagagagaaaataagagaaggggaaggagagatgggggagagggagggagaaccgcacaccgaatccaggggttcctctcccacccttcatgtgcctatggtaacaagggagtccccctcttctgaccccttgttgtcatcaagcaagaacgtctgagccccaggcaccctctgaaattcccaagaaggaagcatgccaagaaggaagcaccccaagaaggaaggcgcacaggacgctggtctggagccatccggttcccggtctgctcaccacgctcaaggagcccctcaacaggaccaggaggagaacaggcacccagcctggggttccccccggacaaggccatgctgtgacccaggcttggtcctggccctgaccatgggaagcccaccccacaggccctcacccaggcaggcctgaggcccatgcaccactaaaggcctggagagggggtcccaccccagcctcacctgggtcccctggggtcagggtgagctgggacagagggaccacctgttgctatgggagagggagagggcacgactttcccagtggaatgggctcctgctgtgctctgagccctgggtcactgtccccactctggggagggaggggaggagcctggagcaccaagggcgcggctggcaataaaggcagatgctcaagttgatgccaccccacgcacgtgaggctgggaccaggggtggcactgacacggctggggagcccactcccgaggttcgacccggggatgtgcacagccacattccaaaggcgcacgggatgagatcagcccgggtgaccctgggactttgtcctcctcggcaggagccagccctgtgcaccctgtgtgcctgtccatctggaaggcccagcatgagaggcctggccgtcctcctcactgtggctctggccacgctcctggctcccggggccggagcaccggtacaaagtcagggctcccagaacaagctgctcctggtgtccttcgacggcttccgctggaactacgaccaggatgtggacacccccaacctggacgccatggcccgagacggggtgaaggcacgctacatgacccccgcctttgtcaccatgaccagcccctgccacttcaccctggtcaccggtgagtactgccctgtgacggggcctgggggtgggagggcctgagaaaccagatggcacagagccgtgtcgtgcaggataaaggggagaggtccttgctccaggcacaggacagagccaaggggaccattaggaatcctcaccgttggtagcaacagatccgggacaaagaaaaatgaccaggggggtccttaaacccgtggccacagccagggcagcaaccccagaaggcttcaggaggaggggagtgtggcgggctccccgctggctcccatggctcccctcccctgcccgcccctccagctggctgtgtcagcctctccctctcccttccatcctttccattttccacccaacacctccctgacagatctgcccaggctgtagaaaatacagacataggtttttaaaaagccaaatatggggccaggctcagtggcccacgcctgtaatcccagcactttgagaggctgaggcgggcggatcactggaggtcaggagttcgagacctgcctggccaacatggcgaaaccccatctctactaaaaatacaaacattagccaggcatgatggtgcatgcttgtaatcccagctacttgggaggctgagacaggagaattgcatgaacccaggaggtggaagttgcagtgagctgagatcgcaccactgcactccagcctgggtgacaaagcaagactgcatataatatatatatacatatatatatacatatatatatatata

SEQ ID NO: 7381 - DNA, 6000 bp, Homo sapiens
tgcatgcctgtaatcccagctacccaggaggctgaggtgggaggattgactgagcttgggaggttgaggctgcagtgagctgtgatcccaccactgtgctccagtctcggagacagagtgagagcttgcctcaaataattaagtaaatttgttaatgcttttctcttgctcacctgtagtttgttaggtgtgttggctgtcacccttatgggtgaaaaaaggtattgtatctttccgccccatggtactaacaggacagacacctcaggtgtctagtagctgtttggtggtggtaagaggcagggggagcagtgcatggggattcatgtggtgtctaagaaggtggcatccaggccaggcgcagtggggattcatgtggtgtctaagaaggtggcatccaggccaggcgcagtggctcatgcctgtcatcccagcactttgggaggccaaggcaggtgatcacgaggtcaggagttcaagaccagcctggccaagatgatgaaaccatctctactaaaaatacaaaatttagccgggtgcggtggcaggcgcctgtaatcccagctactcaggaggctgaggcaggagaattgcttgaacctgggtggcagaggttgcagtgagtcgccgagattgcaccactacactccagcctgggcgagagtgagactctgtctcaaaaaaaaaaaaaaaaaaggtggcatccaacagggcacaggctgtgtacagttgagagcccatgacacactggaaagcagagactggagcccgagccaccctgaagcacacgccgtgctgcgagcttttcccaggcatcgcacatagccctccacaggaataaagacccatttccccacaagcaaagtgcagcaggtttgtgccacggaggagggtggtgggtgcgaggctccttccatgaccgaaggagcctaggctgccagctgggaaaacatctgtagaaaattcacatctattctcaggactatagggtttcttattcaattgttgtagtcaaatgacggcccctaaaaggtgtgtccaaattataacccctggaacaagcaagagtgaccttgtttggaaaatagggcatttgcagatgtaatgaggaatcatcctggattttcaacgacagatgtccttgtaagagaacacagaggcacaggagagaagctgcgtgaaggtggaggtggaaacaggctttgcaggccacagcccaggggcgccgaggagcaccgcagccactacgcaggcaaggcacggatgctccttcggagcctccagaaggaaactaccctggtgaaagcccagctttggactctggcctccggaactaagagagcaaatttgtgttgttttggcagctgcaggacactgacccgtcaatcaacactcccacaagtggccatggctgagaaccaaagtcaaggaagggcactggggaaccatgggaggcacggccaccatttcctgtgcttcatctgagccccacctggcacacctgtggggcgtttcacggcaatacctgttcactgaacaagtgaaccagtgagaatgctggctcttgtttttttttttttttttgagaccgagttttgctcgtcacccacgctggagtgcaatggcgcgatctcagctcactgcaacctctgccttctaggttcaagcgattctcctgcctcagcctcccgagtagctgggattacaggcataagccaccacgcccagctaattttttgtatttttagtagtgacagggtttcaccatgttggccagtctggtctcgaactcctgatctggtgatctgcctgcctcagcctcccaaagtgctgggattacaggcgtgagccactgcgtccggccaccagcttgtttctaactcgaggcctggctcttactaccacactcacttcacctgcctcatgccgtctgtggcagatgcagggtcagggtaccagcggctcagcaggttggaggttgtgctacagcaagaggccaggtttcagtggcactgtgcagtccatacgccttgggggcagtccagcaggtctccaggaaggaggtgagccaaccccaatagcaccactctaagatacagaacactcggccatctgcaggccctgctcatccagtctggggacaggtttttatttttttatttcttatattttttaagacggagtttcactcttgttgcccaggtgcagtgcaatggcatgatctcgactcactgcaacctccacctcccaggttcaagggattctcctgtctcagcctcccaagtagctgagattacaggcatgcaccagcacacccagctaattttgtatttttagtagagacagggtttctccatgttggtcaggctagtctcgaactcccgacctcaggtgatacacccgcctcggcctctcaaagtgctgggattacaggtgtgagccaccatgcctagcccctggggacacttttttcagaggccagatgtcaacttccatctccacatgcctcagtttacacatcattgcatctcagcacagagccccatcatgtagggttactttgggttattctgcccctgtgagaagaaactattggcagcaaagccatactgccctctgccacctctccccagctcaggccagctgcgcctctgccgtgcagtcaatcgttggctctgtgggtggcctggagccaggccagcacccctgctaagccagtgccttcacgggcgctgatttctgccgtggtgatgttctgcttggcacaagcaatgatgtctggaagcctgattaatgacttcatctcctccgtggacatgtaacagggtaggtcgctggagagaaagaggtgccccatcagagcagtggcagccacacacctgccccggacccccagctgcaccacctccctaccgagccatgcttccggctgtaacccgagggagcccccgcccccgctgtgctccctctcagctcagggacgcgtacattttattgaagagtatcagcaccgatgcttctgcaagttgttctgcagaaaggagacctaagagctgcacacaggatgcagagagctgggtggggtcagaggcgtccatcacaaactggggaaaaagaaaaagacagcagcaatgccccgctgccaaacttcctcccctgggcctcacagacctggcactgggagagcaaaactgcattttttaattaattaatttattttttgagacgaagtctcgctccgagtgcagtggcacgatctcggctcactgaaactccgcctccagggttcagggttcaagtgattctcctgcctcagcctcccaagtaactgggactacagacacccgccaccacgcctggctaattttttgtacttttagtagagacggggtttcaccatgttagtcaggatggtctccatctcctgacctcgtgattcgcccacctcagcttcccaaagtgctgggattacaggagtaagccaccgcgcccggcccaaagtagctttaaacaaagctttgggaacaagcagaagcagagggaatcgagttttatgaagacgacctggtgtcactcgtctctgtcctcatgtggccatcagttctccatactggtatccgcggcacaggccttatcaagatgagaccaaccagaggtacgtataagtccaacataaacacagacgtaccggggagtgacacagagggccaagtctgttctctgcggagcagcagccctgccctcagcaagccctctgtgagctcctaccgggggcctgggagcgcaagcaccagaaaccagacagggtgcccagcaggaagcaacactagctaagacctatttccatgagtagtatagtcactaaataacccaaacccctttctacacacagcaaggttggggactggacgtcacagaaatgtagacacacttccctaaaggaagcccatataggattacaacccaccaggagagaacggcagtttccatagtaactggaccagatggggcccatgcaccccccaagctcccggatggtgatctttctctgtgccacgatgtcagtaagattggtgcccacctataggaaaaaccacgatgcaaaaagaacaatacaaccgctgtcccgttgtgaactcctgaagagcaccgtgcccacaccttacacggtggcctgaaccccgcagacccattctccctaacgcaggaacggcgagcagggaccgacgcccatcagtagctggactcgctgtgggggcgaccagccacaggaagccgttgcgaggggagaggaagtgcccgtggagggcggcaggccccctcatcccgcgccaattatcctcagctcgggccgtcccccgctcccgaaggctggccttaagtcacgacctgacccgctgcgcctcggcgtgcacttagaggagcccggagctcttcgccaagcgcagaactgaccccccgcaactccacccgcgggggcggacacctaccgtgggccgtgtcgggggcggctcccccaggtcgcctttcccatcccgggagctcacctgtgcgaagcggtcaaggacccgagcagctaaagggtgagtccccgccccactccgggtgccccccgcgccccggtcccgtccccgcgcggaaggatatcctgcagccgtttcaccagcagcgtcttcccgacgcccgtggcccccagcaggagacacattccgtgcttcgctccacccggcacccgtagctcggcgccgcggctcaaggcccgcccaccggccactctcattggatagttctcaccttcggacttctcattggttcttagggctcattgttccaagggcgcgtccaattagcgcgcagcgttagcgggagagcggaagaccccgcctcctcgcggctctagggccggcgcggtgacgtgcgcgtgcgcgcactggagggaaaaggcggaagcggaagtcggggggcgcgccagctcgtagcaggggagcgcccgcggcgtcgggtttgggctggaggtcgccatggggcgaggcagcggcaccttcgagcgtctcctaggtaacgcgtccccacccgacggctcggccttggtcagcccgcagcctccgcccggcgctgagtcagcgcggccccgagggcccgaggggcgcggaccggccgccctgcccgcctctccccggcccgctgtcctcccgggttcggagccgccgatcctggaccctcggcgcggccgtggggtcggcgtccgtcgggcgttggcaaatggggctctgcgagggtccgcgcagggcgccaggggcgctcggcgacctcgctcctccgcgggcccgggcattcggccgatttcctcttgaccgacgagcacccggccgagtgggccacaaggcctgagtcatgaaagtgggtgactcagtcggatgttaggctcgcacttgggcttctgacccaaaacactgggcctcgaagggtggagccggcagtgttctctctgggaccttcgagctctcttgggggctgcgggtcccagacccaccttttgttcccacactggcttcgggaagtgcctaatggtttaggaaggcgttttctcacgtttttggaggtgaaagctgatcctatctgagcctcctggaattgacgcgttttgggagggaaacgaatgttgatgtgcacgtgcccagcagcacgtggaaaatgcgtctaatgtttgggggtaggagcttgggtggtcgaatgggctgcccaagcttgcctttttgtcaagtagggttttcaaggagacttcaagtgagacaccttccttgccaagggaaccagcaagcagactgagtatctcagccacacaggtagttcagtgcttcagggatgaatccagaggttaactactgaatcagtatagaaagtggacgtggcttggcttgttagatcgtttctgtatccgggaaaggcgatgtgggcagagctggagctgcccccccagaggggccagttgttggagac

SEQ ID NO: 7382 - DNA, 6000 bp, Homo sapiens
tgctgcctggtgacggcacccggaggcccaccaggacgcgccaccggtgaatgtgcctctggtggctgctgagaaaaatacactgtgcagctcagtgtgtggagtgccgtgctcaggccgggctgccgggccagtgcggggatccgggcagcgtgtggagtgcggtgctcaggccgagctgcggggccagtgcggggatcgaggctggtacgggatgggaggcttgttccctgcctcctcagcagacatctgagagtctacagacattcatcaggtccccggtgtgcagggccctgtcctgagaccccacagtgggcctggtggacggcagtggtgtggaggacctgggcagcgggaaccctccctgttttcagtgttggccctctttaaggcaacaggaagttcagcactcgcctgagaaaccgaggcagccttggagccggcgatgccacccctagcttaggctgcaagtacccctgaacctaaacccggccacggggctgcgcagggggattggggaggggtgtgggatgcacctgccatctgcagggttggggtgtcagctgttcctctggggcccttaagtggggtatcctgggacctgggcaaagcggcaggaggggcttgtggacatggggaccgggagtgccgtggtcagcttggagcactggtcactgtgcacttggtgaggtgtggcccagtgctgggcagcccttggcagccactctcgggctgcagaccccttggtgccactgctgagtacagggggtgtggccccatggcctggctggaacggccagggccttgctttgaggacccgtggccgccttttcttgggcacgcctgttttcagccaagcctgggagagaatcagcgaatttctgtctcagctggcccgtgaccaaggccagcccccaggctgtgggcccacaatgaggccagagacaggccatgttccgcacctgcttcgggaaacatgcctggtgtgatggccccgtaggctgccatgccctccagcctcagttttcctggtggaaggatcccttggatgggaccagaaaggggcaccgtgtgtctggaagctgcccactggctgggactcctgggggagcgggaggggcagggagtttcaggctcactgtgcgtgtacaccctgcctggcccaggtcctcttccaaggccttctggtagagtttctctgactaacctgctgtccccaggaaaggctgtcccaagccaagcctggaagtccccattggccatggtatccattttgaggggttaatggtcttccctcaggaggtgacactgccacctggagctgggtgcattctgcctggtgccctgctgaccccaactgcctttcccctctggaaggcagcgaacatctgagctcagggacgagccctgcttgaggtcagacagacatgctgtcttcatccaggctgcacccaggccagatagaccagcaaaatctctgcccgcgactcctcgctgtctaccctggctcaggcgtctgccaggccactcgcaggagccaccgagaggccctttcctccctgccgggggacccccaaaataacctgtggatgccaagcagcaggacactgcggtggatgccaggccgcagtcggaggctggacggggagccctgtcccgtgagcttgctcagtctgccccaaccacccccttgggcctaccgacataacttatgatccgtttgagaatccatcagggatccttgtgagtccccgacctgcagttctagattcatcatttgaaaaagcctctggccctggatgcatttcctgttttcaggattcctcgccttctgactgctctcccagcatctctagctcacggagttcacaaacttcagtcccctacagctccttgcacttttgttctattttttttaatgttttatttacttatttatgtatttatttttatgaaacggtgtcagtttgtcacctgggctggtggtgcagtcttggctcactgcagcctccacctgccgggttcaagcaattgtcctgcctcaccttcccaagaagctggaattacaggcatgcaccaccacgcccagctaattttgtatttttattagtagagatagggtttcaccctgttggccaggctggtcttgaaccttatttttatcttttttaattttaattttttttgagtgagttttgctcttgtcacccaggctggagtgcaatggcacgatcttggctcactgcaacctccacctcccaggttcaagcgattctcctgccttagcctccctagtagctgggattacaggcgcccgccacaacacccagctaatttttgtatttttagtagaggcagcgtttcaccacgttggccaggatggtctcgaattcctaaccccaggtgatcacccacctcggcctcccaaagtgctgggattacaggtgtgagccaccacacctggcctatttttattttttaatatagacacgatctcactctgtcacccgagctggagtgcagtggcctgatcaaggctcactgcagcctcagcctcctgtgcacaagcaatcgtcctacctcatcctcccaggtagctgggactataggcacgtgccatcatgcctggctaatcttttgattttttttagagatgtggtctcactgtgttgcgcaggctggtctgaaacgcctggcctcaagagatcctcctaccttggcctcccaaagtgctgggattacaggtgagagctgccctgcccagccttttttgttctttgtaaagctcttcagttcctgctccttacccgctgggccctgctctttctgctttggagcagttcttccttcagcagggagccagtgttctgtgggttggggggtctctgccagcagccagtttcagccctgtcttgcaggtggccttcggagggacaggttgcagcccaggcccgcccccctccttcctggagtgtctcacagactcaggggacactggccctccaggccctgcttcccccaaggtttccatccatcgcctcttgattcttggtaatcgggagccgatggatgcaactcatctcggtttacactgagtgagacaggcgctgtgggcacagccaagtctgcgggactcagtcaggtgtgagcctggatggccccggacaaggaagcctgtcctcttgctgggaaatttccgttaagatcgggccacttcccctgcttcctaacggttgagtctgtttgctctgggccttttaagcccagcgtgatccctctgagtccctgcggtgcatttgcgccatctccacgcttcctgttgagccccagcccaggcttggtgcgggcagtgctgcactgcactctcctggttgcctcctgagcacctccacccgcttccccaccaggcgtggctgtgttttcacccccagtgtccatctggcacccttctcgattgccaggtagttacggtctgtgtgggcaacacctgagggacccaaccaaaccaaggtccaggacacacttccgggcaggggtaccgcctctggttagctgctcactccccagcccaaatcttccgctgatgacttctggggtcagaggccacctaagggtctagaaaacagtctcctccagttggctacctgcctacgttggggttacggcccaataaacccacagccaagctgaaaatcctaagtgtgcgtcttgcgcttccgacacagccagggcatcgctggatgcgcagaggcagggctggacacattctggtgcttgaggggttccagggaccacgagttgtttttccggtgctcctcacccttcgccctggagggtgggggaggccggacagcagtgaccaagctggagctgcaggtcttcatccctgtggcccagccctaaagcagccttggggacttaaatttcattttgcccagcaggtgcacctgggccaggaacacaccagcgcctccttgttcttcgcagggaagtggaatccaagcaggggcccagatgcaggcaggcatctcctgggaacaagagccccagaatccaccccggggccccacttccagggtggttgcctggggcgtctggtcagagccagaccagaactgagcaggagcttccgggcatctgtgtgtgggaagggagaggcaagtccttcctaaccgccttttttcccagttttcattcagtctggccccaagcaggttctttttttcttttctttttcttttttttttttttttttttgagatggagtctcgctctgtcgcccaggctggagtgcagtggcgcgatctcagctcactgcaacctctgcctcccggattcaagcgattctactgcctcagcttcctgagtaactgggattacaggcgtgagccaccgcgcccggctcccgaagccggttttctgttctcttgcagctgggccggggctgagccctcggtgggggcaggggttgcagacctgtggacgcagggcccacgccgcacacacgtggcccccgccaggtgactcacgagccagcgcctgcgcggcggggtggccaccgggtgcaggttcagggccaggggccgggcctcctggggattggcagggcgcccgccgcggtcccatgtgcctggggccggtccccgggcggtggccttcggccctgcgctccggcctggagaagggaggacgccaggggcccgggggagtggaggcggccacgcagcagccccggagcacccgcgcgtccgcaggccgggcccaccgcgctcggcgcccctcgcggccgctttaaggcgccgggcccgcctcaatcgcagggggcgtggcctagcggtcccgcccccggggcgcgcgcgcgcattggctgtgcggggtgcgggcgcgcgggcggcgctttgaaccgggcgcggggcgcggggcgcggggcgctgcggccggtacacgccggggtagggccggggtcgggttgtggtcgggccgggattgggctctcctgggccatggcagccgaggcgcgcgtgtcgcgctggtacttcggggggctggcctcctgcggggccgcctgctgcacgcacccgctggacctgctcaaggtgaggccggggcccgggacgcggggcggatgggaccctggcgccgccgagacgcctgcaaaggcagcagcccggccccacgcacccggggatcgccgcgcccggggctccctcctggagagcgcgaggaggcccccgacgcccggatggccgatcccgggtggccctccagtggtggccgccgagctcgaggcctgcagggcgcagccgcgctccccagcttcccagccggcttcccagttctcggcaggtggcgatccagccccagctctacactttaatacctggtgaccttgggggagtcacttggcctctctgagccacccacccccatacattcaagaacgctccttccgcctagttagaagttgtggggggagttctgtgaggtgcacaggtgttggcatctagagacgtgctggctgtagcatacccagggtgtgggccaagccgccccccacccaggggtgtttagcacaccgccggacgtgtccctgggcaagtggggtgacccgatgccccggctttgggctgcttccttcggagagctgcgtgggcactggaagcgatgttaggaccagcacacccccaggagagatgccaggagaccctgcacgcgtgtggtcctggccctatgaaagcgggcgtttctcagcacgagaagcagccaccgtttttttactttttttttttttttaatgcttatggggcaaaataagacagagctctccttgtttcccagggacagccaaggggcgttgttttctgaccgtgtcttgccacagagaacaaagaagaaagggcctgaggctttgcacagtctgcccagcaggccctgccctgtgaacctggctgtggtcactgggcagccgcctgtctaggggacctttattttagcagcctg

SEQ ID NO: 7383 - DNA, 6000 bp, Homo sapiens
gtgcacagacacctgtgcagacacacccctacacccgtgcagacacacccctacacccgtgcacagacacctgtgcagacacacccctacacccgtgcagacacacccctacacccgtgcacagacacctgtgcagacacacccctacacccgtgcagacacacccctacacctgtgcagtcacctgtgcagacacacccctacacccgtgcagacacacccctacacctgtgcagtcacctgtgcagacacacccctacacctgtgcagtcacctgtgcagacacacccctacacccgtgcagtcacctgtgcagacacacccctacacccgtgcagacacacccctacaccttgcagtcacctgtgcagacacacccctacacccgtgcagacacacccctacacctgtgcagtcacctgtgcagacacacccctacacccgtgcagtcacctgtgcagacacacccctacacccatgcagacacacccctacaccttgcagtcacctgtgcagacacacccctacacccgtgcagacacacccctacacctgtgcagtcacctgtgcagacacacccctacacccgtgcagtcacctgtgcagacacacccctacacccgtgcacagacacctgtgcagacacaaccctacacccgtgcagacacatcccaacatccatgcacagacgcaccccaacacctgtgcacagacacaccctcacgcccgtgtacacccccaaccccacataaccggccctctcataaccctacaccatgcatcacacccaaaccccatgaccaacacccaccacaggcagcagtgtggtgggtcaggccccactgggccacggtgcggcttctcctgcccttttcacctctgccccctacctgggctgccactccctgggaaggaccagcagccaggttaatatgtatttttctgactttgggaggccaggcaggtgaatcacaaggtcaggagttcaagactagcctggccaaaatggtgaaaccctgtctctactaaaaatacaaaacattagctgggcgtagtggcaggtgccggtaaccccagctactcaggaggctgaggcaggaaaatcgcttgaacttgggaggcagaggttgtggtgacccaagaatgcaccactacactccagcccggtgacagagtgagactctgtcaaaaaaaaataataataatatgtatttttctgtgagcctggacaggttctctggggcgagtgaagggagggcgcagatttgggccatggtcctggtcctgggtctaggctctgtgtggtggagggcaccagcctcccctggcaccgtcctggctgcatcccccatccagcctgggcacgtcccgccacacgccccgcgtgggtctggagtctggggacggtgtggccacaggtgtggaatgacaggctgtgacagttgtgtcaccagatcctctgggcagggagctgtaaggcaggcagggtcaggagctgggcagcccaggaccccagggaggcggggctgtggctcggccggaatgtccttccccgtgactcggctttcttcccctgacccggccagtcctggccccagtcctgtccatggggcggcaactggtgctgggtggtacggccaagactgggtcaggacggggtggccctgctgggatctggaaaatggtgtgcggggttcccaaggacgcaggatgtgggctgtgtggctcccccgaccctggaaggttccctgggacctgagatctggccctgataggtccgggggcctgttctgccaccctccctggggcagcggctgtggtgacccttggagaaaagcctctccgcatttcctaagtcatttcaggacacagaggtagggactctcggggcagcccatggggaggaagcagatcccagcctccccttcctgcccgcccccctcccacaaaggttgctcttggaaaaggtgggactgcgcaccccagggagcttaagcctgccagggagcagggtgggaaggacctgggggccaggcccctaggaggacattccagggcctggagggccctgtagctggaactgggaacaaaaggaagttggggcagccaggggcaggtggaggcacctgggtctgggggagaagtcaagactgggggctgtggggtcagaggggggcgtcctgtgaagctgctcactggccagggatggtgccacctgtccacacccccacctcctttcctgcagaaaagggcggcctgggcctggggtctgacccagggccactgtgggggagcaagcgttggagccaggtgtggggtgggtgctcccaacaccacccagagtggggtgcagagatgcggacacacgtggcctttcccaccccttcccgcagctccagacccccagcgggccaggggatcgcaccatggccagaagtgcctctcccctgcaccatcgctgtctctgacacatccagggttgttgagggaggggcatgacccccagaaggcatcttacccgaaaccaaagtggtattccgtgcccaggtgcccctggagccctgtgtcagatggagcctggccacctgggccctggtgccaggcctggaatgccccccgccaccaactgctgggcctttctaaaagctgagcacttggaggtcaggggtacctcatgctaccggagtgccagaatcctcggagaggggcccagggtctcggaggctctggccccaccccacagcgtcctgttctgtccaggctccgggtgagctgtcccaagtggcctgcttgatagctgcgctgcctgtttcctctgggtaacaacctggcaggcccccagccccagcccccagcagccatcacatcactgtgaccactctgtggtcttccagtccccccagtcaaagcccacagacttgacctctctgctgggagccagtgctgactggcctgcctgctcccctcccctctgagggcagggaggctccaccccagctctgggtggacagtcctggggcccacacccaggggaagccatgcctaagagggggccaggcctgggggtcagaaccaaaccacaggtgctccctgggacccctggagggatgactgggcgtcttcccagctgggagaaaacctggccctggcaggggcgcccctttgtccttcaggaggcaggagggggcagtgaggtcccaggctctctggctctgtctccctccccctgttgctgctctacggtgggggttcagggttcagggatcagggccaagctgtaggcagatgtggaaggtgtctcggtggcttcagtgggggccccaagcccagctggcaggcctggtgactcaacaatctgggatggggagcacggtaccctcgcctccccggcaggcaataccccataggggacccattcccgcagctgtccacggtgcctcgcacccctctgctgctctccctcctcagaaactgatgaatcgcctggtgcaggaagatgggagcaccacctgccctgggcgggagcaccacctgccctgggcgggagcaccacctgccctgggcgggagcaccacctgccctgggcgggagcaccacctgccctgggcgggagcagcacgggccaactaagtagagtcttcatctgtgaagttggaggccccctcaccacttgccacaggcctgtgttctgctcacaggcacgtgccctcatcttgatgtttggggatgggggtggttgggccccaggtaggggtgagggccagacccagcctctgtgaatgccagcgggagggtgggcttgtaacattacatagaaagaacaggcggccttactggacctgatgtcccgcaaggctgggctgcagatggagagccaaggcccacacggcctcactgtcaggggtggcctccccttgccctctggaggggtcctccattgataccccctgcctcctttgtgtgtgaaggcacgggcttaccagtgcctcggtccccgaagcccccgggtccgggaggggccagttaaagcattcctgtggccctggcagggtggccctgacaactagactccttggtccaggccaacaaaggccttactccctggagccacctcaaacctcagcacccaaagcggcccgttatttccatgttgcaaatgagagaaaacaggctgggagaagcacctcacgaggtccagcgggtgggcagccctcgcctccccgaaggtgggagccgccccggcctccgcgtcgggttctgggccgcgagaggggcggggcaggggcgcagggctggagtcggtggctttgtagggccccgcagggcgcggagccacctggggaaacggaagttcagggagggcgaggccgtgccccacatccaggcagcgcaggccgcgggccgctcccctagccaggaagagccgccgtccgcaccgggaccggagaggaagcggaggtctgaagggggacaggtcggacgtggcctcagagagggaggatgtgggccccggagctgagccaggcggccggaaccccacgggacccgcgcgcacctccccaccaaaggggccccggcgttggggggcgaggggtcgctgccctggaggacgttgggacctgccgcgctgcgctccgaggcggggaaacggagggacggcggggcggaggggcgaagcgagcctggactccgggggaggcgaggccgggaagacccagtcccgaggagcagagggggcgggccagctccgggccgggggcgccgacggggccggttccggttgggggggtccctgggcccggcggggttgcgggacgcgccgtcggggagctgcggcccgggagcccgtccggaggcggcgcggggtccgggcggggcgcgcaggggcggcgccaggcggtgacgtgcgcgggggacgtgccgcgccagcgacccgagcacttaaagtcgcccccggcgcggagcggaccggcagaggcgggcagaggcggcgagaggcggcgagaggcgggctgaggcggcccagcggcggcaggtaggcgcggccgcgatgctcgcgcgcgggccggggcccaggagctcccccgtgccgggcaagggggcgacctcggggtccgcgctctcacccccaccccgcccactttgtccatcaggtccgggggcgcccggggcatggactagccttctcgaccccgagcgggccccaccgagggctcccgagagccagccgcgcccctccgcgccctcgcatacctggctgcccagtctcgtctcccccggtccggcccggcgcccacccgtcgggctgccctcaggggctgggctcgggccaggagatggctgcgccggcggccaagcccggtccgggtataaatagctcggtccgcggtggcggggggcgcgggctatatttggtggggctgctgcagccctccctgtatgggtggcctccccgagggagtggggagcacttgcgctcgggccgtggcgctttcccctgttcgcaacaccctgaacactccccgacccacacccgcccttgggcaatgactaacagcccgagaccgtgcagggaagtgggggaccctctccagagccaggctgggctccctgggttcgccctacctccacccctggcccccagctcgtgggaaaaccaggcgcagcctttggtagcctcccacttcctaacccacgcctcagtttccctatacgaaaagtgggttggtcaggagcctccctgggtgttgggccagtcaagagacaggagccgcagagtggaagggaagcccttagctctggccggggcctccaggggtggctggagtcggtgagggacgatggggggagccgaggggcggctgtcctcctctctgtcccagaggcatgggctgaaagggtccctctcctggtgatggccagagtcaggcctgctgggcgggaaatggcagttggcccaccccaaggcccaggggcttgtccatgctgagcacaagggtg

SEQ ID NO: 7384 - DNA, 6000 bp, Homo sapiens
cacgtgcctgtaatcccagctactcaggaggctgaggcaggaaagaatctcttaaacccaggaggcaggggttgcagtgagctgagattgtgccactgcactccagcctgggcaacagagcgagactctgtctcaaaaaaaaaaaaaaaaaaataggggaggggttgggggccaggcacggtggttcactcctgtaatcccagcactttgggaggccgaggcgggtggatcacctgaggtggggagttcgagaccagcctgaccaacatggagaaacgctgtctctactaaaaatacaaaaacattagccgggcatggtggtgcatgcctggaatctcagctacttgggaggctgaggcaggagaatcgcttgaacccaggaagtggaggttgcattgagccaagatcgcgccattgtactccagcctgggcaacaagagtgaaactcggtctcaaaaaataaaaatacagggtgtatttcacataaacaacaaataatttttttagtatgagtatttcccaaatgtgcatgggatatgcttatactaaaaactggggcagtctgtattttctgtggctgttccacctcagactccacttctttgggtctctattttctcctttatgttgtgattctctttttgggggtctcaaaaccccaatgtctctggaagttctggcccctctccccagaggagcactcacacacttctcctgttttacaagcataggggtctgactcactggtgtgccttagaggcccctggatgggatgctctgtggtgttcatgatctcaaggccagaagaggactatgaatgtctctcttcgttctcaaaacctgaagaaaatccagcatctgaacctgagaaactcattccccactcccctttatctttgattattctcatggctgggtgacccctgagcctcctcaaagattcagctgtgggtttttctgaatgatgggcggagagtgaggcatggaagggcaagacgtggctagggtgcactcttcttcaaaagccctgctgcgtcagtagacctggcttcctctggcctggctctctccctcctggcctccctcctccccacccagctcatctggctggcctccctgttctaagcttatcagccgacccccgcaagcacacttcctcagccctcctcagtgcacgagaacctctgaggactcactttttcttgccccttggcctcctttcttttcttttcactcctgtctcttgagccctgggtttgagggaacagtgaccacctcaccttgattccagcccacgtgggtagccggtcatctccctgggcagggcgggagcaaggcactgttgcagagcaaggccgcctgggcttgagcctcattttgttgccagaagattgcttcctcctcaggctcacctgtggcctccccgtgtcttcccaggtccccctgaactgaagtgatgagtggcaggacagcaggctccggaattgggcgacctgggttggaattccagcactgtcacaccaggcagggaacctgagcagaacattcactgccaagattactgtgagcaagtaggaagtaatgcacacaccaagtgctgccacagcaaaagcaggtgctctaggatgggtagtggctgctctgcttaaaagtgggatgcccttactgggtgcgatggctcacacctataatcccagcattctgggaggctgaggcaggcagatcacctgaggtcaggagttcgagaccagcctggacaacatggtgaaaccccatctctactaaaaatgcaaacattagctgggcgtgatggtgggcgcctgtaatcccagctactcgggaggctgaggcaagagaatcgcttgaacccaggagatggaggttgcagtgagccaagatcgcgccactgcactgcaacctgggcgacagaccgagactccgtctcaaaacaacaacaacaacaacaacaacaaaaaaacctgggatgccctagagagagggtgtctgcctggggtcccccataaaaagactgcttttagcctgtctagagtgagagaagaccccagaggaggcagaggataccatcagaatgccctcaggtgctgtttgcaaggaacagcctccccatatatgtcgtatttattttggcaataggagtattgggtaggagaggaaaaaacagtgcaaacctcctttgtgcaacttccagaatctcgtctttggagggctgttcccgtgacacgagtggggcgcctcccccaccactaaaacagaagtgaatgaaattggtgcttgtgcgccccctcctggcaaaatgcggctgtgcgtccaggatgcctggatcttccctgtggcccaggactgcaggaggcgttctgagctgtggccctcttaccaggggtggagcctctggggctgctgaaccagctgtagggatggtgctgctgttcttcctggcatccatcctaggcatcttcatacctcccactttatccctgctgtttcctgattcaagggctgccccattatacaagttctggtctcctcagtggggacaataagaaaaacatttgattcgataacatataaaccactagtgtgagattcatgcagcatcataggaaggggggtgatgtgtttgaaaacagtgagcaggctaatgtattaatctgctaattctgtctcctgagttttctctcttttcctccctcctgccacatgaagtgtgcttggcttcttacctaccataattagacatcttttcttcctcagagaaggcatgagacagggatttgattgtagttatcactgtaaacatcaaactgatttttatgcagaactattgccccagggcataccttccaaggaacctggtctctccttacctagcgaattccacatacacatagatgtacacctacctgtacactcacagattgggtggtgattaaagggacagaatcggggaccagcttcttgttaggaatgcagtgttgccacggcatgacagcatggagcagttgagggaatggctgcccaggagaactcagaactcttgaaatgtagttccaggctgccatcattgccctgatattcaggccgtcagacagatgtgtgttgtaggccctgaacggcacagagagtggcagaacaggctacataaacagctcagcccagaattgtctttccagactgcctgccctcagtcacaacccccaccagggaagggaagcggccccaagactccttcctccttcacccactcgaggaaacagagttcctgttacgtggcatgaatgatgtcttttggccccagttaatccctctgagtcaccaggtggcctttgccaagtgctggagctggaagagatgatagagacactcatctggcgtcctgaggctctcctcacagctgttgaattctagaggtgcatttcagtgtcttggggcatggcaagactttggaggctccctgagcagagcagtggagatgcccaaaaagaaggaagaacctaggatggcagatggggccccccttgccctggggaacttcatgtttgtactttctcaggaagcacacatttccccagttcagcgggagagagtggggagactagcagggaaattgctttccagctttgtgctgggtggttggggtgagggtggccacggaaggaggtgaaatcaggctgacctcaagatagacccaagatgtcccagttctggccgctctaagtctctaaagcagcagctggtgggaggggcagtattgggcagtatgtcagggaggccacctgtctgctcacacagtacaattgatgtgcccctcccaggcatatatccctcttcctccttgctgggcccccatgggtagataaggtgactggaggggtgccaagaaaagggcggtgcccccacaggcatctgaaaacaaagctgctgctccatttgcccagtttgaagattagaatggttttgtgattagccaggagggggtgggggtcagagttctggacacctcactggagtcgggggtcagcataccctaccaaggctgacattcactcctaggtaatggcctgggaccctcaggtgacttgtccactctctggctatgtattgttgaatgaaaaggggacatgtaaatctcgtttcagctgttctgaaataacccttgccacatgggaacacagtctattcaacatgaagaattcaaacctaacacaagtgggtgagaagcaggaacccactgctaggccccaccgcgttccctcagaggtggtctcagtagctggaacttggagaagtagttttggtggggtgttgggacgtgggtgaatccaggtcctggtttggaattgctctggtgggaaccgtcagctaacgtcagttggaagctctgtgtcctccccctcctgagtcctgtttttcctggaggaccttggcccacccctgtggaatgtggggatgtggggaagaaagctgactgcttttactcccactcagaaaattcggttgcgctcttcttcaagggggtgctcctcagcctgcaccccagtgaaggggcctctgaggaactcccagtgccactggcaaacagtctgtaacctttgggccccagccacctcccagcccctgttctcttaattcctgccttcttggcttggagggaggaatctccatttgtaaaagctgagttagggaactagagggttcctgaagctttaaagcgcctcaaagccctcaccctgcacgtgacctgtcacctggagcctgccccagcccccacgcctgcctgttcttataggggctccggtgcctccagggtcacacagcaccatgtggaaactattcctcagggcagctctccttggcctttttatcccctgaatcatgcatttttctgcccttatttggtgtggtttggttgctgggcagctgtccagggtgagtttgcaggaggaagcacagccaagcagcctcgctctgcttatgggacagtcttcctcccaccctccctgagagtgaaagggccccacagagaccatcaggcatggatgctgaactgctgggaagggagctcaggctttttctttttagtccccaagagaagaattctttctcagatgtttttgtggttggagaatatttttgccattgctttgagaagacttcccctcctaactccccctctttccttggaatttccttccttaaatggaaagccttcaacattcactccaagctcgcccttttgctcccccaaggaaaaataacaagcaaacagaggtgcttgcccagtgtctctggaggggcttcccttagaggtgggctgtgtgatcccctgccaggagggggcgatgggggccacttgttcattaacgatgttaggctcaaggtaactgaactttttttgcacatgcctctctgcagagagttgtgcataaacacactgctcggcaggacagagcaagattgggaactgagggcaaatcccttcctccgtgcgtcgaactcttgatcccaggccttaaaagtgggatctctgcactctgggctttctctagcttccccagggaagggaggctcggggtgaggtgggcacggggcatctttcctgcccaactgtgaagtcctaaaaagcttcacaaagtttctattgaatgacagctttcttcttctctttctccagggttgagttccagaataaattctacagcgggaccggtttcaagttcttacccttctccttcgagcatattcgggaagggaagtttgaagagtgagtccctgtgagggccgtgtgccccatgctaccctccccgcctccctccacagtgatcagctgtgcctctctgcctgttggttgtgatctgtgggcaccagctcattcgtgtcaccctgtctgtgagtcatttagatagaatagtcctccttgggtctcccaccacccctagctttgtgtgtagtgtagtgattttctggctgtcactcatactc

SEQ ID NO: 7385 - DNA, 6000 bp, Homo sapiens
ggaggctgaggcaggcagatcacgaggtcaggagttcgagaccaccctgaccaatatggtgaaaccatgtctctactaaaaatacaaaagttagctgagtgtggtggcatgcacctgtaggcccagctactcgggaggctgaggcagaagaataacttgaacccaggaggctgaggttgcggtgagccgaaattgcaccactgcactccagcctgggcaacagagcaatattccctctcaaaacagaaaacaaaaaacaaacaaacaaaaaaacaactttgttttgtctggggggaaaatatagttatttttcaaaaaacatgtaatttatgctaacatgtaatatatttatcattgtcatgtttaaatggattaacagatacatattttttatttaaactcctcagttttaatctccaacattggtatatgtcagtagatataacctacataaaccctttcaataaatttccaagggtataaagagattctgaggtcaaaaagttttagaaatgctctttaggatcagctaagagtgggaatggcaggcagtttgttcttgattttaatgacaggcactttacatagtgtatctgttcatttgctcactcagtacatatttagtgagtgccttctgtgtggttggcactattttaagcattgagaattacacaatgaaaaaagcaaaagacacttctctcccggagctgacaccaagtgtaatgttgtcttgtttcccgattcttttgactgttaaggagagatcttcacaatcttggtcactaagcacttttgccagaaaatagacgttggattttatcatatgccctctcagcatgtactgaatatagtcataggggttttttcatgttgttgatttgtttaagtttttttttccttctttttaaaatatttaacctttcataaatgcttgctgggtcatcgtgtattgtcttttaaatatattgttgaatcctagtatttttatctgggattttgattcatgttaaaaaatgaaattagtttgacattttcttctttttggttatcattgttagattttgtatcgggtttatgtcagtttttgttgttgttattttgagacggaatctcgctttgtcacccaggctggagtgcagtagtgcgatcttgactcactgcaacctctgcctcctgggttcaagcgattctcctgcctcagcctcccgagtagctgggataacagacgcctgctaccatgaccggctaatttttgtatttgtagtagagatggggtttcaccatgttggccagattggtcttgaactcctgacctgaaatgattcacccacttcggcctcccaaagtgctgggattacaggcgtgagccaccgcgcccagccatgcccagctaaatttttgtatttttagtagagacggggtttcaccatgttggccaggctggtctcgaactcctgacctcaggtgatccacctgcctcggcctcccaaagtgctgggattacaggtgtgagccaccatgcctgacctttgtcagctttataaaacaaactgggatgcttcccattttttgcaaccgcagagaccatttaaatagtaaactgtttcagagagtcagactatagataatataccctgaagtccctgaagtctttgaaacaattgacccattatcaaggtcaagtgccttttgggagattggtttcttggcagccttttctgttatttctgtggttatagttacatcttccacttcttgagttgattttagtaagtccttgttcttgaaaataattttactcagatgtttaagtttattcatcctttccaattctctgtttatattctctttccattctttttgttttgttttggttttttgagacggagtcttgctctgttgctcaggctggagtgcagtggcgcaatctcggctcactgcaagctccgcctcctgggttcaagcgattctcccgcctcagcctcccaagtagctgggactacaggtggccgccaccacgcctggctaatttttgtatttttagtagagatggggtttcaccgtgttggccaggatggtctcaatctcctgacctcgtgatctgcgcgcctcggcctcccaatgtgctgggatgacaggtgtgagccaccgcatctggcctctcttttcattcttaattttatgttttctctttcccacacccccaatcctagattaaaacagccagaatttctttaggccttctcagaggacttgcacttggatatatttgtcagttctcctcttttcctgtttcagttcattactctgtacctttatattttactgctttcatctctgttgtctttatgctccttctacttcttgttatgtaagaagagcgcttaaaggtacggcttttctctgaatgccactttggccacatctcctgagtgttaaaaatgaatttttaatggcgggggcgcggtggctcacgcctgtcatcccggcactttgggaggccgaggcgggcagatcacgaggtcaggagatcgagaccatcctggctaacacggtgaaaccccgtctctactaaaaatacaaaaaaattagccaggcgtgatggcgggcgcctgtagtcccagctacttgggaggctgaggcaggagaatggcgtgaacccggggggtggagcttgcagtgagccgagatcatgccactgcactctacctgggcgacagagcgagactctgtctcaaaaaaatatatatatatatatatttagccaggagtggtggcacatgcctgtaatcccagctacccgggaagctgagacaggagaatcgctggagcccaggaggcagaggttgtagtgagccgagatcgtgccactgcactccagcctaggcgacagagcgagactctgtatcaaaaaaaataaaaaagaatttttattgtttttatttttatgggttttttgtttttgttattttgagacagagtctcactctgtcacccagtctggagtgcagtggcttgatcttggctcactgcagtctccacctcccgggttcaagcgattctcctgcctcagcctcccaagaagctgggactacaggtgcccgccaccatgtccagctaatttttttgtatttttagtagagatagggttttgctatgttggccaggctagtctgaaactcctgacctcaggcagtccgcctgcctcatttgacctctcaaagtgctgggacttcaggcgtgagccaccgggcctggctttttttctctcttgagacagggtctggctgtgtcacctcggcttcagtgcagtgataaaatcatggctcactgcagcctcgacctcccaggctcaagtaatcctcccacctcagcctcctgagtagctgggactacaggcactcgccaccacgcctggctaattttttttgtatttctcgtggaatccgggttttgctgtgttgcccagactggtcttgaactcatgggttcaagcgacctcctgcctcagccttttaaatgttgggattacaggtgtgagccaccacacctggcctggttttttttcttggcaagtagcttggtgtaattgatgatgcttttaaaaattttattaaatttcattttagtaaatataacctttttcaattttttatatggctatattttaacagcattagtgagctataattcacatataattcatctatttaaagtatactgttcagtggtttttgatattacattattttttaaaccttgtaaaatatgtatataatatagaatttattattttaacatttttaagtgtataattagtggtattaattacattcataatgtacaaccaccactaccactatttctgaaatttattcatcaccccaaatagaaactctgtaaacattaaaaccattaagtccttccttcccctgcccactttcctcaacttcttgtaacctctattttactttctgtctctatgaatttgcctattctgggaactttatattaatataagtggaattctacaatatttgaccctttgtatctggtgtatttcacttctgtggtcttcaggattcatccacgttgtagcatgtatcagcactttcttctcttttacgggtgaataatattccgtggtgtagttccaccacattgtgtgtatccattcatctgtccatggacacttggattgtttccaccatttggcttttgtgaacagtgatgctatgaatattggcatacaaatacctgtttgagtttctgcttccgtcccttatgctgtgtacctaggagtggaattgctgggtcacatggtaatttttaatcattgcaatatttaatctctttagaaacatttttccatattgttctgaactttcatagattcattctttccatagactcaggtgcattaacacaagcgttctgttttgtcttcatttaattaatatagacaacatgtttctgattagcaagaatcttaagcttttgtatgtagtgcctactcatggagatgttctctcccacaaaaaaaaaaaaccaccctgattttttcttttatttagttaactagtccagcagttggactgtttccttcctgaccttagaaacgccaagtcccgcttttctgcaacatgattattgaaaatagttttaggaaaatactgcgccaagaaagaacactgaagtttattgttcttctgagccatctccatataaattggcaggttcttctgagccatctccatataaactggcagtcttcaggagccaagaaagaaggtcaagcgtaactcaccatctgcttatttccatgttagaggcagtcacaagtttaaactagactctgcgtctcaagaggaaaatgccattcatcaccactgtaactgctctggctagtacccaggtcactcttgcttttgattgctagtagttagaaatcgtgtaaggaaaattccatcctcagtttgaggctgtgcattagaaaaattgcggaattactgccaacagagcaaagccttctggatttcaggtccttgatacaagaagtcactgagatatgtttgtacaatggatgggaatttggctttctgtcttcatggaagaacttggcctcctttttcctcttccctctttcatccacggaaacagtatttagaagagcacagattcagcgttgtggttgtgccgtcaccatttccatgtgtaagtctccattttcaagagtctgtaactataaaatttcctttgctccaatttggactccagggtctcctctggaaggagattagttttgcaaaaccaaagataatacatctgttttggcttggcgttttgtagtcatctagattaaagctctaaaatacatcagaaacttgtcgtcctccgtatattattggatcccatgccggggtttctaatttctgtttctgtattgcatcgtagactctgaacagatgctgtgttcgtttctaggtattgtatgtgatacctggaatatggatgttaggcaaaaatgtattagtgccactttcataatgacccccaatttggaggggggcatttcttctggagatatacttactaccaagtaagttttttttttttttttttttttgagatgggagtctcgccctgtcgcccaggatggaggtgtgatctcagctcactgcaacctccgcctcctgggttcaagtgattctcctgcctcagcctcctgagtagctgagattacaggtgcctgccaccacacccggctaatttttgtattttcggtagagacgggttttcaccaggttggccaggctggtctcgaacacccaacctgaggtgatccgcccgcctctgcctcccaaagtgttgtgattacaggcgtgagccactgcacctggccccaagtaagtttgatgattcaaattctgtctttaaagcaggagaaaaggtgtatttgaggggtctttaccccatctcagaccgaattcttaactcctg

SEQ ID NO: 7386 - DNA, 6000 bp, Homo sapiens
agctacttgggaggctgagacaggagaattacttgaacccgggaggcagaggttgcagtgaggtgagatcgcgccactgcgctccagcctgggcgacagagcgagactccgtctcaaaaaaaaaagaaaggattctcaccttcctgtcccttcctaggagttttgtggtagtgttcgatcctgtgatgtggccatcttctcctcagggcctgtgagaggcaggcagcatctttagctgaggtagaatgcctgttggggaaagtcaaataggatggtggctggggccggggctctggggactccttctgccccacatactcaattggaaagactgagcaagtcccctcacctccctgggcctcagcttccctgtctgtcaaatggagggctcaactggggtgagctccagtttccttctagtgctaacgcgtgttcaaggatccttgctctcctttccggggagcatcaggggtgtgggctagatagcaggaaagaagtaggggtttgtaaacaagagatccaagcccctggacccttagtcccagcacccagtgcagccctcgccctcccagccccttccttagaaaggacaagaaaatccactccttgttctctccctgtcccatcacccccgcagtcccccacagatctgaggccggaggatgccaacatggtgagcaccctcttgctgtcttattcacgtaggcttttcttggtgcctgcacatggctcttgtaaggccaccaatcttgctggattatgacctcatctaaccttaattacttcctaaaagccatatgtccaagaagagccacattgggggttagggcttcaacatatgaatttggaggacatttacagttcagtccacagcacctggtcatgtggagatcccagtctgcatttgtgggatgaaatctctgcttttttaaagtttacacaccacctagctgggcacgtggctcacacctgtagtctcagcactttgggaggccgaggcggggatcacctgatgtcaggagttcgagaccagcctggccaacatggtgaaaccccgtctctactaaaaatacaaaaattagccgggtgtggtggcgggcacctgtagtcccagctactcgggaggctgaggcaggagaatcgcttgaacccaggaggcagaggttgcagtaagctgagattgtgccactgcactccagtctggatgaaagagcaagactccatctcaaaaacaaaaataaaaaaagtctacacaccaaaagagctgaaggcaggagagtttgtggtggttcagagtcctgattctggaggaaacaggcctgtttggagtcccagctctgctccttactagctatgtggcctctcagaggcagcatccttatctgagaaatcgggttgaccttgtaggtggctgagaggctcagatgagggctcgcatgtgaggccttggcactgagcagggcactcctaccgagtgttcaaaggtcgtgagtaccactgctctgcagccctgggctctggtctcagcaatgccgtcactctttctggcttcctaagagtcagaaggcaagtgggagaatagaaccatttcctgtgtctgaaggctgtgcctcagtgcttttgactcactctgaagacagcaggcagccctttctgttttttttggagatgaagtcttgctcttgtcgcccaggctggagtgcaatggcgcagtctcggctcactgcaccctccgcctcccaggttcaagcaattctcccaccatagcctcccgaagctggggctacaggcacacgctgccacgcctggctaattttttgtgtttttagtaaagacagggtttcaccatgttgcccaggctggtctcaaactcctgaactcaggcgatccgcctacctcggcttcccaaagtgctgggattacaggtgtcagctaccacgcccgacccacaggcagccctttcacctcacgccgagcacgtctcctccatccatgaacattttgcaacttttttttaaagagacaggttcatactatgttgtctagattggactcaaactcctgggctcaagctttcccaagtagcttgaacctcttaagtaactgtgactacaagtgcacctggccactttttctgagacggagtctcgctctgtcacccaagtggagtgcagtggcatgatctccgcccactgcgagctccgcctcctgggttcacgccattctcctgcctcaccctcctgagtagctgggactacaggcacccgccaccacgcctggctaattttttttgtatttttagtagagaccgggtttcaccgtgttagccaggatggtctcgatctcctgactttgtgatccgcccgcctcggcctcccaaagtgctgggattacaggcgtgagccaccgcgcctggcccacctgcccattttttaaaaactttattcttcctggtatcaaggggagaaagaaaaaaattttttaaaatatttaaaactttattttgaaataatttcaaaatcacagcagtttgaagggtacaacaaagaacattttgccacattttctctttcattcgttccctcctcttctccctcacccctgtttcttcctatcctctctgaaccatgaaccatttgaggattatttgtatacatcatgctcgtttatccgtaagatgttttagtgaacatttcccaagaacagggacagcctctcacatgcccatggtacagttctcaaattcaggaaatgtgtaatattctctgatcagcccaggagttgctaatttgtagttcctgtttcaaatttgccaactgtcccaataatgattttgaaagccgttgtttttctggtccaggatccaatccaggatcaagcgctgcctttagttgtcctctctgcagcctcctttcgtttggagcaggtcctcagcctttctgtctttcatgacattgatgtttgtgaagagtacagtccagtttctgttgtagaacgtccttgaagttggtcccggaatatttgtttaaagtgagttgggaaaccacattcacatgtcttttggttatgtgtgtatttgtcaaacagccagccttgtgctgcgtgctgtgatggggagcattactcaacagagcctggccctgaccttggggatgtagtttgggtttgtggggaaagcagctaccgccaggtgggctttacggacccctgtgtgtctcatgactagaggcagtgacgcttggataaatacatactggatggatgcaggatgagtccgcattctagaagtgtgcagaggtacagaagtggccctgctccctgtccagcacccagtcatcagctttccctggcttcccgaggcaccctgacgttcacactccaaacacaaagtcttctctcaggaatctcgagtgagctgcagtctgggttctagccctgccctagcagggatctgctcagtgactgggctgctctcttcctgctttaggccaatgcgggggagaggagaccactgtgactctccccagtgcccttggagcgcagaatgaagtgaggggaggaggagggtcacgagccctggagcgctgggaagacaggctgtaggccgcaggccccgatcctgcctgggacgaggttcaacagaagtaggatggtttcatcatgacctggcaggaaaaccaccagacctggaattttgcttttacaactgtttaacttctgtttcatacaggatggaaaccggtgaattgtaatctcacataaccgagcaagatctagtagtcataagcactttgtcagagcaaagcagacaaggcaaagtgttggaaatgtcatcggatcttcacagaaccttagccaagcagcctttcaatgcgagaaacaaaataacatggatttttatctagtaatgaagtcaacaccattgtccaccctgggttaacacattcacatctcaaagcgaatggggctgcagacactcgtgttagagagccttggaatgtcctgcctttttacgtttaattaaaattaaataaaatatacaaaattcagttcatcagttgttctagtggcattttaagggtttagtaccatatgtggctcatgagtaccatcctggacagcgtcgacctagagcagttccatccccgcgcagagttctgtttgacggcgccactctgcacttccagcagcctggggagcaggggtgcaggagagttccttctgtgtcacagacttggtcacacagtacagatctcagatcagcacttaaacacgactgccagctgtcaacggcgtgttctgtggaatgctgggatgcatcacaggtatgctggaagatgtatagaattttacttctgttattctggtaactcagagtcctgttcagtcagtttccacgtcaggttgctgtcctggttttaaagagaatgaacgcagccgaagttgaatcgaggcagtgatttcactcagtgcgttgggtctttccactcacctggccctccagaaccccagggccttgagtgcatgggctggtacaagagcccagtttttggctggggaggcacttcctatgggagggggacgcctgtctcagtgctgaggcaaccaccaccgaggaccctgggctggaagctgggctgagatgtctggtggtaggttctgaggcaggacaggggaccgactcaaatggatgatacgaacggcaggctggattcacgttgctcctgcacctccagcatctgctgaggacacctagaactgtggccctggccaaacctcagctccctattccatgaaagtgtgggtcaaagtgtgggtggtagagtggggctgacagtggcccctaagctcctagggtccagcccacaactgaggaagccacacggctggttgtgtacgagccggagtgtctctgtttggttgaaagtgccggtctgtgggtccttgctggtgtgtgtgcttctgtccccgcctcctggcctcctggctgaggggaagctgagtgggccacggcccatgtgtcgcactcgcctcggctcccacacagccgcctctgctccagcaaggatgtggctcttccacactctgctctgcatagccagtaagtcctctcacccgctgcttcgaggggctgctgtgccctcagctccagccaggtgtctgcagactacagccttgactgtctgtctctgatggggctcagttagagccagaggttagagagtggcagctcctccaggaaaggagtcttgctcggtgggtcagggccccaggcttgttgggaagggcggctgaggcttcgtgttgccagttctgtcagccagggcctttggactccagggctctgccattctgttcctcctccagccagcctccccccgccaccgaggccctctccccatggcacccacttggggcaggtccttgactctgtagtttgttctctgagtgtggaggctccgcctggcagagctcccttctgttacagagcaggggttgggctgatgagggtgaggaccctgtgagagagtgttgaccagagactgggggcaagtgtctgtatggtagagggtgtgagtgttggcagggagcctgcttcctgtgttgtcaggcccagggtaaaaactggaatgtggggtggggggaggcacttctgctgcctggggggtcccattttagcctttaactgtcccatggaagcctctgggcaagccaagccatgagtcctttcgggggccccctgtgatgagacagcacggtcaggtgagcccctggaggctgctaagattaagccggaggccagggtggtcctgcctagtgatctgagcagacttcccatgggtctcctgcccctgctcaggaggttggccggagaattggatgggcatcaagcttatgtggatgaaaggctcctggtagctgagttctccctgaaagatgggctgaggctgtgctgggaggggacttgggattagcatcccacctggggccagatcaccc

SEQ ID NO: 7387 - DNA, 6000 bp, Homo sapiens
ctctccagagcctcggggcccccgtatgtctgtggggactttgtgaacagatttcctgccagcggtctgttctgcccttggctgtcctccgccctccgtctgtggctgccgggctgggccgggtgggaagtagccctgcgcgtgcttttgttttccagtgctgctcctggcatacatgaaagggaacgccaacttgtgccgcgccatcgtccggtcgggggctcgcctcggggtgaataacaaccagggagtcaacatcttcaactaccaggtcgccaccaagcagctcctgttccgactgctgggtgagtggcccgctctctgctctcacagtgcaagcacagtcgtagtgttgggatcgccatgtattgtattggtgatctttcaatctcatgatgccttaggatcggaaccgctcgtttcctggcagtagctgggaccatttctctgaataagggaaggacttttgagcgtgttgggaaggtcactgtgaacagtctcttttcaaagcactctgccttgtgcatttcccacaccccacaaccttctagaaatgccaaagctccaggcaggccacccttcctgtgtgtcctggccacttacctgcacacctgtcctcttgagactgactcagatcctccagaaccttcaaaatggcctgctgctccagcccctatcagctctccttcccctgtgacccttttgtggaaaggagtgcttccctcctgatttcatatttgtgaatctttactcttccctgctgaggtgacagaaagaatcagaatgtctcgagtgcctgtgctgtgtcatcacccacagtggggagagacaggcaggaaaacaagctccgacatccccggtagccatgggatggcgatgcacaggacctgcccagggggcacagctggtctgtggtggagtcgggttgaaggacagcatttgtgacatctggtctactgcaccttccctctgccgtgcacttggcctttgaaaagctcagcaccggtgcccatcacagggccggcagcacacacatcccattactcagaaggaactgacggactcacgtgctgctccgtccccatgagctcagtggacctgtctatgtagagcagtcagacagtgcctgggatagagtgagagttcagccagtaaatccaagtgattgtcattcctgtctgcattagtaactcccaaactagatgtgaaaacttagttctttctcataggttgctctgcccatggtcccactgcagacccaggcactctccggaagcctggaaatcacccgtgtcttctgcctgctcccgctcacatcccacacttgtgttcagtcactgagttacagattttgcctcctcaatttctcttgtcttagtcccatcctctgttcccctggccagtttgtctagctgtgtggtctctgttctctccctaccgtgccttccatcccagccatccctgactacgtgtttcccccacagacatcacactggttcacctcgttgaccaccgtttccttctccccaagtctcccgggcaagggctgattctccagtctcctctgggaagctggccctgaaccacttagaacctatcgctccttcgtcacctatgtcatgtggcagcgctgcctcacttacgggtctgtgttcctgctgcctccaagccctggggcttgcgtggcgccgtcgcggtttgacgggaccgggcctcccccctgtgttgcagatatgctgtccaaggagcctccgtggtgtgacggctcctactgctatgagtgcactgccaggttcggagtcaccactcgcaaacaccactggtaagaccccagcgtcactggcaaggagcgaggggactgccgctgatgtcattgcttccccccttctccaggacaggccgtgaacttgcctgggtcctgcacattgatgggcaaaccttgaccaaatggagggatgagatgagcacacccaaggatcctactgaggaacagagatgtagggaaggcagggagcctgcagacgggtggctttcctgctggaggctgaaggtgcacagtttccaggcagcctgccaggcctgtgccatccttcctgacttcctgcctgcaccaaagctgagatgagctactgccctcatggtgtgcctcagtatgggccgctttgccgagaactaaggggctgttcccattaaaatgagatagataggtcgggtgcggtggctcatgcctgtaatcccagcactttgggaggcagaggcaggcggatcgcttgaggtcaggagttcgagaccagcctggccaacatggcgaaaccccgtctctactaaaaatacaaaaattagctgggggtcgtcaaaaccctgtctttactaaaaatacaaaaattagctgggggtcgtggtgggcacctgtaatcccagctacttgggaggctgagacaagaggttgcagtgagctgagatcacgccactgcactccagcgtggcccacagagcgagacttcatctcaaaaaagaaaaaaggaaaaaaaaagatagtgctgagctgctctctttttgtttgtttttgagacatagtcttgctctattacccaggctgagtacagtgacacgagctcggcttactgcaatctccacttcgcgggttcaagcgattcttattcctcagcctcctgagcagctgggattcaggcatacgccaccacgcccagctaatttttgtatttttagtagagacggggtttcaccatgttggccaggctgatcttgaaacccgtgccctcaagtgatgcgcctgcctcagccttccaaagtgctgggattacaggcgtgagccaccatgcctggcctgagctgctcttgatcttccaaaaaaaaaaaaaaaagccttcttcagtattgctttaacttgatgattgactagagttttgttttcatagactaaaaattctacatgaattgtggtaaccgggctggcagttggcagagttgccagagtagcattgcgggcgccttggctgccaggccctgctgcggttgtcctcacgtgccaggaagcagagtctgtcgttggcgctcctctcatacttcctttctttgcttccacagtcgtcactgcggacgtcttctttgccataaatgctcgaccaaggagattcctattataaagtttgatctgaacaagcctgtgcgggtttgcaacatttgttttgatgtactgactctgggtggggtttcttagtgagccccccggagggtccaggccacgtccttggtcacctccccagcagctgctctgctcaccagcctgaccccacccagagcaggagctggcgggtgtcttcctgcggcaatagactggaacgattaaggaccatggtgtgatagatcccatttcaaatgattccatatgattgtcagtgtgtgtgtcagactgtgatcgatttcactagatgtctcactcatcagaccaggccattgggcctaagtggtaaatgtgattaggaattagacctctccccattctgctagcaacatacagggacacttggaaaaccatttccccttccagtagcttggtgtccatcccagagcattcatgaagtcttcccgcctgggctgactgatgaggcagagcctctcagcgtaggaagctggctgcttaatgagctggctttactctagggtaagtggctgtggacttttctgcacagtgttttcataaagataataggatcctcttgccctgaagtctttttttctttttacgctaagctgtatttttagtgagctaccccttttaaaaaggtgaaatctttcttaacagggttcaaagatgagagctgaaaaatcgtggccttaacaactgaaagctttacagtgttcatgctactgaggtgtcaggagtgcagctgggccgcttgacacctcgtagcagccgtctcattctctcgtcttgctgcgtcctgtctgtggagtcctcagtcactctgctgttggagagtgctggaggaaatgcacttttactgtgctgcactttttatagagctgcattgtcggtgattccaatttaaaaatccatattcaaaaataccctcacacatccctgcatcagtgattctaatgatcagctttgactggacctcagctcacacgaatctccaaggaaaaactctacagagcatcttttagagcaagagattcatacaggccaagtgatgagagggggagtcaccaaggcttcagccccaagggcatctccagcctcaggccggcaggtcctatgtccttgacacaaatgcttcttgctgaaatcctccctagtgatgctgcgagtgctgttggtcccagttctgtgtagcttgccctgccccatgaagggccaccagccaagggccctggccacgtgtgcgccaccttactttggaagtctctggcttgtgtgctggatgaggctgccagaacttgttgggcgttcatcgctgttagtacatatattaaccgtgaggtgttaaacttttcttttgaaggtttggccagtttctaaaaaatgcacatttaaagagaagcatctaccacggctttaaaacaaaacaactctgagatgaacaatatgtgttatactcagagattaacaatctcaatcatacatactgattctttcagacatttaataaccactacatttttttgcattaatgaagtttgactatatgtgtaaagggactaaatatttttgcaacagcctgttctttgttcattcttttctggatagtgtgtcctctgtattgcggtagatttatacattctgttgcctaaatatgtgtgtaaaatgagctgataaactggagtactacttaaaaaaaagtctgtgatttataagatgtatatgctttctatgtgaatataagcttgtgcacaatgtttaaaagaaaaacaatgaattagaagagatcccccgtcccccagtctgacatatttcatacagaatgtttaaaagaaaaactctgctagtcttggcaaacatttggccatgtgaggcatgtggtcagtttccattttctattacctggaaagggccataaggaagcaggcagggcttaggtagcttggttacctaagttagaaagtaagagaatcatgattcggatatgaattgaagtggttggtacatggatacctgttctttaaaaggaatgtgggagatgagtcaagggtgaggccgattgttctgcccatgccctaccataccaatttcaataacaatcttgcctgtcattgcactcagaatcttaagatcatgtttcaaatatgttgattcaaacttgcttctaagcctgagtccagggatagcaatggtactgaccagctatggactgggagaacattgagtcctgttttccattggcttcagggcgcatccatgtggatataggaaaagcctctttccacagacttaggaagccccccgaccacgcggacgctcgctgggctgcactcagcaggctgcttgagtgggagctgactccaacatgccctgccctggctgggactaggcatgcttccagcccttcccgtgctctccctgctgtcaacacttgcgtacaaacctgcctagctgttgtaagttttcatcagtagcttaagtactagtagcaaaaacttaaattcattcagaaagttgccacttctgaatgagtagagcaggaaaagtaaactttactgaaacataatttgctgcaacagtcaacattgttatgctgaatgtgctctcaactgccctttgctcatcgccagatttattatccagtgtattcctaacagtcttttgttgtcgttgtttttaaaacaaaggtacggaccatgtgctatatataaatcgaatggcttaaactaatttgctatgatcctctaacaccgaaatttcccataaacttaagtgcctacacttaggacttttgaactttcagtcatctttttcgtggtgtctcactgaacgat

SEQ ID NO: 7388 - DNA, 6000 bp, Homo sapiens; identical to SEQ ID NO: 1914

SEQ ID NO: 7389 - DNA, 6000 bp, Homo sapiens
ggctattactagaatacctaaatctggagacttatcctttttaattctaagtaccagccttgtattctttctttcatctttttcttccttttcttcctcttatttatcttctagaacttctattaattggatgttggttctttgaacatattgtttgtgttatttggggaggttttatggggctaataaaaaaaagaaccctatcttttcctcttaagtttgaaatcaattgagagccaagacacagtagacagatgagcggatatcaaaatgttagcataattactgataagcaacaaggaggatttgacttaaaaccttagatcaaaaaaccttgtaattagttcatccaataattaagcagatgtatccacccagtcacaggcagaggagggcaaagcaggagcagctctgtgccgcctggcagagagtagaatacaaggtgtgcttcttgtgggcagaaagacaccaaagggagcccccccaaggggcggagccaagcatgccaatcagtcagtttcctcccctgaggaagagtgggttaagaaggggagtctgggcggggcgcggtggctcatgcctgtaatcccagcgctttgggaggccgaagcgtgcggatcacttgaggtcaggagttcgagacgagcctggccaacatggtgaaaccccatctctgctaaaaatacaaaaattagctgggtgtggtggtgagtgcctgtaatcccagctactcaggcggctgaggcagaagaatcacttgaacccgggaggcggaggttgcagtgagccgagatcgcggccaccgcactctagcctgggcaacaagaaggaaactctgtctcaaaaaaaaaaagaaagaaagaaaaaaaagagagaaagggagtctggagattgtctagtttccctagtgggaaatatattcagtagcatgagaccagagaaaaaataatttctcccaatttaacttttatcatttaaaaaaaaaaaacctatgtcttttttttttcctggaagattttctaaattttatgtttcagagcttctattaatttttctggagttaacaacatgtatatattttttaactttcaaaaggtctcgttttctgaacaagtagaacatacaggaaattctggcttatcaacaaagtgaattcaggaaagccaatagaaaaactggtaaaggatatgaaaaggcaattcatgcaggaggaaacccaaatgattaataaatcgatgaagaaatgttcaaacccactgttagccagaaatgcaaaataaaagaacaaggatatggcatcagcttggcaacaattgcgatgttaataatatcaagcgacaaagccaaaaagagaaccctcgtatactgctggtgggagtgtgaactggcagagccattctggaaaacagtctggcagtcctgagtggaattaggtatggcaatactctgcgaatgagcaataccattcggggatatagtttccttccttccttccttccttccttccttccttccttccttccttccttccttccttccttcctccctcctttccttcgtttctcttttcttttctttcattccttttttttttttttttttttttttgagaaagggtcttgctgttgcccaggctggaatgctgtggtgcgatcatagttcactgcagccttgaactcctggcctcaagtgatcctcccaactccagcttcccaaggtgttgggattacaggcctgagccaccatacctggcctggatacagtttcaagagaaattctcacctaggtccacatgggaacacgatgaggacatcagtcgtcatgttaattgtgatagttgttggcaacaacctgagttcattattaggggaaataaactgtgatggatacacaccattgaatactgtgcagcagttcatagcaacaaaccagataaacaaatagcaatgtaacaatccattgtaacaaatagcaatacaaatagctctaaaaaatttcttgttgagtgaaaaagatcagaaacaaatgagatatatgaaagttctgtgtatgtaaatacagaacagatagacatgcaaaccccatcacatattttataagggtacctacatatttagtaatatatattgtttcagctatctaccgatgcataataaaccaccccaaagctccagtggcttaaaccaactgttttttcttaagattctctgggtcagaaatttgggcagggctaggctgggcggtccacggggtattggttggagtgaaacacttggatacaatcagctggtgactgggctgccctggaaactcccagaagactttgctcacatgtctggggcctcagtgcacctctgtgtggcctctttctctctccatgtgctgtcttatcccccaggactctctctggcaggatagttggacttcctcatagcatggtgactgacttccaagattgaaaactgaagctaccaggtttcttgaggtccaggcccagaactggcagagtgtcatttctagtgctttctgttggtcaaggcaagtcacagggccagcccagactcaaggggaggggaaacagactctacccctggctgagtggtgtgacttgcacatgtggtgaggggagaaattgatgggcaccatctgtggggactgtcagggcactcagacttctggctgcctatagagagtagagagtatagaattagtgaggggaaacaggatgggagctagggaagaacgaaacaggacaaaggtttagctcagacctctgaggaagacctagtgtcatgaagtaaggaatatgaccaatctaacctttgtgtctgaggtacaaataaaccccaaatcaaaatcaaccaaataaggccgggcgcgatggctcacgcctataatcccagcactttgggagtttgagatgggcggatcacctgaggtcaggagttcaagaccagcctggccaacatggtgaaaatacaaataattagccgggcgtggtggtgcatgcctgtaatcccagctactcaggaggctgaggcaggagaatcacttgaacccgggaggtggaggttgcagtgagctgagatcgcgccattgcattccagcctgggtgacaagagtgaaactctgtctcaaaaaaaaaaaaaaaaaaaatcaatcaaagaaaataggattccataacccaaaacagaaaacctccaacaatatggaaacttcagaaatagtccaagtacatgttaacttctaagttaaaatgattttcaaatagggagaaagagaaggacgcagatgagtctggctttctctgtcccttctctccctgtagtgccgtgagtgggggtgtaagtgacaagccctgaaacgtggaattggttcagtcaaaggggtggccaatgaggatggccccatccctggttggcagttggcaaagcttgacatgcagtagacaatccatctgtgaagctcttacctgtatctcaggactaaatccacatgccccttaagatgggggcttcacagcagtgttgttcagactttgagttgtgacccattaatggactgggaaactcaacagaaggcacgtagtaaggtgagcattgtcccatcaaactttagtgtcaaccgtgtatttccaaacgcattattctattcactcactcactcagtagatacttgttgagcagctactgtgtggcaggcactggggatccaggagaaagtaacacatacaaatgcacctgtgtgtgcgggtgcttgtgtgtatgttctggatcacagcatgaaattcgtctctcgctgtgggctgcagtcagagagcccagcggctgctgctgcctggtggctgggtgggaatgtcagggtactgggggggtggctacttcccatgtgggtcagcaagttacaagaacagaaaaggcctctgtttgaattccttttcggcacccggggaaacgagcagctttataagaaaccctgcccgtagccatccgcccaagtttggtgagggtcagaaaatcatgcacaaaaactgtgttttctttcccgagctattgttagcgcaagtgtagacagtcagccacgttccttgcttcatggaagccagtcttcctcgtaggaccatgaagaccttttcttttctttttctttctttcttttttttttctttgagatggagtttctctcttgttgcccaggctggagtgcaatggcgcaatcttggctaatgcaacctccgcctcccaggttcaatcgattctcctgcctcagcgtcctgagtagctgggattacaggcccctgccaccacgcccggctaatttttgtattttagtagagacagagtttcaccatgttggccaggctggtctcgaactcctgacctcaggtgatccacccacgtcggcttcccaaaatgctgggattacaggcgtgagccaccgtgcccggccagaccttttgttatgatgttattttcccctctttactccattttgctttgccagtttctctactcacctgggccaccacctagagcaagttgcctcatctctccgaggctccgcttccgaaccctgtgaaatgggagtaacagaagtcctgcctcgtgggggtgttgtgctgtgataaatgaagaaacaccttggagaatttagggcagtggctgggcctgaggacagtgtttgtgttgcctgggctggggcagggtctgggccggacggggctctctgaggttggattcctcctgcgaggagagctgtttttctgcaaagccccttcctcctcctgctgaagcttctggatttgagaggctttactctccaggagagtgaagcgagttgggccagagctgagagtctggtggccgagcccacaggaagctggggtctgtggttcagatgccggattgggcaagagtagagaactggtcgctgtgatcctggtcagggatatttggagacacccacagttctggtaaattcggaggcaggaagtgagagggggagggagagagggaaacggcaaactgcaccccagcccctcctggcctggcaccccttccaaatggtgcaatgagtggggtgagtggcgtgtggagttgagcgcagcccaggggacccccctctctgggaataagaacagagatagccccgtcccctgcccccaccccacaaatgagttacagctctgtttcctcttctgtttactgtccaaagtcccaggccaggaggtgccaggttagagcttggacactcagaccctccagtgcaggccttgcccggaccagcccctcctccactctcctctcccctgtgagctccacctgccccagttctcctggctttaacccctccttggccaaggccagggttgcctgcgggagccaggtgtccgctctccacacctttcacaggtaactgaggctggggaggcaactgggacgaggatgcttgggaacaaggaggccttggttcagggatggggaggaccccatgggaagctgtgggtggtcgggtccatgagcgtggggaggggtctcctggccaggtcaaggcccaagcggtctcctgagaagggaaaggacccagcgggatttcaaacctcatcccaaacgccctgccaacctcagatcctacccaggccaccaccccgaacccctccgaccctgcgttccatcccaccatcaacctccacgtgaatctgcacctctgccccagccccagccctcagagcaacctcagcccagcccagcccagctccagctccagctccagcccgggccccatcatggccaaggactttcaagatatccagcagctgagctcggaggaaaatgaccatcctttccatcaaggtgaggggccaggcactcgcaggctgaatcccaggagaggaaatccatttttgaaaggcaagtgtgcagtttctgcggctttgctccccctctgtctcagctcatgattgctctgtccctttgaggtctctgccgcacccactctgtg

SEQ ID NO: 7390 - DNA, 6000 bp, Homo sapiens
gccccctccttagttcggcatctgcacagcactgaagaacctgggaatcagaccctgagaccctgagcaagtaaaatgggaagagaggtggcgggaggctggctgggggtgcaggggtgcggagggaacccagggtgtgttggggggtgctgggtgggaaacatcagaggatggattctggatgtcaggcctgggaggggatggaggaaagaagaaagctcccggtggggcgcggtggtccacgcctgtaatcccagcacgttgggaggctggggtgggtggattgcctgagctcaggagtttgagacaagcctgggcaacacggtgaaaccccgtctctactaaaatacaaaaaagtagccaggcgtggtggcgtgcacctgttgtcccagctactccagaggctgaggcaggagaaccgcttgaacccgggaggcagaggttgcagtaagctgagatcatgccactgcactccggcctggggacagagcaagactccctctcaaaaaaaaaaaaaaaaagaaaagaaaaaaaagaaaaagaaaagaaagaaagaagaaaggtctccatgatggagccgtcaatcagatgggagtaaagagatgggcccctcattcccactctagtcctggtgagcccccacctcagccccagcctcagtcttgactcagtcccaggtccagcgccagccctatcatgaccaaggagtatcaagaccttcagcatctggacaatgaggagagtgaccaccatcagctcagaaaaggtgagggccaccttgccctgcctctgcaaggcgagaatttggcggttctccaccccccagccacagctcctactcttgcccgtgagcctggctctctctctgggtctgtctccctcccccaacactgggaaaggtgtcggaactgcctctctcaggagaggggcggagtgtggggttggagtccctttattggtgacaggtgcccaaagctttcctgtgcctcctggccctcggaggtggacccgggggtgtgggaacagctggaagctggagagatgaggtcactgtcggcttcctatgacgaagtcacgccccctcttcctttccccttccaacaccacccagggaccccggtcgtgcgagcgtgtgcgtgtgtgtgtcagtgatcagtttggtgaagggggaaaaggtttctgtgaagggtctgaggattctgtgaggggggcgatgaggggtctctgacctgagggagaacgagactcttttgcttcaaaaacaaattccccttgacccatttctttgtcctccgagcagggaattgtttaggctgagcaaggatgaagttcgtgggggatggggtgcagcgcgctttgacggaaggagggtccgcagcggaggagacccggcagggaggcccccccaaccctccagctctcagggcacagggctaacgtgtctcttccccctgctgggtggaagacttgagggcctgaatggtagctattgcaccttctctccctgcacgcagccaaagacaagtggaattcatggacagagaaagaaaccttccttctttccccactttcaggggaagcagcgactccgaggcgcgggccactcaattgcgtttcaaggcgcgggaggagggggtggactgaggttcctggattggctgcagtgacgcagtcatgccattaggtgtcagcaaaagctcagggcctcggtgggatggggcggctcagcgcttagcccccttccccagccctcttttctccccgatttccagttgcctctggccctgcagggtcgcccaccgcccgcatttcttcatgtacatggttcctcctagactactagggccgccttagcttgctacccttttaggaccctggagctgtgccagggtcccctctgtccccgcgctcctgacaccccctcctcttgcagggccacctcctccccagcccctcctgcagcgtctctgctccggacctcgcctcctcctgctctccctgggcctcagcctcctgctgcttgtggttgtctgtgtgatcggatcccaaagtgggtgccccaggggtgggaagggggcaacattggggggtgttgacgggggaccgtggcaagggagtggtgggtgcagtggtggcggacacagcgatcccgttttcttctctctgcacgctgtcctggccagactcccagctgcaggaggagctgcggggcctgagagagacgttcagcaacttcacagcgagcacggaggcccaggtcaagggcttgagcacccagggtgagggcgctggggcggggctggggctggggctggggctggggggctgtcgggaacgctgagcgagcctctcccgcaggaggcaatgtgggaagaaagatgaagtcgctagagtcccagctggagaaacagcagaaggacctgagtgaaggtcagagagggagtgtgtgtgtgtgtgtgtgtgtgtgaaagagagtgagaatgtgtggatgtgtgtgagaaagtgtgagtgtgtgtggatgtgtgtgagaatgagagggagtgtgtgtgtgtgtgagtctgtgtgtgagaatgagggggagtgtgttttgggtgtgtgtatgagagccttgtgtggatgtgagaatgagagggagtgtgtatgtctgtgagtgtgagaatgagatggagtgtgtgtgagtctgtgtgtgagaatgaggtgtgtgtgtgtgagaatgagatggtgtgtgtgtgggaatgagagggggtgtgtgtctgagtgtgagaatgagatagagtgtgtgtgagacagtctgtgggaatgagagggagtgtgtgtgagagtgtgagaatgacggagtgtgtctgtgagtgtgataatgaggtgtgtgtgagtctgagtgtaagaatgagatggggtgtgtgtgtctgtgagtgtgagagtgtgagaatgaggggtgtttgtgtctgagtgtgagtctgtgagtgtgagaatgagatggggtgtgtgagtgagtgtgagaatgagatggggtgtgtgtgtctgtgagtgtgtgtgtgtttgtgagtgtgagaatgagatggggtgtgtgtgagtgtgagaatgagatggggtgtgtgtctgtgtgtgagaatgagatgggtgtgtgtgtgacagagtctgagtgtgagaatgagagggagtgtgtgtgagtgtgagaatgagaaggagtggatgggtgtgtgagtctgtgtgaatgagggagtgggtgtgtgtacgagtgtgagtctgtgtttatgtgtgagaatgtgtcagtgtatgtgtgtgagaacgtgtgtatgtgtgttagtgtgtgttgcgtgtgtgggggaatgagagggattgtgtctgtgagtgtgagaatgagatggagtgtctgtgagactgtgtgtgaggagtgggagtgtgtgtgagaatgagatgggtgtgtgtgtctgagtgtgtgtctgtgagaatgagagggagtgtgtgtgtgtgtgagagcctgtgtgaaaatgagaaggagtgtggatgggtgtttgtgagtgggagagtctgtgtgtttatgtgtgtgagaatgagggagtgtgggtgtgtgtgcgaatgtgagtctgtgtttatgtgtgtgagaatgtgtcagtgtatgtgagaacgtgtgtgttagtgtgttgcgtgtgtgagaatgtaagtatatgtgtaagtgcatgtgagtgtgtgtatgtgcgtgttgtgtgaatgtgcattgtgtgtgcatgtgtgaaagagtatatgtgtgttgtgggtgagtgtgtgtggtgtgtgtagtgggtgagggtgtgttgtatgtgtgggtgtgcgttgtgtgaatgtgtgtatgtgggtgagggtgtgtgtgcctgtgtgagggtgtgttgtggtttttgtgtgtgtttgggtgagggtgtgttgtgtgtgtgtgtgggtgaaggtgtgttgtgtgtgtcgtgggtgaaggtgtgttgtgtgtgtagtgactgtagattagggtgtgttccgtgtgtgtgtgtgagggtgtatgttgtgggtgttttgtgtgtgagtgggtgtgtaagggtgtgttgtgtgtatgtgggttaaggtgtgttatgcgtgagggtgtattgtgtgtgtgttttgtgtgtgttgtgtgtatgtgggttagggtgtgttgtgtgtttgtgtgttttgtgtgttgtctgtgtatgtgggttacggtgtgttgtgcgtgtgagggtgtgttgtgtatggtgtgttgtgtgtgttgtgtgagtgtgtatgtgagttagggtgtgttgtgtctatgtatgtgtgtgtaagggtgtgttgtgtgtctgtgggtgtgttttgtgtatgtgggttagggtgtgttgtgtgttctgtattgtgtgttttatgtgttgtctgtatgtgggttatgtgtgttgtgtgtgttgtggatgtatgtgggttagggtgtgttgtgtgtctctgtgtgttgtctgcgtttgtgtctgtgggttagggtgtgttgtatgtgttgtgttttgtgtgttgtccgtgtgtgtgtatgtgggttaggttgtgtgtgtgtgtgttgtatattgtctgtgtgtgtgtgttaggatgtgttgtgtgtctgtgtgagtgtgtgtgtaagggtgtgttgtgtgtgtaggagtgtgtgtgtgtgtgtgtatgggggtctctcaggccaactccgctgctgtttgtggcaatgcgacgggtgttcgggtcccagcaggaggatgtagggctgacctcgtttcccgtttccctccccgtggtttccgcatctcctcccgctcccctccgcccggtctccccagatcactccagcctgctgctccacgtgaagcagttcgtgtctgacctgcggagcctgagctgtcagatggcggcgctccagggcaatggtaaggaggccagcccggcccgctctctgcctccccccttctctgggcagcgcttagcccctgcgccccgtttctcccgctcaggctcagaaaggacctgctgcccggtcaactgggtggagcacgagcgcagctgctactggttctctcgctccgggaaggcctgggctgacgccgacaactactgccggctggaggacgcgcacctggtggtggtcacgtcctgggaggagcaggtgaggacccggagggtctgggaggctggctggcctcggagagatcaccacccgccttctctctcctcagaaatttgtccagcaccacataggccctgtgaacacctggatgggcctccacgaccaaaacgggccctggaagtgggtggacgggacggactacgagacgggcttcaagtgagtgcgcgccctccctcggcctgggtccggccgccttcgcgccctggggccctgggctgaggagtctggagcgacccgcctgcggatccgacctcctggggcccacagctggctctgtccccaggaactggaggccggagcagccggacgactggtacggccacgggctcggaggaggcgaggactgtgcccacttcaccgacgacggccgctggaacgacgacgtctgccagaggccctaccgctgggtctgcgagacagagctggacaaggccagccaggagccacctctcctttaatttatttcttcaatgcctcgacctgccgcaggggtccgggattgggaatccgcccatctgggggcctcttctgctttctcgggaattttcatctaggattttaagggaaggggaaggatagggtgatgttccgaaggtgaggagcttgaaacccgtggcgctttctgcagtttgcaggttatcattgtgaactttttttttttaagagtaaaaagaaatatacctaaaccttctgttagttgtctggttattggggattcggaagcaggagtgggctggttggcattacgaagccttagcgggtgctgtggcatcatgagaactgtgtgggctttgggccagaatggccagactttgttatttacagatacgtgagtttgggcaaattattgttctctg

SEQ ID NO: 7391 - DNA, 6000 bp, Homo sapiens
ggaagtggtgagttttggagagctaaagggagctctgtaatgaaggaatggttttagggctctgggaattgggaggatttggaggaaggggtgaggagaaacgggttagagcagttttctagaggggaggctgtgtaatggtaggggagtggctttcagtacttggggttcatttgttgtgctgatgtaattcttttccgctggcatctttctcttttgttcttgcatttctgaatcataagagtgtaggatgcctaacactgagtttggaggtttgggctgggggttcagaatttcgtgtcctcagagacatttgatgttgatggaaggcctgaaggactatgccattgcctttctgaaagataactgtatgtctaaaggaatcatcaccttgtatggcatcgccctctcccccaatctatttcaggtgagccagtggtacgagctggtggtgtttacagcaagcatggagatctatggctctgctgtggcagataaactggacaatagcagaagcattcttaagaggagatattacagacaggtaagctagaatcccagtctaagagtgtggcttgggagggaggccaccagggagggatctgggtttgaggagagtatcctggagagaggcctgctacatgatcccctgccttccagcactgcactttggagttgggcagctacatcaaggacctctctgtggtccacagtgacctctccagcattgtgatcctggataactccccaggggcttacaggagccatccaggtacgggggaaggtggtgagtctggcaggaccagaacatggttctgagaaggtatttttgcaggagacctgggctttggtccttgagagctgggattccctagattatccctagtttgctgtaagtcgaaatgcaagttatttttgtgtttcaaatgagataccatatatgtccatttcataagtcggatttcttatatcatttttttcatttttaaaatttatttttggctgggcacggtggattatgcttgtaatcccagcactttgggaggccgaggcaggcggatcacgaggtcagaagttcgagaccagcctaacaaacatggtgaaaccccatctctactaaaaatagaaaaaactagccaggcgtggtggcgcacgcctgtaatcccagcaactcgggaggctgaggcaggagaatcgcttgaacccgggaggcggaggttgcagtgagccgagattgcaccattgcactccagcctgggtgacagagcgagacgccgtctcaaaaaaaataaataataaataaataaaaataaaatttatttttatttattttttgagatagggtctcactctgttcccaggctggagtgcagtgtcatgatcatagctcactgcagcctcgatctcccaggctcaagtgatccttctgcctcagcctctcagtagttgggactacaggcgtgcaccaccatgcccagctaatttttttattttttatttttttttgagacagagtctcgcactgtcacccaggctggaatgcagtggcgtgatctcggcttactgcaacctccgacttccaggttcaagcaattctcctgcctcagcctcccaagtagctgggatcacaggcacctgccaccacgcgcagctaattttttgtatttttagtagcgacggagtttcaccacgttggccaggctggtcttgaattcctgacctcgtgattcgtccgctttggcctcccaaagtgctgggattacaggcgtaagccactgcccttggccaattttttgatttttagtagagaagggatctcattatgttgcccaggctggactcaaactcctgagctcaagtgatcctcccacctcggcctctcaaagtgttgggataacaggtgtgagccactgcgcctggccaagtgtgtttcaagtgaggcacaatggcagtaagcttgactagaagcatcaataggtatgagatctggtgattaaaacttagtttcggagcataaaccaggaaagttttacttaggttgttgacttccggtagtgggaggcatatatttttaacaataattcctccttccctccaagaagagaaaaacaccgtctctcttgaattctgtttcttctcatctgcattttcacccaccctagacaatgccatccccatcaaatcctggttcagtgaccccagcgacacagcccttctcaacctgctcccaatgctggatgccctcaggtaagggaagtgggctctggacacttggatatctcaagaaaggaggaggtgggggatcctcagagggaataaaaaaggtttgtcctgttttaactctgttcccttaagaatttaacatttggacccaggtcgtcttacttcaaagctcatcactttagctagtaggctgtgggcaaattgaacctatctaatcatgaatatggtgataatttaggtcccacatctccagtgatgctgccttacaagagtgttgtgagggtatgaactataaggtactctaccaatgcaagttattgtcaccccaggttcaccgctgatgttcgttccgtgctgagccgaaaccttcaccaacatcggctctggtgacagctgctccccctccacctgagttggggtgggggggaaagggagggcgagcccttgggatgccgtctgatgccctgtccaatgtgaggactgcctgggcagggtctgcccctcccacccctctctgccctgggagccctacactccacttggagtctggatggacacatgggccaggggctctgaagcagcctcactcttaacttcgtgttcacactccatggaaaccccagactgggacacaggcggaagcctaggagagccgaatcagtgtttgtgaagaggcaggactggccagagtgacagacatacggtgatccaggaggctcaaagagaagccaagtcagctttgttgtgatttgattttttttaaaaaactcttgtacaaaactgatctaattcttcactcctgctccaagggctgggctgtgggtgggatactgggattttgggccactggattttccctaaatttgtcccccctttactctccctctatttttctctccttagactccctcagacctgtaaccagctttgtgtcttttttccttttctctcttttaaaccatgcattataactttgaaaccaaagcggccttaggtccttctctggggttttgggaagtgaagagaggggactttgttcacatgcaccctgtcccacaggcagagggggaagagactgctgttggactcaaggggcagggggaaaggtggcgttgagtatagggatagaataatgcggacaccagatgcctgggatacaataatgctgacaccagatgctttggcgggaagggccgagtgacaggatgggcgcgctggtggggagtggaaggacaccttcggagaagcaggctatggaagcacgaaaggagaaaccggctatggaagcacgaaaggagaaacctggacggccaaagggcgtagagctggagaaaccgggcttcgtccggggcactgacgtggacaggttaagcgggcgctgcccccaggtggctggcgccccgacctccgctgtccgggaaggcgtcggtccccctcccagctgtcgcccagccggccccgcctccccggcgccctcccaagccggccctacttcgcgcacccgccacgtgacgctccgccctctttgagatcacatgatttaactcaagtcccgcagtgttcctccgcgctggcgtagtccctacctttccaacctcctctccagtccctattggtctactcattttggcacttaagcgttctgtagatctctccaaacatctgttttctttttgacttcttatttctggagatcatctccgccacttgggtactactttgttttggtgtcaacggccgccttcagcgtagcaacacggttcgtgaatagctaaccttgtaattgtccctgctgttcctctacgttgttaacgaaaggaacttggagaaccaagtctcgtatgatgattaccatcttttactcctcttcagccccagcttccttgaggggacggttggggaataggtttagagtaattttcgatgagcaaaagccaaccgtctttgctacgtcgcctgcgtagcccacaaattgattccaaagcgattacgctaatggcgtgagggggccggtcagttggtggtgctacgctagcagcgttagcgccgctgaggtagtggcgtatcttagcggggggggcagtccccgatagtcgggggcggggttggtgaatagggaagtggcgcaaattcgtggatcgctccgctgaatccgcccgcgcgtcgccgccgtcgtcgccgccccccgtcccggcccccctgggttccctcagcccagccctgtccagcccggttcccgggaggatgaagttcgtgtacaaagaagagcatccgttcgagaagcgccgctctgagggcgagaagatccgaaagaaatacccggaccgggtgccggtgaggacagtagccagggccgagggcgcgggacgcttacgctgacgccacagcctggccttggatcgggacaggcagcgcagggatcaggctgctggctgtggtggggttggcagcgagcctgaaactgctgtccttgggacccaggatgaaaggagtggggtagtggtggatgtggggttgagagggatgtggacaggagagagaaaccttagcatttgaggccttagagagtttgacagcctgagcttcaaatggtcatccccccagctagctaaggttgcgagattgaatcactagtcgacccaaacaagtcacctccgtctgattaagatagttgtttatggtgacgccctattgggggatggatcctggatatttaaatgagctccagtcagtgaggtcaggatctctgggactcagtgctgcaccgcgtgtacaaagacaaagagatgaatctggggtagatttaggtgctaggaatattgtttcttgagttcttgacaggtgcagcttcggggctgcattccttctgtctcctaattttcatctctttatcaggtgatagtagaaaaggctcccaaagctcggataggagacctggacaaaaagaaatacctggtgccttctgatctcacaggtgggaacctgatccaagactcaggcttgcttcctgtgggtgggagtgcagtctctgcgggaggaggctccacctagcagctgttcttttgagggcatttttgacctctgtgactttcttgcatcttgtatcttttgcagttggtcagttctacttcttgatccggaagcgaattcatctccgagctgaggatgccttgtttttctttgtcaacaatgtcattccacccaccagtgccacaatgggtcagctgtaccaggtatggtgactgggaagtggtggaggctttggagaggaatcttggaagagcgtgaggggaagaaagtgttgttacatcagtagttttggactagcttcctggcttgccttaaagtttcataatagccgtgggttgggggtttggacagaacagtaggagtagagagaaggaaagagaacagtgagctagagaaactatctgttcgggactcttcccagtccccctccccattccaaagcagcagaaaacagtttgaggcctttttgcccaggactgcagagattatactgctcgtgtggtaggccttggagtcagtgaaggagtcaggcaatggtttgtggttctagaagaacgtgtctgggtcgtggttggtttaagttactggagcccagttgctgaacagttttctgctttcatcccaggaacaccatgaagaagacttctttctctacattgcctacagtgacgaaagtgtctacggtctgtgaagctgctgcccctgagctggaggggggtctcattctacaaagagagaggtggcccc

SEQ ID NO: 7392 - DNA, 6000 bp, Homo sapiens
tgagccaacatgcttggtctcccccccttttttttttttgagacagagtcttgctctgttgcccaggctgaagtacagtgatgcagtctcggctcactgcaacctctgcctcccaggttaaagcgattctcctgcttcagcctcccgagtagctgggattacaggcccctgccaccacacccagctaattttttgtatttctagtagagatggggtttcaccatgttggctagactggtctcgaactcctgacctcgtgatcctcctgcctctgcctcccaaagggctgcgattacaggcataagccaccacacctggccgcaccattttttttttttaagagacaggatctccctctgttgcccagactggagtgcagtggcatgatcatagctcactgcagcctcgaacttatgggcttaagtgatcttctcacctcagcttcctgagtagctgggactacagacataaccactgtgcctggccatgtctggcacattatagacacttagaaaatatttgttgagggctgggtgtggtggctcgcacctgtaatcctagaattttgggaggccaaggtgggcggatcacctgaggtcaggagttcgagactagcctggccaacatggtgaaaccccatctctaccaaaaatatttaaaaaattagctgggcatggtggtccgtgcctgtaaccctagctacttgggaagctgaggcacaagaatcgcttgaacctgagaggcagaggttgtgatgagccaagatcgtgccactgccttccagcctgggtgacagagcaagactctgtctcaaaaaaaaaaaagaaaaaagaaaaaagaaaatatttgttgaacagtgaatgaaaatattgtttatttgcaatttattcattcattcctcaaatatttattggtgataaaatccagacacatctctaccctcttggagcatacagtatagtggggatattgacattgaataaataagtacataaagtaaatacagtattttcaaactgtgataagagctttgaaagcaaagtactggtagccgtgagagcactatgcagatgatctgactcagtttggggtggggtggtcaggccaggctttctaaaagaagtgctatttgagggatagctgaaggattagttggttagctggatagaggaaggtgggtgggagtggatggagaagagcttccagacccagagaacagactgtacaaaggcaattcagtgggcaggaacagagaaggccagtgtggctgaggcagtcaggtcagccatggtgtgacacttactgggaagaacacgagtgtcactgaaagattttattttattttatttcttttttttttttttgagacagtgtcttgctctgtcgcccaggctggagtgcagtggcgcgatctcagctcactgcaagctccgcctcccaggttcacgccattctcctgcctcagcctcacgagaagctgggactacaggtgcccaccaccacacccggctaattttttttttttttttttgtatttttagtagagacggggtttcaccatggtctcgatctcctgacctcgtgatccgcccgcctcagcctcccaaagtgctgggattacaggcgtgagccaccgcacccggccaactgaaagattttaaacaggaaatgacaaagctctgagtgagtaagaagtggtcactccagagaatagagtttaaaatgaccagtgtggaagggagattggtttggaggcagttgctgtgtccagtcttgggctggtgtggcgtggcggcagtgagtttggagagaagctggatatagttaagtgatgacaaatattttcttttagagctaaaaggaaaattttcaagaaaatctcagctggtctgaaggtagtgaattatttcaattgattgttcacagtcagttacagacggaacttctttttccactctcactgctttctcactactgcatctgactagtcttttaacataataaaaaaaaaggccgggggtggtggctcaggcctgtaatcccagcactttgggaggccgaggcgggcggatcccgatgtcaggagtttgagaccagtctgaccaacatggtgaaaccccatctctactaaaaatacaaaaattagctgggtgtggtggtgcgcgcctgtaatcccagctatttaagagaccgaggcaggagaattgcttgaacccgggaggcggaggttgcagtgagccgagatcgcaccactgcactccagcctaggcaatagagcaagattacgtctcaaaataaaataaaattaaaaagaaaaaaagaaaatctcaccatcggaaaaaaaaaaaaaaaaaaaaaggtcggggccaggcgcagtggctcacaccggtaatcccagcactttgggaggccgaagcaggtggatcacctgaggtcaggagttcgagaccgacctgaccaacatggtgaaaccccatctcaactaaatacaaaaagttagccgggtgtcgtggtacatgcctgtaatcccagctacttgggaggttgaggtaggagaattgcttgaacttgggaggcagaggttgcagtgagctgagattgtgccattgcactccagcctgggcgcagtggctcacgcctgtaatctcagcactttggaaggccaaggcgggcggatcacaaggtcaggagatcgagaccatcctggctaacacggtgaaaccccgcctctactaaaaaaatacaaaaaaattagccgggcgtggtggcgggtgcctgtagtctcagctactcaggaggctgaggcaggagaatggcctgaacccgggaggcggaggttgcagtgagctgagatcgtgccattgcactccagcctgggcgacagagaaagactccgtctcaaaaaaaaaaaaaaaaaaaaaaaaaaaaaaaaaaaaggaaagtcagttgcggtagctcactcctgtaatcccaccactttgggaggctgaggcagggagatcacttgaggtcaggaatttgagcccagcctggccaacatggtgaaacctcgtttctactaaaaatacaaaaaattagctgggcgtggtggtgcgcgcttataatcccagctactcgggagggtgaggcaggagaattgcttgaacccgggaggcagaggttgcagtgagccgagatcgtgccactgcactccagcttgggtgacagagcgagactctgtttcaaaaaacaaacaaagccagaacaatgatgacacgtggctgtaattgcagctatttgttggggggtgggggggcatgctttgagcccaggagttcaaggctgcagtgagctataattgtaccactgcactctagcctgggcgacagagtgagacccggcctctaagagtacattaatccagaaaagtaccattaatccaaaagtacaacaataaaaacgaataacaaacagttcatggctgggagcagtgactcacgcctgtaatcccagcactttgggaggtcgaggtgggttgggatcacctgaggtcaggaattcgagatctgcctggctaacacggtgaaaccccgtctctactaaaaatacaaaaattagctgggcgtggtggtgggcacctatactcccagctacttgggaggctgaggcaggagaatcacttgaacccaggaggtggaggttgtagtgagccgagatcatgccattgcactccagtctgggcgacaagagcaaaaactctgtttcaaaaaaaaaaaaaaagagttcatgaaagtcttcattttatacaaaagcaggtcaattagcttagcataagggggactttaatatgtttagcgaataaacgaaggaaagacagagaaatgtttgagagggcaaaacaaagataaaaaacgtgagagagttgaggtaaaaaatggagagaggaaaatgaaatgagagagagccagaataagcagggtatgtgagaatctgagaagtatgaggaggttggagggtagtaggaagattgggaggaaactgggcagggtgggtggggaaagtgcagtgtgcacctaagaagaggaaagaaagattaattgctgatgctgggttccaaggagactggagacaaggcgcaaaggtaaacgaaaagacaaggagtgggctgggtgcggtggctcacgcctgtaatcctgcactttaggaggtgggggcagggggattgcttcagttcaagtgttcaagaccagcctgagcaacatggtgaaaacccttctctaccaaaaatacaaaaactttagctgggcgtggtggtgtgcacccgcggtcccagctactggggacgctgaggcggggtgatcgcttgagcccaggaggcgaggctgcagtgagccgagattgcacctctgcactccagcctgggtaacacagacttcctcctctcaaacaacaacaaaaaaaagacaaggagtgaaacaggaagctccaaagcaggaaaggcaggaaggggagatgaccaaagatgaaggaggaaggagcaaaaggctggaaggggtgccgggaggaaggagggagcaatgctttggggagagatagcaggactgcagggtgagggaccatggacgaccaccttagagagccagattatagggaggacggaacagtgaggcgtgacagagtgcacagcaattggcagtccaagcccaggcccgggagggaaagagaaacgggcgagtgtgggggaggggtgggaaaggtggaggataggtctgaaaagactctaagggaggggaacgatgggtgtggccaagactctgacctagccctcaccctgctccccaccctcggccggctttaggtcccagtggtttcttcctccagttaggagccttgatgccggaggggacagtggtaggtggggaggttgagtgcaaagggttcaggctgtaagtcatgttgggttggaatgggggcacaggaaggtggggctgttggggagccacgctaagccgggtgtctgtagcagagccagagaaccgggacactgaagagggtgctgaagggggcgactctcagggatcgagccagggcccccgaaggtgggatcgaccagggtaggagacaggaaaaaaaaggagagcagcgggtgggggcgaaagcagggccgaggagagagcactttggacagaacccggcggggaaagggcggcgccgaggcttgtcaggggcgccccgcagcgtcccaggcgcacctgttgggaagaaaggaaggggcttcccggtgttcgagggaaatccagtccggaggggctgactcggagcttgggactcctggggagccaccgcctcctccccagcggcggtcaaaaccgggcaagcgaaggggcgtgaccctggtgctcaggtttcttcctcctcacctgggcaaggaggggtgggggccacgacttccggttcaggtgagtgtcccttcggtgacgtcaggtcatcctcggccgcccctccggtcccgcctccccctcccgcgctcccggggcgcgcgggccgcgcccccgacgccctacatatactcaggtgcgccccacctgtccgcccgcacctgctggctcacctccgagccacctctgctgcgcaccgcagcctcggacctacagcccaggatactttgggacttgccggcgctcagaaacgcgcccagacggcccctccaccttttgtttgcctagggtcgccgagagcgcccggagggaaccgcctggccttcggggaccaccaattttgtctggaaccaccctcccggcgtatcctactccctgtgccgcgaggccatcgcttcactggaggggtcgatttgtgtgtagtttggtgacaagatttgcattcacctggcccaaaccctttttgtctctttgggtgaccggaaaactccacctcaagttttcttttgtggggctgccccccaagtgtcgtttgttttactgtagggtctccccgcccggcgcccccagtgttttctgaggg

SEQ ID NO: 7393 - DNA, 6000 bp, Homo sapiens; identical to SEQ ID NO: 2850

SEQ ID NO: 7394 - DNA, 6000 bp, Homo sapiens
ggcgggcggatcacggggtcaggagatcaagaccaccctggctaacacggtgaaaccctgtctctactaaaaatacaaaaaattagccgggccgggtggtgggcgcctgtagtcccagctactcgggaggctgagggaggagaatggcgtgaacctgggaggcggagtttgcagtgagcagagatcgcgccattgcactccagcctgggtgacagacagagactctgtctcaaaaaagaaaaaaaaagaaaaaaaaaagaaaaagaaagtgtggtctctgttgcctacatcaccatcaccttgagtcctacatcctttgaatgagtcttgggggtgtgccctagaaaatcattggccaattcccgaagccagtacatgtagaagccaaatctgagttatgcaaatacattatttttctattgttcaacttacctctatttgggtctccattctacctgcctgcagaaaacattctctcagtcacttccaggtgaactccgtcatcccactccttctcccacctccaccattgatctaaatttggggagttcctctgagccacagcctaggtggggtggggtgggaaggggctgctggatgagagtcctctttctgagatgaatcctcctgggcccttcatctccgtgggtcacacatgccctcatttctactctgctgctgccgtccccacgatccaatagcaatagcacgacccctggccttgaccgtgtatctggggctctgtcccttccacatcacccccaaaccagcatcaaatgtcttgtctggctctgcactaggctcccctcagttagtgcagggtgtccaactgggggcggaagggcttcctgtgcctgcctcttccaatcctccatgtcttatttataccctgacagacactgagggttttgaacttaaaaggctggaatttggcatctttgttctctgactagaaagaggaatcatttgaagaccaaaaagcaggagccagcatctcacagcatgatctgagacccccgtggaagctgctcttttctttctcatcacataggctgagccacccgggactgtcagtgcacaaggaccagggacgcggctgctcctctgagggggaggaagccaagagtatcttctcttagattgggctgagttcccacacccagcacacacattccctgctcactcacctcccacagacagctgggaaatgacacctctggtgacagagccactctccgggcttctgtggggagcgggtggggcactgcagtgggggaggatctcacacccggaggccctgggaagccagggtgggggagggaggaagctggttcctgtttgtcttagagatcaaggccatcagcctccctgcaccttccagggatgtagtaagcacccccaccccagggccaaagggcctcgcctaaaatgcctcctgcacccttgaggcttgctttgaccccctgcactccaccagagcgacagctcccctggtcccatcttctctgacaagctgggtgggagtgtatacagctgctgggtgtgcttagagggcctaatggagaccagccagggataatctcctatgttatccacatcaagccatttaacaaatatggatttagtacctacatatgcaatgtatttggggtccagagagaggagggcaacggtccaaggtcacacctgcgaggcgaatacgcatgtaaagcagcaccttgtaacctgtgcccactgtgcctactactaaagaaaaaaaaatgagagaaaaagaaaaaaggctttttttttttttttggcccaggccctgtgcctgggaccaaagcctgagccctttcctgcagtcgggtcgctgacctaagcctggggcaaagctaggtcttggccagtcagcagccaccacgtgaagcagcccctgcccccatcacccccggcagccttgtgccctcctcctcggggtcctcagctcaccccacctcagtcgggcctgctccagcggttaagtacccctagtctgaaccttaatcgtgaggcggggcagccccctccccacaccctgtagacactcccccgtcctccgccccctggacttgtttgggcgggaagagcctgcctcatcttttcttcctaccctcctacccagtggccagggaccccaggcttcctctgagacatccaccagcggtgatgggttgggaccaatctcccccactcctctccaccctagcagtaaggtccccgctctcgatactgccccagcacctgcactggccctctctgatttcccaactccagcccattccaagtgctgaaggcgggtcgctaggtgctgggacctgggcgcggggcaagaccttgggctgtgtggggtgcaggctggtttactgggttcacgattgagggagtggtctgggggttaggtgtagggccaggctgcgttgtgctctaaggggcaggcggcaggcggtttgggggggctgtggtcagacagggtggggtggcggtgggtttggggaagccgcagcagcccgccttggggtcccgcgagtgccgagggagctgccggggcatggtggcgcggggcccgtggtcctgcccggcacgacccccgccccgcagcgccccgcagcgccccgcccccgcggccccgctcgcgacgcgtctcccgcggcgccccgcccccgcccgcagtgcccggatgcgggtgacgcgcggccgccatctttccgtcccgggcagccagcgccagtcggagccagcgcgagccgccgccgccatcactgccgctgccaagtcctccacccgctgcccccgccatgtgagtcggccgcccgccaccctcaccgcgcttccctgcgccggccgccgcccttggcaaccggccgtcgggagtgcccggggtctctcctgcgttccccgcgccccggggccaggcccaagccggtgactgcgcgcgggcggccgaggagccccgcgtcccgggctggccggctcgggcgatggccgcgggaaggagcggacccagtgtcctcctgcccctccccgcccctgtcaccgcggccgcctgtcttttcgggtcgacccggatcgcatctgtgaggtcgccctcagttgacaggcggggaaactgaggccgggggggcctcgctcaaggtcacgcagctcatcggcggcagggctggaccgagaccagggcttacatcgggtggccttcctcccgaaaaggaggactggagggacgaggatggacaggtggatgggcggagccctggctgcggggccgggaggctgcaggccctgggtcttaatccgtccctgctcctcaggtctgctaccgctgccacggccccccctgctgccccggctggggagggtggtccccctgcaccccctccaaacctcaccagtaacaggagactgcagcagacccaggcccaggtggatgaggtgagtgtggggggagtcaaaagcagtaggagggaccctgggggttggcgtataggtgtaggggcccatgttggtttgggagtgatgacagttcacgcctgtgggtttgcggacaaagataccatgccccatccctgtctccctgtcagcacgcacttggaagggcgctgggggtgttaatcagctttgctagcctggggtgtgccagcctgggcaggtgtgctctggtgatggacagagcgcctgaggttccatagagggagggtgttgctatgacatctgagatgtcaccagcatgcccctgatgtgtgctccttgcatgtccccaggtgtgctaggcatgttctgtgtgtccttggcatgttaacctggcagtatcagggtgcatgttccatgtgtggcacggtgggcacatgtttgaggattgccctcactgaggtgggccttggcacacccccctgcctcgtgggcccttctcccaggtggtggacatcatgagggtgaacgtggacaaggtcctggagcgagaccagaagctgtcggagctggacgaccgtgcagatgcactccaggcgggggcctcccagtttgaaacaagcgcagccaagctcaagcgcaaatactggtggaaaaacctcaaggtaagggtggggacaggaaggaggacaggtgggtgaatggggtatcatagtttgtcttactgatcctcgcctctcacccccagatgatgatcatcttgggagtgatttgcgccatcatcctcatcatcatcataggtgagtagggtgagaatggccggggccctttccctggagaggtttccccagtggattctaggttttgaaggtcattaatctagtttttactcttcagccaaaaacacatatagctgctaatggcaattctgattcatctagagccaaaaactttgatgttatttagcctgcattttgcctagttcttggcagtcttgttaacatttggaaataggaaagctggtgtatccattgaggaccctttaggcctaagagcccagtctgagaaccctggaattgaggagtgggagaaaggaaaggaccaggggcttgagacatgaccaggaagccaaccaccccattatttgagagcttgcggtctcagaggctcagaggattagggtctgtggcttcaaggccataccatggagcggaagggacctcagaacctacctgtctagccccttgctttgtagatggaaaaactgagtccaagagagggtgtcagccagctggggagtggggaggattggagcagggccaggcctgacacactgctttcttgttctctctctttctctcccctctccctcttcctcatcttcttcccctctctccacagtttacttcagcacttaaatccccgaggagtctgccctgcctagagaagggcctctcccccaaccctcagccgttcctccacctctcagccatatctttcagcccccactcccctggatccgtgtgtgtgtgtgtccgtgtgtgtgtccccctgtaaatagccagctgttatttatacatatataatattatatatatttggtctgtttgtagttttattactagatgatttttccggttgtccttaacaccccttcctgaggttcccttcacccctctctcttgccttccttccctttccctttcttcctgactagccccaagtcccttcatttgcatctgctatgcaatagtccctctcctttccttcttcttccctcagatttagctgatccttcctcccaccctggccttcctttcctctttcctcctcactctccccgtcatgctccctctgccccgccctcaaaaaaaaaaaaaaaaaaaaaaaaacaacagcacctgtccaggcttccttaggtacatcttctttgtatccattgggaggctctgagactggccccacttggtcctaagaatcccaaggtctttgggagcgtccagcatgttaattagcgtatcattacatactgctatccctttccatttctttttgttccatcactcttctctcaacctgtgtttctttttttactgaggagttagtccccattagttcttgtatcacattttcatttgcacgacattactcgcaggtggtggggagcctgggcttttggggaaccaggctgctctggtccccagcattgcctcctcctagcccctctagtccagtttgcctcccttaccctcattttccaaacctcttgtaccctcctctccctcccccagctggtatgtaagtgtcttgaagttcagtatgttatgatggaccaataattctgccacttcgggtttctccctacattcctgctccccagttttcatgtggggtactcaactgacattcccatggggtttccctcccatctgcctgatccacctcctcctcccaccaggagagttgggggttggccacaattgatctcttgtgagaggggtggctaccagtgtgtgtgtgggggtcatcactgccttggggaggagtggggcagggcagagaatccccccaattcct

SEQ ID NO: 7395 - DNA, 6000 bp, Homo sapiens
cccaggctggagtgcagtgacgcgatctcggctcactgcaagctccgcctcctgggttcatgccattttcctgcctcagcctccctagtagctgggactacaggcacctgccaccacgcctggctaattttttgtatttttagtagagatggggtttcattgtgttagccaggatggtctcgacctcatgacctggtgatccgccctcctcggcctcccaaagtgctgagattacaggcatgagccaccacacccggccaatttttgtattttttttttttagtagagatgagggttcaccatgttgggcaggatggtctcgatctctcgacctcatgatccgctgacctcagcctcccaaagtgctgggattacaggcctgagccaccatgcccagccctgatatatatatatatagatagatagatagatagatagatagatagatagatagatagatagatgtaattttgagacagagtttaactcttgttgcccaggctggagtgcaatggcgcaatctcctgctcactgcaacctccacttccggggttcaagtgattctcctgcctcagcctcccgagtagctgggattacaggcatgcgccaccacccccagctaattttgtattttttttagtagagaagaagtttccccatgttggtcaggctggtttcacacccccaacctcaggtgatctgcctgccttggcctcccaaagtgctgggattacaggtgtgagccaccacgcccagactcctgatattttttttattttattttttttgactcctgatatttttaattaaaaaaaaaattaggaggtcagggaacccaatatggaaggcagattgtggcaaaagaatttaatgatactactaatgtatgaaataacttttctgaagggagctgggggaaaggtgctgacctgagtaattttggaaatgagtcgagtctgtaagatcaaaggcaaatggaactacacataagcactgtaccctagtttataagattgttctccacaggggtatgtgttaacaattctcttttgagacattatgattacaaataaagaaatattttattttattttattgaaacggaatcttgctctgtaacctaggctggagtgcaacgacgcgatcttggctcacagcaacctccgcctcccaggttcaagtaattctcgtgcctcagcctcccaagtagctgggactacaggtgcgtgccaccacgcccagctaatttctgtatttttagtagagacggggttttgccatgctgcccaggatcgtcttgaactcctgacctcaggtgatccacctgcctcagcctcccgaactgctgggattacaggcatgagctactgtgcctggcacatataaagaaaaattttaggctgggtgtggtggctcacccctgtaatcctagcactttgggaggccgaggcaggtggatcacctgaggtcgggagttcgcaaaccagcctgaccaacatggagaaaccctgtttctactaaaaatacaaaattagccaggcgtggtggcgcatgcctgtaatctcagctacttgggaggctgaagcaggagaatcgcttgaacccgggaggcagaggttgcagtatgccaagatcatgccattgtgctccagcctgggcgacaacagcaaaactccatctcaaaaaaaaaaagaaagaaagaagaaaaagtttaggccgggtgcagtggctcatgcctgtaataccagcactttgggaggccaaggcgggaggatcacctgaggtcaggagttcgagaccagcctggctaacatggtgaaaccctgtttctactaaaaatacaaaaacaaattagccaggtgtggtggttcgtgcttgtaattccagctactcaggaggctgaggcaggagaatcgcttgaacctgagaggtgaaggttgcagtgaactgagattgcaacattgcactctagcatgggcaacaagaacaaaactccgtctcaaataataataataataataataataaagaatttaaaaagaaaaacaaaacaattctgatactcctatacacgtgtcctggaataaacaattaagtaaatagatggcaaattatggaagccaggtttctcacagttggggtgggagtttagataaacaagggaggtggctagaatgatccatgtagtaatggattaaagttggagacatcagtatgaattcatgcttagcttaatatagatatggatggttatatatggaaatacatgtttgtgtatatacgtgggttagtatacacacatatatttccttgctttctcagatgtgagggtccagaagcaatgatacctcaaaagcaacaagcacacctagggcccagatcttggattctaaaaccatttgccaataaaagaaaataggggtccttggagaaatggctgattgcaggactgtggcaggaaatacacaaaatgagcctggagcattttatagtaccagaaagtaaggtgacactaaataaaaacaaggttttaattaaaataccaatgatgacaacaacactgatgggactcttatttttctccctggttgaggattgaccgccatcatgaatgacttagtaactatctgaactaggaagttcatgatcaactgactacatacttcaggaggaacaaatggttattgaggtccttcaccctgggaagacaacagtacctaagacagaaattcaggaaaaactagccaaaatgtatgagactacactagatgtcatcatctttgtttgtttttgtttgtctttatgagatggagtctccgtctgtcacccaggctggagtgtagtggcgcaatctcggctcactgcaacctctgcctcctgggttcaagtgattctcctgcctcagcctcccgagtagctgggattacaggtgcctgccaccacacccggctaatttttgtagttttagcagagacagggtttcacaatgttggccaggctggtctcaaactcctgacctcatgtgatctgcctgcctctgcctcccaaagtgctgggattacaggcgtgagccaccacgcctggcctcatctttgtatttggattcagaactcattttggtggtggcaagacaactggctttggcatgatttatgattcactggattatgcaaagaaaaataaacccaaatgctgacttccaagacatggcctggatgagaagaaaagaactcaagaaagcaatgaaaggaacacaagaccagaatgaagaaagggggactgcaaaggacagtgttggtgtggcaaaaagccaaaggagtaaagatgctacagtaacatctgtggccactgtggatttttcacaagatttataaactaaaaacttttgtgtgcaaaaaaaaatggatgggggtatgctaaagagacacaggagccaacggaaacagctctcaaaggccaaagctagaacgaaattagctagaaaataaatatgaagtatattggattataacccaaagtataaatgtccatgagtccatactgattaaataaatggttgaataaataatggaggagtagagacaaatatctcatatgaaagaactccaggccagggatggtggctcacgcctgtaatcccagcactttgggaggctgaggcgggtggatcacgaggtcaggagatcgagaccatcctggctaacacggtggtctctattaaaaatacaaaaaataagccgggcgtggtggcgggcacctgtagtcccagctacttgggaggctgaggcaggagaatggcgtgaacccgggaggcggagctctcagtgagctaagatcgcgccactgcactccagcctgggcgacagagcgagactccgtctcaaaaaaaataaaaaataaaaataaagagcctaaggactaaggatttaattaaccaagcaccaacccgtgcagcctcaggagactggtcccgcagcgcaagtgtgtccctctaccccccgcaagccgggccgcgtcttcctggctctcctggcgccggcaccgagcagggcgtggacctgaacttatgtgaccccacccggtcacaacccggggtaggaagctaaagccgtccgcccacccgaggggcggtcccagcaccccagtgggggactgctgcgctcggcctctgtgttcgatcgggaacccaggtctcttccctgccaataacaaaaccgccgcgtcccgggcctcccttccggagccggagtcggcggccgagcgctggtggcggagcctggacagttaattccaaccgcctccgggtgattccggggacaggagcgccgagagctcctccctttggccgcggagccggctcggcgctgattggctgagggcctcggttgtggctcttgaaggctccccattggccccgcgctccagtggcaggagtgtggcggcccggcctccgcaggctacccggggttgaagctactgcgagctccggtggctgcctggggacgctcagggacgctcattcctggccagagtcctgacttctttctcggatcgagatctcgttgctggctcgaggaaatcaccggctcttctcccggatccttttcttctctcacttgctggctttcttcttcctgcctccctggcttccatctcccaaccccgcgattccctcctctactcccgtgctcccgtcgcccgccatcctgagccatcccacctgcaaccttctgtcttttgcccctccttgacctcagagggtcctgccttaagcttctcaccagaatctcctagatttctatctcttccctgcttgccagctcttgactcccaaattccagctgacgtttgaccacttgacatttgaccctgacacccttgactgcaaatctaaattcttatcttctgcaacctgtactgctgaaacaggccttccccctgtcttccaaccccgctttctgacacccatttttactttcttactcttgggtcagttcctgctacagctatcccaccatggacttcttgatgagtggcctggcagcctgcggggcctgtgtattcaccaatcccctggaggtggtgaagaccaggatgcagttgcaaggagaactgcaggcccctggcacataccagcggcactaccgaaatgtcttccatgccttcatcaccatcggcaaggtggatggccttgctgccctgcagaaaggcctggcccccgccctcttgtaccagttcctgatgaatggcatccgactgggcacctatgggctggctgaggctgggggctacctgcacacagccgaaggcacccacagtcctgcccgcagcgcagcagctggggccatggctggggtcatgggagcctacttggggagccccatctacatggtaagaagagggctcttgcctgggaccttcagggcagatcctcgttgtaggataggagctgttctttcccaagggcataggtggcagagtgctgccccactgcaagcagggaaaggcatcaggaaagtgctggtaggcttcggagtcttctgatctgccctatacacacccatctgatggacacgattgaatgtattgattaagattatgggctttggggccgggtgcagtggttcacacctgtaatcccagcactttgggaggccaaggcgggcggatcacgaggtcaggagatggagaccatcctggctaacacagtgaaaccccgtctctactaaaaatacaaaaaattagccgggtgcggtggtgggcgcctgtagtcccagctactcgggaggctgaggcaggagaatggcatgaacccgggaggcggagcttgcagtgagccgagatccggtcactgcactccagcctgggccacagagcaaggctacgtctcacaaaaaaaaaaaaaaaagattatgggctttggaatcagactttctggaactaaaatcctggctttgaaaattactagttgttggccgggcgcggtggctcacgccagta

SEQ ID NO: 7396 - DNA, 6000 bp, Homo sapiens
ctttgaccagtatccagtcaaagtaccattttacaaagttactgaagttagtgctttcattccctatccccgtcagtgtggttatgttagtaattgattatacagttaggttaatttgttattgcttgtctcccacttttggtcccctgcccccatattctggttgatttcgattatttatttaattttgggtatgtaaaatatcgccatggttctaagcgttaaagctatacacacagataatcctcagagaagtgctgttcctccctcatctccagtttcattccttgatcctatccacccttttctcacctccacctcccatagtaactaaccaatctccttaatttctggtgtatccttcctgtgttgggaagaattcttttacttaggtcacggtggagattctgccttatgaaggcatgaggaagggactggggcagagaagggagagtcaagcctcggaaggtaagaagcaggagagggaggagtcatccaggacggaagcaggctgggtcagcccaggactgcatgggcctagaatattccagaacaccaggaaagcagtgtggagagccagccagaacctggaggccccctccatatgagatgcaggccctctaactcctcctttcattactatttagaaacccccaagaggctctcctccctgccccatcgtgggctgccttgggaagctggacccaggcagaccctacacctcctctgaccagccctgcaccagagggaagatgagccctccacatcatggcatcctgtcaacatgggaagaaaaagtggaagcaggactggctctctctgtgccctctggggtcccaccaacccaccccgactccaggcctttctgccccatgcagggtccccagcaaggactatgagtcctctttgctggctcagaagaggaacttggagatgggggaaggccctgttgttggatatttcaacaccacctcaccactggcaggggaattggtggcgggggcgggggggcggggggcggcattcccggcagcagctggaattttacaatgggagctcctctcaacaagatagggagggggcttgggagggtgatgccagggaagccaggccctgcttgcccagcttttgaaaaaaggcgtcatgctgggagagcgggtgccactgtcttcccccctcacctctgccccaaagccgtgaggttctgctgacaagtcataagaaacagctgatgactgactcagacggaaatgagcgtgtcaaaggggtgggtggtgagcccggtgtgctgggttaacccccagggcagctcagctgagggtcccctggctgggttccctctccccatctctcaggctcccaggggctagtggctcaggcaagtcctgcctctgagaagaacttggggcgagctcgagaaagccttggaatgccggggaggctggcacaccagaattccaccagtgcctgaggatatcctgcccttccgtggagaaggctttgatgtgtcccttgagcagggtggggttggggggaaggggcacaccgaggccaggagatgggaaagtcacaggcggccccagaatgagaaagagaagccatgggcagtcaggcattgggtgcggtgtgctagcagcagtcctatggcactgtgttctgcccccttaaggacaggagtgtgcagaagtggtgttggctgagaacattcatttgcatcttgtgtttgcatccattacagtgtgggacacgtaatgagtgagcaggatgactcactcctgcttcatggcataaccagcttggccatcgcagcaggggctgggcagaggggtcttaaaacccagatcacacggttcaggacatgctccaggctagagacgcctgggccccgtgagccaccacggtcatcaccggtggagtccgagagagtgttgctcggtatcccctctggcacacactcctgtgagccttggccttttctctggaggatgcagggctgtgcggggcagctggtgtagatagatgtggtggggctcacaatccccagcaactgagagtctagattttcttttttttttttttttgagacagagtcttgctctgtcacccaggctggcatgatcttggctcaccgcaacctccacctcccgggttcaagccattctcatgcctcagcctcccgagtagctgtgattacaggtgtgcaccaccacacccagctaattttttgtatttttagtagagacagggtttccccatgttggccaggctggtctcaaactcctgacctcaggtgatccacccgcctcagcctcccaaattgctgggattacagacatgcctagcctacctcttaaagcaaaatcaagtcttcacttgttgaagtagaaacatgaattggttttaattttcttccagtaactgcctccgactgtgctgaggggcaatgtattctagtggttgaaaccccagaccccctgggtttataccctggctttgccatctcctagctgtgtgactttaggcaagctgtttaacctctctgtgccaccaatttcccatctttaacctgccccatccagcttcctacaaaattggtccagccttcagcctccttctgataggtttccctcatgctgctggcagccctctagaaaagtaacaacaaaccggctcaggccccacgtttgttccacccctcaccccaatctggagctgctgacttgtccaacagtgggtctgcaagatgccccctctgccccttgtctcagccctgccatggctcacaggcagcaccggagcaggcgagcgagtttgccggctgagtagatagtgacccgaggaacaaagggcagcatcctcagctttgggcatcccagtctgtgtcaggacttctctgaaagccctctgccctcagctttgcggagagaaggaaggatcttccagatgggctgacaaccctttttctcttcccaatcttatgacagggattggcgggtcactgtgctggttctggactgacacctcccagcaagcccaccagagtggctgcgcccacgtccttgacaatactccgtggctcttagaactttagaatgcagaggatttagcaacttttgtccctagaattgggtctcagccacaatttgaaaataaaaagtcctccctgatccccttgtctgtttataccagtgtcaactctctcccagctgcctcgaacaagtcccttatccttcctggacctcagcctccccttctgtaaaatgagggacttgctggggaggcctctgagctccctccaagaacctgctctgggggtaacctgggagaaatcagcctgtgagaacaaagggtcgctgtcacatctgggccagctgttcatgccccaggctcatccatgtgaaggtgtctggtgttctacctcctccagcaggtgccgttagccctgagctggaataggacccacctccagagggtcttgtggtcgggctgccatgggaggcagaaagatgaggcctcatcacaggtgtcagtccccacagatgctcatccatgccaggtgccagcacaatcccaggtcagggaggggtctgcccggtctggctcagggtcagtggactcacgacctgagctacctgtggaggtgttaaacagaagatccaaaggcaactgtaaaagtcacatggaagggcctcaggatgtctttgggcatccaggtgctgctaatggacacacccaaggtcttgagtcaccaatgaaaggttttcttctttttgttttctttttgagatggaatctcgctctgtcacccaggctggggtgcagcggtgtgatctcgacttactgcaacctccgcctcccgggttcaagcgagtctcctgcctcagcctcccgggtaactgggattacaggtgcctgccaccacgcctggctaatgttttaaaatattttttagtagagatggggtttcaagatgttggccaggctggattcgaaatcctgacctcaagtgatccgcccaccttggcctcccaaagtgctgggattacgggcatgagccaccgcacccagccacccgtgaaaagttttctgaactcagctcttcacctccacagccagaaggcatgggacctaatgggttagtctttgtcctgggccagcccggcgccctggcatatactcctgggtccaggttctcagcaagctaattcctgcacccagactgtggcatgggctggctcccctttctccaatactcttccccctcatttgccctggcttcctcatccagcttaaatgtcccttcttcagagaggcctccctgaccccccaacaccctggaggggggtccccacttgtcccactcccagcaccatcctttacagcatgtttcacttcttggaatcacgtctttgtttgctccattgctcagtgtctgtgtctcccaccaaggagcacagctgcttggttcactgctgtctcctctagtctcctctagtgcctggcacatggcagacagtcagtgaacccgtgatggaaccaaggtgcgtgtgccgcttcctgcgtgcccactgctgcactgtccggctttggaatgcatagcctaccacagacactgtgaaaggatgctggagagctcacaaagggcttagttttcacttggcgagtggtgcctcccaggctggggaggcaggaggatttgcctgtgtggggcctccgtaagctgaatactctagccgcgcagctgaacccaggttaggattttatccctctttgtatgtcatctgcatggctcagctctgagctctgtgcttcctcttctggcttccagagctgaactgcagctttctcagcatccctctatggcctggcctgactggccagtgaaggggtctgcccggaaggagtgagtgcagtggcatcccctgaggccagggcgatgatggcaatgactgtagcagggcagctctcgcgtgttggaagcttactcagcgcatctgctacagcattttatcttcccaagagccccatgaggttagcaccattgtcatcccattttacagataagtcaacagaagtttggaaaagttaaagtatttgcccaaagtcacatggctagcaaatatcagagtccaggtttgagtgtaagtccgtcggatgccagagccaagcttaatcactgggccaaatcaccttccgtggcttccccagagacccaggagccctcatacataactaagaagctgggctggccctgctgggggctctcagttccccatacggggctaaaaccctcctgaaattccctcttcagtgactttccagctcagctaagcaccccttggattctcctcagtaggatgaggaaggagggcagggaaggtctttgaatgacaggtaacattgccaagccccaggggaaggaaagaaaaatggcaaaagtggaggttagggcagaaaggaaacagatgcctgtgacctgggcacccaatcagagggagctccctccaagcatattgagggagttgctgtggccttgtcatcaggaacacgctctctgccccatccctggaggtttggaaaacacagcctggaaattcagaaaaagtcctccgagtgattctgattttcccctcaggatcttcctgcccagcccactggggtctgaccactccctgggtacttggcgacacttcccactgcccagtgccctttccacctctctgctcccattcctgaccccttacttcccacacctctgtcccgttctgctgcaggggtgctctgtcctgccactcagatgtggccctccagatgccattcctaccctggaggcagctgtaaggcccctggtcctgtttccacagcacctgagctatagctgggctgggctgatcgcgctgcactgtgagcacctgttgtctttactggaccaggtgctctctgggaaaggagctcgacaagctgaccggcgtctgtcccccatgcaggcgatgacccagg

SEQ ID NO: 7397 - DNA, 6000 bp, Homo sapiens
tggatattagaagaatggattccaagaacaaagttgagttacctggaatctaggttatttgggccaattatttaatttagcatttacttttttaaacctaattttaggccggacgcggtggtggctcacgcctgtaatcccagtactttgggaggccgaggcaggcagatcacctgaggtcgggaggtcgagaccagcctgaccaacatggagaaaccccgtctctactaaaaatacaaaattagccgggcatggtagtacatgcctgtaatcccagctactcgggagactgaggcaggagaatcgcttgaacccgggaggtgtaggttgtggtgagctgagatcgtgccattgcactccagcctgggcaacacgagcgaaactccgtctcaaaaaaaaataaaaaaccccaaaatccctaattttaacagttatatacaccccttgatagagaatattcaatttagagaatattgaaaatttgcaaaaaggaaaataaatagcatctttaactctataatttggaaatagccattaatgatttttttacaatgaatttgttattttaatctatatttttatatatatatataatataaacagcatttctctatgtcattggacattctttgaaagcataactttcttttcttcttttttttttttttgagacggagtcttgctctgtctgtcacccaggctggagtgcaatggcgcgatcatggctcactgcaacctccacctcctgggcttaagcaactctcctgcctcagcctctggagtagctgggactacaggcgcacgcagccacgcccagctaattttttgtattttagtagagacagggttttaccgtgttgcctaggctgatcttgaactcctgagctcaggcaatctgcccgccttggcctcccaaagtgctgggattacaggtgtgagccaccgcacctggcctcataattgtcttatgttgcaaaataatgcatcacatgaatgaccataatttatttttctcctattagttttttgtttttctgatgttttgttttgttttatcattgcaaagggagtccctttgttctatctcttatttccttgggctccctgtctagaagtaggaattagaactgttgaaagtgaagcatttatactttttttgttattctcaatcagtttgactaagtggctttctcattagactgttgaaagtgaaatagaactgttgggctcaagggtataaacatttttaaggcccttgatactgtgaaccccaaagtatctgagacaggtctcagtcaatttagaaagtttattttgccaaggttaagaatgcacccatgacacagcctcaggaggttctgaagacctgtgcccaaggtggttggggaacagcttgcttttatacaatttagggagaataatacatgaattaatacatgtaagatttatgatggctcaatccagaagggagggacacctcgaagggcgtggggggcttccaggtcataagtagattgaaaaattttctgattggcaattggttgagttattatcaatagaaacgaatgtctgggttatgataaggggtagtggagaccaagattttattatgcaaatgaagcctctgggtagcaggctttagagagaatacattgtaagtgtttcttatcagacttaaggtctgtattgacgttaatgctggttggcttttcctgaattccaaaaaggaggagaggatatataatgaggcatgtctgatcccctcttcccatcatggcctgaaccagtgtttcaggttaactttggaatgcccttgccttagagtaggggtccgttcagatggttgcgggggtgggggggggtgttgggggtgggcttagaattttattttggtttacaatacatattcctaagttgccctccaccttctggaacctaaatccctcagtttacaaatcaagtaggaaataaaggtcaaagataagggacaggcccccagttatctatttagattggtggaagctatcactggaccccaagcttcttccgcagttaatgttgataaagcattgagactttttctgttatacttcattagtttgatgaagtggctttctcattggactattgagagtgaaacagtgagacactcagctgtgctcccaaagcacaaaatgggtcgctgattaggggggtagaaaggagtatgggaagggacttgaaaaacctataaaaggccaggtgtggtggctcacacctgtaatcctagcactttgggaggctgaggcaggcggatcataaggtcaggagttcgagaccagcctgaccaacatggtgaaaccccgtctctactaaaaacgcaaaaattagctgggcatgttggtgtgtacctgtaatcccagctactcaggaggctgaggcaggagaatcacttgaacccaggaggtggaggttgcagtgagccgagattgcgccactgcacttcagcctgggcgacagagcgagactccatgtcaaaacaaaacaaaacaaacaaacaaaaacaacctataaaaacagattcaactacagctttacctttgtgttgctaaaatcataggtcattggcacctccctcagtgtctagcaatggaatatagcagttactattttaatggcctatcaaagcaagtggtaagctcgctgtttaacagaaggagcccatgatcactgtctctgaactggctctttgctaatgttaattagctttacctccagggtaactaatttgttgatgatgtaccatttccagaaaaattacagttaaaccttaatagttttatatcctgattggactttttatgttggtagcatggtcttctttgtgttgaattgctttttaaaaactttattttggaaggtaaaagatacacaaactagaatagtataatgggcccctttcatactcaccacccaatttctgtgattatcaatattctgccattcttgtttcatctctaccctccacaccttttttttttttaattttgagatggagtcttgctccgtcgcccaggctggagtgcagtggcatgatcttggctcactgcaacctctgcctcctgagttcaagtgattctcctatctcagcctcccgagtagctgggattacaagcacccgccaccatgcccggctaatttttgtatttttagtagagatggggttttgccatgttggccaggctggtcttgaactcctgacctcaggtgatcacccgtcttggcctcccaaagtgctgggattacaggtgtgagccactacgcctatgcccggcccagattacttttttttttttttttttttgagacaaagtcttgctcttgtcccccaggctggagtgcgatggcacaatctcggcaaactgcaacctctgcctcccgggttccagcgattctcctgcctcagccaccccccgacccaattactttttctaaactagtacttcaggcacctgtgtgcttgatagtgtaatgaggttgtctattgccccaggccaagggttcccgcccggactttaccgcagattggaatcacttggagagcttttaaagctccccacgcacgcccaggacaaaccccataccagttgagtcagaatgctgaggttgggaccaggcattgttatttttttaaagattccccagtgattccaacttgtttcagaactattgctctttagggctaaaataacaacacaaggactggagtcaggacacctgggagtttgtgctagctgtgtgcatttctcataacctctttagggccactctctgtgtgtaaaagtgttctctatggctctgaaattctcctttaagtctaaccttgttagactggtgttcaaggctctgcagaaactagcttctactcatctctaccattttatacttaacaggcttccagggccaccacgcagccaaatgtgccgggcacgtttccttccattcatctttgctcgccctgtctttcactaagtctagaatgtgctcctccctcctgtctgaataagagacctgctttaacttcgtggtcatccagatgtaacctcatggaccctctccatctgagtgccttggtcagcagtaatctcttccacctctgaactccagacgtacttaccacttagatcccacatttggcaggaggcaaaacttaccatatgtggatgatttttatatgtatggtctggaccccagagccagacctaggctcctcttttcatgataatatggaggaaaaaaaagtgaaatgtggcaaagtttggaccaggacccaattttccttattagcctcctgttttcttaattctgtgttttcttgtatcactgctatttttccctacacacacaaatacatgaatatatatatatgaatgatatacatgtgacatatacgaatatatagtatatatgatataaacgataggtatgtgatatatatgaatatatgtatcagtgatatatatgatatatgtgaatgtgtgtgatatatatatgatatatacatgaatggtgctgctttacagtatagtggttagtggttcaggatcctctctcaggatccttatgaagtttacagtgtaaagctcttagtataggacctggctcaggtcaggtactcagctgttactattgctataattattctagtaagattcctaagggaattgatgggcgcattttccttcatttaaaaaaaaacacttatcaagttccctcagtgttcaaatgatatgtgggaattgaaaggttttaaaaaatatattgtttactcaagcaaaaattaggacattaggggcaacaggagtttctgatattttgtgatggactggtcctggaagataatgctggtcatgttagtccacagagtctctgctttttaggagcagactgtctgataggagaaatgaaatgtgtatgcatgcttaagtattttcgtttttttgttcgtttgtttttttgagatggagtctcacagtgtcgccgggctggagtgcaatggtgtgatctcagctcactgcaaccttcgcctcctgggttcaagcgattctcctgcctcagcctcccaagtagctgggattacaggcacccgccaccatgcctggctaattttttgtatttttagttgagacggggtttcactatgttggccaggctggtctcgaacttctgacctcatgatctgcccgcctcggcctcccaaagtgctgggattacaagcgtgagccaccgcatccggtctgcttaagtattttctatatgatagaaagtaaaaatgctctgagagaagcaaaacataaggggctattgggagttcaccgtgaacccttcaaagcctccaacgctgctgaatgacaactagaagcttattaaatgttttgagagaattctggcaagctcagatgtcaggtgggtgtgtggcctttgtccccggagcatttggttttaggctagacaatacttgctgttcctgcaccctagagccgcccccaggcatctgcaagcccagcttcttcaccttgcctcggtgtcacctgatcctaagtagcagctccttatcactctctgtccctttatcctgctgcgtttttcttcttagcacctatcaacacctgacatactatgtatttaattgttttatgactttctttccttaaaatatgagctccttgaaagagggactgtgttcattctgtttactgccgtcttctccagtgcccagaacagtgcccagtgcagcggagaccccccacatgctttctcattggcagaacagcacagttgttaagagccccggctctggggccagacggccttggtttgcagcaggcagaaccacttgggcaagtcactctaactctttgtgcctccttttctcatgtgtgagttggagatggtaatggtacccacttcatagcgttcctgttttgattaagtgagttattactaacgaagccttcaaaa

SEQ ID NO: 7398 - DNA, 6000 bp, Homo sapiens
gctgtgagagattagctgtgcaatgtttgggctccttaaaaggaagtttatttaaaataaaacttacctgcacgtatgtaacactgtagacacagatccttcccacagtatatttaatctctgcagaattcactgggaggggaggggagccagtgggacctcttggctattacacaggttggcacttccagagagaacagtcttggcatcacaggcttcaggcatactcaaagctcttctcccttctgattccagtttctccatgccctgcagggcctcttgggattattgtattctggaaagcaaacaaagttggacactgtctctttaaataatagaggctgagaacctctcaggccaccatgacatatcccagcattggaccagcccctgaataaactggaaagacgcctggtctggcttcagttacagggagcaccaccagggaacatctcggggagcctggttggaagctgcaggcttagtctgtcggctgcgggtctctgactgccctgtggggagggtcttgccttaacatcccttgcatttggctgcaaagaaatctgcttggaagaaggggttacgctgtttggccgggtgagttttattggcaaactgtgcctctgggtgatgtgtgcctatgctttacaagaattgcctaatttcccaccccctgcaagccgcaaatgaaaaggattgcaggagagatggtgcatttgtgttggaattgactggagattcagagggctttttatatccttggttaaaaggtggatatatactctggctggggaggtggggggccatctgagagcatctagaaaccctaatgcatccagattgaaaggaagaaaggaatctagatgctttttcccccatggaaaatagctgtgcacacacagctggcaggtggccttggtaagcaggttagggagaagctgccacctgtggcagagccttggccagccgggctctgggtgtggcaagcctggtcagcaggcactgagtagcacttcctctgccaccattgagaaccaggcaggaggccagaggcagtgagggacagatgggttgggtttacctgtctggcagtatatggtgtggctgtgacctgggtggttattgattaaactattgggttcaaaagaaaggaagaagcgagctgtagcacccaatatatgcacttttctgtatgtgtattagactttattaaaaagtttatttgaaaatcacaaaggaagggaaagaaaaccctgagttagatatgctcatatttctaaagtgcttacttagaacagtcctgagtatgttgtgatcacataagtgttggttaaataaataaatgtccaaatggcataaaacaaagtaataatttctagagcaaatctaacttataaaatgacctgtggaggaaagaaaacactgccatgtctttagacttttttttctacttgcatatgcactttcatttataaatctttatctatctatctatatctatctatctatctatctatctacctacctacctacctacctatcagagttacaagctactttagtgcagaggtggtcaggtcttccctgaaaggttgatgtgagagttaaatgtgatataataatagtggtggcaatttgggcactgggcccttattatgttgcagacacgatgttaactgctttgtacatattgtctccttcaatcaccaccataaacctttaaagcaggcattactatttccttttgcacctgagaaaactgaagctcagtgaacttgagaaattgcccaaattcacaacaaaagtaagcagggtgattaggtttgttggagcccagagccagagtgcctaaccactgcaccatactgcctctcacagaccatgcatataaagtccaggcaaagtgcttggcatataacgggcactgtaaatgcagtgtttacaagtacacttcattttaatctgataacacgatagttttaaaaagatcattgtttgaagatctttttcaaatttatttttacttaccgtaagaatatacaattagctaaaatagcagctcctttcaaatcgtaaaataatatagaattatttgaatcattgagagtgatgagcttctatgacacagtacactagaggtagggaagtgtgtgtgtgtgtgtgtgtgcgcgcgcgtgcgtgaactgctgcattttcaggcagaaacctttaacatccacattcctgctccctgtcccgtgcctcaaggctggcctgcgcacgggagtctcagttgggcgcgcctctgccaagccgagactgaagggggctagcctctctccctgtaacgctgggcgggccacgttaggaggctatgaatcagctgatttccttggctgctccaaccccacctcaaatggccacctcgcacccgcccgccaaaccccatggccaggactccagccaaggctgacagccaagcccgactgctgcaggaacactttgcctagagcttattcggtggtagtctggttttgcctaggctaggaggagcccaatcccagaccatgctatccagtagtcggccggacttttcttcccctaattcgcacccaagaggagcccgctagatcaatccccgccaatcctaggaagctggcatgcttcgtaggtgcagacagtaatagcggggaccggcgcggggcaggtgtgtccggctaagacgccaggacagggcaggggctccaggacccgagaggagagggacttcttccagcgctcaagcgcccgctgccctctattagtgggaaaggaatccagcctcagccccgcgcgggcgcggtcggcgtcggcgggcccagaagcccagccctgggcatccgctgagctacatttggctgggtcttcccagagtgggctgaggagccagtttctcggtcaacactaggtctccacggggccaggggagaagggaggtgggaggtgagaaagctcagccgcctctggtttcgagtaaaagtcgccgcggttttgcagggaccgactttttcttgaggcgcatttaaggccaagtgactgtctcctgccctccctctctcctgccccctctcctccctgagtcccgccctcccgcacacgctgacccagggacacaccctactgcagcgacgcaaacagggcgttgttcccgttaaaggggaacgccaggagcctcccactgcccccttgcttcgcgcgcgcgcagccccgcagcgcagctttggcggcgccagcagcggagccaacgcacccgagtttgtgtttgaggccaccctgaggatcgggacagctgttcctttgggctgtaagtgatttggtggggagagtgaaggagatggaggagaaatgtgggcatcttccagtgagggtgccagaaagcgcagcgcaggcgcggggctttggccagctccctggggcttctgtttaggggcacagggtcccctgtgtgtcctgtttccctccaatgggtcttggagtaatacaacgaggagagcctttatggtctataagaccttacagggcaagggtgatggtgctggtgtctggatagcggataagggcggcccagttctcgccttgctgaagaggcgttgactctgggacacactggcaaaacagtccctgtggcggacatcccgagagtgttggactcctgtggttccccagttcccagcctcctgccatcggcttaattcaaaccctctgggagtcatcagaaatccttgtttatttcttccagtgcattccagagtttctttgaatgtgatgcttgtggagaggaacagaggggcctgggattgggtactttccaaactgggttattgaaacgttgtctccctggcccaagactctgcctaaaatggtccccagagtctcagccagatctttcacagccatgcatgtcctctaacaggtcatcccagccttcagttcccccaaagtttaaaatgaggggcgaggaccgcattacttgggataaatgtcctgccggctctgaccggctgaaattctcggactcagccttttaccctctgtctctctctcccgtccgctggacatctactcccttcggtccaggctcctgggctcctgtcccaccgcacccagaccggagctcaggcttgttggggttcgtgtcctggctttgagtgcctggggtgcagactggacccctaggcgagcacgtgggtctagcgcaagagcagaatgccccctgaccccaggggctgcctggggaagcgcgcggtggacgggaagcgcagggtccgggcaaccctctcgagccattcttttctttccacactactctggctctgcaccacctctccggagccgccagagtctgcgcgaggctgagctggggccaggaccgttcctctacgctggcagagttgggtggaaacttggagacaaacggaatgcggagagcactggggtctgggaaaccagcctcctcgccgctgtctcccccaccgcatgccacggctgtctccaggtctcagacggaaatctgggcacctactcccctcacccctacctccaccccataggggaattcaccatctgaaccggggtctcggagaacgtgacctctcaccttccagggaggtcgccgggaggtgcttggggtgggtggaagcgtgcagtggcctctgctcatattttctggaaacccctccgttccctgggtggttttagacgtgcgaaccgcttgttttgtttccaaaagcaaaagatgttccgttgcaggcgggcccggctgggcgctgggcactgggcgctggtcctgcaggcggctgctgccccctctcggcggcaggcggcgcgaaggctcctgacccgcgcgggcggtcgggctgcgggcgctgggccaggccgggccttccgctagtgcgcgggaccctccctctgcgcgcgcctccgtcgctcggcccagtgcgttcggcctcacgcccagcgctctcctcgcaggcagaaactccgctgagcagaacttgccgccagaatgctcctcctgttgctgagtatcatcgtcctccacgtcgcggtgctggtgctgctgttcgtctccacgatcgtcagcgtgagtgcctggcggggaggctccctgcgcggcccgcccttccccatctgggttcccagcccgtgctcctgctggttcaggactgtgttatttgcagacagttggaagtctcagacgtcccagggaagtttctggcaatctgcccccttccagttgctttgagaaaacgagagcagattcagtgataggaaccaagcgagcgctgggctgggttagctgcgcaggtctctatttaagccaagtaacttcagagccgatctagggtccccgaccttcatttgacaagattgtttaacttttttttttcttgatgcagcctcgttgaagaagaggagtatttatgatttttttttctccaaaccatagtcagatgggtgaattaatttataaaacacccttttaggacttgaaattggaaagttaaaatgggcttttctggaaaagagttcacaggtcccatgtcggctttatggcatgaacacaacacattgttagtaaagcttccactggtaggaacaggccatcagagtaacttctgttacaaaactgtccagcccattagatcttaaagttattttcttggcgatgaagatgagcagacattcaggcagttttccagtggtggctttcacttcttaatttaaggcacattgtaagcatgattttctttttcgttttcttttcttttcttttctttttttttttttttttgagatggagtctccagcctgtcacccgggctggagtgcagtgccatgatcttggcttactgcaacctctgccttccgggttcaagccattctcctgcctcagcctgggattacaggtgcccgccaccacgcctggctaattttttttttttttgtatttttagtagagacggggtttcactatgttgg

SEQ ID NO: 7399 - DNA, 6000 bp, Homo sapiens; identical to SEQ ID NO: 3668

SEQ ID NO: 7400 - DNA, 6000 bp, Homo sapiens
ttttgacagttgtgtcttgcaaggatcggttcatttcatctaagttacttaatttgtgttattcatagtattcccttattattactttaatgtttgtgaggtcagtagagaagtccccccttttatttctgatattgatattttgtgtcttttctctttttttcttggtcaggctggctggaggtttctcagttttattgggaaaataaattttccccaaagaaccagctttgggtgtaatttttttttctctattgttttcctgttttcaatttgattgatttttgcttatctttaattttttgtcctgcctcctttgggtttaactcattcctctttctctaatttctttctttctttttttgagacggagtcttcctctgttgcccaggctggaatgcagtggtgcaatctcggctcactgcaacctccgtctcccgggttcaagcaattctcctgcctcagcctcccaagtagctaggattacaggcgccctccaccacgcctggttaatttttgtatatttagtagagatggggtttcaccatgttggccgggctggtcttgaactcctgacctcaagtaatctgcctgcttcagcctcccaaagtactgggattataggcatgagccactgcgcccagccactctttctgtaatttcttaagggcaaagcttatattcctgacctgggacttttcttccttactaatagaagccctgccttagccgcatcccacagggtttcatgtgttctattctcattttcattcagttcaaaatgtttctagatttcccaagacttcccatttggccctcgcgtgcattctttccacgatcgctttctgtgactgatttcgagtttaattctgtggtggtttgggagcatactgtgtatgctttctattcgtttaaatttaaggtttgtttggtggccccaagtgtgatctgttttggtgacaccagagactgcaggctgttcccaaggctgccatgtgctgtggtcaggtccagccactggatggcgctgctcaggtcagctgcgtcctcccgattttccacctgcgtttttttttttctttctttctttctttctttctttctttctttctttctttctttctttctttctttctttctttctttctttttctttctttctttctttccttccttctttttctttttctttctttctttttctctttctttttctttctttctttctcattagattttttttaatgggtctcaaaaatctgtgacaattttttttttttttttgagacggagtctcgctctgtcgcccaggctgaagtgcagtggcgccatcttgggtcactgcaagctccacctcccgggttcacgccattctcctgcttcagcctcccgagtagctgggactacaggcgcctgccaccacgcccagctaatttttttaattttttagtagagacggggtttcaccgtgttagccaggatgatctcgatctcctgacttcatgatacgcccgcctcagcctctcaaagtgctgggattacaggcatgactcaccgcgcccggcccgacaaatttttggtcaagttgtttccattcaaaagtactgattttaaaaactaataacttaaaactgccacaggcaaaaaagaaaaccaaagtggtccacaaaacattttcctttccttctaaaggttttatgatgcattgttatcattaaccagtcttttactactaaatttaaatggtcaattgaaacaaacagttctgagacgttcttcaccactgattaagagcggggtggcaggtattagggataatattcatttagccttctgagctttctgggcagacttggtgaccttgccagctccagcagccttcttgtccactgctttgattctctcagtcactgagaggaccatggagggccctaacaagaactgtggatttgtcttttccaccctttagttctgtcagcttttgcttcatacctcacctcacttctttttgttgttgttgtttgtttttgagatggattctcgctctgtcgcccaggctggagtgcagtggcatgacctcagctcactgcaacctccgcctcccaggttcatgcgattctcctgcctcagcctccagagtagctgggattacaggcgcctgccaccacgcccggctaatttttgtatgtttagtggagacggggtttcaccatatcggctaggctagtcttgaactcctgacctcaggtgatccacctgtcttggcctcccaaagtgctgggattacaggcgtgagccaccgcgcctggccactcacctcagttcttaatctgaagagtgggcatgcctcgcagggttgtcaccaggactcgatgacacagttgtcacagccagcgtctgtctagccatgccccccgccaggcactgcgctgagtgctttccttgcactttctcatttaatcctcctggcgtcccatggcacctctaccattcccacctcccaggctaggaagcggtgctcagcgaggggagatggctgcccgccgtggcacgggcgtccttgtctcatcagcactctgttctgcctcctgcaagtcccttgccagagcttggcagctggttcacttccgagtgaaggttggctggcttattgttactattgtcttcaaaatacaatgtgtatttacacagagacacagtagcacctagcaggttctgtcctgggccctggaaggtaaaggtaaagaaaaggaagatggctgggcttggtggctcacacttgtagtttcagtactttgggaggaggccgaggtgggagactcacttgagcccaggagttccagaccaaactgggcaatgtggtgagactccatgtctacaaaataaaaaaaaattagccaggtttgggccgggtgcggtggctcacgcctgtaatccctcggcactttgggaggccgaggcaggcggatcatgaggtcaggagatcgagaccatcctggctaacacggtgaaaccctgtctctactaaaaatacaaaaaaatagctgggcatggtggcgggcgcctgtagtcccagctacttaggaggctgaggcaggagaatggcgtgaacccgggaggtggagcttgcagtgagcagagatcgcgccactgtactccagcctgggtgatagagtgagactccatctcaaaaaaaaaggaaagaaaaaagaaaatggggtgaagctcacaaccagcagaggagtgagaagaggcagcccagcgtggaggcgagcagggccttgagaagcaccgtcttacccgtgggccccacacccacccctgctggagcacgtgagctgtcagtgccttttgagtttggtgcaggtcacacttgttaattgaagaatgaatgacatttcaccctcctgaaaggagttatggatctagggaactggagcagctgcctgccatttcgttttactgtgggatctagagaccacagtcgcattgtgacattctaacttccacccctcctgccatgaggtggtttttgctgcccagggcttgcctgacctcagattccagcatcggggtcttcccaggagggtccctccagagagtgaatggtgagagagggacctgtattagttgacattaagcagacagagtagaggggccgccagcctcggccctgagtgggccctgtacttttacatctgttcttgcttctgtgcagaaggtaacctcaggtggcctgtctcatcacccccattccactcaagggaaacctgggcttagattggtcatgggaggcttgccatggtccctcacggtgggtggtgaagctcccagctcagacagtggctgccaaaggccagagtcctctgagccaggtggcctcttatgtggaaaaacagggttagggggctggcttaatatgaaatggcttctcctcttctaccagagaataaactttttaaaaaatatttttattttattttattttttgagatgaagtttcactcttgttgcccaggctggagtgcagtggcgtgatctcggctcactgcaatctccacttcctgggttgaagcgattctcctgcttcagcctctccagtagctgggattacaggtgcctgccaccacgtctggctatttttgtatttttagtagagacggagtgtcaccatgttgtccaggctggtctcgaactcctgaccatcaggtgatctgcctgctttggcctcccagaatgctgggattacaggcgtgagccactgggcacggccagagaataaacttcttctttttttttttttttgagatggagtctcgctctgtcatccaggctggagtgcagtggcatgatctcggctcactgcaacctctgcctcccaggttcaagtgattcttctgcctcagcctccccagtagctgggactacagtcgtgcaccaccatgtccagctaatttttgtatttttagtagaaacggggtttcaccatattggccaggctgatctctgactcctggccttgtgatccgcctgcctaggcctcccaaagtgctgggattacgggggtgagccatcgcgcccggcccagagaataaacttagaggaaaaagactctggcacactcatccttatgtctttgtgccaggcacagggctctaacccaaagttgccctaaataaacgttacccgagtcagcttatggtgccagggcatgagggcagctctgggggcagtgggggctgcagcgctgcaggcagattctgcaggggtgatggatcccaggaggacctgtcccctctccagcagcccccacccattcccctgccctttgttgtgtgtggtgtgtggcctggaatcgatgtgactttgcctgtccaggcctgctgtttgtccatgtgtcacaatgtgacatgttgacccactgcagatcattccctgaccacagagcgctgctcccgagaaccctgcacccctcaatggagtaaattaccataaagcctcttccttacccatgctttggggtgttaacagctgaggctattcgtcggtgacctgtgggactcgagctattcctgcagctcagcagacctcctggccgtggtgggtagctcctttcctttagtcagattccgaggcctctgcaacctggagccttggagtgggggttccattagaattactgggtagcagaaagccgggacctctgttgtatgaaggaggttggggctgggagtggatgggagaccgccctttggtcacaggtgtgaaggggaggccatcaagggagactctgacacccggaggcagagcctggatgtgggacccaggactctcctactctgctcacgtctgacctggatttttggttcttttttgccaatccagtttcaggagggaggtccaccctcctgaggggggttttggaaatgacagctatgagaaagggactatcatgtctctgagtggggatcggggagctgggaggggcttccctctgctgcctagaattccactctgaaccattagtcattctttccagcgaagcaggtgcttctccgggcaacataaatcctcctcaaggtgactgaagtgaccggatggacaccaccaccctcctgagacaggctgacctgaggccattgggacctgggcacaggagggagaggggggagggggtggatacgttccagctttgaccagttcagccctaattgggagactcaggtggatgtcagctgctgctgggttcccccagtgttagttgcttaatctttcagtgctcagtttccgtccttcatcttggctcccacagaaggtgaaaaaagcatatttcttgctcactttcccagtttccttgggtttcaagacccagaagcactcacttttatccttgtcccatttttatggggctttctgtctggtagggctggccttgctcaggctggctctgctcctcactgcctggggtctggaggctttgctcttttatctggaaagtag

SEQ ID NO: 7401 - DNA, 6000 bp, Homo sapiens
ggccacttgtgctttcagcagtgttcctgagagcctgctgtgtgccaggctggtgccagaggggagggacagggctgctccagtcctgcccttggggaatgtgcagcctggttctattcccagagtcaaggacactctgcagccagttaagtgttgtagctctcttccagggcctgcaggagaggaggctctgagcacatagctgagccccagggcactcaagctgcacacttgagggaagcattgtgggagcctgtggtttttccaagaaaaaggtctcctttgggtcctgggggcagcgggagggcagaacctgaggccttggacaggtctgcatgacccacccagaaatgccatcagtttattttacaggagtccctgtcagagcttttggggcagacctcagaggagtctgtccagggcctccaagcccaggccctcaacattccaggacgcaaaatctctactctcagcactagggagtaagtaggatgcttccggaaattgagtggactccattgtctggtgccatttcctgtccaccccattcctccctagggttgcaggcttaactgtaggtgttgggtaagtcactgtctcactctgttctttactctcctgatcggtaaactggtgtagtgggtggtaaacccaatgcccacaggggccttattacattgatttcctcactctccctgttgccggctagactcaccccattcaatatgcaattggcctctcctcaaacagccagttaccccccagggaacaggtatcagtcttcctcagcctttgtgagctacacccctcactgtgcagcaatctttggggttcaagtagctctttggtagagggtgtgttcagtgactcatgataagcctgcaggtgcccacatgggtgtgagcctccaggggcaaagctggccatggaggctcagagagggctggaaagaactcgcccagctcaccacagagcccaagctggaatgagaccacgagcgtcatctaggaccagaatcacccatgtcaacagtcatctgaccccattatatacagatggagaagtgggggaggggagactcaggctctgagcagtctcttcccacagcctggcccctctgccataacctgggcaggtcccagcttggctcccacagcagtgaaggatatgcagggccaggcaggggggcaggggggcaggggggctctgggagtggggaggggtttcagtagcctaggcaatggctagagtggacaacccagttttcctgcccagtgcctgccctgccatccacggctgagctccgggcaccgagggcatggctggacaggacaagcgtcctggaagaggccctgcccgtgctggacgcctgcccgaaaaggctcgaaacccacagaagctgcctctcagtctctaagaggcttggagaggaagcggggagatgcgaattcctatctcccagttggcaacgccgaggtcgggcaggggccgggctgggtgacctggaaggaatcctccgctctgggcgcgccacgcagtcccgggtggggctgtcccgtgttagcccttccggtgcccgggacgcgcacctggcggcattcctggccaggtgtctggactgggggctgagcccagcctgtccccgccgcccctccctacctcccgggtagagcgggcgcggcgcatgtgacccagggctgggctcccgggagttacgcgctgacgccgcgtcaccccactccgggccgggcgcccattggctgcgccgggcccgcgggggcggggctggtctggctctgcgccccggctcccctgggtctccagccgctgccctggcccgcgcgcgtgcggagccgccccggctctccggctacctccagtccagacaaaaccaggggcagcagtgctgtgaggtcctgagcaagtcgcttcaccgtcccgctccacgtgcctcaatttactcatctgtaaaatgggatggtaacagcctcaaccgcctgaggctgtcgagaggagtgaatgggtttaaaccgcactgaacactctgtaagcgctcagcaagtaaactgtgccgaacctgcccgccggggtcaccgtggaccaggctggatccctgacccctgataggcacaccattacagaggggcttgtgtccacgttccttgggcgtgctcaacgctccccagccaaccggggcccgagggtcttgtttggaggtctcaggatctttgaggagagaaactgccaagacaagcatgttccccctgaaaaatggatcccctcttctgttttcccctaccctcacgttgagggttgccctggtaatcccaggctgtggggcaaagatttgtttctttggtggcaaagatgtaaattcttcccacccccacgttggactgtgccccatgggggttggattttctggggtgcaggtcttctgttgaccttgtcttaccttctttccctttcccctaactcctgcagttatggagtgaatatttattgagctattctatttacatatgtggtaacccatttaaaaacggtgaggcgggttgggtgcagtagctcacgtctgtaatccgagcactttgggaagccgaagtgggtagattactggaggctaggagttcgaaaccagtctgaccaacatgacaaaaccccatctctactaaaaatacaaaaattagccgggcgtggtagtgcatgactgtaatcccatctactcgggaggctgagggaaaagaaatgcttgaacccgggaggccgacgttgcagtgagccaagattgtgccactgcactccagcctgggcaacagagcgagactctgtcttaaaaacaacaacaacaacaacaacaacaacaacaaaaacagtgatagccaggtgcagtgactcacacttgcaatcccagcactttgggggggccgaggtaggtggatcacctaaggtcaggagttcaagaccagcctggccaaaatggtgaaacctcatctctactaaaaatacaaaaattagcctggcatggtggcgtgcgcctgtaatcccagctactcaggaggctgagacagaattgcttgaacctgggaggtggaggtcgcagtgagccgagatcatgccgctgcactccagcctgggtgacagagagagactttgtctcaaaacaaaaaacaaaacaaaacaaaacaaaaaacagtgaggcagatctgttgtgatgatgactccaaaacaccctccctgcctctgcagagggactgcagaaagggttattcccattttatagatacagtagctgagactcagaagtgaggtattggatccaggtcacacagcaagcaggtgaaaacccagatcacctgcctagctctgaagaaaatggtatttaggcttcacccagcacttcctatcccaccccctccctgggaagggctgtttaaattttcagggaagtcaccagcttcctgcagcctctagagtgttggtgggggtggggcactgaggagaagccagctttgttctctgtgttctccagcagttgttcatctggagggagtgggtcctgggtggacccttgagcagggctacttggggagatgtggtttggcgacccctatgacttctggcgccgctattctgggtaattttccaccgcagccacttctgggagaggaacaaagggagctggatgtccaggctgagccccagggacttgggctctgtggcttctctcccccacacaccccttctaaaatgcatcatgaatgttactcctgcttagggcgtggccagataggctatatctggagtttgagcaaggcagtctgcaggatggcttgacttatgaaggtctggggtcgggaaggcctgaggcccaggcccctgatgagtttcctggactgccctccaccaagggtgcttctctctgcttgcatacctctggggacagggagctcactgccttatcacattcagattcctgaatgttaattctggtttatttcaacccacctcattgggaccccttccctccttcctgccccacctggctctgtccctaggccacagaaccaggttcggtttccagccctcttctcaacagggctgcctgctctgatctagtcccagcttgtgatgatccagggcagcctggctctgatctaaagcacagctacctcttccttgcggcccctatcctggctgctcctgggaataagtgccaaatctggggtcagacagccctggggccagtcttccttgggtactggcttcctccttcaggagctgcactgggcccactggtatcctatccctacagctggatctgggaggaaaccagatgacgaaattccagcctctttctttggccactcctgtcctcaagaggccaatcttctggtttctttgcagagagggggcaggctgatctcacaggtcatgctcccctccacattgtcactagcctcccagcctgcccgtgagaaagcatcattaggcccatgttacaaatgaggaaaattgaggcagagtgatgtaactggcccagcagttacatcaggcctgctcacaacacagcaggcctgggacccctataacttggatcctggtctgtcttgttctaaagagtcaaatctaggaaatgaggaaatgaagtttgggatgggcccaggcctggggcttccactcggcttccttgcttggtgctggagaaacagaggcccagagagggggctcggcttgcccgcgttcccgcagcagccggccagaggccgctgccattgtgcgcgaggctggataaaatgaatgactggagggcgctctggaggaggggccggctgaggggagatttgtggcgcagaccggggatcaggggtcccccgctctctcaaggtggggcggggccgtctatctgggagggcgggtcctccccgaaaggccccgcctccgcctcgaccgcccagcagagctgcggccgggggaacccagtttccgaggaacttttcgccggcgccgggccgcctctgaggccagggcaggacacgaacgcgcggagcggcggcggcgactgagagccggggccgcggcggcgctccctaggaagggccgtacgaggcggcgggcccggcgggcctcccggaggaggcggctgcgccatggacgagccacccttcagcgaggcggctttggagcaggcgctgggcgagccgtgcgatctggacgcggcgctgctgaccgacatcgaaggtgcgtcagggcgggcagggcttgaagctgcgccgggtggcgcgagtagggggcgcgcaggtgtctccctggcctttgtctcccccacgggcgccagctccgtgctgtgctcgcgcgggacttcccggtgtctctgagctcggtgtcccgagcctcaccgagcctccctggttcccgcgctagcgtctcgggccgcgcgcttgtgggtgagggctcctgggccgggccggggtcccttggcggctccgggccgggacacgtgcgcctctacgcgtcccaggccgggtgccgcccgaccggtgactctccagccctgtgatggccacggctgaagctggggacccaggcgtcgccgaagctccgccccagccccagccgtgacgtaattgcgaggttactcacggtcattccctccggcccgagagttcagctcggcgtcggagctcttgcgcatgcgcatgggcgctgcctcgcgcccttcccccgcctcgtgtcgggttctcccggtctgcgacgggcacagcctccgcactcattcactgacatccaccgaatgccaggccccgtcttaggcaccgagggtttacagacagacctgggtaccccctcttttagggaacacaaaaatctcccgggaaaccaaacgggtatttagttgtaccttgggtggagcgaggctgggggagggcagggatgtggctactttgggtagagcggtcagggacttctaagctgagacctgagggtcacccccaggac

SEQ ID NO: 7402 - DNA, 6000 bp, Homo sapiens
tgtcaatataatgttatgggagaatatcttagcacataaggcttttttctgtacttgagactatttcctttagatagagacctacatgtagaattagaggcttcaagggtcttgattaaaggctaccaaattttttcctgaaagggtgtatttacactccttcagcagtatttgtttcactgtagccttaccagctttgagcattctcattttaaacaaaatcattgctaatgtgttggctgcaaagaacaagatcaaaggcacagtgtttttctcactattcagaagctggagaagagctcatttgtgtgtctcacatgcatgttctgtgttacaacctctcagtgcttggtttttatctgtttactgagggagggatcttcaggttattatcacatatagttaaaatagtaaccctttgtcatattttattttattttattttatttttttgagatggagtttcgctcttgttgcccaagctggagtgcaatggcatgatctcggctcaccgtaacctccacctcccgggttcaagcaattctcctgccttagcctcccgagtagctgggattacaggcatgtaccaccacgcccggctaattttgtatttttagtagagatggggtttctccatgttgaggctggtcttgaactcctgacctcaggtgatccacccgcctcggcctcccaaagtactgggattacaggcatgagtcactgcgcccggccatattttaaaagaaagatttttctttcttttaatgacaaacaaatgactttgtttgtcatttgcctttgaattaaggctttatgttctgatggaaataagtctacagatcttttcctttgcaatagcttctcctttcctgtagaaatttgacaggcaggactttttagctctctctgggtaagtcacctttccctctggacctcagtttccctgtcttttaaatggttggatgggtggagatgtgatttctcagcttccttctaggtggagattcttgggctctggactccacagtgcagctcaacattggcaaccctctccacatgctctgggactccagctgcggaatctcctctccttgagactgagagttcattcagcgatcgtcttttgagcatctaccacacgccaggcactattctagatgctggggatatggtagtgatgaaaaaacaaagtccctgccatcatgacctctagtaaagggagatggacaacaaagaaaccagaaagttataattcagatggtgataaacactatggaaaaaaatgaaacagggtaaaggattagggagtgccaggaagcaaggaaggagggaagttgcttatataggagggtcaggtgacattttagtggagacttgaaggaagtgagggagccggccaggcagatatccagaagagcattctaggtagtagttaccgcaagtgtaaaggccctaaagcaggaggccagcatggcttgagcacaaggattgagggggacaaagcaggggagagggacagagaagaggtaggtggccttagggctctcataaggacttggctctcactgagcgaaatggaaagcccaggatggttttgagcaggccagtgacctgattgcagctgttttcaaggagttagaaaagacctctaccctagtgggtactgcaggctctggctctgggatgagccacaccctgtcccattcctgatgagggaccttggcctctcctagccttagttctttatctaagaaataattccaaggatttagccaagtacccctccctcactgcagctgacctaactgggccaagcttttgtgtaagtggtagggaggagttggaaggggagggaggagagtggagccaatccagaggcttgaatgtttaatgtggaatttcctctctctaggggaccacaggtgggggcagcttgcagggggaggttattcagttcactagtatctagccagcacctacccatcctgagtctcggactcctggctcaggggaggtggggtagctaacaagctccaacaggcccaggcacagtcacagtggccagaattggagccatccatcctcccaagaatcaggcctgtcaggacctgcctccagaaacccactcagctgctctgttctcagggaaggtggcctttcctgattctgctccccctacctccagcccctgaattagcacccttggagttcaaaactattttccacggttggaattttgtatcaattagtaggattctttgactatttttcctctcccaccattctagaaactaacgggcctggtgagggctttgtctatttcctttcctgttgtggtcccggagtcccccagcacagtgcctggcacgtaaggggcactcagtaaatgagctgaatgaatgaaagataggggagtaaggaaggtaatgctgttcctttttacaggcaataaaacagaggcccagacagggtctgacctcctcagcagcagagcaggtgactgccttctggcctaattcctataatgggagccacccaggagcataggttcacacccaaggacctcccaggccctcccccatcttctctaagggaactgcagagccaggccctgcctgaccccagaaacaagactagtttcccaggaaaagatcctagggcaggagtggagcaagtgacagcttgttttttattttatttttattttatattttttgagacagggtcttgctctgtcacccaggctggagtgcagtggtgcgatctcagcccactgcaacctctgcctcctgggctcaattgatcctcccacctcagccacccgagtacctgggactacaggtatctgctactacgcctggctaatttttgtgtattttttgtagagacagggttttaccatgttgcccagattggtctcgaactcctgggttcaagcgatccatgcgcctcagcctccaaaagtgctgggattacaggtgtgagccaccactcccagacgtgacagcctgttaatagcaataatagcactttgaatataccagacactgcttttccacaactttttgagacatgttttgttagcaactccattttacagatgaaaaaacagaggctcagggtggtaagtggcatgccgaaggtagtggcagagcctaggtgctccaacccaggcagctgggctcagcccactccgatcctctccagctgcctctctgttacagcgcagaacatcagcagcatcaggagtcatgtgctcttccagctctgccttgagtacccgatgacctcgtttcctcagcggtagatagcgatggttaatattggctagcctgtagagttatcgggagaccaacgcacaaaaagggtttaataccgtgcccagcacatagtaagtggtcaatacatgttaattgttgatattcttgttatctgtggtgtgtctgggccgggagggagggctgcagggcggtgtctacgcacactttacaggtgaggtcatcccgcgggctgggggtgccgggcccctcgctggcccacgcccagccaggtgcacccgcggcgagagtccggtggcctcaggtcacaggcccctccccgccggacatttaaggagggacgccgggcgcaggcgcagacagcgcaagccccacgccacgcgtcgctggtcccaggcagcgagtcgctcgcgcgccccgccgcccgcctggcgacagctccgccgcgcacgcacatggaggggagcgcgagccccccggaaaagccccgcgcccgccctgcggctgccgtgctgtgccggggcccggtagagccgctggtcttcctggccaactttgccttggtcctgcagggcccgctcaccacgcagtatctgtggcaccgcttcagcgccgacctcggctacaatggcacccgccaaagggggggctgcagcaaccgcagcgcggaccccaccatgcaggtagcggggcggcgaggagcctggcaggtggagggccctggtctggagcgtgggggcagcggaggggcggggcctgcgtaatggtagtggcgggtaactggagggagggtgcattttggatggtgggcgggaccagagcaaaggggcctgaccgagaacctcagcgggtgggatgcgaaaagctgagctaaagtctggccttgcaggttaacaaaaggggggggaaaggaaagggaatggggccttggtccatgtccttccccctctccactggcagattttgaaagctgtgctaagattctctgaggtttagggctccaaaggaagtcctcatccctgtagctcccgggatggcgaggatttggggattgtggaacccagagtgaggaaccgcaccctggtcattgtgcccctacaggaagtggagacccttacctcccactggaccctctacatgaacgtgggcggcttcctggtggggctcttctcgtccaccctgctgggagcttggagcgacagtgtgggccgccgcccgctgctagtgctggcctcgctgggcctgctgctccaggccctagtgtccgtttttgtggtgcagctgcagctccacgtcggctacttcgtgctgggtcgcatcctttgtgccctcctcggcgacttcggtggccttctggctgctagctttgcgtccgtggcagatgtcagctccagtcgcagccgcaccttccggatggccctgctggaagccagcatcggggtggctgggatgctggcaagcctcctcgggggccactggctccgggcccagggttatgccaaccccttctggctggccttggccttgctgatagccatgactctctatgcagctttctgctttggtgagaccttaaaggagccaaagtccacccggctcttcacgttccgtcaccaccgatccattgtccagctctatgtggctcccgccccagagaagtccaggaaacatttagccctctactcactggccatcttcgtggtgatcactgtgcactttggggcccaggacatcttaaccctttatgaactaagcacacccctctgctgggactccaaactaatcggctatggttctgcagctcagcatctcccctacctcaccagcctgctggccctgaagctcctgcagtactgcctggccgatgcctgggtagctgagatcggcctggccttcaacatcctggggatggtggtctttgcctttgccactatcacgcctctcatgttcacaggtaaagtgtgtgggctcagggacagcttgtcccagaggcactgggtaagaactgggggccggccactcactgcccccagatgtggttcattcctgtgtctttggaaacatagttatgcccccagcctgcactggagaacagacaactaagaaatccctcaaaaatgccatctttgatacatggaaaatatagaccttcagtagctaaagtaattaacccactgttatcaaccattaatattgttagtaatatagagcaaaagacaaaagtgtggctcatacactaattgctttaccccttggcctcccaccgcctattcatatgttcttaaacaaagtccatgccattaatgcctggtactcacttctctgataagaatcacaggacctacctcaaatacccttagtcagcttctttgggttttttaaaaaccagtcttctcggaccacagatatgaaattcctgcttcagttcctcttctcctctttctccttctcctttccctcctcacttcctccccttctttttttgatgggagagggtcaacaggccagtaaatgaggaagttaactttttaaaatttttatttgattgatgtatttagagacagggtctcgctttgttacccaggctagagtgcagtggcacgatcatggctcactgcagcctcatcccccgggcccagatgatcctcccaccttggcctctctagtagctgggaccactggtgcacattaccacaccttgctaatttttgtattttttata

SEQ ID NO: 7403 - DNA, 6000 bp, Homo sapiens
gatgagcctcaggaacaagcggagggctccctgactgtgtacgtgatatctgaacactcctcacttcttccccaggtaaggtaacagagaggctgcgactttgccttatcccttcagctcgtggactcctgggtcacctccttcttgcatcattgctacccatttcttccatttgctacagaaaactctccaaaaaaaaatttttttttttttgagacggagtcttgctctgttgcctaggctggagtacagtggcgggatctcggctcactgcagcctccgcctcccgggttcaagtgattctcctgcctcaacctcctgaatacctgggattacaggcatgtgccatgtaatgtatttttagtagaaatggggtttcaccacgttggtcaggctggtctcgaactcctgaccttgtgatctacctgccttggccccccagagtgctgagattacaggcgtgagccaccgcacccgtcctccacatatttttaataaagaatgctggctgggtctggtggctcacactgtaatcccagcactttgggaggccgaggcgggcagtttgcttgaactcaggggttcaagaccagcctgggcaacatggcaaaaccccatctctacaaaaaataaaaaaaattagctggatgtggtagtccctgttacttttggaggctgaggcagggggagcgcttgagcctgggaggtggaggttgcagtgagctaatatcatgccattgcactccccatctctactaacaatacaagaatcggccgggtgcggtggcacatgcctgtaatcccagcactttgggaggccgaggcaggcggatcacttgaggtcaggagtttgagaccagcctggtcaacatggtgaaaccccatttctactaaaaatacaaaaattagccgggcgtggtggtgggtgcctgtagtcccagctactcgagaggctgaggcaggagaatcacttgaacccaggaggtggaggttgcaatgagccaagatagtgccactgcactccagcctgggcgacagagtgagactctgtctcaaaaagaaaatttataatcaaatatttaatttttataaaagcactaaagaaaatgttaatgaacgtccccatccccacccccagctcacaaactgcagtgcagtagcacggtgtgtacttccatggttatactccattcccttttggcccaaggcaaccagattttgtgtttgtaattttcttgcttttccttagagtttgatcacatatgctgtatctctgtaaacaatgtatttaattttacatttttgaatttatataaatggtggcttataacacatgttcctctgccacttttattttattcccttcatgtggcagagcctggtgagagaatcatccataattatgtagttgaatctatgtatcattgtataaacataaacataatttacccattctattgctaatggacatttggattatttctaggttttactgttagaaataatgctattatgaatacttgtttctttgccatgtgccatttttatatcagactctccagttgtctgtttattccgcttttcttgctcagcatgccatctctgagtttccatttcaccattttaccagcccctgaagagttagatgctgcctggacccatgtcaactgggaaaaagaagagaacggagacaaatgaaaatactcaatatatactcatagctcagaaatgctgagttaatagctcatgaatctcaagagaggtgcaaacctgttggtcattggcaaaggggcagattcggaacagtaggagccagggtgctttttggctttcttttctgagccatgggcattctgtctcttgctcacccccacaggacatgatgagctacattgggcccaagaggacagcagtggtgcgggggataatgcaccgggaggcctttaacatcattggccgccgcatagtccaggtggcccaggccatgtctttgactgaggatgtgcttgctgctgctctggctgaccaccttccagaggacaagtggagcgctgagaagaggcggcctctcaagtccagcttgggtagggcaccaggctctgccacatgaagggagaggaaatgaattacatggggcaggagggaaatctgcatgccaacttctttctcctttcttctctagtctcaatttttttcttatttattttatgttattattattattattattttttttagttatttattttgagacggagtctcactctgttgcctgggctgagtgcagtggcactatctcggctcactgcaagctccgcctcccgggttcacgccattctcctgcctcagcctcccaagtagctgggaccacaggtgcccgccaccactcctggctaatttttttgtatttttagtagagacggggtttcactgtgttagccaggatggtctcgatctcctgacctcgtgatctgcccgcctcggcttcccaaagtgctgggattacaagtgtgagccaccacacctggcctatttattttattttattttttgagacagagtcttgctctgttgcccagactggagtgcagtggcgtgatcttggctcaccacaacctctgcttcccacgttcaagtgattctcactcctcagtttcctgagtaggattacaggtgcatgccaccatgtctggctaattcttgtatttttatttttattttatttttttttgagacggagcctcctgtcgtccaggctggagtgcagtgacgtgatcttgtctcactgcaacctccgcatcccaggttcaagcgattcccctgccccagcctcctgaatagttgggattacaggcgcccaccaccatgcctagctaatttttgtatttttagtagagacggggtttcaccatgttgaccaggctggtcttgaaatcccaacctcaaatgatctgcctgcctcggcctcccaaagtgctgggattacagcgtgagccaccacacccggccgatatttgtattttcagtagagatggggtttctccatgatggccaggctggtcttgaagtgctggcctcaagtgatccgtctgcctcagtctcccaaagtgctgggattacagacatgagccacagcgcccggcagctttttcttactcagtgttcctcatcccagttttgtcctccttttggttccatgatggaaagcagccccattccagaggagaaacaagttcagctcagctgggagtacaggctgcccctcttctttgatccacaagagcctctgacttccctgactcctgtttctgtaggctatgagatcaccttcagtttactcaacccagaccccaagtcccatgatgtctactgggacattgagggggctgtccggcgctatgtgcaacctttcctgaatgccctcggtgccgctggcaacttctctgtggactctcaggtgagaccgggagcaagttgaggagtccttttcaatgtctatacatatttacaagtgcagtctgttcctccatctcttagagcttgctgatttgctaggaatttcctgtgtgtatatgtatgtgagtgtcataagggtgggtactgggggtgcgtgtgtgcccttgtctgtgtccatccatccattgagggcagattctggtgtctttacttccttggcatcctattgagagagtttgtcagtgcttgttaacaaaccaccttcctatagctccctctagacctgtactcaccaattgtgcttagatgttaatgccatgacccatctttttttttttttttttttttttgagacagagtcttgttctattaccaggctggagtgcagtggtgtgatcccagctcactgcaacctccgcctcccaggttcaagcgattctcctgactcagcctcctgagtagctgggattacaggtgcgtgccaccatgcccagctgatttttgtattttagtagagacgggttttcaccacattggccaggatggtcttgatctttgcccagctgatttttgtattttagtagagatggggtttcaccacgttggccaggatggtctcgatcttttgacctcgtgatccacctgccttggcctcccaaagtgctgggattacaggtgtgagtgatggagcccagcagagccattcttaaggaatttagtttttagaaaaatgcttcctgaaatttgttattgtagtaacaataaagatgtgaagggccaggtgcggcggctcacgcctgtaatcccagcactttgggaggctgaggcaggcggatcacgaggttaggagatcaagaccatcctggccaacatggtgaaaccccatctctacaaagataaaaattagctgggcatggtggcgcgtacctttagtcccagctactcgggaggctgaggcaggagaattgcttgaacccgggaggtggagtttgcagtgagccaagattgtgccactgcactccagcctggcaacagagtgagactccatctcaaaaaaaaaagatgtgaagaatgtagctttctgtatcacgctgtctccttgtagggaaaacacgtgggagaaatttttatcaggtcttcctagtgggagtaattgcttctgaataactggcttgatttgatcttgtagacactgaattatgctgttctttgtttctctctttgtgtagactgttaggaaacctggtaaaatacgtgatttttaaagcacgtatttagtttattcagtttacccttggctttgctattttcttctgcaattattttctctcagccctgattttgtctcttatatgttgccttgtcctgattgtgtcttttttaaggcacctcaaatcttttttgggagaaagtagaatataaatctaaacaaagtaaccactccctgtttgctctacagattctttactatgcaatgttgggggtgaatccccgctttgactcagcttcctccagctactatttggacatgcacagcctcccccatgtcatcaacccagtggagtcccggctgggtgagcacctaaggatgagggtctttcttttctgccaggctagggagggaccctgacggctcagctgggtaggggacaggagttggaggtggattatatacagtgatggttcccaggttgggttggtccgaggagactgtggagattgaggctcctttttttctttttttgagacaaggccttgctctgttgcccagtctaaagtgcagtggcacagtcatagctcactgcagcctccaactcctggactcaagtggtcttcccacctcagcctctcgagtagctagaactataggtatgtgccactacacttggctaattttcaaaattttttttagagacaggatctcattatgttgcccatgctggtcttgaactcccctcaagtgatcttcccaccccagccccctaaaatgctgggattataggcgtgagccactatgcctgagccctaggttcctttttcatgatgctctgttgatatctccatcttcacacctatcatatccaaaagcatttattaaacgtgattcctagcactttttacaaatgaatgactaggctgggtctatctccctaaaagccatctaggagagaggctgtcacacacataggaaagacaacagcaaaagtacttgagggcagaatttgaattgacagttctgctgattgaggttgaataaccttgaagctagtattagagtttttcatttttcgggtggaaactaggaagaggaggtgtgactaagaactgtaacacaggcaaaccaaagtgagtatatctaattgtggaatctcagataccagaggcaggctagtgtggcccaaggattgtgagggggtggcatgtgaggccttagaaaattcctccgttcatttattcattcagcaaacattgactgagggactaccttatgacagtgctgagtagagaaaagaagggcatttcaggcaaagggaactgtgagct

SEQ ID NO: 7404 - DNA, 6000 bp, Homo sapiens; identical to SEQ ID NO: 766

SEQ ID NO: 7405 - DNA, 6000 bp, Homo sapiens
ttattttctttgtaagtcaagagctttcaccttttcacttaaagctggccaggtgcagtggctcacacctgtaatcccagcacttttgggaggctgaggcaggtggatcacttgaggtcaggagctcgagaccagcctggccaacatgatgaaactgtctctactaaaaatacaaaaattagctgagtgtggtggtgcatgcctgaagtcccagctacttgggaggctgagacaggagaatcacttgaacctgggaggtggaggttgcagtgagccgagattgcaccagtgcactctagcctggtgacagagcaagactctgtctcaaaaaaagaaagcactttatggcttctctttggcatatctgaattgccaacatcactactcttgctctgtggagtcataatgaagtcaaatatgggttacttgaatacaagcactgtgatacaactatagtgaactgataaccaagacagctacggacagctactgaaagactaatgggacgttagtgcatacagtgtggatatactgcacaaagggataatctgcatcctgggcagcactgaatgggacatagcaagattttatcatgctactcggaatggtacactatttaaaaacttatgaattatttctggaattttccatttaatatttttggactgtagttgaccacaggtaactgaaaccattgtggataagggtggactactgcatttaatttaaagaaatcctagttccagcccactacattgggtttaggactcataatgggttgaaattttgatctgaaatatattgttgtgtcatatccatcgctccatcctcttccatagtatatcatttcattatttctttcctcaaacttggccatggcctctttttttaaaacaagagacagggtctcactctgttccccaggcttgagtgcaatagtgccgtcatagcttactgcagcctcaaattcctgggctcacgcgatcctcccacttgagcctcccaagtaggtaggactacaggtgtgcactgccacgcccagccaatttttaaatttttttgtagagatggggtctcatcacgttgctgaggctggtctcaaactcctggcctcaagtgatcctccttaattggcctcccaaagttctgggattacaggcatgagccaccgtgcccagccaccatggcctctcttgatcccaaaccgtcatgggctgttccctcttcctgcagtgctcgttctatctttaacctgcagtacttgcctcactgactcctcttcatccttggcctcaactcctttcttcagggagggtcttgctcacccctcactgtaaactcccacagctccttgctttttttttttttttttttttttttgagaccatctccctctgttacccagctagagtgcagtggtgtgatcacagctcactgcagcctcgacctcctgcctttcccctgctgaatgactgtcttccccattagagagagctcgcgagggcgggtgctctgatgccttactctctgttgaatttcaaaactgtttgtagaattgagttgaaaggaatgcctttcccccctttctggatgtcactgggatgtcctgtgtaacctcttcttccttccatctttccatccttgcccttcctagttcttggcacagctgaagatcatggactacagcctgctggtgggcatccacgacgtggaccgggcagagcaggaggagatggaggtggaggagcgggcagaggacgaggagtgtgagaatgatggggtgggtggcaacctactctgctcctatggcacacctccggacagccctggcaacctcctcagctttcctcggttctttggtcctggggaattcgacccctctgttgacgtctatgccatgaaaagccatgaaagtaagtcagagcctgcgcctgctctgcacagccctgccctcatcctaccccctcagctcattgtttagatccttctaggggcatctggacctccacctcattcattgctgcctttgacctctttctgcctccagattcccatccagggtcaccacctgaacctggggctcctcctctgccaggctttcctatacttccctgcttgtcctggctgactgaagagtggttctgctctggttcatgagatgaaccaaactttattcatactgtcctgtcagccccacagagtgactgtgaagatccaataagataagagctatgacagctggaaaggactccactggtccttttctcagccccaacatgataaggatggagctgagccttgtgtctgggggttgtagcagtgcccagctgctgtctgcccttctcctgccccctcttccttcttccctgctctccttgtccctccaggttcccccaagaaggaggtgtatttcatggccatcattgatatcctcacgccatacgatacaaagaagaaagctgcacatgctgccaaaacggtgaaacacggggtgagtcctctccatcttcatccagggcccagctgggtcggtgcatctgtgcttaccctcagaccccagggagggcagtctcaggcctcctgctccaaggaacacactcctgtctccttcttcccaggagagcagactggaagagcagcctgcctgccttgccatgttccctgccttcacccacctgctccctgccaggctgggcccaatttgtttatcccccagttctccagccctcggggccaagcctgccagtgtctttccccagggcctgctgggcctgttgtgcatcttgttgaagggcgagtaatagctttgtttccatgcccatactgctccccacaggcctgtttccctgtgggcctgaagccctgttctccatgtagtggcccccacagagatccagagccgcgttgccacctccccactgcctttcttctacttcggtgcaggcctggggttataaatcacaggagtggggccaggacagttcaggacttgtatgccacttcctgaggtggtctgctcagtcttggtggggttgggggtggtattcagctctgatactgagtaagaggcttctgaataccctggctccccccatgtgcagcctcctgattggggcacaggaactcaacctgaatcagcctcttgtgtattacaggcaggggccgagatctcgactgtgaaccctgagcagtactccaaacgcttcaacgagtttatgtccaacatcctgacgtagttctcttctaccttcagccagagccagagagctggatatggggtcggggatcgggagttagggagaagggtgtatttgggctagatgggagggtgggagcagagtcgggtttgggagggctttagcaatgagactgcagcctgtgacaccgaaagagactttagctgaagaggagggggatgtgctgtgtgtgcacctgctcacaggatgtaaccccaccttctgcttacccttgattttttctccccatttgacacccaggttaaaaaggggttccctttttggtaccttgtaaccttttaagataccttggggctagagatgacttcgtgggtttatttgggttttgtttctgaaatttcattgctccaggtttgctatttataatcatatttcatcagcctacccaccctccccatctttgctgagctctcagttcccttcaattaaagagatacccggtagacccagcacaagggtccttccagaaccaagtgctatggatgccagattggagaggtcagacacctcgccctgctgcatttgctcttgtctggattaactttgtaatttatggagtattgtgcacaacttcctccacctttcccttggattcaagtgaaaactgttgcattattcctccatcctgtctggaatacaccaggtcaacaccagagatctcagatcagaatcagagatctcagaggggaataagttcatcctcatgggatggtgaggggcaggaaagcggctgggctcttggacacctggttctcagagaaccctgtgatgatcacccaagccccaggctgtcttagcccctggagttcagaagtcctctctgtaaagcctgcctcccactaggtcaagaggaactagagtacctttggatttatcaggaccctcatgtttaaatggttatttccctttgggaaaacttcagaaactgatgtatcaaatgaggccctgtgccctcgatctatttccttcttccttctgacctcctcccaggcactcttacttctagccgaactcttagctctgggcagatctccaagcgcctggagtgctttttagcagagacacctcgttaagctccgggatgaccttgtaggagatctgtctccctgtgcctggagagttacagccagcaaggtgcccccatcttagagtgtggtgtccaaacgtgaggtggcttcctagttacatgaggatgtgatccaggaaatccagtttggaggcttgatgtgggttttgacctggcctcagccttggggctgtttttccttgttgccccgctctagacttttagcagatctgcagcccacaggcttttttggaaggagtggcttcctgcaggtgttccacctgccttcggagcctgccacccaggccctcagaactgagccacaggctgctctggccaggagagaaacagctctgttgttctgcattgggggaggtacattcctgcatcttctcaccccctcaaccaggaactggggatttgggatgagatatggtcagacttgtagataaccccaaagatgtgaagatcgcttgtgaaaccattttgaatgaatagattggtttcctgtggctccctccaaacctggccaagcccagcttccgaagcaggaaccagcactgtctctgtgcctgactcacagcatataggtcaggaaagaatggagacggcattcttggacttcactggggctgctggattggatgggaaaccttctggaagaggcagatgggggtcaaaccactgccttggccccaggaaggggccataggtaggtctgaacaactgccgcaagaccactacatgacttagggaacttgaaaccaactggctcatggagaaaacaaatttgacttgggaaagggattatgtaggaataatgtttggacttgatttccccacgtcataatgaagaatggaagtttggatctgctcctcgtcaggcgcagcatctctgaagcttggaaagctgtcttccagcagcctccgtggcctcgggttcctaccggcttctctgcatttggtctgctgatcatgttgccataatgtgtatggaaagtgtaacacattcttactggttaaagacgactaccaggtatctaacttgtttaacattgagtttgtgtgtgtgtgtgtatgtttgtgtgttttgtatattgtttacattttgagaggtagcattctgtttcaaatgctttttgtttttctgacagtattgttgactgggtcataacattttgagctgtggtttggtggattttcaatttttttttttaaaggtcattcgctgtgctatcttcaaaaccttgagtttggcccccaatttttggcattcaaatgtttaaaagctatttatcttggtttatacaagtttcctttctcttctttttgtcatggtattctatttggtctgcagtttgaatgtagagaaagtggactgatcccccaagcgttgtctgcccccactctttcctccttgggtcccgccattcttttactgggcagtcgagggcattggaggggaagtgactgccctcagcctcactccctggggccatgaagaaaagctaaacagtctcatggcatctcagaataatgttgggtctcccaagaagaaaggtgtaagaataacgacatggctgattaggcgaggccaggatagggctaaggccaggattcctggctggcatccagtcaccccttctcccatccttccccctcttcttccacaagtcc

SEQ ID NO: 7406 - DNA, 6000 bp, Homo sapiens
ggaaagagctaccagcaaaaaagtggttaacacaacagagttgctgcaggctctggtttgaggcaggttatgaaaccacatcagggcccagcactaagcagccacctgccagctatggcagcagaagttttcggctcaactcctgtagacctagtcgacctctgccagcctcttctctctgtttctccccatctagggtaggggccagttggttgttttactaatggaagtgatatgtatccatagtcacacgaaagtctcaagagtgtttcctcattgccagtctttttgttagtttattgatctcttctttttcaggggtctctggtggtttcctgctctcagggcacctagtgtttaggcttcaggaagaagcttctgagggtgttggctaggacctaggtctaggcttttcctaggctcatcaagttttgttggctgccctgtgaaagccagaaaggcgtatggggtcctgtgatctgggattccccaaggcttttggcactcctggacaaatactaggaagggttagtggactttctataccagcacccctgtaggtgcgggttacagagaggtgatggggtggcagtttcaggtcagacttgggaagctctttccctctccttagtcagagttaagtccttcagagccctcacttgtcagccacatgccgccctcccctctcaggtggaggcttttgcgtagcagctgtcccaggggctgctagagtaactgaagccccaaggccctgggaagataaacaatctgagccagctctggctttctagatacttgaatttctgttaggctcaattatccagcctagtgggctgcgctgatgggtcccaggagcatctcttcaatcagaatgcgccccaggctggcgcacgggtgtttgcttgttgggatggcgtgttgtgggtcacattttctctgaggtctctaagcttggagctgtctgagaagaggaaacttgctcctgttatcctggaagtaaataactggcccctgaggactcagtctcctgtgcaggtttggctaggatcctagtcagagatagatagcatctgggtctgacggggttgctgcaggggcgtgagggaggtggccttctgggtacttctagaatatctccatctgggactcttttctgcattcccaggaaagatggggctgttaccatggtgatgaccttacggtctttagcaagcaggaccctatctcagatagggaggtgagccagtacacaggtgccatctgtctccactttctcctggtcacagggccctcagggatctggggacagccaaactctggataaggggcagatcattccaccccttccttctctacttccctctgctcactgtgggttgcggccacctcctggttcctcctgctgcaggactcctaccgttggtgctgggcaggggaaggcatggtgctaatatacacctggaaacaggtgctgagaggggagactgaggtgaggatgggcaggacagagaagaacgggggcaggagggaggccacaggttcgagtctgtgcccttaggagacatatgttgaggtggattccagctctctatgggagttacaggtgttggccacgttctctatcctcgcctctcttgtggggaaaagggccctggtggtttggcagtggagtgggtagcatcacaagggttggcctgagtggctgccaaatggagaaaacatccggatgggttgttttgtgtcacccaggaggggtgccttctaggtctgggcaaaggttgtccctagtctgttgttttctcctttcttcctcccttcctccctccccacttccctctttctacctgatcagtcctcctaagttggggtttggggagatccagaattgaaaaaatcagaggaggtgagtggatgcagtgacctcaaaatagttcatccactgctgcctgtacccacaggcctcacttcctttccctcctgatgggaagagcttaagagcagatgtcccacattaggccttcagtgagacacagtccagcaggggttgtgctgagtgagaattctctccctggggctttgtcggcagagggtcctcatgggagtgccatagggggtgaggctgggggatgggccttgacttctctgccctggggctgcgtgcctcttgatgacctgtcctccgatgccctgccagggccctgtcccaatgggatgatgcatggggcagcctgttgtttatcccagcccagcagcaggaaatgagtagagctaagtccacatggactttctccactttccatgcttcagaatcaaaagagtggaactgcctggagttctcagggaaacaagggcctgcctcccagcgggatccgagggtgagagggggcagggaaagcagtgtgacctgtctgacctgtgctgcttgtttgcagaacagcagagaggggcagcaggatgaatgtgggcacagcgcacagcgaggtgaaccccaacacgcgggtgatgaacagccgtggcatctggctctcctacgtgctggccatcggtctcctccacatcgtgctgctgagcatcccgtttgtgagtgtccctgtcgtctggaccctcaccaacctcattcacaacatggtgagagcctgtctgctgcctgcccctgcccctgcccctgccctgtgggctgccctttggcagggctgagggataggaggagcctgtcgggcctggcccaggtgtcagggtgatgtactgacgacatctgcctccagagcccaggcctagcccttacctctctgccttgctcccccttctgggttcctgccctgtgtaccatgacaggaatcaaatctgcagatttttccacatctctagggtggggtggctgttggcctggaagatgtgctcctgagagctgaacaaagggctccagagagttcccaggacccgagagtcctggtgcctaggctgatacagaaatgcccctttctcaagttagcttctcgaaccgtcttccacttttgcccttctctgctccctcaccacttgctaccttgcactctttgtcgggtaagcagggcttagtcccatcgcttgcctcctcccaacaggcacagggggctatgagtggcctggaggggggcagcatctcggtgcctatcttgtggccaacttccaccgtgcattctcatgccaggcctagcccgtcccccagggagtccccttgttcttctcctgccatactcccagctgctccatcctgacctccagcccatatccccctgcccagcagagggaggctccagatcactgggagttacttgtgtctgtgactgggtggaggagctgggcaggggggcctttcccttttgtatcctctaacaaagacttcttcctccagggcatgtatatcttcctgcacacggtgaaggggacaccctttgagaccccggaccagggcaaggcgaggctgctaacccactgggagcagatggattatggggtccagttcacggcctctcggaagttcttgaccatcacacccatcgtgctgtgagtgcctgggctacaggaagacaccagcaggcagggcaaggcctggaggaccccagggcccagccatgcttattaaccctgccgtggctcctggtgtagggatgaacagaggaagttggaatattcctgggtcttacactggactcaggctttgggcctccctggccccatctttcctccattggagcttccttcctgctagtgagataggcctacaggcttggggtgaagctgggaggtgggggcggtactgggccaggaggggcccctttagcctgagagctcttgcttcttacgctggtctgggaacctcttctgtaactccttagctgttgggattctgcctttcccctcccaggaagtgagggaggaaggggtcctcccaacagtcttttatatctctccccacccttcccctcccaggtacttcctcaccagcttctacactaagtacgaccagatccattttgtgctcaacaccgtgtccctgatgagcgtgcttatccccaagctgccccagctccacggagtccggatttttggaatcaataagtactgagagtgcagccccttcccctgcccagggtggcaggggaggggtagggtaaaaggcatgtgctgcaacactgaagacagaaagaagaagcctctggacactgccagagatgggggttgagcctctggcctaatttcccccctcgcttcccccagtagccaacttggagtagcttgtagtggggttggggtaggccccctgggctctgaccttttctgaattttttgatcttttccttttgctttttgaatagagactccatggagttggtcatggaatgggctgggctcctgggctgaacatggaccacgcagttgcgacaggaggccaggggaaaaacccctgctcacttgtttgccctcaggcagccaaagcactttaacccctgcatagggagcagagggcggtacggcttctggattgtttcactgtgattcctaggttttttcgatgccacgcagtgtgtgcttttgtgtatggaagcaagtgtgggatgggtctttgcctttctgggtagggagctgtctaatccaagtcccaggcttttggcagcttctctgcaacccaccgtgggtcctggttgggagtggggagggtcaggttggggaaagatggggtagagtgtagatggcttggttccagaggtgagggggccagggctgctgccatcctggcctggtggaggttggggagctgtaggagagctagtgagtcgagacttagaagaatggggccacatagcagcagaggactggtgtaagggagggaggggtagggacagaagctagacccaatctcctttgggatgtgggcagggagggaagcaggcttggagggttaatttacccacagaatgtgatagtaataggggagggaggctgctgtgggtttaactcctgggttggctgttgggtagacaggtggggaaaaggcccgtgagtcattgtaagcacaggtccaacttggccctgactcctgcgggggtatggggaagctgtgacagaaacgatgggtgctgtggtcctctgcaggccctcaccccttaacttcctcatacagactggcactgggcagggcctctcatgtggcagccacatgtggcgttgtgaggccaccccatgtggggtctgtggtgagagtcctgtaggatccctgctcaagcagcacagaggaaggggcaagacgtggcctgtaggcactgtctcagcctgcagagaagaaagtgaggccgggagcctgagcctgggctggagccttctcccctccccagttggactaggggcagtgttaattttgaaaaggtgtgggtccctgtgtcctcttccaggggtccaagggaacgggagaggtcactgggcctgttttctccctcctgaccctgcatctcccaccccgtgtatcatagggaactttcaccttaaaatctttctaagcaaagtgtgaataggatttttactccctttgtacagtattctgagaaacgcaaataaaagggcaacatgtttctgtttccctgtgtctggccttcgcttcctggaaggctgaggggagggggcaggggtgtgggcagcggctcccgctgaggtgctggtggggcatcagtgcagctctgacggtggcaggaggggcgctgggactgctgggctttctgctggcttcagcagggaaatcccccaagggggctgtgagggaactggcggcggcagcggtagtcagagagcaaaattctctgtgcttttgcctggctgttctccgacaggtcttgcgccttggccccagaggctggggtgacctgtgccatggccaaggagggggacactccagcaatggtttacacgtggagccagggtcccaagtggtgctcagtccttcccagtgaatccccagcccttctc

SEQ ID NO: 7407 - DNA, 6000 bp, Homo sapiens
atcaacatggagaaaccccgtctctactaaaaatacaaaattagccaggtgtggtggcacatgcctgtaatctcagctatttgggaggcccaggcaggagaattgcttgaacctaggaggcggatgttgcggtgagccgagatcgtgtcattgcactccagcctggggagcaagagcaaaactccatctcaaaaaaaacaaaaaaactaaaaaacaaaaacctcctctcactaggattgcttccttatgttgtagtttgagacctttcatgaggcactaggaagatggcattggctataagaagtctgcagctctctccccagtcccattcacttccaagttcagctggcaaagacctttatctaggaagccacaggccaggaaaaccagccagctcagcctttaggggtggggtggagcaggcagcaggggtaggggagaagcgggggatgctgggggtagggcagagagacaaagtggatttgttttccagcagctggggctgtttcctgactattccctgcctgtcacccttaatccctccctagcctattcacattgtctgagtttagtgaaaggaggggctctctccaccctttggtggggcgtgggtgggtttttaagtctgggaggttatgaaggaaagatcagagctgaattttttttaatatatatatatactggggctgcaggtaaattctgggtggagatggatgaagagggtttagatcctacaatgatgtataagtcttaaatgatatgcactccagtagcaggcagggtaagggtgattgtaggagccccaaagtgaatgactggaaatcagagggaatgcaaagagaagttgagactctcctacactcagaacaaggaaaacacccttcaatgcctcagtgaatgataagaggcagagggataaacaaaatgccctaggattgcccatgatctgcactaagccgtctatggcaggtagagactacaagtcccagcatgccctgtgcccaggtcaccttgcctgctgggaggtgtagttgggtaacagagagctggaggtggcttggtgcccagcagagctgatgcccagatgagagaagaggtggagccagcattccctctttgtccctgctaatgctattgacaagaagggaaggaagttgggagagggtgttcctagttttcagtgtaaaccaggaaactctggggggatgttgatgggagggaagaggaaagaggttgggggctggggaaggaatttctgtagcaggtggtgcagagataccgagcagcctatgtataggggtgtgtgtgtgtggtgtcagtgagaggactcagtttatgttgccttaatttcttaggggacaggatttttcttataattctgggaaatggtcttcagaaaaccctttagaaaagcgactatctctcgttccttcatttgaagtcactaaagggagtctgggccaaagagatcctattgatgatcttggtctgccctttccctttctgtgctcagcctcccctgctctctgatgagggtggaggtgggggagggagtgatccagagattctgaaatgttggccagagtcaagatcttggaaaatcttcccggaatggaaagcagttctggtgctaagtcctccaaggagaagacagaaaagcaaagaactggttctgagctccagggtcatggggaatctgagaccacccatcctactcctagacccctgagctcaggctttgtgctgggggcagggggtagggaaagcaagaattgaaaagtaatctctcttctatcccaaagtagggaagtcacaaccagaagaaatgtccagactggggagaaaacatgtccgtggctcccagccagcttcttcctctttccaatatcaatttctaaatgtgggggagggggagaatgaccactggtggagccaaacagtatgaaggagtcaaagaaggtggaggtgggggagggtggaccacagttctccatctctaaggctggttctgaaatagcttgaggccaggagcagtggcttatgcctgtaatcccagcactttgggaggccaaggcgggtggatcatttgaggtcaggggttcgagaccaatctgaccaacatggtgaaaccccgagtctactaaaaatacaaaaaaattagccaggtgtggtggcgcatgcctgcagtcccagctactcaggaggctgaggcaggagaattgcttgaacctgggaggcagaggttgcagtcagcagagatcgtgtcactgcactgcagcctgggcgacaaagcgagactccatctcaaaaaaaaaaaaaaaaagaaatagcttgagtctaggaaatgcacttcctttactttacctgcttgggtgggtaggtgcagctgtgggctcaaacccctacccgctttcaacttagacactcccaccacttgcttttcggcctggctcgggcagtgtgcgatttgcggcaccagagggcgctccgcccatttccaaagtggagctgtgtctcccgagggccgtagtggtttaatatcatctacgggtggaaagggatcaggacagggttggacgaccacagagattttagcccaagtgcaattattacgcaaccccatctccgacccgaagtttggtcccctgctcccgcggtctgtttagtcaccattcgttcaacacacatgttttttagagaatggcggcgcgaggccgggcgcagtggctcacgcctgtaatcccagaactttgggaggccgaggcgggcggatcacctgaggtcgggagttcgagaccagcctgaccaatatggagaaacaccgtctctattaaagatacaaaatttagccggcgtggtggcgggcgcctgtaatcccagctattcgggaggctgaggcaggagaattgcttgaacccgggtggcggaggttgcggtgagccaagatcgcgcccactgcactccagcctcggcaacagatcgagactccgtttaaaaaaaaaaaaaaaaaaaaaaacaaggagagagagagagaaagaatggcgacgcggggttggggggccggagatgggtgatatgttgcccaggctggtctcgaactcctggactcaagccatcctcctgcctcggtctcccacagcgctaatattacaggcgtgagcctacacacatttattgagcgcccgccagtttcctggggaccacgagcgtcccatgctcccctctctccaggatcgtcaccaccctgactcaggctcgcccacatccgcctcctccgacgcctctcatgtcccttctcctcttcccttaggatgaagtgaagctgccggccaaactgagcatcagcaaatcgctgaaagagtcggaggcgctgccagagaaggagggcgaggagctgggcgagggcgagcggcccgaggaggacgcagcggcgctggagctttcgtcggacgaggcggtggaggttgaggaggttattgaggagtcccgcgcagagcgtatcaagcgcagcggcctgcggcgcgtggacgacttcaagaaggccttctccaaggagaagatggagaagaccaaggtgcgtacccgcgagaacctggagaagacgcgcctcaagaccaaggaaaacctggagaagacgcggcacaccctggagaagcgcatgaacaagctgggcacgcgcctggtgcccgccgagcggcgcgagaaactgaagacgtcgcgggacaagttgcgcaaatccttcacgcccgaccacgtggtgtacgcgcgctccaagaccgcggtctacaaggtgccacccttcaccttccacgtcaagaagatccgcgagggccaggtggaagtgctcaaggccaccgagatggtggaggtgggcgccgacgacgacgagggcggcgcggagcgcggggaggccggcgacctgcggcgcgggagcagccccgacgtgcacgcgctgctggagatcaccgaggagtcggacgccgtgctggtggacaagagcgacagcgactgagccgcccccgctgccacccaccccattcctcgctccttccgaacttcctctttcgcattctctctcggctcgagctggctgagatttttctaaattgaaaacacgcccccctccccacacctccaggaactccactcccagtcttagagctgttaggacccgatggggaggcagcccccgcagtggacaacccccgcttggacacagtccgagtggaatgggaagggaatggtcaatccctgtcctggttgtccaagtcgggatctcagaggaaattgcagtgattccacggttaggcccccctgggggggctgccttcccctcagcctctccccacaccacccacccagctgctgtcattccgctcactgagctcttcttcattctcaccctgatccctgggggactcaaagccaaaactgcccaaagaggaaagattgaatcctaaaggggatccctgcccccatgggaggccccctactagaaggacgtgaaagcagcttttgggggaaactgaggcagtggggaagacagagcagaatgagccctcaccctggctgggggtccagcacaggctgtatctgcagagggtcccagaggaacgctggagccaagagaagccctgggaaggaggggtggggaacgacatgcatgtgagggatggcacactgatgtgtttatgcacctgtacacaggagcgcatggccatggctttggaaaggagaatggaaaaatagaagaaggtcggccgggcttggtggcttatgcctgtaaccccagcactttgggaggccgaggtgggcggatcacctgaagtcaggagttcgggaccagcctggcaaacaccccatctctactaagcgaaaacccatctctactaaaattacaaaaattagctgggcatggttgcgcatgcctgtaatcccagctactttggaggctgaggtggggagaattgcttgaacctgggaggtggaggttgcagtgagccaaggtcgcgacactgcactccagcctgggtgacagagtgagactccatctcaacagaaggaaaaaaaaggaaaataggagaaggtggaaatgggtgaagagagaagtcccctcactagctgcatgagaaatctatcttactgtggttctccatgggcagcaggaccatttttcagaatcaagagggaggacagtgtgagaaggcgatgatccaaagaagacagagaggtcagccccacccgatccctcaaatgggctcttggaggcacccccaggggcagcccatttctcaaagtccagaaaattagggtcccagaagggggcagcagcaggctgggagttaggagggagagcagggtgccggccctgccaccaagttgagagctggaggggaggtggggagagaacatcacagagcagccagccctggttcactcctggcagtttcttctcaagctccttccctaggagcatggtggcacgtgcctgtggtctcagctacttgggaggctgaggcgggaggatcgccagagcccaggagtttgaggctgcagtgagctatgagggtgcctctgtgctccatcctaggcaacagagtgatacgctgtttaaaaaggaaaaaatccttccctagagctagtatcctaaagctgcagagctagcccagacctcattggtttccttgtccttggggtgcttttcctgaatctttgcgggtgaagggagtgttgctcccagtccagaggcctgattctgtttggactgggttctcaagacacgaccaggttctcaagacacgagtccccttgttcctccccattaaagggggtttgtcagaagcaagaacagcccctctccccagtcacagcctgaagggaggccccgagagcttcctccttccccccacctgctccttaccttctctgccctgctttttagaactgcagttcattgttttaagggattgggggagggagcctggggacacaaacctttta

SEQ ID NO: 7408 - DNA, 6000 bp, Homo sapiens
cacagtgaattaagtctcatccctgcctgggttagatgtcagagcctgagacacaatgtagttggactccagtccacaggtggctgactccaaatctgatatgagttaactccaaatctgatgtaagttcaagttttgggactgttccttaactttttttttttttttttgagacggagtctcgctctgtagcccaggctggagtgcagtggcgcgatctcgactcactgcaagctctgcctcctgggttcatgccattctcctgcctcagcctcccaggtagctgggactacaggcgcctgccaccacgcctggctaattttttgtattttttagtagagacggggtttcaccgtgttagccaggtgaatctcctgacctcgtaatctgcccgcctcggcctcccaaagtgctgggattacaggcgtgagacaccgcgcccggcctttttttttttcgagatggagtctccctctgtagcccaggctggagtgcagcggcatgatcttggctaactgcaacctccgcctcctgggttcaagcaattctccagcctccgcctccctagtagctgggactataggcacctgccaccatgcctggctaatttttgtagttttagtagagctggggtttcaccatactggtcaggctggtctcgaattcctgacctcaggtgatccacccacccgcctcggcctcccaaagtgttgggattacaggcgtgagccacgccgcccggccctttttttttttttttttaacagggtctcactctgttgcccagactggagtgtagtggcgcgatctcggctcacctccgcctcccaggctcaagcgattcctctgcctcagcctcccaagtagctgagattacaggcgcgcgccactaccgcccggctaacttttttatttttagtaaagacgggggtttcaccatgttggccaggctggtcttgaactcctgacctcaaatgatccaccagcctcggcctcccaaagtgctgggattacaggcgtgagccaccgcgccaggcctatcccttaaaatagtttttaatttgaataaggtttactatgaataaataaatcacagtcggcttgatcccaagagcacagacgttcctggtgccccttttcgtgctctcccagcttgcgccactatggccctggccctttaaggctgagcgcgaggccccgcctcgcccggcgccccgcccctcccgctggatcccgcagccgcggctcttcccgacgcgttccgccttccccagctgtgcactctccatccagctgtgcgctctcgtcgggagtcccagccatgtccgacgagagagaggtagccgaggcagcgaccggggaagacgcctcttcgccgcctccgaaaaccgaggcagcgagcgacccccagcatcccgcggcctccgaaggggccgccgccgccgccgcctcgccgccactgctgcgctgcctagtgctcaccggctttggaggctacgacaaggtgaagctgcagagccggccggcagcgcccccggcccctgggcccggccagctgacgctgcgtctgcgggcctgcgggctcaacttcgcagacctcatggctaggcaggggctgtacgaccgtctcccgcctctgcctgtcactccgggcatggagggcgcgggtgttgtgatcgcagtgggcgagggagtcagcgaccgcaaggtgagcgggttgcgtagggcagggcagggctgcgcaggccactgggcagtggggcacgagtgggcgagcgccgggggtgtggcagggcgggagaaactggcgcggacctgggtgcacgagcgtggaaagcgtagccaaggaacttgtgtttgggggctcctggagagcggcatttatgtggggaggggagacgaaattatcgccccttccccaaccatttttagttgtggccgccgcccagaagctgtgctggtgggggggaaaacaataaggtgcccatgcgcatgcgcacaaccacactaccgtccccaccccccccccccccccccattaaaaccacacctgtacccctacccaccaaacactctctgggtaattgtggtctgtgactatgagtgacggttagtgccccctttccccgagggagcttgaggggctatgtcgtcggggttgggcgggggcacagcggccgtgccagagtcctggtcacatgcagccccgtggtctgtgggggtgtgaggcggcccctcccaaagcaaggccaaagagacgagacacgcccatcacggaggagagagagcctttgctaccccaccgccaccagccttacaccgccgatctgattttggggtgggggaggcgggattgggtcatccgatctttgtcttgggctctgtgtctcccgtgactgcagtatctcctcctcctgtgactcagccctcagccttcgggccacgacccggggctgcccttgggaatgcctggggcggggagtggaaggggggacccacctctgccttcctcctgcagaggacccccacttcagaaaccccagtgccaggggtttggactggaacggagaggtgcggcgccttgaactggttggccaagtctgcaggcctgtttctccttctcatttatcattaatcttggccacaaccctggacaccagagagctcaaaatgatcagctttttgagagacctgggatgaggcctcagcacgccatttgtttagaggtttcttttttttttctttttctttttttttttttttttttttagacggagtttcgctcttgttgcccaggctggagtgcaatggcgcgatctcggctcaccgcaacctctgcctcccgggttcaagcgattctcctgcctcagcctctcgagtagctgggattacaggcatgcgccaccatgcctggctaattttgtattttagtagagatgggtttctccatgtcggtcagtctggtctcgaactcccgacctcaggtgatctgcccacctcggcctccctaagtgctggggttacagacataagccactgcgcttggccaggagtttcctttttaaatcagacccctcaatgagaggccccacagatgcagcctcttgcagacctgccagcccaattctggagccaggtttgttggattcatcctgtatgcaaacagcttctccttaaggctttcctctgaattcagctctggccccaccctcaaactgacttctaaatgatcccactcttgagcaggcgtctaagaggaatattttcgggaggtagttgtagttcatgttactgctgaaggccacccacctcacctcccctccatacactttccgcctggtaaatacaggatatcctgtccagggcaagaatctgatgtaagagcctggattctgcggggagggcccttccctctctctccctcctcctccttcctggtgtctgggttggggaggggtcatggccctgatttggatggcctgagggttagcatgagccagggtaagtgagacttgttctgggtcaaatctgggactggccatgaccctaaatgaccaatgcactcctcgcagctctcctgggttgttctgtatctgctagtcctgagtccctgggtggagggcttccgttcttgttctccagacctcatctcaggccagaacttggaaggaaagaccccagcatgccctcagttctcgtattcagtggagtgtgggggcttgaggacatgaaaaagggcgtaagtggcagtcccatcccccttccccatggaccctaactcttgttaatatacagaattcccatcattcctggcagggatcaagacagacccagattgtcccagaacagcacccacacctccctcttcatgctcttcagagagcgcagagaagtcttttctcctgacgctccctccttttccctgcccttcccttgaccccacttgctaagctggagagaaaggttctgttatctttgtcccctttccctcctgcacagaggctctcgtgggggtgggggggaagccttttactgctgcgtaggcctctgtagcccttcttgtctgttgcccctcctgcaccatctctgagtgaagatgttttctgggctcccagtgctggctcaaacacacttctcccgaggtgaccacaccctgctgtaagcgctcagagaactttgcctgcactttggtatggccctgaccacacagtgccgtcttcttttggttgtgtgacttccttgctgctattatattattattattattattgttagctaacattattaagtgcttattatgtgccagacattgtgctaaaattttttttttccatttggaaaaactgccctaattgacagataagaaaactggagctggaaaagtggagctcaaaaagattaagtaatttttatgcatccgaagtcacacagtcagtaaacagttgagaccgcttttgtaaccacagcagtttgatcttttccacaatacttcatgctgccctaactgtaagcttcttgcattcagggatcttacacaatagtgacatgtaagatctgtaagaagatgataaggatagtatctgcctcaaagaactgatgtaagggttaattaagcattatatataaagcacttgaaatcgggctcggccctcagtcagcactcagtaaaggtgagttgttattgttgttgatgatgatgttattattattattattaccatgactattgctgcttctcctgctacttcatttggaagaaggtagccttgtacctagggggaaatcagtaaatagcctgtgggtgaatgaatgagtgactgaatgatactcttctgttcttcaaggcaggagaccgggtgatggtgttgaaccggtcagggatgtggcaggaagaggtgactgtgccctcggtccagaccttcctgattcctgaggccatgacctttgaggaagctgctgccttgctcgtcaattacattacagcctacatggtcctctttgacttcggcaacctacagcctggccacagcgtcttggtacacatggctgcaggtgacaggtcccctcactttatcaccccttaccccacccagatttccttccaggccccttccctgcagcctgtctgggttgttgtcatggcaacaccaggctgccttggcctgtggctcccagaggcctctgctgtgtagttgccgtggtaacattcaggcaccaggtctagtctggtgtgctatccttagcaacgtgccctcaccccacacccccacctctctagctaccttccccaccacttctcagtcatggaaattagacacggccctaaaatgagcgtaggcaaaatgaaggtgacaggctgagtccctgggaggctagaatggagtggttggtggccagggcaactccatatcccctgcttatgggtgtcttgctgcagggggtgtgggtatggctgccgtgcagctgtgccgtacagtggagaatgtgacagtgttcggaacggcctcggccagcaagcacgaggcactgaaggagaatggggtcacacatcccatcgactatcacacgactgactacgtggatgagatcaagaagatttcccctaaaggtggggggcataatatgggagggggtagggaggcacaggacagggaggggagctccagatctgtggatcctaatgttgttcttgggttcccctactctatgacaggagtggacattgtcatggaccctctgggtgggtcagatactgccaagggctacaacctcctgaaacccatgggcaaagtcgtcacctatggtgagttagtgggccagggatggagagagcatgtgagggcaggagggagggtctaaggggtgggatatagaggccagggcttttgaatgaagaaggggtagggactcaggtgctctgtagacgatcagggttaggaatggtcctgtatgctgcattcagattgctgactcttgggtaccagctcttttcattctctg

SEQ ID NO: 7409 - DNA, 6000 bp, Homo sapiens
gttttatccagcagcacatgcccaggaaggcaaagggaagaagggtggggggtaaccccctgccctctcctgggagaacgagggagccactcctagcctggggaggccctggaatggaaactggggctgtagactccatgcttggttctgcccagagcacttggtctccttgtgccagctctgagctaagaaagggagagaggagagagagccagccagaggggccgtggagaggtagatatcactctgtcagccccccagataaatgtggaacatcggcgctttggtaggcctaggttccagaagcaaataaaatcaatgtggttctgactctcagggaacctgcagtctaggagtactcatgttttctactttggctcaaattctggactcttttattattttttaaatgactttttttttttaagacaggttcttgctctgttgcccaggctggagtgcagtggcgcaatcatggcttaccgtagcctcgacctcctgggctcaagagatccccctgcctcagccccacaagtagctgggatcataggcatgcaccaccacacctggataatttttaatttttttgtagagatgggggtctcgccatgttgcccaggtgggtctcaaactcctgggctcaggtgattctcctgcctcagcctcctaaagtgctgggattataggcgtgagccaccttgctcagccaaattatagtcttaccctctaaaaattctacttgtttcctcttcaaaaaacaaacaaacaaaaaatacaacaggaagaaacactttatttatatacttatttttgagtcataaaacctggattttcattttagctctccttattagctttgtgaacttgggcaaatcagttaacctcccttatcctccctggtctcctcctcctcagagaaataggcgagtaatacctgctcttcctgcttcccaggaccgttggaatcattgttgttctccaacccccactttctgggcagcaccttctcccctacctttctggctcgtcctgaaggggaggctcttcctattcccttccccattgctttgcccttgtatctgctcatcctcctctctcccctctccaggagagacgtttcagagcccttgcctccttcaccatgccggttgccgccaccaactctgaaactggtaagaagggggtgaggatgttagcttatttcagtggttcagagggtgccaggcgaggacttaggggtgggcacttgcacagctccagataagaaccaactggctccactgctgtccaccctaccactcagccattccttctggcagctgctgtggccatctcctctgtgtgggttcctgtgctggaacggagaagagaaagaataagacccatacctgctccagtgtagggctggagcacaactcacctccgtggagggcaggggatgcatgctccagaggtgacccgtactattgctggagggcagtggcataggaccaggccttcaggaggtggccccggagctgggccttggagaatggcttgggggtggagggattacagcagcacagcctggggctgagaagtccataatcgctgcccactaggccagcatgtgccagaggtggacagggggtactggggaccaggaagctgtgagtgaaggaacaagaataccaggttaggatacctggacgtggctctgtaggaggcattaggacaagggagtgggccactcagacaaactagcaaagcctcagtggcaaactgcttaacctcttggagctcgcatttcttcttctgtaaagaggctgctgtgagacgcaaaggctgtaatgggagagcacattacttttaggaatagtcataattattatgctgctgttgctgccgctgccaccaagttgttgttgttgtttttgagacaagttctggctctttagcctaggctggagtgcagtggcgcaagcttggctcactgcaacctctgcctaccagcctcaagtcattctcccacctcagcctcccaagtagctgggactacaggtgtgcaccaccatgcccagctaatttttgtatttttcgtaaagacaaaaatgttgcccatgctggtctcaaactcctgagctcaagtactccacccgcctcgacctcccaaactactgggattacaggtgtgaaccactgtgcctggcctgagttgttattttggcattaaccctgtgtccttgaaacagtcacctccttttgaagacctgagatttccctaagatgagatgatgggacaagatcagtgttcttaacttttttctttttctttttttttttttttgagatggagtctccctctgttgcccaggctggagggcagtggtgggatctcggctcactgcaaccttcacctcccaggttcaagtgattctcctgcctcagcctcccaagtagctgggattacaggcacctgctatcatgcccagctaatttttgtatttttgtagagactgggtttcaccatgttggccaggctgtcctgacctcaggtgatccacctgccttggcctcccaaagtgctgggattacaggcatgagccaccacacctggcctgttcttaattttattggtcctgagtcacttagaatctggtgacagcagtgagccctcatcgtagacatatacatccatgcacaaaaggtatattctactctaggggatcatggattcccgtagtgcacgcaggaccccagaaggttaagttccctgtgctagaggccctctgaggcccgggcagctgggaactgctatggttctgctctgagttgtctgaacttccccctgcctggatgcctccctcccatgcagctccttcccttgctctaggccccactactgcctctgccagaggttccagggctgccactttgggtagaatgattcctctgtgcctcctctccgagaaagtgaagggagtgagccagggcctaaactgtggtacacttgtccaggaaaggcctcttctccttgcagtggagggatggcaccaatgtccccagcttctgcagcatcagagggctcagtcccccatctcctgtccagcctgctgggctccctggggtctccctgcctctttcagcctgcctaggccccactgtaagctgcttaggcattaattaaacccacccctgagcctgtgcttaatggcctctccagccgggactgcccagtaaacccaccaatagtgcctgactggggcgtaggaggaggagcaagcccagcaatttggcttcgttgttgcagaccacttgatgggggcgtggtgggggaggatgggggacagggagtggagccttggggtgtggcggtgggttctgcttcctcaaaggactcctggggctcctgctccccttcatgttgttcgaggggctgctcctggcttctcatattcaaaggaagaagtacaaagtgtttttcttccttcaggcagcctctgtcctatcctgagctacattagctcccagcttcaaaaatctaatggtggattctgccccttattatctggtggtcattatacttcccacaggatagagagacagctgtgtccctgcctctgagttcaggctccccttccctcctcctcccctgggagatccctgccttggactctgcaaagggcaaagctaataagatcctttttccgcccttccccatgggtcagtatggttgaagggagggaaagggtatgggtgtattcctcttgcagggagaccccatatctactttgggtagagtcaggggcccttttcctgagacttgggagataaatggacagtggcactgggctgagaacttagagatcctgaacctggcatctcctgacctgcagccttgctccctcttcccctgtcaccagattccctcccttttttggatcaaggctgggatatgtggctgctttcaggtggagctgtccctttaaatctctcctccatccctgggttactgtcctggtgtgtaattctactgtcatggcaaccaggggtgcaatgcgacctggtgccactcctcagggaatgtctgagtggaggctgcagtaccctgatggtggcctcttgggcacaagatctcagaggaatggggtcaccggagcggagctgagtccttcccttctgcccacacttttccctgtgtgcaaatgtgccctcatttttcctttctggggaactgagttccaagatgcctgacttgcttcctgggcatcatccccttcattaagaggaagaactcatgggagatgggggaggggaagaagctgctgtgaggcgaggggtaagcagggctggggcaccatccctacccacagcgatgccacctcccccacgtaccctgcctcccagtggctgaccaagggtgggtagggggaggcgtctgaggcttgaggtatttgccccatgcccaagtgaggctgcctcccggtggagggctgagtcgttcttggggacttccttagactgagggactattgtaaaggaaacagggcctggagaggggactgagagcagaggtcagagggcatagggaggaggtggcatggggtgtattagaggaggggcttctagaaaagagggtacagggacaagatgggccaagacttttctccctcgggtctcctgaagctggctgtgaggggagggtctcggagtaccgcgccagtcttgaaggggcagcatgcctaccccctcctcaaaacttcctgttagccgcctcctccccatccccaccgacactgacatgctggggatcgggcaatctgtgggactagggctccctcccaccactcttctcccacccgggttaccgcctgctctgcaccgcgcagcgccagtcagggctttagccaatcagcaaggcggtcacggcggctgagccttcccattggctggttcctcagagggcgctcctcgactcccgccttccccagcccggccaggctttggctggggaggcggtagacggcggcgtgtaggacgctccgggagtccccgggtctgggggccgccatggcaggcagcccaggcagcggggtctccttggagggtatatccctggagtcttctgaggaagcggagctccagagggaaggtagggaagggcgggccagatgggggcggggcagctggccccttagcctaccttcctccagcagagtcggggcatctggggagggtggcctgggagaggtcatctgagggcaccttcaggagagctgtcctgggcagagggcaccaactcccttggctcagtcctcccctagataacggagggaatctggcataccctggcaggaagggaagggtccctgccctggcctctttcagagcccactgagggcctcgcaggtctctgaccaatgccaagccccggcctgggcaagaggggtctgaagggcaagcttgcacttttttttctggagaaggcagggagcaggaggaggaaggagatgggagtccaggagtccctgaaccatctctgccagctccagttccagtgccccctcctccccactcctgttccttcctggaggaggggggcactgacaagagcattgagaggcgccaggggtgcatcctccgccgtcctccgtggcttgggtactgttatgcagatgtaggcatgggcggcatggtggcagagtaatgatacccttcgcccatctctgcccccagctgggcacattctgcttctcgcttcctttccccggaacttgccacagcctggaactcccacctctgtcagtgagtgaaggcagccctcacctcaggtctcgggggcattgttgcggcccagctgcaggtgttatcgtgtcctccattatgtcccatttcgggctgagagtttgcttatccctgtgatgacttggtgtgacctcagcctttgggtcacaccaaggcctccagtgcctgtttccctagctcctgccagcgttccaggcctcagctttgacttcctat

SEQ ID NO: 7410 - DNA, 6000 bp, Homo sapiens
gaatgttaccatgcatatgttgcccctaagggaacaggcccattggcacctgaaaagaggagggtggcaggtggtcaatggcagcagaggtatgtgtggctccggtgcgtgtgttgcggggggtatctgatcccctccaggtatgggcccttgtcagcttgttggatcccacagggtcaggtcttgtccaccccagactccttccttcctaatggggtcctcagaccaccccctctcccacctaggaggcaggatgtcagctgacacagtatcccctttgggacacttccaggggtctacctggggcacctggctccacgcccagcgtggtcagtattggagggaactgcagagcctcctaccacatgagaatctcaaaacacttagctcaggctaattccatgggaactgagggcaaatcagaggggaaatgaagatggcaagtctgactgtaaccccagcagcaagggataatgacagcaaacattttcatagcgctccttatatgctaggcactgttctaagccccttacaaatgtaaatttccttaatgcttacaacaggtctatgagatgggcatcattatcatcacccccattttacagatgagaaaactgaggcacagagagttgaagtcacacgccgttagtaaatggcagggctgggctttgaatccaggcagtccgactgcagagtccgtgatcttaacaactaactctaaaccagctaacagttgttttgttggaggcaacttagcatagtgcttagggatgtggctggagtcaggtagtccaggctgtaacctggctctgatacctacctgctgggtggctgaagcaggtaaatgtctctgaacctcagctttcgcatctgtagaatggattaatgacattactcttcttcctcttagaatccccaaaccacttcacagaatgctttggggattctaagagttaaggcagtacagttctttgtgcagttcgggctgattacacaaaggtggtgccataccactaggaagttgtccctgtcatctggtcaatcccctctcccgccgtgtcttcccagctgtgctataccttctaggctcagatgtcccgctcacccttatctggcctggccctggccagctggctagctggccaggtgtttggtgcacttccaaaacttggggcagcgatctgggtccaggcccttatcagtgctaggcagcacaaggcctgcagctggggggcggcctggctggcgggtggcaatctgggtcatgggtgcgccctgtaagtctccaactgagctcaaggcacctctgttttcccctcttctctctcactgatgtctcagaaccctggcaggaaggcactcccattgtacagatggggtgactgaggcctacaggctggaagctgcccaaggcccttcagccagtcagtggcagagaggcagcctggacctctggattctgcagctctgagggcccctctgaccattccactcctcagataggcaaccaaggccacagtcccagccccatgggtgggacttttagtacctaaggcttagacaccctggaggccttagcatctgaggcctaagaaagtgcatgggcaagtccagagaaggaagaaagtgaataaagatggaagagaaagaggaactttgggagaagcagagagggaggaggaaaaagagagagaagaggtgggtcatcagggtcctcaggagcaaagccaagccctgcagtagggactacctcgtcctcaggtccaggacccctcccccgcaccccatcacttgccccacctgccaaggcaggggtctctcccattctccagtctggtgagatccagtaatcccctccctacccccaggactgcagggtcacccattcctcagaaagaaggctgtttgcacatccctttctttcttttttttttttttttgagacggagtctcgctctgttgcccaggctggagtgcagtggcgcaatctcggttcactgcaacctctgccccctggttcaagggattctcctgcctcagcttcctgagtagctgggattacaggcatgcgccaccacgcctggctaatttttgtattttcagtagagatggggtttcaccatgttggccaggctccctgccccatgccctcacgtggcattttcccaccttgctcagcccacctgttcagctccacccaggcatgcctcacatctggactcccagcccttcacatctcaccagtgcttggctgggcacggtggctcacacctgtaatcccagcactttgggaggccgaggtgggtggatcacgaggtcaggagattgagaccatcctggctaacacagtgaaaccccgtctctactaaaaaaatacaaaaaattagctgggcgtggtggcgggcgcctgtagtcccagctactcgggaggctgaggcaggagaatggcgtgaacccaggaggcggagcttgcagtgagccaagatcgcgccactgcactccagactgggagagagagcaagactgtgtctcaaaaacaagaaaaactcacctgtgtttttaggctagcgccagtgacccctcctccggtgactccacccccgagtgctgcaaacgcgtcctgctcttcttcctgccatacagatccttggcactcagcactttcggcccctggggtccatgtcacctcggaagcactgaggctgccctgtgttcccagtttgcctccctgtcgcggctaggagcttccccagagtagagacgggccttgttcagctcagcaccccctcccaccagcccccagtgctcagcaccccctcccaccagcccccagtgatcagcagcccctccccacagcccccagtgctcggcaccccctcccacagcccccagtgctcagcaccccctccccacagcccccagtgctcggcaccccctccccacagcctccagtgctcaacacaatgccaggcacagagtgggaacctttgttgaaccgacccaattgcctgtcacctcaatgccctgtgctgtagtgggcgaggagggaaaagaggcacctccacacccagtctggggccaccttaggtgacccctgtcctccccttggacctgccctcacattcctggggaaggcacaccttcctctctgctagggacacaactgagaaaactgagaccccgagctcagaggcctcttggctggggcctagtcatcctggctccccagtctcagagccccaaccccgcaatagggagccattcttacaatcattcagtaaatgtttattgagcacctactacgtgacagccactctgctaggagtagtgaatttcgtggggatgggacatacagggtcttcgcactcaggtagtttcccttccaaaagcattgtcagataatatgaacacaaatcaatcaagaaaccacgtattggtttttttgttttgttttgttttccttctaaagagtctcactctgtcacccaggctggagtgcagtggtgccatcttggctcactgcaacctctgcctcccaggcttaggcaatcctcccacctcagcctctcaagtagctgggactacaggtatacgtcaccacacccagctaatttttgtatttttgtagacatgtggtttcactatgttgcccagttggtctcggactcctgagctcaagcaatctgcctgcctcagcctcccaaaatgttaggattacaggtgtgagccaccacgcccaaccaagaaaccatttaaaaattagtcaggcatggtggtgtgtgctagctactctggaggctgaggtgggaggttcacttaagtctaggagtttgagactgatgtgagctgtaatcatgccactgcattctagcctggataacagagggagacccgctctcaaaaaaataaaaaagaagaaagaaatcagcagcccacactgagatagtgagaccctgtttctacacacagatttttttttttttaattacctgggcactgtggcatgcctataattccagttactcaggaggctgggccaggaggatccctggggcccaggagttcaaggctgcagtgaactatgatcatgccactgcactctaagcctgggtgacagagtgagactctgtctcaaaaaggaagagagagagagaggaaggaaggaaggaagcagggatggaggaaggaaggaaggaaggaaggaaggaaggagggaagggagggaaggagggagggaaaagaaaccagaacatgacagattgggtcaaggtggtggccagggagggcctctgaagaggagacatttgggccgagatgtgagaaggtctgaggtattggggggagggtgtccgggatatggacagctggatgtgcaaaggccctgggacaggaaagggcttagtgagttctaggaaccacaggaggccaataggctaggtggggagagagcgagagagacggagtgcaagatggggtcagggagagaagtaggaccacatcgtccagacctgcggaccactcccaaggatgctgcagcccatgcccggtgggcagcagctatttctgagagaagagcatgtgtttagagcccctcaggggagctaagcccccctgaagaagagaccagcaggtcccctggtattagctgagtcccagggatgggcaagaaaagaagccaggtgaagactagagaatgaaggagggagatggacctgagggtgacctgcccatcttccccaaacatccttcgctggtgccagccagacttacctcttccctgcactgcccctctctcccagcccctgctcacctaccctcacacctgcaaatccagctcgttctccctttccctccacacttccttcctctggccctaccacctccaacacgtggatcccctccactgacatgtggccccctctggaggaggaccaggagaccctgggatgccctgtgccccactcagcctgtgccctctgctgcagggacccgcggtgcgggttatgctgggggctcagatcaccgtagacaactggacactcaggaccacgccatggaggagctgcaggtgggtgttccctggcatcagcagtgctcccacctggaggctctggggacctggtcctagactcctatcttcgttgggggtggaagagcccctcacagcccagcctcagcggccacttcccacaggatgattatgaagacatgatggaggagaatctggagcaggaggaatatgaagacccagacatccccgagtcccagatggaggagccggcaggtgagcccctctccctccctcagctgggatgagctgctgagccctagacagggacaggaggggcacttgtcctctccccttctccacagtcctcctcccaagcaccacgggccgttctcccctcaattctggctgattgaaggataaacagagctttgtttgaaatgatcacaggaggtggctgggagagcaggggcagtcacccatccagtgcccctgcaatgtgagaagggcgggcagccagtttgggacaagggcgtgagcccacatgccatctgtgcccatccaatgccagcttccaggccagaaaatgggcttgttcttggggaaagaggtcctgagaaatgaggggcttgtggggaccctcctagatagaaagacaccaggaaccaccctgccttccctggcctgtccaaggtcttaggtggggagccccaggcaggacctgtttactgtcaacaggacttaagtgctggagattgggattaaagttaagaggcccctcttggaaatgagggctgggggtgggaggggtgggaatataaggggctgacccaccctggtgcctcagctcagtgagacactgtgctgacgggctcattgaggcaggtgggaggagagaagggagtctggtctcagaggtggcaggggagggaggaggtcctaggaggatcctgaaaattgccactcagggctctgccgtcaccttggagagg

SEQ ID NO: 7411 - DNA, 6000 bp, Homo sapiens
atggaaagccaggtcagggtgctgctggaacacagcacctgggttgagaactggacagggtgggagcccatctggctcaggcacgttggggggtctaatgctgactctttcatttgagtgaccttggggcgatttgacctttggggccccccttttctcatccataaaacgggagagtgtgtgcagggaaagtctgggttctcctccacacgagtaaagtcactacacacaagagccctcagtttcctcccctgttccgtaaaccaaaacgtctaagttgtaaagaaccttggcggagagtaggctttcaccttgaccgatagtttatttatttatttatttatttattattttttgagacagagtctccctctgtcatccaggttggagtgcagtggtgtgatctcggctcactgcagcctcgacctcgcgggctcaagcgattctctggcctcagcctcccaagtagctgagactacaggtgcgcaccaccaccgctggctaatttttgtatttttagtagagacggggcttcgtcatgttggtcaggctggtctcgaactcctgtcctcaggtgatccgcccacctcggcctcccaaactgctgggattacaggcgtgagcccgaccttgactgatagttgattaaattatttcgtgtcatttctgaactcagcttgagatgggaagggaatggaaaggacgccttctctcgggcccttttgcccagcgcccctttacaggtcacagattgcactctccctgctcccaagctggagtttcagagctgtgggggagctcaaaggcattttgtcagggaaagctgatagttggcccctcggagtccacgtgctaacccggcaggcgccggctgactgggctcctccagcgccggacgcgaccagtgggggcctgaagggcggggaaggcagagacgtcaaagtcgaggcctacccttcttaaaggcgcaggctaggagtacccatctccccgcccgcccccccccgcctccacccgcccgcccgcccccctccgccaccgcccgcgcgtgctggtttctctgttaggacaaataagcaagatagcacagaagttctaaacgcgaagtgggtggtggggcctggggtacggggctgccccgggaaataaagtgtctccctgacaagcgggatcggagagggcagcgctggacttaagccttcctgtctcccggggaggcagtgtggagccctgggaaaagcacccggccggttcgaatctccggctcttcacgtcgagcctcagtttcactttctgtaaaacggggtaatctatttctttttcagacggagtttcgctcttgttgcccaggctggagtgcaatggcgcagtctcggctcaccgcaacctccgccttccgggtttaagcgattctcctgcctcagcctctcgagtggctgggattactggcatgcgccaccacgcccggctaattttttgtatttttagtagagacgaggtttcaccatgttggtcaggctgctctcgaactcctgacctctggtgatccgcccgcctcggcctccaaaaaggctgggattacaggcgtaagccactgcgcccggcctttttttttgagacggagtgttactctgttgcccaggctggaatgcagtggtgcgatctcggctcactgcaacctccgccggccgggttcaagcgattctcctgcctcagcctcccgagtagctgggattacaggcgccagccatcatgcccggctacttttgtatttttagtagagacggggtttcaccatgttggccaggctggtctcgaactcctgacttcaagtgatccgcccgcctcggcctcctaaagtgctggattacaggcgtgagccaccgcgcccggcctgtggtaatctatttcaacaataacctactgcaaagagttttgagactcagaagaaatcacgatacgagagcaaccaacaccaaaacgtcgatgccctcccgcactcagtgctcttcctctccgcgcagagtcattccgggccttaggcgaggttgtgatttgcccaaggtcacgcgaaggtgggatctggctccccatggctctcccgtctcccccggcttgctcacgtcccagcccgcccggcccgggctgcagctcagctaacccagtggcgcacacccgcgcggggccctgtggtttacaaagcgttttgcagttgcaggcctgtcctgtaacctgaaaaatgggggcgatgctaaggccggcgagagaagtcgccgcgaagttttcaagtctcggcgggtagcccggcaagtaacttcgtcgttattgtgtggtctcccggcgatctcgaagaactcattctcactgccgccgccacgcacctgaggacaccgaggaagagggccagtgcgtcaccctcgccgtccagaaggcgctggggtttccagtgccgcgcgcggccggggcggggctggtgaaaatgcgctgttaaggccggcgcggcggctcacgcctggaatcccagcactttcgaagaccgaggtgggcggatcgcttgagcccaggagttccagactagcctgggcaaaatagggagacaaaaataaaagtaacaaaccagccgggcgtggcggcgcgcgcctgtggtcccagctactccggaggctgaggcaggaggatcgcttgaacccgggaggtcaaggctgcagtgagcctagatcgcgccactgccctccagcctcggcgacagagcgaggctgaaaaagatgctgtctaaaaaaagatgctggaagtgcgtgctgctgccacgttaagcgcgacgtggagaccgcgaagttggccggcagctctcagcgctggacaggcatggaactcgcccgcgcggccccgtcaagggggcgggaccgtcgcaggtccgggcggagacgcgagtgggcggagccggggacactccgggcttgcggctggtcggcccgcggcgggcggggcctcgtggcgcggtgtaggggcggggcccccttggctgctttcggcgtcggcctaggtgcgctgcgagcgcgcgcggaccgcgcacaggcggcggagccggtatgggcccgcctgaccctgggcgccgcgccgcacgagcaccagcctagagccaggtaggcggcactgggccggggctgggggcggagacggaagcgggggtctccgggcggccgtgcgagccagggcaggtgctggggccgtcgagctggcgtggtccccctcacctggcggctctccgccgttcggggccgggagtgtcgccgagggtcggggagacgtcctggtcctacgttcctacttcccgctctcccggctgcgccccgggcctgcattttggggcgggaacccagagactgctctttctctccgggccccgggtctggcccgtccggccgggcggggagggccgggcatcccagcccgcagtcctgaggaggcgacgggcccttcttggtcaccggatctgtttacacgtcaccctcgatgcccggccgtccctccacgcccagtaacttgggctctcaggtgcctgcccggggccttggtgctggagtgggggctgtgggggcagcacaggtactctgattttggggccacgagggccaaatccgcgcctgcacgtaggaggtgcgcagtggacacgtgcgaggtggacgagggaaggaccctggctcctactgcattcgagcgataggtctggcaccctagcttccttcggaaccactcctgagtgaccttgggcaggccacctcgtctccccgagccttagttttccccggcggaggggggcggacagtccctgctttagaggtcattgccagggttgttgaggcaacagatgtttcgagggcggtggatgagggttgggttaaagtctcacagtgggccgggtgcggtggctcacgcctgtaatcccagtgctttgggaggctgaggcgggcggatcacgaggtcaggagatcgagatcatcttggccaacatggtgaaaccctgtctctactaaaaatgcaaaaattaactaggcgtggtggtgcgcgcctgtagtcccagctacttgggaggctgaagcaagagaaccgcttgaacgggggtggatgttgcagtgagccaagatggtgccactgcactccagcctggcaacagtgcgcagagcgagacgccgtctcaaaacaaaagtctcacagtggcccagcctcctttcctgccatccctggagttgtggtctgtttgaggtttggttttcaggactgaagcttcaagatggctgaccaggaccctgcgggcatcagccccctccagcaaatggtggcctcaggcaccggggctgtggttacctctctcttcagtaagacctaggggaggtggggtgggggcgggtggggatggggcagaccggagattggaggctgtgtggtcctgggggaggagtcctaggggtggggtcctgaaaggagccttcagacccgcttcctcccccagtgacacccctggacgtggtgaaggttcgcctgcagtctcagcggccctccatggccagcggtgagtacctgacctggaactagtgaggggtggtgcctgggcaaaagaaagatctcccagaggctggccgtggtttctcatacctgtaatcccagcgctttgggaggctgaggtgggtggatcacctgagatcaggagttcaaggccagcctggccaacgtggtgaaactctctcactactaaaactacaaaaattagccgggcttggtggcatgcgcctgtagtcccagctacctgggaggctgaggcaggagaatcgcttgaaccgggaaggtggaggttgcagtgagctgagattgtgccactatgctccagggtgggcgacagagcaagactccatctcaaaaaataaaataaaaagatctcccagagatggggtccctagggcgggtgggggctctcctgacttgaggggctgccttgtattttagagctgatgccttcctccagactgtggagcctctcctataccaaatgtgagtgccccaagccacagggagcatgggagggtgcaagggggagacagtccttgtccctgtccccagggcaccagtgggctccacagccatggactagcatatactcccaggtcctgccagccagtcctgtgacctgcaccagaacatccacacagggacctggcctttactggccttccagggataggggcccactgcctccctgcaaggttctaggatcctgtcattataatgccccctgcctttccccagtgccctcctctctccaatccacagggaagtgcctcctgtattgcaatggtgtcctggagcctctgtacctgtgcccaaatggtgcccgctgtgccacctggtttcaagaccctacccgcttcactggcaccatggtgaggagcagctgggtccgtagggattcgtcggtgtccgtgaggagttcggtctggctgggcagcagacccaggagtaaagggattgggcaaggcacgcagaggtagccggttccgtcaggaagtgcttccggagaaggcagtacctccatggggtgtttgttttcttttagacagagtctcgctctgtcacccaggctggagtgcggtggtgtgatctcagctcactgcaacctctgtctcctgggttcaagtggttctcctgtctcagcctccgaagtagctgggattacaagcgtgcaccaccacctgccgctaatttttgtatttttagtagagacagggttttgccgtgttggccaggctggtctcgaactcctgcctcaagtgatttatccgccttggcctcccaaagtgctggctgggattacatatgtgagccaccgtgcctggcctccataaggtttttgaagggtgaccaggtgtccgcctggacccagctgctggggtactgcatgtgtagaggcagggaggcctgagggctgtgggcagaggctgagggcgt

SEQ ID NO: 7412 - DNA, 6000 bp, Homo sapiens
tgggcaacagagcgagaccctgtttaaaaaaaaaaaatgaattaattgatgtccatccagtatagagaggatcaggtatccagatccccgctcctccccacacatgcactgatcagagctgaagacctggggtatggaggggagtccgtctgcagatctccagcgagttttgtggagaaaacccctggttgttgtggatcttctcaacattttgtggtcaagagcatagaccgtagcgatactcattccgaagacttcagagtgtgggtatagagtacccatactctgtggctcttaggattgtctatggaaaaccagactgtaagggttcagcattttccacgtctgcagcttaatcagtacacaatacttactaatggatgtgttaaaatggctgctttagaacttacataagctctgaaggatttatcaccaattcttccccccaagaaaattttattgaaaagctcaactgttgagaaattctttcataacaataattacttaaaagatacacatttggccgggcgcgatggctcatgcctgtaatcccagcactttgggaggctgaggcaggcggattacctgaggtcaggagttcaagaccagcctggccaacatggtgataacctcgtctctactaaaaatacaaaattagctgggcgtggtggctcacgcttgtaatcccaggattttgggaggccgaggcgggtggatcacgaggtcaggagatcgagaccatcttggctaacatggtgaaacccagtctctacaaaaaaatacaaaaaaaaaatagccaagcgtggtggcaggtgcctgttgtcccagctgctcgggaggctgaggcaggagaatggtgtgaacctgggaggcggagcttgcagtgagccgagatcatgccactgcactccagcttggccaaaaaagcgagactgtctggaaaaaaaaaaaggctgggcgtggtggctcacgcctgtaatcccagcacttcgggaggccgaggcaggcggatcacctgaggtcaggagttcaagaccagcctcaacatggagaaaccccgtctctactaaaaatacaaaattacccaggcgtggtggtgcatacctgtaatcccagctactcgggaggctgaggcaggagaattgcttgaacctgggaggtggaggttgtggcgagccaagatcgcgccattgcactccagcctggacaacaagagtgaaactccgtctcaaaaaaaaaaaaaaaagatacacatttatctttgtggatggagatataacagatgagttagttctaactaattgtattttcataattttggcttattggaacaaatagaaatttcaggctttggggaaaatctgagcctgcagagaatttgtggatgagaatcatggagttctatgttggaaacctggcttacatcaccatttaaagattttatattatttacttcttgttttgaggttttataacttgtatattcaatgagaaaagaggtggtgagctcagttggaaaacagggctagaaatgggagctgtactggaaattttattgtgttagagtctccctctctcgcccaggcaggagtgcagtggtatgatcatagctcattgcagtctcaagctcccaagttcaagtgatcctcctccttcagccttccaaagtgctgagattacaggtgtgagccaccatgcccagctggattcttttgtttgtttgttttgttttgttttgagatggagttttgctcttgttgcccaggctagagtgcaatggcacaatctcagctcaccgcaacctccacctccccctcccaggttcaagcaattctcctgcctcagcctcccaaatagctgggattacaggcatgcaccaccacacctggctaattttgtatttttagttagttggtcagtccatgttggtctggctggtctcaaactcccgactgctggtgatccacccacctcggcttcccaaagtgctggaattacaggcatgagccaccgtgcttggccgggattcttcatatgtaaatctttttgcttctttattttttgaggtttcgctgtcacctaggctggagtgcagtggcacgatcacaactcactgcaacctctacctcccgggctcaagtgattctttcacctgagcctcccaagtagctgggaccacaggtgtgcgtcaccatgctaattttgggggtgtgtgttgttgttgttgtttggtgaagactaggtttcacatgttgcccaggctggtctcaaactcctgaactcatgtgatccccccaccttggcctcccgaagtgctgggattacaggcgtgagccagagccactgtgctgggccgtgtgtgtgtgtgtgtgtgtgtgtgtgtgtgtgtaagagacagggtgttgttctatctaccaggttggactgcagtggccaccactgccaccacacctggctaatttttttaaaatttggaaagatagggtctcactatattgcccaggcttatgtgcaaatctttatgcggcttcatgccttcactttttttttttccattgttcctttggaaattgttccagttttttttttcctgtatctttaaacaacaacacaaagcacccttttaattaagttactataaacacataacattcaggaattgttttaaatttatttgctaaatgtgggcgccttatggatgacatttggccagagctatgcagagttgccagagcttaataatgagcaataattcatcttggaaacttttctgttttgctgtttaatccagtacagatgcaggtgttttctttctgtgactttttgtgagtagttgtatctgtaaatcacctcccatggagacgggtgttcctgtgactgagagccagctgttgggtgttttagctaaacagcttgctcctagttagctgctcaaatccccctgagaggtgtatcggctgcttcagggaatagagcagatggggtgaaggtttttgcaaggcctttagtgacctgctttcaatttgctgcaattcttctgctttggctttttcctataggtgccagagttcatctgcttcatatttttactactgacgcatcttcctgtcgtatattcttagactgtggtgacttaagaatctttgggtcacctgttacatggtttctcctgccacctgtatggggaggagaagactggtattcaaactcaagcctgtttctatcttattctcattgatttttatgatacatagaaaactttgtttctttctgaaaatggcattttagtgattcattgttttctgtgggagaaagcttatgacctgctcttttctttttcccttccagagggaatctggaaaaattgcaatcaaaacatcatttctctaagaaaattttgggtaaccgaagttctggacaacaggtaaagtgtgtttaaactttggtggtgctgacaaatcatctgtaatctgcagaagtaaactgggagagggaggaggacaagttaaaaattaagtctactttgtgtcggggctttattggggatttcccatatattacctcatttaggtggtttttacctggatcctggatgtagatctgggaatctcagaaagaatctgtcctttaaaatgctgttttaaatggatttgctgttgattggatttaatgtcctcacagttcagtttagcaatcattttttaatgtctaccataaataaggtacagaagtataatttgtagattctgttatatagtaaaggggtacaatatttattgcaagaccatttactgggcttctaagtaaaaccaaaatctggtatgcgatgcagcctagctagggaagatcttcctagttcccttctgtcttttgttttagttcttaatgattgccagcagtttgtagctgtaccatcttcttaatcccttttagcacttgtctaaaatttaagtttcctaataaatcaccccttcacagtggagtccaaccgaggtgtcccctttatgttctcagtggtggtttttctgtgattggaccgaataactatacctgtgtgttttttaaatttctatctcacaaaattctgaaggtctcatgaaataatagtatgtgtaaagaacctaggtctggccaggcatggtggttcacgcctgtaatcccagcactttgagaggccaaggcaggcggatcacctgaggtcaggagttcgagaccagcctggccaacatggtgaaaccccatctctactaaaaatacaaaaatgatggtgcatgactgtaatcccagatactcgggaggctgaggcacaagaatcacttgaacctgggaggcggaggttgcagtgagccaagatcacgccactgcactgcagcctgagcgaaagagggaaactgtctcaaaaaaaaaaaaaaaaaacaaacagaagaaccaaggtctgagaaatatctcagtaaatagtagctacaagtttaccttttaaaccagaggagatatgaaagcaatccatactttctgggaccttgtggggccaacaggtgttgactgaggtgaattgaccttcttgaagatagtagagagtgagatgctgtttattctttttttttgagatggagtcttgctctgttcaagcaattctcctgtctcagcctcctgagctgctgggattacaggtgcacaccaccgtgcccgggtaatttttgtatttttgtagagacggagtttcaccatgttgaccaggctggtctttaactcctgacctcaactaatctgcccgccttggcctcccaaagtgctgggattacaggcgtgagccaccctacccaactgagatgctgtttattctaacatttgttccactgtgaaccttgaggttagatttcaagtattcaaagcagtagttcctagagatatcataattagtaattaaattaagatttaatatttgttgattttattttggtatttttccacttttatcagggcataccaattcaatcaccatgagttggagcttcctgactcgcctgctagaggagattcacaaccattccacatttgtggggaagatctggctcactgttctgattgtcttccggatcgtccttacagctgtaggaggagaatccatctattacgatgagcaaagcaaatttgtgtgcaacacagaacagccgggctgtgagaatgtctgttatgatgcgtttgcacctctctcccatgtacgcttctgggtgttccagatcatcctggtggcaactccctctgtgatgtacctgggctatgctatccacaagattgccaaaatggagcacggtgaagcagacaagaaggcagctcggagcaagccctatgcaatgcgctggaaacaacaccgggctctggaagaaacggaggaggacaacgaagaggatcctatgatgtatccagagatggagttagaaagtgataaggaaaataaagagcagagccaacccaaacctaagcatgatggccgacgacggattcgggaagatgggctcatgaaaatctatgtgctgcagttgctggcaaggaccgtgtttgaggtgggttttctgatagggcagtattttctgtatggcttccaagtccacccgttttatgtgtgcagcagacttccttgtcctcataagatagactgctttatttctagacccactgaaaagaccatcttccttctgataatgtatggtgttacaggcctttgcctcttgcttaacatttgggagatgcttcatttagggtttgggaccattcgagactcactaaacagtaaaaggagggaacttgaggatccgggtgcttataattatcctttcacttggaatacaccatctgctccccctggctataacattgctgtcaaaccagatcaaatccagtacaccgaactgtccaatgctaagatcgcctacaagcaaaacaaggccaacacagcccaggaacagcagtatggcagccatgaggagaacctcccagctg

SEQ ID NO: 7413 - DNA, 6000 bp, Homo sapiens
agcctcgacctagagagcagcccagagtccaccaggtggccggagatttgggccaattaagtagggggttggaggtagtagtaggaagacctgaggtcagtcttgccctggcaattcgtgccagcaagtgaagacccaacacttgcatgaggaagggatccaacgaggagctcattaatgggaaatattcaggagcgcggccgaagggtttgcgccattgttggtgagttgttaagacttggaagaaaactgacttcagtaagcttccatttccacccctcgatgtgaggaaataagatcagggctgacaaacagtgatgactaataataccttaagcttgcacagcatactttacagtttacaaaacactcttatttgatcctcacaacagccaagaggcgacaaggtggctattactaattatccctagtttccagacctggaaaactctggctcagaacttgggtgacacgggtaggttaccccgcctttaagtgaccaagccgagacttactgtgccgctctcccccttggaagcctagtgatgtgcctaggtaatgagcaggtaaagtcgctgacgctgggcagcagctagacggcgctgaagctccagtaaggaatttggcattaggacccagcagaagcctggccgcccgccgcggaaaagactattggatttgctctgccgaccacacctcctcccgccccgcctacctgtccgtcttcgcacagcgcagccaattggtggcctccacatccttatacgtcattattctacgcccaggtggctctaggacaccctgtggtgctctgggtcgcagttgtcctcagagttgcctgattggaaaaatctccagggcgagggatcagtctcgaggctgccggttcccctggccctcagggatggagccaaggtcccagggcgggttttctttcctaggaagtggttgctgggttctgaggagtttcccccttggcagccatgagccggcagttctggtagtgactgctgggccctgctggacagcggtcgcatgcagctcctatgaggcccctgccgccggtcggcgatgtccggctggagctgtcgcctccgccgccgctgctgccggtgccggttgtgagcgggtctccagtcggctcctctgggcgtctcatggcctctagcagctccctggtgcccgaccggctgcgcctgccgctctgcttcctgggtgtctttgtctgctatttttactatgggatcctgcaggaaaagatgtgagcgaccccgggggcgggccgacagtctctccccagcctgtgacagggatcccgggccttctgcctctggacccgggctttcctcttgtcctcctgcccggctgtcgccctcttagcaccctactacttttgcagctatggctgagcctacccagaattccagaactccaggattattttctggattcttcggacttggttattttcttttcttagctgtttttccccgcttggttctaagggcctgcgttttacaggctgagacttctattcctcaaacaggacccgagtcggcccccttttggtactcccagatgcttgcaaacaacctattcgtcctcggccttggtgccatagccgaaataccgtctcctcctgcctggggtacctgatttcactatctcgttctgcatgtttcctctccgtctttttcgggtattcttttcttaggctttggaatcagtaggctgggatgtctagtttctagatccagtaaaatcagccccttttgcaaatgagcctagtggtccttaacaaactctgcctacatccagagaggcaagataattttaaagttttcagtggctcgggatatattagatgacagtgagtgaaatacactaatttctccctcttttctcatgcatttcatttctagaacaagaggaaagtatggggaaggagccaagcaggagacgttcacctttgccttaactttggtcttcattcaatgtgtgatcaatgctgtgtttgccaagatctgtgagtacccagatagtaatttgttgggtaccccaccaccccaagttccctcagtatgctgggcattaagcattgattcaaccttaaaggctaactcatgatctccaccccattttgtacttacacagcctctctgtgaagtctgtaaaactaatgactttgaagtggagtaaaatattatttccccaatttttatcagcttctgagttagaaatgttcagagaatgggtcttctatattccaaatccccattgaaaatacttaaaacatttttttctttccctttgagtttcttttgtgtgtcagcttcaagcatgctttgagcattctctctttgttccctggggactagcagcagagctgactggtcccttgaactgaatgaggcccccacctccaccctgcatgtggtcttttgttgggcttaggtagaattggaaagatgaataattttcagagatttcccagtgtaacaggacagaaatagcttgtgtcttgtttgacagacaagttcctttcatgtggcttcagctttgcttagtggtccatcctagccccaccaggtttctcttgtttttttttttttttcttttcttttctttttttttttttttttttgtcttctcccagtgatccagttttttgacactgccagggtggatcgtacccggagctggctctatgctgcctgttctatctcctatctgggtgccatggtctccagcaattcagcactacagtttgtcaactacccaactcaggtgaaacctcagggtgggatgatggttggctcagatatcatttgaaaaggactaagagttcttccctcaggtctgtgagttaaaaaaaaaaaaaaaaaaaagataacggtcctgtaagacattgggagtgtatagaaccatagaacttacgtttagtggtggtgggttgggccatgatagggctgctttctgaggctgaggtctctggtgcaggccctgtgcttactcatcttaatcagtgcggtacctagcatagtacctgacacatcacagatgctcagaaattatttgctggatttaatttcaggtccttggtaaatcctgcaagccaatcccaggtaagcaaagaagatggtcttcctcttctgtcgtcactcttcctatagtaagctctctctctgctacaactgtgtccctctcggcttcatcatcccatcatggctgtctccagggactttcccccagctctccctgctgcccatcctgtcatctgtgtcacttcttgtgatgttcataggctggtaatccttaataggagctaaaggctgacctagcctgcttcacttggtcagccatttctgtgttgcatgtgtttatattgtcattagacaacttaattcccattttgatcatcagtttctttatctcaacttcttttccttctccactgttccctacccttgtcctgtcccttcctggacttttcacctttgttctctacctcctccctgtcttatacttaaccctgttgctcaatccttatctaggtgccagcctggcaccctccttttgtcctctctaagccttccttctcagtcattcttttctccctgagtcttttcttggttcctgggagggagggcattggggtcatcaataccttatggatgcctgaattttccactctgttttttccctgtagtcatgctccttggggtgaccctcttgaagaagaagtacccgttggccaagtacctgtgtgtgctgttaattgtggctggagtggcccttttcatgtacaaacccaagaaagttgttgggatagaagaacacacagtcggctatggagagctactcttggtatgagatcctgttggggaaggcacccttttccagcaaacttaaccaaaggatagtctcacctaggcaggtagaaggccagttctgtgtcaagggaggttgtggtgctccttgtccccatatctgctctttgctgcaggcccctgactctattaatgccatagtgggaaacctgaaatatttaactacaactcagctctcattctggagaagagataactctgagggttgtggctgaatcctggtgtgaggtcacagagacctgagagcaaagagggaaggaataatgtctctcactgtggctttccaagaaacctggaagccagagtttaaaataatatgatagtagctggtatgtatgcattaggcactgttccgagtgttttacatgttaattgactaatttttacaacaataatctcatatgtagtattatctccattttacagatgaagaaactaggcacagagaagttaactcgcttgcccatggtcacttggctatttgaagtggtagagtcaggattccaatccaggcagcctaagcacaggatccggtctctggagcactatactccaagctaggaagctaacctgctgggactacctttcccctcccagtatgttgggaagtgagcttcctgctctactctgattacaaaatcactacgtagctcagttagcctgtcagtccagtgcgtgggccggggggcgggggtggggggtagtgagcatggtctctccccaccttccacctgtgaccaaatggcaacgttttgttctgaggactttaaaggcagtggctttccaaggagcctgagagtgagaatcctgtgtcctgggtttggaaagggccctgttggccacttcactgcaggctgcaccctttctttcccagctattatcgctgaccctggatggactgactggtgtttcccaggaccacatgcgggctcattaccaaacaggctccaaccacatgatgctgaacatcaacctttggtcgacattgctgctgggaatgggtgagagccagttctgctgttcttcccatgtatcaccagagggcaggctgccctcatccttttgatccctctagctgttagttgcccagaccaagggcctgaattagttccaagatgcccttttgttcaagcccttgagaaaccttcctggaaaaacctgcaccagcaggatttgtttgctacttgttactggcacaatgaaggagagtcgtgtgtcagttgtcatgggaagacactcagtagtaaaacacagggaggtacctgggaactttccctttcatgagggaaatgagacacacgtagtgctcacaggaaacagagttagctgtacactgaagacagttcaaatgtgaatgatttgctttgaaatcagtgcttcctaacttttcaaatttgggcacatgtagaaagtattttttatacagcacactggggttaatggtggaggctgctgatggctgaaggtgactaatgcgaggggcttccttgagctaaggatgtgtgggtcagcatctctacagcatctgaggatttctgcttgtaatcactttggtagaagtaactcattaactttcaagcctttctcacaaaattctctttagtttctctaatcagagaaaaatatgagaagaatcaatgatgagacgatgcaaacccacaccatacactttcccgcgtcccacctcccttgcagttctttaacaggccatgtgcaggagtgtctgtgtgtgtgtgtgtgtgtgtgtgtgtgcgcacattttgtgtgcacaaaatgcgccgtacatttgttgacatgtcttctcaggaatcctgttcactggggagctctgggagttcttgagctttgctgaaaggtaccctgccatcatctataacatcctgctctttgggctgaccagtgccctgggtcaggtgagtgcttgaaaggggatggcttggcttccctactctggcagctggttccctaagaaagactggcctggctggaagaagagggtggcaagattagccctgaggtctgtttatagactttagaccaatggcagatacccagaagcccaccggacctcacctttatctttctctagagcttcatctttatgacggtt

SEQ ID NO: 7414 - DNA, 6000 bp, Homo sapiens
agtggcgtgatctcggcccactgcaacctccgcctccagggttcatgtgattctcccacctcagcctcctgaatagctgggactataggcacatgccaccacgctcggctactttttgtatttttagtagagactgggtttcaccatgttgtccaggctggtcttaaactcctggcctcaagtgatctgcccgtcccggccttccgaagtgctgggattacatgtgtgagccacagcacccagtctccctgaacttttaataacactaacaccttggccgagtgcagtggctcacgcctgttatcccagcactttgggagccgaggtggggggattatctgaggtcaggagtttaagaccagcctggccaacatggtgaaactccatttctactaaaaatacaaaaattagccaggcatggtggcaggcacctgtaatcccagctacctgggaggctgagtcaggagaatcgcttgaaccaggaggtggaggttgcagtgagctgagattgtgccactgcactccagcctgggtgacagagcaagcctccgtcacaaaacaaaaaaacacactacacctttagttccactagacatttttcttttccctccctccctcccttctttctttttctttttgttttttttttatttttaaattctctttcttcctttcttttctttctttccttccttccctttcctccctcccttcgttctttcctttcttccttcctctctttttctctctctcttcagttgtttattgctgaattgactcctgaatgtgtgaattaatatgcatacctgagaaaattgagaattgcagttctgagaccagaagcaatggacctggtggacccaagaatagattatctgaagcgtgtcctattttactttctcacttctcttttctgtctaacaacactggtgctccctcccactcactttttttttttttaacctgagtgatactgtgaggccttattaatatttaaattgttatgtataatttttgttcttttttgtgtgtttatagactatagtgcatatcattttattccagacatcaggaaatgctttagggtatgggattttcttgtgggtatgaggaagaaaggacaatgggctcattgcctgctcagagaattaagtacaaaggcggcctgagtcctgtaattcttaataactcagatgactgagtcaggcaggccagagttctggccccaaagctagtgacaacttgaaaagttagtcattgaccagacaatcaacttggagtttacctatgaaatcatgatatggtgaggattaaatggagaaaaaatggctgtaactgcactgactgacttataattggtgctcaataaataatagctgccattttgttgttattgttctctcttttcttttccccctcagtcatttttggttgtcagttctttcctttaaagtgctagtttggttgagttagaattgatttcattatatagataattttggaatgtcagaatactatatctgtaattacattggactagtcattaaaagaaagtttagaataagataatagagaatcagtctgtagaatggctattgggggagaactatttttgcattttgcttgtcattctttttctatattgagttcatagattactatacagcaatctggggtgagtttgttttcttcatctgaatgcttaaggaaacttaggtcctccatttgaacaaatcaatcccatacatacaattactttactatccagtgtatataagaattcacggctgggcgccgtggctcacacctgtaatcccaacactttgggaggccaaggcgggtggatcacttgaggtcaggagtttgagaccagcctggccaacatggtgaaaccccgtctctactaaaaatacagaaattagctgggtgtggtggcgggcacctgtagtacccagctacttgggaggcagaatcgcttgaatgtgggaggcagagattgcaataagccgagatcgcgccactgtactccagcctgggcgacagagtgagactcatggttcactgcagttttgatctccctggctcaaacgatcttcccacctcagcctcccaagtagctggtactacaggcgcatcccaaaatacccagctaatttttaaaaatttttttgtagagacagggtctccctgtgttgctcaggttggtctcaaactcctgggctcaagcagtcctcccacctcagcctcccaaagtgctgggattacaggcattagctactgcacctgacctcttttatttttaaagtggtttttttttttgaggggtctcattctgttgcccaggctggagtgcagtggcatgatcatagctcacagcagccttgaacttctgggtccaagcagttctcccacttctgcctcctgagcagtagggactataggcgagtgcctgctagttgttgtatttttttttctagagctggtgtcttgctgtgttgcccaggctgatctcaaattcctggcctcaagcaaacctcctacctcccaaagtgctgggattacaggcgtgagccactgcaaagccttaatttaggccttctaaaaccttttgaaaatttaaattgagattgattaagcctgacagtcactttgttatattagtttcagtttgatttttgttcctgaaaattcttcctgacacaaggaagctcattatttctgacttgctgatagatgaaaggtgtatttctccaaaactgttgtgtaaatggtggtaaaatctataaatttaaaataaaaagtatgtcaattaaaaaattttaagatactatattcatgtgattctgttttcattctttgtggataacatttgttgtttggactagtcttcattgaggaacagtctggttaatttgttttatttcatgcatcagagttcagctttttgtttatttgatgataaataacatcttaaaattaacttacatttcctaatatttgtacatgccaaataaaatttctacaacaaaagcaagctttgtaaagtgaatttaaactttttaaaaattttattttgttacttaatatgctacagtgcatattttaagttataaagagattgaaatgcatcttaatacagctaaagtttagtgacttccaaagctattctatgtacagcgttaagaattcaagtaatattccttaggaatggtgagaagggacattaaaaaaaaaaagaattcaagtaatattcccaagaaagacatcaacctttgcttgcctcttaatatttacaccctttaaatactaacacactatttcttgttttttaaaattcatttttttcttattcatatcatgttagtatctctagcaaaggccttttgattttatgtcttaattccaaatttaggctttttaaaagtgaaactatatattatcaagaatcaaataggacattagaagttcttggcagtttatgtactttatattcttgaagtttttactttcttattcagcttgtctgtcatatgattccttatctaagactcaaaaagtattctaattttttacatttgtattaatttgctgctgttataatagatgattataccaagtaatgataccagtaacagtcaaaggagaaagtattttaacattctttcaactaaatataccgaaagaagaaacttttcttggtattaaattaattaaattgaaagtgatctttattctgttaattccttttaaaatggaagagatcagcacataaggatatggtttcttcagaagtttcacattaatttctttgttgtgtctcattttagtgaatggctttctcaaatgccatctattatttttaaccaatggtcttttatgacttctttcccagtgtctgtttactaatttgtgttctttatatcaatattattttaatagcatcacatattgtaaaaaaagtgggttttttttttttttttgccatcctaagcaagatattagctacttttgtggacaccagcatccttaaatgtaagcatttgcatattactttcccttaaaatttttttcattccttaatattctcttacttggaatcgagtagtctgatagataagaaaattgtaccaaaatgttttccttgttataacactatgattttattccaggtattagccttaaatattgtgtattttttctttctttaaaatagatgatccataattatatggaacatttagaaagaacaaaacttcatcagctctcagggagtgatcaactagaatccacagctcatagtagaattaggtaagctttgttatatattttgccttgagaaaaagtaaaataaataatatgtttgtttctgtttttctctgttctttaatcctggaacaatagttaggctgattcaaaaagctctccactgtggttggaatgctgcaggagagaatagcacagaaaagtagaaacggtttttaccattaaaaagataaattatgagccatccatataagcagcacattgagtatttagattgttttctgatacttgatggagattatactaggtttaaaattttgtaatttatgggaatgctgaaatattttatttctcccgtgtaattggtttgaagtcctttttgttacagagaggcatgtttgaaagggttagctagccatctgtttggtgtaggagtgtgaataaattatgtagatcttcaggcattgtagccaatgagctaagccaggactcttagtggaggggaaaatagttaataggctggctgtcgcttggggttgctgcataaatgctaggagcagcagctctatggttatgaggtggggagaacggaatgacgtcatcgcttgggagctgctgcaggatggagtggaaagctgctgctgatggcattgtttttgtggcagcaagctgaatgacagatcctcactacaaagatacccctttggcccccgtgtaggcctccttggttcgggtgtttcaccatgccagcacagcgccatgagtcctggatgcatgctgctgtttgtgtttggctttgttggcggggcggtggtcattaattctgctatcttagtatctctctctgttttgctgcttgtgcacttttctatttctaccggtgtgccagctctgacgcagaacctaccaaggatactcaggtactcccatctctcttagaagcccctgcttagctggtttttattaaatttttagctcaacgggtctgctttgtaacaatttctgttgcagattgaaacaatggaaaatggcctgaagctaggatttttgattctaatttatagtaatttatagaccatcagttaggattatagctttatgtttggaaaccactaactaaagaaaaggattttcatattgtacttacacacaagtacaaggtcagtgtggtcttgttttaagcagaatgttcaaagtaaaagaagagcaagagtagagcaccggctccaagtttatacaacctctgcatttagcttctgagcatttagggacaaatatcttttatgcttggacttgcagtcagttagatacaggccgtaagcttattttgttttaattatcctttgaatgatagagtttcaggtatcatttttgtaatttttgataatagctcatgggaactgacaatttaaatattttcctcctaaaacaaaatatgttttaaagtgaaaaaatttaagacttttaggttaaggaatgcctttttccccattatttacacatcaaagttgtgaaagctttacaaagcctattcactattgttttgtcagatgttgccctttcttttctttgtagtcttgggtgacaaatatccatgcctgcttgtgggggtagtcattaatctctgtagctttactgttgctcactctacttacaccctgtaagagccatcttctgtattttagaggcttaaggttgtggtttcttttgttttctaaaccgtcagactagcagtct

SEQ ID NO: 7415 - DNA, 6000 bp, Homo sapiens
ccctcaaaatgatgaaggaataaatgaaaggagggatggagaaattaatgatgaagaaaaaatgaatgaggtagggctgcttgtttgctgctattttcttcacaatgcttttaagatttcctggtccatctcctccttcaccacttctctccctccctcgatctcttctccaacttgtctcttacagaagggcgccgcgttcccgcgctcctccccttcccctcgccccgcccctccccagcgaggccccgcctcgctgcccgagcccggcgggaatgaatggcagcgtagccgccgcgccgctcggggtgccgattggctgaccggcgcgctgacgcgccggcgaccgcgggtgcacgcaggcgaacagagccggcgggggcggagccgggctccggggcggggcgcaggagccccggggcggaggagccggggaggcgggaggcgggaggcgggaggtgttggggccgttgaagcggcctccctcccgcccccagccgcccggtctggccccagccctgtcccgacccccggcctggcccactccgaccctacccggccgaagggttccgctggacacgcaggcggcctccggagcagcccaagcccatgagggccgcgcgcccggccgccggtgctgacgagacggagctcctggcccccgaggaggagcagaggatcaatgcggttcaagaatcgattccagcggtgagagggatggcgtcccggtcccgctgcccgtgtcagaagcgggttcccaaatcccgccgttaagcgcacggctcccggctcctcacctggattcatcctgggtggatcccgcaccttggccagggatcagttccctggggattccccaccctgctgtccctgggcgatccccttcctccaaggatgggagctcctgcctcacccgggtctcccctcgcgatctgcggacctcagatggattcccggccccgggactccaagcctgtcctccttcccggggatccctttgctcctggggctcaccctcccgacccccatacaggctgggctctggctctctctgggaacccgaaccccagccccgggcaccgcccccgagtcctccgacctggctttggcctccatccctttacctccagggtgggggtctcccggggcgcgcggaacggggtggcgccctgcggagagatttgtcgtaaagcggggtgctaggcattttgggtgctttgtgaacggccctagcaacagggaaactgaggcacgctccgccagcttagccctgcctggccgtgtaggggccttgctggttctccagctgaacgtcccagggcggtgctatttttgggctctgcgaaggggcatgttagctttcgggtggcgagacctgctgtggaggcgccggtgttaggaaacgaggaggaggaaccgtggaggcgccaccggaaggctggccgactgctcattcactgtagagctggtggaaatgccgggctggggggcgccgtggccttactcccctctggggctccaccgtctaacaatggatggaggttagcccatgactctgagaggaactccgggcttttcttttctgtttaagtgggtgaaagttcacctctccagggcatatggtaactgcatccctttgtgtgaattcccggaccttcaccaccagcatgtttgctgggggtgcagtgacaggggaaattttaagaaatgcatgaaatcttccaagaaggttgttgagtttttagacactaccttttatttcagaattttaaagtacacattttttttttctttccaatctccatgccctcactgccctctcacccatctcattcctcccccagtcccaaagggtaaaggaggcaacaaatgcacagaagagttgccatggtctgggccaccaggaaggggatcagcttgaagacttggattgacttctgaatatattgcttatcagtcagggtgttgaatgcttggcactgttcccccagtggaacttcataccggtgtgtctaagggcaaaatggaaccgtagtgttctgactttagaacctgatgtcagaaatgaagaccggaggggcttttagagagaatgtaacatgcactccagtcatgatcagtgaagccctgtgcatgcggtttgatttggttttacttctctacacgtctgtgctcttcctgttttcagagaacagtggcaatattctgtgaaattgccccttccttgtttgattaagagtttgtcattcttacctatacctttggatcctctaaaaagaaaaaaaacaaacaaaccctgttcaattatttgttgcacaaacgttaaaactgttaaaacaacaacaacaacaacttcatttaggatgctaccctctcagcttattgaactgactttttaattatttttgctggacactgatctctccattccttattagcacagttgtaatgtgatttttgcgctattattcacttaaaaactaaaaatacaggtattttcttttggtgtggcatagactgtaattttcttgggggcttgtgtgtttctcaatggatatttaacagtttctttcttgatgacatctagatctaccctgattttctttgaagatttgtgtgatctcataatttcttggttttctatcataagctaggttggaaacatagttctaagcatcaattttaacttggaaataaagcctataaacaaaaagtaatgtaatgagaatgtcctgatttttgtggttcacacattaaaatgctgagagtagtactattctgcatcttttaatgctgtgttcatgatatatctttctgagcattcccaggtaggtaaattgcaaaggaactggagggagagacacactgtctttgaagggagacatgcttcctccctcctgatagatttattgggactggatggaggagcatgaggagggtttatgcaatgatggcttcttaacaaacttaggatgtgaaaaatttcactggaacacagaggcatattttatcttcctcattttatgtttcacacttgagtatccccaagatacctacacacacatagacaaacacaaagtcatcctctccccttcatagcatctctgattgatggcaataactgctaatatttattgagtgccatttatctatgccaggcactggctgggcacttgtatattactcatcctcaactataactctggaagacataaatgttatacccatttaatagaagagtaaataggtttagagaatgaaagggaacttgcccatagtcacacagctaggaaggggtagacccaagagttcaacttcatgtctgtctctcaaccagtcatgctgctagctcacctctttctctctcttaactctctgcccacaccacatctgtgtgtgggcacacagatcttataggcataagatccacagagctctactgtatcttcttgttggtgtgtactcatttcaacagtcttgcaaccaaaaatccaaggaaaaagaagcccttttcctcagccccaacctcatgatcatgcagctagcttcaaaactggatatgtgggaaagcattttaatctacagtattagaagtcttacagggctacctattgtcttttttcccatgttcttaaagcactaaatcataggcatggggtagtctccttatatatgccatcttcctttatttaataattaagtcaagattggcactattgacagtagacacttttcctgaacaaatatgctcagtcataaaggggagctaatagtaagaggggtccacttatacgttgcaacataaatgatgttgaaggggcccttggaatatccgttgtcttggattttaagtgtttttgtgtgtgtgtgagattcggggttctcttggttccaaggctgcctgtttctcttacttacagaacctgctgtgtccacagtaaaactaattgactatgggatatctttgttaagacaaaatagttcagcagtagctggaatgtctttctattcattcaacaattattaagctctagcaataagctgggcattgtacttcagtttggtaatggaaaggtgaacaagacagccttcatggaattcacactacagtgggaaaagatgaaataaaaaataagctaaaacaaatcaaagtcttaccaattgtgacatagggctctggttggatggggagggttgaaatgatacttcagttaggatagtctggaaaacctctcttgaggaggtgacatctgagctgagctgaaaggatgagaagagagctgagcattctggagaatatcctagacagaagtaaacagcaagtacacatgcccagaggcagacacaaccttgatgtgtttaaggagcagaaaggaggtggtatagccagaggatggagagagagaaagatgccaccctgagactggaggggtagtgaggcccagaccactcagggcttgtgggcctctgaacactgtgttacagtgctatcgtaagcactttgggaagccagaggcagactttaagctgggattggggtgtgtgatgtgatctgggttttttgttgttgtttgtttttgagacagggtcttgttctgtcacccagactggagtgcagtggtgccatcacaactcactgttgcagccttgacctccgaggctcaagcagtccttctacctcagtcagaagtagctggggctacaggcatacactaccacacctggctaatttttacatttttttttgtgtgtagagatgggatctcactataccgcctaggctggtcttaaactcttgggctcaagcaacctcccgcctcagctccccaaaagtgctgggattacaggtgtgagccaccatgcccagcccctcatctgtttctaatggaaaactgtagctgctatgtaaagaagagagtctgtactgggtcaagcaggaagactagttaagagactttgtatttgtacagacctgagatgttaggtctttatttaaggtaggagacgcggagctgggattacaggtgcacaccaccacaccaggctaatttttgtatttttgtagagatggagtttctctatgttggccaggctggtcttgaactcctgacctcaagtgatgaggtggacttatttgaaatatattttgaaggtagtgttgatggtacttgcactcggagaatgaggaacacttgtgggatttgatctactgagatcagcctctgagatctgctggtgggttgcagatctactcagtgggcacagtgctttaggttgaatttaaagtgtgttagtgtgctaaggagtgttcccaggtctctgatctgttctttccctccatggttttgaaattctgtcatggcatgggagaggggtatgggggaaggaggaggtgataagaacgttgggcaagggggaaggcaggagagttttgaaagagaaagtgaaggaatgagtaaaaaaactctgcctaactagtagctttattaagtgcagctcccactcccaggactgaatcaccttccttcaaaccctctagagcttgttggttactcaagcattgagtaaccattagggccactccgctttaaatagagatgtcttccataaatggatgctgttttccataaccagcacttgaacctttcccattcttttttcggggaagagatgaaggccagagtgtgggagttgatttacattttacatctgcttttccatttaggttttaggagtgatttcttcaggaggctgtggaggaggcttgattgcaccctggcaggttagagagaaatgggaaaattgtattgtactttcccagcagaacaattatgctgtctatcctactgagccccagatttagagaattgcttccaggatagttacccttatctttccctattgcccgtgtcttaccctgtgcatcaggatagagtgccttaagtcaccatgggtgggatatttttctgtataactttctacttttattttttaatgtga

SEQ ID NO: 7416 - DNA, 6000 bp, Homo sapiens
cagggcccgggctgcaacgtggagccgcaggtccccgcctgtgtctcccgacgcccccagcttctgagcgcgagggtgggagtttcccgagtgggaaagccccatggcttcggtggcctcggtggccctgtggtgggtcaggccggtgccaactgcgctgagggcggagctgccgccaccttgacacctgggagatggcagggccaccctccctccctccctccctgccctgtccccgactgtatcacggagcgaggatcatccgtgtggatctggggtccccttcccagacttctcctttctggtcgtcctcctctcattcattccaccttggcagcctttgtggattttctgactccgtaaatgaagttacatctagggcgcctagattctgcccctttggtttaatagctaatgaaaaaaaaaaaaaaaaagctttgccacctcctctaggtgcctggatttctcccggtgaaatttgatggaggcaggaaaatacgaggcggtggcagccccacctccttgcatgagggagcctcctagagctggaggtggaaccaccctgcttgtcccactccttttctttcttgctttattgctttcttgctttccttactttccttccttcttttttttttgagatggagtcttgctctgttgccaggaggctggagtgcagagggcaatatcagctcactgcaacctccatcttccgggttcaagcgattctcctgttccagcctccctagtagctgggattacaggtgtgtgccacaacacgcagctaatttttgcatttttaggagagacggggtttcaccatgttggccaggctggtctcgaactcctaacctcaagtgatctgcccgccttggcatcccaaagtgctaggattacagacgtgagccaccgtgcccagccttgtcctactacttttctgccctcaccacttttccttggcaggcagagcttgggctcctgctaatactgggatggttcagtggcattagatggcattggtggaggggaatgagaaattaaccccctctgaaagcgtagcttcactgggaaaaagcactctactgtctgaacaattcataaatgaattttgggaatatacaatgtcacagattaaaagcagaccatcctgtgttcttccagccccaggagcttctgcttggtgtgcaggggctaatggtggacagcaatggagtgtagatttattagagacggctgccatctggctctctgtggccccaaacctcatgtgtcagcagtgtgactctttctaaggtgctcttaggaccagatttcgtttttgtaagattggtctttgatggaatgcctactttgtggcaggcactgtgctgggcgctggcacacctttatccacttactccttctgtgttcaataaggtagctccagatatcctccactttatagattaggaagcaggcttggagaagggacttggcttgtccaggagctgatggttataaataatgagtctgttttgaaatcacatctctctaacctgggctgcgctgggcctttcatgggccgttggccctctggccttcacgggccccgtcttccataaaaaaaataataacaattggcccggcgcagtggtgaaagcgcgtctctacaaaagatacaaaaaattagccaggcatcgtggagcacgcctgtaatcccagactcggggagtctgaggcaggagaattgcttggacccggaaggcagaggttgcggtgacccgagatcttgccattgcactccagcctcaaaaaaaaaaaaattaataaaaattatattttacaactgcattggtataaatacaagtatagtccagactggattacaattaattttaaaaacaaaacattttagggctggctcatgtctgtctgtaatcccagagctttgggaggctggggcaggaggactgcttgagaccaggagtttgagactagcctgcacaacatagtgagaccctatctctccaaaaaaagaaaaaattaactgggcatttcagcatagctgtagttccagctacttgagaggctgaggtgggaggatccctcgagcccaggagttcgaggctgctgtgagctatgatcatgccatcgtattccagcctgggtgacagaggtagacactgttaacaacaacaacaaaaaaattaattaaaataagttttaaaaaattgcaacattttcctcaaccctaaatgttcatttttttcttctgattttcatggaaatggaaacattttggtttgtaagcattgggagccctctgtcttgtgggagaaaggagctcagtgtttgacttcaggctctgctgcttcctgggtacctagttccttggtacctggtccaagcagcctggataccccgggtccctgggctgcctgggccaggacagccgccctaggataaatggaaatgcagcccctgcggcttgttcaccctcctgtaatgccttctctcttaccctttggtcagggcctggtgtctctgcatgcaccagggcttagtgccatgctggtacaagcgtggggaggatgcaggaggactggcatgggatggggagcactgcctgggaagccccttcttcctggggctactggggtgctaagaaagtaccctaatagctcacaccacactttgctttctccttcatcacatgctaggacgctctagggcaattgagctgttttccccttcacccatcaagaagagatatcggcctttccgcagtcacagtctttcctaactcaattcaaactctgctgttgataaggagggctgtagccagcccaggctgcccgcttcccagcctcccctgctccgccttccgcccccgaggctgtgcaccatgtgcagtgtctggtccccaataatgagattagtcttggttgccttttaataaaacgcagtgggcaccgggagggagagcgatgcttggctcagtgaagatctgcgggtcatgctgtccctaatgcgctgattgcattaagtggattctggctgcaggtagggtgagtgggtggggacgagggtgactctcacagctctaagatccagaaactgccagagatctgtcaccctcatcctgagctgtcacagaggaaggcaagtgactgtgtgaggggctacgtgagctccctctggttgcaaggttctggtctgcagggcagtggagcccttgggggtggggagtggcagcttccaggccttgaagctgctgcccacagttctgctctgagaacacagagggcccaagaacagccggtgtcccagggctgcccagtgaggagggaagagcgagagagtattcttgctgtcaagactgggaaatgagggccacgattcaaagccttgcttcctagggagaaatctcacccaatgtccaggtttgcaaatgcagcagacacatttgtgggtgggtcagattctgtccagagataccagaatgtctatccctgtacacccccacctctggcatgggacagcccttccctgcacacaaatgggttatcaattatgtccaatgaatggcctcacgagagtcctgttgcggaagggatcttccgcttatctcctgtaaagcacagagccacgctcagaacctacggactgtggtcgcctgcaggccagccatgggctttcctttcatccttacacttagattttgaagcctcgcctttgaatcagaagcaggctgctgtcattccagaggccgctgttcatctctggcttcctcccagatgcccaggtgccccgggtgcctgggctgcctaggccagggcacccgccttaggagcaaatggaaatgcatcttcctcggcttgtttgccctcctgtaaccccttccctcttgccttcggtcagggcctgctgtcttgcacgcaccagtgcttagtgccatggtggaaccgaggcggggaggacgcaggaggactggcacaggagggggggcaccgcccgggagcttcccctgcgtcaaagcagcttcctcagtgagctccaacacagacccttgctggcctcagtctctggaaagactgacagcaccaccctagttcctgggccttggaaaggccaaagccacgagcaggcagccactgttcggcaggagagctagagatgctattgcccacagacatcaaagcaggggtgccgtcttccgtgtgcatgctgggacgggtcttggaggcccagattagctcctggcttgaacttgtaccacccttacctgaaaattgggtctgtaccaaagctcatctgcacgcccctttagggcagggaccaggccccctctgtgtggccctagcacctggccaagtgcaggtggctgcgggttgagttgagctgctatttgctgatgggaatttgggggcctgtcgcttgtcctctttgagcctccatttcctggcctgtcaaattggggcaatgctcctgttatccacacagtgtcatttaagggtgacattagagatggcatgaagtgcccagcacagagcaggtgctcacaggctgttgggtccccaccctactgacacaccaagcacacgtctgccctgccatggtggggagcaaacaatgttatggttccgactccccgggaggccaggccgggcatttcactgtaggatgttgaagccgcaggcagtcgtcgctgcgagaagagagcctggctctgatgtccactgtcttccagggagcctggtgggaaggaaggagtgggcagcggcccctcgctctgcgggcctctcctgccctttgtactccacgaggtgtgaggaagttgccgggtcacccagcagagggagaggtgatgtcccctctgttcttcctaatttgtagctaatcagattctgcctgcagccaggctctctggggatgaatctaataaaggaggcggcgacctggagaggaggacagacaacaagtgaccaggggggacagcacttctttcagtacattttcctgttagactcggggtattagagacccaaagatacccaaggaggagtgagagcgtccctgccttcgaggagcagacagggcaccgcgagggtaaggaggctccgggagagcctggggacagagtgatctgcgcaccgcggtgcctgaggagtggaggcaggggtgtgggcccacagcagggagccaggctgggccatgtccttggattctgtgagcccaggcgtctcctctagagggcctagcaggaacagtgggggctgcagatggaaacgggcaggatcatgccatgcagttggcatttcactggcactcgggggcacttacgcaggggacagcatgatgttgggagctggctttgtccctggcatgtctgtcacgttgaagagggagaagctgcaggccctgacttgggtggggcagtgaggatgctcaggagggaagtgaggggaggggtgccagcatgcggcggcctgggcagccttctgtggaggagctgaggtgtcacctgggcccggaagaagggcagccctgctagctagtggggagggcatgagagaacttggcgacgatgggagagaaggtgacttgggacgagctgggtttgaagcgtctgtgggatgtccaggtagagatgagtagtgaaccgtcagaaatggggcttgaatttggggtggcggggacagaactgatacccgtgtaggtgacagataaggacagaggcaggagttccaaaaataggatttattgttggctggggcttctggaatcccgtattcccgtccaccctgggaatgtggattggagctatgtttctgggagatgatttgatggaatgtgtcagaagtctaaaacagaacctagcccttgtttcaggattccctgcagagaagtttgcagatgaccacatcctgttgtttatttggtggaaaactgaaatcgaaagctagctaaatgctgaacaatgggaactagttggctaaaaaatggccgtgcaatgcaaga

SEQ ID NO: 7417 - DNA, 6000 bp, Homo sapiens
ccgaaccaaaggctgctgggtttgcatgtttacagactccccctggggcgagggtcagagctggctctggggagctgggctaggaagaggaggtgcagcccagactcttcctagcctttctaaaccaaagttctttgccattcctacaagcccagccttgctgctggttttttcctttcctttgggtatttgcactattttgggagcaagttttctatgtgggagccactttttttgtacaggggtaagttgggggttttcagggagcctgttaggtgcctccttcttttctttcctcaatctatgcaagcggctctggccgccatcatctcctgggatgccagagggctgcctctccagcggcttgggccggggaggggacactccagttctctagcatggcctgaggtatggggtatgtgcatgtggaggccagggtaaggtgaatggggaggctgggaggactggtgttgccctttggagcttggtgaggagggtgggcctagggcttggcgagtgccacatctggcaggtttggaaatttccaaataaatccttttgtctattggtggtgcctggacctggtccttgaacagcacagccctcattaacagactggagtcctagaggacttggcccacagagctttattggagagatacacacaaaggctgtccactcacttccataatttcttgatggacatgtttttctcactgtccttctgcatgacctaggggtgggagagagaatgaacattaagttacgaacacacacatgccctagcccactgccccagagccaccactggcaaaggcacaaagatggaggcctataccttggctactgccatctcaaagtcctcctgagtgacatggactcgccgttctcgcagggcatacatgccagcttctgtgcacacgccctgaacaggaaaaggaaattgaggccccactgctgtgcccctcatctgtggcccttgagcccagagcttcctgcctctgccctgttttcagtgggtactccaattaccttcacttcagcccctgatgctcctggcatgagctcagcaatttttctcaggttgatcccccgggtcaggttcatcttccgagaatgaatcttcaaaatgtccagccgggcctggagatggcaaggaaaagcctgagccccacaccccacccccacagccagagccactttgcacagtgtccatcacaaacctcctcattggggggtgggaattcaatttttctgtcaatgcgccctgggcgaagcagtgccgagtccaggatatcaatcctattagtagccatgataacctgagcagagaaagcaagtggggatcagctaaacctcttcctcagcctgcgtggcacccaggccttccctgggcccatcccaaggatgctaccaccttaccttgatgttcttggtggcctcaaagccgtcgagctggttgagcaactccagcatcgtgcgctgcacttcactgtcccctccagaacccccctccagccgcgaggagccgatggagtcgatttcgtccatgaagatgatagatggagcatgttcccgtgccatgacaaacagctccctcaccattcttgcccctgtgtggaggccgagctggtgttagggagcttattagcttattagctctctaaccccctacccctacctcttgcttctcacattgctagccatggttaccttcccctatgaatttctgtaccagttcagagccagagacacgaataaaggtacagtccgtatgatgagccacagcccgggccaacagtgtcttcccagtgcctggaggtccatacagcagcactccctacaggggaacagcaggactcagggcagaaagctacacccctcatttcattcagtgaacatttaccgagtgctgggtcccttgctagatgttagggatacaaaaaaaaaaaaggaacatcaaggtcccttctatccaaaccacctcaccgccctaggaacacttccccagccactcttttcagggggagggccagcccaagcaagatgcagcctatcccggtgcctccccaacccctgcagtagggctggctggggcaggaggagtaagtacagcttggccctctcagagaagccctgctcctcaccttgggctgagcaatgcccagtgcttcgaagagctcaggatgcttaacaggcagctcgatcacttctttgatctccttgatctgtttgtccagtccaccaatcatctcataagttgaatctggtactttctccaccatcatcagtgacactaatgggtctaccttgttgggcaggatcttgtgcagagtgtagctgtcattccttagagccacccggcaattgggtgtcacctgggtgaagggggcgagtttcagaagtggtacagtaagagctgaccccaccaccaccaccacctcacctgctacactcacatcattgatgtcaatgtttttgtccacgtctacaacaaatttaccttcaggatgtacctaaagaaacaagggctcatgaccttccttgacagccaccaaatcactaatcctacccaggaagacctatgagaatcccacaataccttgacagaacacagaaccctgtctcccgaggctacacacaaaggggtgggaatgcagtggagaccgagctggtccctggggtcatgctgcttttaccttgaccaacactttcttcttatccatggcccggactacttcccccacataggagccctgctcctgcagcagctgtagctcctcccgcaataggcgaactagatggcaaacagacacagtggtcacctagctactcctttggagtctccaggacccaattctacgtgcatgagctaagcatcactcttattaaaggaaggccaaaggtcaaaattcatgtatttaaggaggctacaatagggctcaggaaaaagagatgcatgtgaaactactagatgatgacagggagaaaacagtaagcactgctgtgaagacacagtgcagggagataaggacagacctcagacaaactgcccacatgcggcttcccatctttctccactcacctttagcatttagttcgttcctctgtgcctgcagcctccggaggttttggctcttatcattcacaatcagctgtggcagacaagagacaaattccattattcaagggcaggagacaggaggaggtaggatcttggccaagacctcacaggtctgaatgagctgagggaagggcacagggcacctgcatgttgtttcagattctccagtatgatcctaatgaccctgccctgtccttcaagagtccctctggaccttacagcagccatcaaagaaggctgcttgtccaatactggtccaggagtaacagaatctaatggagaaaagttacagctggctcatgtaacaccaaatttcttgcaggaaggcaacaacacctggtggaaagattgttaggtgagaaacctgagttctagcccagccgctgtcaatcaaaagcaaagtaaaggtaagacaatctatttttaaaaatctagatctgttaccaaacggcacatgggtatagcatcagctaccctgcttcaagactactaaggtgaacgaataaaaacacatgaaaaagcattcaaaaatggtaaactaaacataatacctgcaaatgcacttggaattcagaattgtcttttgtggctttcccccatccaatttatattacagttgacacttgaacaacgcagggggttagggtgaaattgaaaatccatggacctgtccaaagttaaactactaacagcctaccgtaacagtataacgtaacactaacagactactgtttatgttgtctgtaaggcttactactggaagccataccttactgctggaagccttactggtaacacaaacatttgattaacaacataaacggtcctttttctatggtttagcgctttaggctagggctctgggttgcccaatttctttcattcagtctctatggaattagcattgtccagatccctcaatgatgcccttcctcacattctcacttcaccctcacccaacctcttggtgataaatttcaactcctgagcttatgtttcccttttataagaatccttttcattcgggcttcttccaaaagggttgacctttggctagaggtacctttactattaagatttgactcgaagatgtgtaacaaactgtgaacactaagaccctcaaagagatgggactggaggagaacaagagattgcttacttctgatacatacaccctactagctaagaaacaaacaagaaaggagaagcagcagcttcttccactgcactcccaaaggaattagatggatttgtggaagtccgtttccatcccccatcatcacccttcctagctccctctggagtccgtcctcacctggagttcttcaatcttggacagataatattggcggagtccgctgcctgccttcccctcctccagctccatctgaagacacagagtgagtcttaaacgacaggttaaacatccgagggggtaaagccacttgcagggcactttgaataaggcttgacaccaggtagctttgcgtagtagaaaaagtttggacttcggaggctcaggatctgggttctaatccctccctcccttggaaccctccattttcccaggactaaaataaaagaatgggaacgccgcctacctcatacgacttttaggaggaccgagaggcgatatgatatagacggggggcgctttgcactgcgtgaagtgctctacaagcccgaggtgtcagtactgacgaaggagccagcggaacggagccaaaggactggcgtcccgtctcctgcgacccgtgggccggccattcccgcgcccatcgcttccctcactcactccgcttctaccgcgtcttcctctcccagccttgccctgactcaccgagggcggcgctgacacagcagatccggtcgcaggcagcgtccagcatggactggtccaggcacctccgacccacccgacgctcctgccccggcccgctctccactcagatcacgctcgctccgcacccagccccgtaacctgccgggccgccactgcacccgccatacctgctctggtccgtcaagcgccatcttctctcttcagcagagaccgccggcatccgagccgtcttggcgcgcaagcgcggaagcggaggattgggacctgaagaccaggcagagaagaattccgggtcaatgggcggggtgtgcggcgagaccacactaagggaaccatgatgggaggggcggctactcgagttcaggggctttggaaggggatgaggaaggagtagaactcctcctcagtgttgcctcattgaaactctgtttatagttcttgtgatatgccttcctagtctcaactttcaacttacaaaacccaaggacagagtattgagaacaatctagggccacactcaaaatggcggaaaacctcgagccagggacgcaggggacgcaagcggaagcggaagtagttagctgcatacttgtgcggttccaagtgtggagaaagcggctctgggtctaggtagtgtgcggagaggggcgcggggtggaattgctgcgggaagtgggaaactggaagtgggaaactggaagtggaatctggtgctccggaaagagacgttcccaacttctactttctccccagattgagggatactccccctttccaccatgggcaagaagggcaaagttggcaagagccgacgagacaagttttatcacttggcgaaggagacgggtgagtccggattcgctcagtctgcgagcgagcgagcgatctctgcccggttcgcctgctctttgcgaccattatgtacctctcctgcagaaggggtggtcggttgcgaggccggagaaatcctactagtgaagcagtttgcgcacttggttgttttgtccaggttaccgttcccgatctgctttca

SEQ ID NO: 7418 - DNA, 6000 bp, Homo sapiens
cgtgtaccaggctatcagccagcgttttacaaatcatcacactttcctctcagaagcccttgagggggggtctgaagggggtgagaggggctccctagtatgaaagctcagacgttgggtcccaactgcctggattggaatcttggttcagcctcttgctggctgtgtgccagctactgcccgccatctactgtaccatgtctcacgttcttcatctgtaagaggcataacaacagtatcgagtcataggcttgttatgaggatgaaatgtgatgatacttactgtggagtgcttagaacagtgtgtggcatatgtagtaagcatgtcacaaacgttggctattattattatcccattttgcagataagcaaactgaaggtcagagaggttacacaacttgctcaaggtcacacagccttataattccactctgccagactgagctcacagtctctgttagtcagtctataggctggtgacacctctagtttctacttgtggttttgattagctggacgctatgtgaattgagaacactttcgtattccgctgaaacagtgtggtcctcatttctaagaagttcccgggtgatactgatgccagcagcagcgtcattacctgggaacctgttagaaatgcaaaaaattctcaggcctccctccagacctactactcaggaactctagggatggggcccggtgggctgttgcggcaagccccccagtgatcctgacacacgttcaagtttgaaaccccttgctataaaatatgtgtctcctaaaaccaagctgctagcttacattcaataaacatttacctagcatgatcttggcagttcaaagaggaatgtgccagaaaccaagcaaagaagaaaaagaaataaatggaaatggaaagtgatctgctcagaggccacaaagttgagggaggaggtttccagagtgggatttggcccaaatgttgcctgaggaagtacgtaaaggggtctcaactctggctacacaacagaacagcaggactgtgtgtgcagctcacgaagtgggtacacagggtaatctgcaagttctgggtggatctagcacctggattgttaaaacttgcatagatggccagcgttcatactttctgcttgtttgtacaaagtcattcttctagagtaattgttgtaaaattgctaggcaaggtggcaggtctgataagatttgatgacgtaatggctcttagtcgctaataagaggcttttgtggagtggcgtgtcacagccagcgaaggctcagctctgtgatcttcgcctgcctcacttgggggaccagaaggcagcttgtcttggaactgcctcattcacagaagaccccattgagtacagaaactgcacatcaaagggaggagtaaggaaaacaagatggtgaatcctcaaaaattaaacaaaattacctttttaattttttttttttgtagaaacggggtctcactttgtcacccagactggtcttgaagtcctaggctcaagcaattctcccatctcagcctcccaaagtgctggatttacaggtgtgagccactcacctcagccagaattaccactgaaaaaaagaaaaaaggttaagatggtaaattttgttgtgtatattttaccagtatgatccagcatttccacttctgggtacatgccccagagaattgaaagcagagtctcgatcaggtatttgtacaaccctgttgatagcagcactattcacaatagccaaaggtggaagcaacacaggtgtccctcaatatatgaatggatgaacagaatgcagcacacacgcacaataaaatattactcagccttcaaaaggaaggcagttctggccaggcacagtggctcactcctgtaatcccagcactttggaaggccgaggcaggcagatcacttgaggtcaagagttcaagaccagcctggccaatatggtgaaaccccgtctctactaaaaatacaaaaattaggtggacatggtggcagatgcctgtaatcccatctactcaggaggttgaggcaggagaatcccttgaacctgggaggcagaggttgcagtgagctgagatcacaccatcactgtcctccagcctgggcgatagagcaagactctgtctcaaaaagaaaggaaaaaaaaaggataaaaaaaagaaagagccagaaggtgaggtaccatgatgccaaccttggaccaatcatttgaccaggaaggtggagctgagtaggaagatggaagcttcccaaaaaacttgtctaaagtagaaaaagaaggggttatctttaaaaaagggtgagtccaaacatggctcctggagaaattgtcccaaatgggacatccacccccatttgtgtctatgacagatgccaccaaaacattaaagtcacgtgggcccttcaaagctctgggccctgctgcctccttcccaccatagtcattttatattggctctgttttgccagcagtatgacaaggagattccaaaaagaactgagctgaagaaattgatgcacacaagcaccaagagaaattgcgccagagcaatgtgtggccttgactgtcctcctggcctctgaatggtctaatttgtgactttgctaagccagaagtttcaatgtgctgtgaggctggcccgtgggagcaagatcctctgctcgtgggtgagcctagctggctgcccgccacccacctctgcacccagtgttcatactttctgcttgtttgtacaaagtcactcttctagagtaattgttgtaaaattgctaggcaaggtggcaggtctgataagatttgatgaagtgataggtcttagtcactaataagaggcttttttggaatggtgtgtcacagccaaggaagcctcagctctgtgatcttcgcctgcctcacttgggggaccagaaggtagcttgtcctggaactgcctcattcacagaaggccccagtgagtacagaaactgcacatcaaagggaggagtaaggaaaacaggatggcaaatcttcaaaaattaaacaaaattacttttttttttttttgtagcgatggggtctcactttgtcacccaggctggtcttgaagtcctagactcaagcaatcctcccacctcagcctcccaaagtgccggatttacaagtgtgagccaccaagcccagtcagaattaccactaaaaaaaaaaaagaaaaaaggttaagatggtagattttgttgtgtatattttaccattatgatccagcatttccacttctgggtacataccccagagaactgaaagcagagtcttgagcaggtatttgtacaaccctgtttgtagcagcactattcacaatagccaaaggtggaagcaacacaggtgtccatcagtatatgaatgcatgaacagaatgcggcacacacgcacaataggatattgctcagccttcaaaaggaaggcagttctggccaagcgtggtggttcatgcctgtaataccagcactttgggaggctgaggtgggcggatcatttgaggtcaggagttcgagaccagcctggccgacatgatgaaaccccatctctactaaaaatacaaaaattagccagtcggcacgtgcctgtaatcccagctactcaagaggctgaggcaaggccaggcacggtggctcatgcctgtaatcccaacactttgggaggccaaggcgggcggattgcctgagctcaagagtttgagaccagcctaggcaacatggtgaaaccccatctctgctaaaatacaaaagaaattaaccaggcgtggtggcgtgcacctgtagtcccagctactcaggaggctgaggcaggagaattgcttgaactcgggaggcggaggttgcagtgagccgagatcacaccactgcactccagcactccagcctgggcgacagagtgaggctccatctctacaaaacaaacaaacaaacaaacaacaacaacaacaacaaaaacactgaggcaagagaatcgtttgaacctgggaggcagaggttacagtgagccaagatcacaccactgcactccagcctgggcaacagagcgaaactccatctcaaaaaaaaaaaaagaaagaaaagagaaagagagagctccagagatggatggtggtgatggttgcagaacaatgtgaatgtacttagtgccccaaactgtacacttaaacataattaaaatgggcctagcacggtggctcattcccagcatttgggaggctgaggtgggaggattgcttgagctcaagagtttgagaccaggctgggcaacataagcaacactctgtctctacaaaaactacagaaattagccaagcctggtggctgcacacttgtagtcccagtcacttgggaagttgaggagggagggtcacttgagctcaggggtcagaggttgccacgaactgtgattgtgccactgcactccagcctaggtgacaaaagcaagactctgtcttaaaaacaacacaacaaaaaattggctggacgcagtggctcttgcctgtaatcctagcactttaggaggccgaggaaggcagttcacttgaggtcaggagttcgagaccagcctggccaacatggtgaaaccctgtctctactaaaaatacaaaaattagccaggcgtggtggcaggtgcctgtggtcccggttactctgcgggctgaggcacaagaatcacgtgaactcgggaggcagaggttgcagtgagccgagatcacaccactgcactccagcctgggtgactgagactcagtctaaaaaaaaaaaaaaaattgaaatggtaaattctgttgtgtacgttttaccacaattaaaaaaaaaaaaagcggaatgggagtggagctaaatgaggctagtttagggtgggaaccggggcacaggaagcacgtcacttctggtggggagtggggggagggagaagactgaataagccgtgaactgggcagctgtgacacgcgcaccttgtcaccttgtcaccaatttcctgcccgggatcccagagctacccttcttggagcccacaggggtaaggttgagcttctcactttccctccaatgaagcgtggcagcatgggaaggattttggcagtgtcgaggtctgagttttagtccgttcccctctctgggtctcagtttctcgctggtaagtgcaggggttggggaatccccagcgctcctgtggctcgacattctgcactctgtgaagctcctgccctgccctgctgggtctctgagctcacgcacttgccctggcgctcctttcctgatttgtctcccctctctccttcctctgctctgccatctcggtggccgatgtagaaatgtggggctgcctccttatttaggggcccacgtgggctgtgatctggaccatctgagctgatgcagaggggaagggacagtccctgttctccccggcaggcgtggtgggttcataatgaatctcagtcactcacttcctacctgcctcggttcgagggggtctttcctaacccatggctcacattcccatgaagcctcttctttctaggcacgtagaaaggccctttttcccttttattatttttgtaaaatttactaggtaacgcataaaaagcttatgtaacatacatatacatcatactgcacagtaatataccaaacacacctgaagctgccactcagcacaaggatggagtatcaccaaactgcaaacaccacttatctgctttttttttttttttttttttttgagacagagttttcattcttgtcgcccaggctggagtgcagtggcacaatcttggctcaccacaaccttcgcctgctgggttcaagcgattctcttgtctcagcctcccaagtagctgggactacaggtgcgcatgccaccatgcccagctaatttttgtgtttttggtagcgacagggtttcactatgttggccaggagagtctcgatctcttgacctcatgatccgcccacctcggcctcccaaaat

SEQ ID NO: 7419 - DNA, 6000 bp, Homo sapiens
ccaccacgcctggctagtttttgtatctttaatagagatggggtttcaccatgttagccaggaggctggtctcgaactcctgacctcaagtgatctgcccagctcagcctcccaaagttctgggattacaggcatgagccaccacgcccagccttaaatatggtttttatttgaaaaaaaaaaaaatccctagaaacatgtagtggagacacagctttaaagctctgaatagttgattttcagctcatgcctgtaatcccagcacttggggaggctgaggcgggatgattgcttgaggccaggcgtttaagaatagcctggacaacatagtaagaccccatctctaaaaaattaaaattaaaaaataaaaaaagagtcgactttatttctgtaactggaagaatctagctaacatttctcaagcactttataggtgccaggaactctactttaagtaattaaactcaggttctcatttatacttacattccttgtgcctattgtatggataagcaaactgaggctcagagaaatttagggacttgccaaaggtcacacagctttgttagtagcagagatgagatttggcccaggtctggctccgtgcacttgatttctgctctttagtatctcctggttgagtcactggaatacacagcatagcttaaaatgaaggaggaagtactgaagaggtaatggaaggagacctaactgtctctgagagggaagagagtggttgggagggaactatattaattgaggagtgcagagaaattaatatggtccaaaggaaaaaaaggtttttttgagatggagttttgctcttatttcccaggctggagtgcaatggcatgaccttggctcactgcaacctctgcctcccaggttcaagcagttctcctgcctcagtctcccaagtagctgggattacaggcgcccaccaccacacccggctaattttgtatttttagtagagatgaggtttcaccatgttggccaggctggtcttgaactcctgacctcaagtgatccacccgcctcggcctcccaaagtgctgggattacaggcataaaccaccgtgcccggctggtccaaagaaagttgtgtgtcgagagctcatccagcaggcttcttaaatcaggagcttgtaagttgcatataaagacaaaaaagggagttccaaagagtaatgctgtgggaaatgacttgaatttaaaccgtcaccttgtttcatctcatggactggtcagacaccatttttgttgtcgttgttgttgttaaattaattgctcagaatatagcagcaggcgcaaattgtagtactcgttttaaaattgaagattaaattttaaattacccaacaaaggcctaactttgttaaaagagagggaaaggacaggttctgccagtatctctggccagctagctaactaacttttttcttattccaaaaaaatgacttgggaccacttataaaaattatgtattgttcaatgagatacaattaatgaggaaatcaggatgagagaaaaataaaggcagggaaataaagctatggcccatttagcacaaacgcatcccaaagattgctagaagcagaggtgaaatttttgctgtgtgttaacaatcaaagcaaaaagaggaacaaggtccattagaacattctcagaatccacaagatagaaatgaatcagttgttcagcataaacacagtgtttcctggtgctgttggaacactttgtgaaattagggacaatatctcatcaacatcccagaccaacatcccaaaagaccatttaatagcttgcatctgtgcttctccctaccccatagcccctccctccagagatgaccactatgctgacttgtaaaatattaatcttatatccagccacctttctttttcgtttgtttgtttgtgtttttgcagacagagtcttattctgtcgcccagtgcagtgttgtgatctcaacttactgcaacctgtgcctcccaggttcaagtgattcccctgcctcagcctcccaagtagctgggattacaggtgcatgccacaatgcctggctaatttttgtatttttggtagagacggggtttcaccatgttagccaggctgatctcgaactcctggcctcccacagtgctgggattacaggtgtgagctgccattcctggccttatccagccacctttctaaactcacatttatttctaataatttgtctgcagactctttgaggtttttacatatcatgtcatctgtctttgagagttttaaacattggactgctccattcactcaaaaattttaaaaaattccatgattgcattattcatacttcatggagatagatggggggctaagaaagcataccagacatagtcactttcaatcccaggtccaaatgctggataggtagcttccttgagaatgggcatggtagaaatttctggggggacgtgtagggatttgggaaaaacacctggttttatggtcatggactttcagtacatttttttccaaatcccctacagatcaattactttttctctttttttatacttatttaattttttttagatggagtttcgctcttgttgcccaggctggagtgcaatggcgcgatctcagctcactgcaacctctgcctcccgggctcaagcgattctcctgcctcagcctactaagtagctgggattacaggcatgtaccacacccggctaattttgtatttttagtagagacagggtttcaccatgttggtcaggctggtcttaaactcctgacctcaggtgattcacccaccttggcctctcaaagtgctgggattacagccgtgagccactgcgcctggcctcttttctttcttttttttttttttgagacaggatctcactctgtcacctaggctggagtgcactggcatgatcatggctcacttcagcctcgacctcccaggctcaggtgatcctcccacctcagcctcctgagtagctgggactacagacacatgccatcatgcccagctgattcttttgtatttttgtagagtcagggttttgccatgttgcccaggctggtctcgaacttctgggctcaagcgatcctcctgcctcggcctcccaaaattctgggattacaggtgtgagccactgcacctagcttcatccatattttttttagccatgtatagaacatgagatgtttgaagttgttttctgacaggaatttggagagtgaatattttatggtgctgattaaacccagattcatgtgcttggaaaagacaaccacagggaagctagtgagtgctttgagatatgtcaaggggtaaaactaagaccacaagtgggctgcagaagcacctacaggcattgccaagaggatctccaaaaagcagttcaccctggtctgctctgaagtttggatacaagtcctgacccatgggcatggttcaggatcttctagcctggaaaattttcagggcagttgcccacaaccaaccaactgacaaaaacacagcaatagctagagagcacccaattttaagcaatccacccttccgtcagcctgctactgtgaatgagcctcaatatgtgatctgtagttagctgaattctattgacagcctatggttactggatataagccaattctgttctggggacttgccagaaatgacacaattggccagttgacccacagcctagttcctagcagagattggatagctgattgagcgttgtggctgttttgaggcttgaccagagattcctgccgttggcagaggggaatctgtagtctttgcttcttggtagcaggtgaggctgaaaacgcaagtagcaggctaaaaactggtttcaagtcctcaccatctggtgaaacctcagagcccatcagatagaaaatgccagctgggactgtgctaattcggtaaggcctgggtggagaaggagggcctgggcacgaccatctggtttcggaatggaggtagcagtcatttattaagtacttaatgtatatcgggcactgtacaggagacgttctggctgttctcctgtacatttcctgcaaagacctaatgagatatgattactccatcctacaggtaaggaaactgagctcagagagtctagctgcccagggtcacacagtaaatgatgagccaggacttgaacacttgactgcttgaatcctgtactccctccaggggccaagatgtggcagctcacagaatgcctatatctttttttttttttgtcttttgagacagtctcactctgttgcccaggctggagtgcagtggtgagatctcacctcactgcaacccccgcctcccaggttcaagtgattcttgtgcctcagcctctcaagtagctgggattacaggcctgcaccaccaaacctggctaatttttgtatttttagtagagagggggtttcaccatgttggccaggccagtctctaactgctgacctcaggtgatccacccaccttggtctcccaaagtgctgggattataggcgtgagccaccatacctagctctacatctttatcacactctgttcctttgccttggtgggaaaagttgcagcttagtaccaactgcctcctgcttgagccactgtgcacagttactatcagcctggccctgtaggcacgtagaacccctggactcaatactgcataggatgggataagaccacatctgatgtggtgaaggtcaccgggatgatgttgtttctgagataacaggtatgtctgccttccttccctttgcatttagctttcacaatcaacagtgttgacatgaagagcctgccggactggacggtgcaaaatgggaagaacctgaccctgcagtgcttcgcggatgtcagcaccacctctcacgtcaagcctcagcaccagatgctgttctataaggatgacgtgctgttttacaacatctcctccatgaagagcacagagagttattttattcctgaagtccggatctatgactcagggacatataaatgtactgtgattgtgaacaacaaagagaaaaccactgcagagtaccagctgttggtggaaggtgagtccttggaactgagcacaggcaagcagatggagcatagcacacagtggcgtgaataacagctgtgaatgaatagtgacactggacttaactctccacccatcaccctctcattcatctgcctggcattttccttacctgaatacgtaagcactagacatattcccaataggccaggcccttccttccttccttccttccttccttccttccttccttccttccttccttccttcctttctttctttgatggagtctcactctgtcacccagtctggagtgcagtggtgtgatctcggctcactgcaacctctgcctcccaggttcaagcgattctcctgcctcagcctcccaagtaattgggattacaggtgtgtgccaccacacctggctaattttgtatttttagtagagatggggtttcactgtgttggtcaggctggtctcgaactcctgacctcaagtgatccacctgccttggcctcccaaaatgcttcttcatctcgtctcataaattaaaatttcttcttcaagactcaactcaatgatgtcttctctttccaaaacaaaatgggtctaccccagggtgccagtcagtacagctctgatgctctctctacattcaatggtatttgtgtgtataaaggccacagcggtgtgttaagacacctcgttctgcagtcactctgcctgggtttcaatctgggcaagtcccttaacagctctaaacttcaaaatcctcaccagtaaaaggaagataacaacgatacccatttcaggcaattattgagagggttaaaagtgtcatgtgggtagagtgcttagcaaaatttccagcacctagtgagttcctaataaatagaaatgtatttatttattttgagacagagtcttcctctgtcacccaggcta

SEQ ID NO: 7420 - DNA, 6000 bp, Homo sapiens
tggcagcctccaggccctgagaacctgtttgtgaactacctgtcccgcatccatcgtgaggaggcaagtccagtccccacagtggctttgcagggtgcagggggatgcaagtgagacagggatatgggggatcctgacccctccatgaaggaaccatgctctctgtgggctggggccaccctaggtgaaatagtggcaggactgtgagggtttcaagatgcaggaagggctgatggcctcacctgggtagaggtaactgggaaggcctctaggaggaggtggctgatgtcatttcagaggtggtggggacaaaaggggaatgacagtggacaagggcttcaggccaagcagtcccagttcatgtgtcttgtgatcttggtgggaaggtgcttgaactcccagagttctaacttctgcagctaaaacacaggaccctagctgccttctcaccccagctagtggcaggcctcagtaaatgacagaacagtggaatgctcctcgagttgtgatggggtgatgggggagtattttggggaggggtagaaggatggaacctgccaaccatgagtccaaggtgggcagggacaaggttgagggtgtgcatgtgtgggagttcactgagagcagcagccttgctcaaggggcgcacagcccaaggacagagagtctgcagtctagtggaggggccagggctgtccacagctatgagggactccgcttcctgaggcatcgccccaggacagctatgggtgatagcatctgggccctctggctctggaggtgggatctggctctgggggatggagggggggatttgttgggggcctgggctgggaaactggagctgcagggattgggctggacaggccccctgctctgccctcgcccccaggacttccagttcatcctcaagggtatagcccggctgctgtccaaccccctgctccagacctacctgcctaactccaccaagaagatccagttccaccaggagctgctagttctcttctggaagctctgcgacttcaacaaggtgggccagcctcgaggggccctgcagggagatggagagcagctgccccaataacccgggggcagggacagtgtcagactgaggggggtggggcagagctgcccctcccttgaactcagcccacttggcccctccccgcacccctagaaattcctcttcttcgtgctgaagagcagcgacgtcctagacatccttgtccccatcctcttcttcctcaacgatgcccgggccgatcagtgtaagaccagggtgggggtgggatgctgggggctttcctggcggcgaggtggagggctggctatctgccctgactcccaggagctcaggcctggcactctgacctcctaggagggaggcctccaaaatggtcactgcctgggcccctccttccccctcccacccgagtgacccctcccacgccacctgccgcagctcgggtgggcctgatgcacattggtgtcttcatcttgctgcttctgagcggggagcggaacttcggggtgcggctgaacaaaccctactcaatccgcgtgcccatggacatcccagtcttcacagggacccacgccgacctgctcattgtggtgagggggctcgtgcggccgggcccaggaggtgcaggggtggtgtcctcttggctgagtctggaggcagcggggaccccacggtgcctctgtccctcctggcacaggtgttccacaagatcatcaccagcgggcaccagcggttgcagcccctcttcgactgcctgctcaccatcgtggtcaacggtaggggcccggagcttgcactccccgcgctcaccaccaggtggtgtcaggccacaggccaacctgccacttgctccaggtttcaagcccctccagcccacagaaagaacgcaagcttgtgtacccttcatagtagccacattaaaaaaaaagggtgacaacaattgaataatatgttttatctatcatcatctcaacatgtagccaatatgaaaattactaatgagatatttaatattcccttctcacactcagtcttgtcgcccaggctggagtgcagtggcaccatctcagctcactgcaacctccgccccttgggttcaagcaattctcatgcctcagcctcctgagtaggtgggattacaggcgtgtgccaccacacctggctaatttttgtatctttagtagagacggggttttgccatgttgtccaggctggtctcgaactcctgacctcagatgatatgcccacctcagcctcccaaagtgctgggattacaggcatgagccactgcatctggcctttttttaaaaaaaaaaaatttaacaattttttttgacatctgaaggaggttagcccagtttatgggagccactggtagtccgataacatttttactttatttatttatttattttattttattttattttttatttttaagacagagtctcactctctgttgctcaggctagagtgcagtggcacaatctccattcactgcaacctcccaggttaagtgatcctcatgcctcagcctcccaagtagctgggatcacagcatgtgccaccacaactggctaattttttttttttttttgtatttttagtagagacagagttttgccatgttggccaggctggtcttgaagtcctggcctcaagcaatctgcctgccttggcctcccaaagcgctggggttacaggtgtgaaccaccacacccggccatatttcattttatttctaattatagtgacgggatctcactatgtttcccaggcttgtcctgaactcctgagctcaaatgatcctcctgcctcagcctcccaaagtgctgggattatacaggcgtgagccactgtgtctggcctcttgtgtgtttcatatgtgcagcacacgtgttaggactagctgtgtttcaagcacgaaatggccacacgtggctgatgtccactgtgttgggcagtgcaggtttggacatttggagtcacagtgtatggggatgtggaggccccaccctttctgcctttgtcctccctgtccagcccctacccccacccagcaaggactgcacacagctgctggggagaggaagcagaaggagccaggctccctggggttcaggacctagcaaggcaggtggccatgggctggggcaaaatgccttcagtgtgaacatcttttggagaggatggttgtggctaggggtggctggtctgtctgtgttctggtttagactgcagggtgggtagtgtgcggtggtagaggcctctagctgggctgtgagctttggggtcaggactgtcccttcccctcctggttcactctctggctccatctcacaaatcttaactgagctggttccgagaacacacttgtgaccaagacagccctggtccctgccctgtggagccctcagcctagtgagggaaaatgacacaagacaaggaagtgttcagatcagcatggaacttcagtctgggtgtgcccccagggttgggtcccaaaatacacctctagtgacatggcagcttgacgttctagaaagatttaaagtcttgagtttgtatccctgcccgatcatttcattactggggaacttgggccaagtttacaaccttctctgagcctcagtttccatgtctgtaaaatggggatgatcttgtctgtgtcctgcctccctcgtggtatgggggggactggcatgggtgggatgtgtatggctttataagcaggacagctgtcttcatggtcgaggggtgagggtggggcctaactgcctcccaggactctgcacacagtatggccagtgtggactcagcctcttagggccttggtcgtcctggctctgcagggggcagggagggattgagagcaggagcctgttgttccaccccggcccaggatgtgcagggatggcttggctgaggggcccaggagtgagctgacccctcccttacagtgtccccctacctcaagagcctgtccatggtgactgccaacaagttgctgcacctgctggaggccttctccaccacctggttcctcttctctgccgcccagaaccaccacctggtcttcttcctcctggaggtcttcaacaacatcatccagtaccagtttgatggtgaggcaccagcctgaggccctggtggtcagggtggccagcgggcctacttcctacataaggggggcacagcccaggaggtggcctctgggaggtgctggcctgcttgccttctgcccccagttcattcattcagtgtacatttattgagcatctacagtgtacctgggtgcaggggatgcagtggggaacaaagctttgcttcttgccctgtggagctcatagctggggatggaggcagggaaggaggcttcaaacagatgatggacatctgaaatttttttttttttcccgacggcgtctcactctgtcgcccaggctggagtgcagtggcgcgatcttggctcgctgcaacctccgtctcccaggttcatgcaattctactgcctcggcctcccaagtagctgggattacaggcgccccccaccatacctagctaattttttgtatttttaatagagacaagcaatctgcctgcctcggcctcccaaactgctgggataacaggcatgagccgccacatctggcctgaaatgtgataaaagggaagtacagagtagtaagtccctgatgggtatcttagcagcccgtctgcccagtgtcacagacatccggctgcctgctgtcacttcaagccttgccactcgttagccctgtgaccagggcacgtcacttgacctctctgatcctcagttccctcatctgtaaggtgctcataacaatggttctaagggtcctggtctcagaaggtgttgggaagatggggcaaaataacccccagaaggcacttagcacagtgcctggcaacttaaaaatgatcagtttctattattgctatttccaaagtcgggcaaatttgcagtgatctctgagggagaaataggggtaaggtggggcaagagacagcacatgcaaaggccctggggtgggatgttggaactgaaagtgaagagtatggcataaggcaggaccagagatggggactggggcctgagagccaggagaagtcagcgttgggggatggacggatcctctgtgacttctcctggccaccttgctcgaggggaggtgggaagagagtcagaatatttaacagctggcctgacgtggatgctgccatgctggggcctgtactttttgccaggtgttagctgtttagtgctgggttgtggcgggaactcaaaggcactggggcgggggtgttgtgaggtgctcaggcctgacattctgggatagccatagtgggcacacacagccagtgccagccctgccccagcaccctctcttgggctccctgtaccatctccaaccccttgggcagacaccctcctgtcctccaaactcccccttccaggaagcccacccagattggacggggggagctggagggggcctccctgaggcgaggcatgctccctgcccacaggcaactccaacctggtctacgccatcatccgcaagcgcagcatcttccaccagctggccaacctgcccacggacccgcccaccattcacaaggccctgcagcggcgccggcggacacctgagcccttgtctcgcaccggctcccaggagggcacctccatggagggctcccgccccgctgcccctgcagagccaggcaccctcaagaccagtctggtggctactccaggtctggtgctagtggatgggacaggagtgtggatactggtgtggctgggggagggacatggtctcggggtgtcacccccatctctggcaaagagcatggcttatgtatggaagccgaggggatggggctgggcaacagggatggggggagggtactggatgggcttagcatatgtagcttggtgttgggggcaa

SEQ ID NO: 7421 - DNA, 6000 bp, Homo sapiens
ccttcatgttcctgccccttggcagaagggcccagaaaggaggtggggctcctacacgctctgcccaaccaccgccccaccttcccagtttaggagttctttcctgccctggtcagccaggctcgcacacccctggcacccctccctggcactgaccagaaggaggccactggtgatgggggatacagagcccatttactgcacccccccaccccctccacaccccactgcccccatctaaagaaatgagatgccaggaaagagcctggagcagacctggctgtcactcacacacacagtccccaacagagctgatttctccatttctccttcgggacacagcggattcttggtgctcatccttcagcggcctcccaggccggcgcctgcagcagcgccttgtagctccgggcagtgcagctatggcttctcgttgttggaattggctcccccttcccatttggacaccccctgcacagccactgggcaccccgccaccttttccctccacaccatcctgctgggcggggaaggggtgcgctgggcacagtgggacagctggggaggtctcagcagagggacagtcctttgcaccaggcgcagcaggctcctggtgctcacccacactgctgcccttctgcagcgtggcctggagtcctttggttaaagcagaagtctaggtggtagctgtgccattttccaagcctggcgacccagagcagcttgtgggaatcaccccctacttgtcagcagaaaccagcggtctagggtccgagcaggaggggtggtttatgattttggaatcagaactcaactgccctctcatggctgcatgccaagccacccgccgggcagccctctaacctcacagctgctctgccggtgacaggccctgtctcccctcccgctgctggcatcagcgctctcgaccctcagcaggaaagctcttcaccctgggtgggtggggggcgggcagtgtaagcacagccaggaggaagagccctggcaggagccccgagtcctcaggtgctgaggatgctgccgcttggcatgaccaggtttgctgcatttatatttcaggattgagctgacctctgacctcacttccctgtagcaagttccttaggtcctgagccacaaatattcttgcaaatccttttggtaaggacactgatttcttagactagtggtgctccccttctactgcgtgctaacgtgcccccaaacaactgacgcggcctcaacctcccctcctccatcgccttcataaccgattaatacatttcccacctgagcccttctcattcttctcaagcacgaggaatctctggcagaagaggccccgtctgggggcagaggttcctggaggggagttaagtccctgagttcctggagggggcctaatgggccggcaggttggggtgctagcgccccctcgcaaggctgggggaactgtcaccctgggacctcaggcttcggaaatgtggatgtcgtcaccctgcagccttgggtctcaccctgagaagatgaggcagcttctgcacagtgcacagcagatactctgagaacggtccgtgctcccaagctgtgagacaggcaggttcttaggatcagggcaagggttagcagacaacggccgggccacatctgatcccccacctgcctgtgccaatccagcgtggcagtagtagcaacactcacccattttcctgtggtctgtgcctctttgtgccgcagtggccgaggtgagtcactgcagcagagaccacacagccccccaaatctaagtagtatctggctgtttgcagaaaaaggttgcagtccctggacagaggctagagggggctggacacaactgccagcccttgaaggtccctggggacagaggctgctcaggcagatggatctggagggcctcttagaacaagaaagaccaggcctccggctgggggtgaaactgccactgccacccacgtccagagctgggaccttggcagtggggagggaaaatcccttccccttattttcagagagtagaccctctgctgcccatccttcccccactggatctttggaggtctctagaccaccaacccacacttggctgttctgtgggaccgagactgtgcccgaggtgctgctcctgggacgagggaagactcctcgactcctctgcatgctgcagttaccactttgtgccctgaattgagaaggaggggccggaggacttcttggggcaggactggagttcacgttcattcccatcactgcccagcccgcatgctccctgtggctcctaggcatgccggtggcatctgcttgctcccccacacctctgcccccctgcatgtggttgcccctcgcagcactgcgtggggtctccgcggctccacatcacgctgtcctcacacggtgatgcttggggttgcagaggctggtcagtttggctttggctcttcatcttcagcacgatggttctcatgggggtggggagcgctggcagctgtgagacagttctggtcccagccaagtccagggaaccgccctagaatcatcagtatgaaaaataacatgcctgttgttatcaaaccactaaaaccacaggccagctagcagggtgctctctctccgcctgtcaggttccaccctcccggcctccatgcctctgatgcctttcccagctctcagggtccagtcgagttgcagctacaagctgcacgtcccctaactttaaatttactagctcagccaacagatctgcatctagaacctgaagctttagtggttgccagttccagcactccccaggagcttcagttcacaggctctcatgacaattaggaagtgggactggaagcagaaggcccccaattagttccccgacatgctgaagtggtcagtctcatccttgaactactcacagatcaaattccttccgcctggggccagaaagcggtcaggtctgtaaatccagaggcagctgctgcttaagatcctgcttgccactgtctgcccgcctcctcagctctcccctcgggccggagtttcacacacttcatgcctctggtggcgtccctgggttccgctgaagctgctgtgggaagtgccacctccagtttcacagtgtggctaggacagtgggcttgcaggctggtgacagctcccctgagcaagaggcctcctcctcctcccccagagctagggaagctggcagggcttggctggcttcacagcttggcaggagaaagaacaggcgcggctgtcagctcctctccatcacttcttcccaccttgtggtctcagagggaaaatgaacccaggctatagactgggctggctctgatagatcaggacccacccctccatttgaggtctgcagggctgtcttgactcctctggaaatggacatgactctagaggaaggtgctagtgtggtaaaacagggaaggggaggaggaggccaaggaaccccagctgtggggtagttctggttcttccatctgatgtatgcaagaaactacagacaatagacctgccagtgtgaatttccagctcaggctggaaatgcgtgctgactgtgaccaccaggagagggcgtcagagggacaagatcagacctgctgggttctcagtggtcccagggctggcagtgtgtcttggttcataaaagacgggcatgcagttggctccatctggaagcgtgcatcctagggtgccagtatcccccgaggggacaaaactcagccagcgggaatgggaaattatctagggtgataggaatattgtcagcacaaccacacaacccaagatcagaaaggcccttggcaactcaaatgcccaagttccttccttaagtaccctgcagaggctgaacagggtctgtgggctgccaggttctgtgcgggatcaaggggagctctgcaagctctggccggcttggcggcacagactgtcttgctgcaagcgatgagaagcaaatcagcagtggtttgagaaaccagagtctagcgcagcttctgcaattccaaacattctccttcctcgtccccatttccccctttccttgcccatggtgcaggatggaatgagtaaaataaattatctttttctccccatttctctttacagaactgaagaataacgaagttatccttagcgtcctcctaaaggcttttccttttggcatcttaaaagcttgagagataaaacggaaaccccagagaggagtctgggcaggctcccagggtgcatgctgcctccataaatctgctgagctctagaccctcaatcaggacttgtcccttggctagcaggatcctgggaacacctttggccctgccctgtgtagagatgttcatgtctgttcctgtgggtcactttgttaagctgaagagttttaagaggtagagctcagaccctggactgggatttttcttaccactcaaacttgctatccacacaccctgcacaccttagataaaaagaacattttaaaagcagagttcactttcactccagtctcccctcttttgccctcactgaagccaaaccacagaagactttgaggaatgagagacaaatgaggtagagctcacctgtgctcaccagctccgtcagggtggtcagccgacccctttccctgggaaccccacttctctctgtggctggcttggttgtcgggggtgagatgccatattgattacagggcagcaaagaaccagtaccaggaatttacttgaccattccccttatttttcatctagaggaatctcggattcagccctttcattgctaagacaccttttcactgaggttcttaccagctcagccaaatctccactctgctatagcagaagcaataatgtttgctttaaaaagatttcttgacctatgccttttcttagaaagtttgatagattagttagaacttcagatcatcagatcagtctcaaatgggtttcttggaattttatatttgacaatatttatactataccaaactcatttgcagttcttaggtttgttggttaaaacatttttttaaagcagtaagtttatagaaaatgttttcatttaatggaaggctggggaatgtccagcatcaacccctatggcatgcattcccaggggccttctcatctgggcctggaacctttggttcagggcttaggggagaacaggccacatggcaacagccacacagtcattgccttcaacacagagccacgtgtccccaaacagcaatagtcatgcccttgtccaggctgggatctaattgacacaataggtcgttgactccctcctagtagagctatctaggtttgtctggaaagtttccgaccctggcttataggcaccacacctcatgtactcctcatggcttggatctctgtattcagcctttgttcagtccaataaactttgagtagatgatctcaattactgtgtgttttttcagtttgctttgttttaaaacaaaatcccttttgaacccattgaagtttgacctttctttcattttgatgcctcttactctgcagcagagtacaaagccatacatccaccctgttaaaaaatatgcagtcaccatggctgtcaaaaccacatgacatgatctgtgttcactcagggacatatggattgtgcttccatccacagagctcagcacatcctttctgttcacgggaattcctcttcttcttctttttttttttttttttgagacagggcctccctctgttgcccaagctggagtgcagtggtgcaatcacagctcactgtggcctggacctcgtgggcttaagtgatcctcccgtctcagcctcccaggtagctgggactacaggtgctcaccaccacacctggctaattgttttatagagacagagtctgactatgttgctcaggctggtcttgaactcctgggctcaagtgatcttcccatcttggcctcctaaagttctaggattacaggcatgagccactgcacctgaccctctt

SEQ ID NO: 7422 - DNA, 6000 bp, Homo sapiens
ttttggggagaaggaagggagggacaggccccgccgggctgccagccacctgatagtcacaaacgttgtagccgtaggactcacagctgctcttgtctctgccaatgcacagtatggtctgacccagggagacggagaacatccccaagctggccagcttcagcaccacgcacctgggggcagggaccttgtcaggtggaggggcccaggcacatgggcaccgggctctacccaggctataggtgtggctgatgtccgagtgggatcatgttgtgtcctgggcccagcctccttccaacctgctctgtctgtggcaatgtggtccaaagtgcgttctcagagtccgagtctccaggcgattcatgggaaaaagggttctgtgttttcgttttgtttcaagaccgagtctcactctgtcacccaggcaggagttcagtgttgtgacctcggctcactgccacctctgcctcctgggttcaagcgatttctgactaaattttgtattttgagtacagacagggtttcgccatgttggccaggctggtctcgaactcctgacctcaggtgatccacccgccttggcctcccaaagtgctgggattacaggtgtgggccacggcgcctggccaagggttctgtttttagatcagtttgagaaacactgcacagtccagccatgttccctcatgcctggtgtggagaggcacatgcagcaagccctgcggtggagaagcctgtggccttttcaggatcctgactgcaggcgagctcctcctttcctccgccgcctatggacattgaagcccactgacacaagcttgcatgtcataaacacgtgccacacatatgtactgcacaatgcatgaccagaccaaataggtgattgtctaaacgaaacatcatcacatgcatgttatctgtttttgctttttttttttgagatagggtctcactccattgcctaggctggagtgcagtgacgcgatcacagctccctgtagccttgacctcctgggcttaagtgatcctcccacctcagcttctctagtagctaggactgtgtgtcctagtctttcatcatgcccagttaatttttttgtattttttgtagagacggggtcttgccatgttgcccaggccggtctcaaactcctgggatcaagtgattctcccatcttggccttccaaagtgttggcctttacaggcgtgagtcactgtgcctggttgcgtgttatctctaagggtgaacattcccactgctgatatggggctacagagtggctgggaacagtggttctcctgttgagggagctaggggtaggtgagagctttttttgttttgttttcttttttgagatgaagtcacactctgtcacccaggctggagtgtagtggcgcaatctctgctcactgcaacatctgtctcctgggttcgagtgattctcctgcctcagcttcccgggtagctgggattacaggtgtgcaccaccacacctggctgatttttgtgtttttagtagagacagggtttcaccatgttggccaggctggtctcgaactcctgacctcaggtgatccaccttggcctcccaaagttctgggattacaggcgtgagccaccatgcccggcctcaaaaaataaagtttcaaagcaaaccaaacacagctgactttgaggaagcagagggaaaagcagttagggcaagtggtgactgagggtggcgtgagggagagaagccagtgggagctcaggtgggctttacacaagaatttctgcagctggatgaggggtggagaagtagggggtctagacaggacctaagtgctgagacagaagatggcagaacctgggagtggtagtcccagctgctccggcgggaggatcgcttgagcccaggaggtcgagggcttgcttttgaacttgcacctggcaggcacgatgagcttgactttggctgggcgcttcactcatgtgaacctcagtttcctcatccctcaagggggatgaggatggtctggacttcacgggtcacgtgagggttgtccaggtaaggggagtaaaccctcggcatgtagaagctctgcatgtcccgtgttgctggttttcctgtgtgcaaagcccattcccagcacccctggccacagtcccttgctccactgaatggccggagcttggtccagactggcggcttcctttggaggtgggggattggaaagccttagacctggggccctgaggtcgtgtgctgtgaggtgtgtacctgccttcccttgggccactagtgaagggggaagcctctcagctggggaccccaggtgccaggtgacaaccaaaagagagcagcaggatgcagacttgttacatgcccacttgtccccaccaagggtggcactcaccagatcagagtgaggttgacctccgtgttgggagggtagttctccagctggaccagaaatgtgaacagcaggggacccaggaagttgaccagggcgatgaccccagggggcaggtactggagcagcagaaacagggactcctgcgggaaaaggcaggtcaggggagcccgcgtgctggggggcccctgtctgctccccgccccccacagtgccctaaagtgtaactctggggcaggcccagaatagggtcgcctgtaagctattccctgcagcagcctggcagttggcgggaatatccagtgggagcccgcctgccttggccgtgacctgtggccacgaccgattgaacctctctgagcctcggtttcctcatctgtaaaatgggatcatcctgtctcacccccgcagttctggccaggattaaatgaatgcagttgcctgacacctccttgttgtcctgtgagtacttggtagcccagaagatggcgctgatggccccaaccaccaggagcccgttgagtacgttgacccgcaggtaggagagcaggcggcaggccgtctgggcccgggtctgctgctgcatcagctggaagcgacggccctcctccagctccacctgcccggaagggtggggacagaggcagctgcaggcggggtgggcatgggaggaaagggtgcaggaaacgctctcacacacagtcacaaccattcacgctcacatacacagtcacaaactctcacactgtcatgctcccatagacactcagattcacacattcacaggcgtgctcgccatcacccattcagtcacatgtgccctcacactcggccacacatgcacacacattcacacgctctccatcacgctcccacaggctccctcccacacacgctcacacacactggcacggtcgcacttgctcgcacacacctggaacacgtggctctcacgcactcgctcccatatacctggagcttgtggatctcaggcactcactcgtgcacacaccttgaactcgttgctgatctcatgcttcttgatggtggctgcttcctgcacccggatgcagaagtcccatgaggagaagaccttggcgctgagaggcgcctgatagccctgacccagcagagtcttctgcggcagccccttcaccatcctgcggggcaggagaccaggggctgctggaggaggggcacctctaccatccagcctcagccttggctcggctctgggtctgggaaggcccctgcagccccaggtgcaggtcctggtgagtgaggagtcggggtagggggcggtggccctgttcctaaggtttgcggccagagcctgggctgaggaagcacccaggagcctgctgtgccgggccatgggccttcctgccaatgggagggtaccctgccaaggaaggggtgatcagggaagattccctggggaaggggtgaaggtgtggacctcgctctcaccgccgcagagtcccacagaagcagaggagcaggcaggccagcgggctgaggaggtaggccaggcggatgctgtacacggagctgctctccggccccactcggtacgcaccgtagaagagataggtgttggtgaaggcctggggacagcgacgaagatacccagcccgggtgagcaccaggctctgctcaagtgctttccatatatgatcttgttagcccccgtgcaatccccccatcaggtagggagtgtcccgtcttacaagggcccacagaggttcggcaacgtgcccacggtcacagggctttgagaaatagagccacgactggaacccaggaaccccattggtgaccactcgatggcttcccaggatgagggtggggaagtgcttctcccagaggccggggcacttttccccctttgtccctggcaccgcctacaccagctgggctctgaggaccacgggcatgtgtccatgagtctatgttgggcacagtggcctcagcctctctctaaccccaccaccggccaggccagtctgtctaggtaagaccatcccctgaggagccgaaatgtccctggaggagcagaggtcctcttagacttgtgtcccctgaagccagttccctgggtctcccagactctggaccatagccgggacagacctcactcaccctgccagtcaaaacatgccaaagttgattgtggaacctcaaaacgccaggcggggactggcggctaccagggcactggagggctgttgaggaggaagggggtcaatagagagggatccccaaggcataggtgaggctctgcggctactgctctataacccccaaccctggggaggcctgggcagggggctgaggatgtgccaaaggcgtgccccacacaaggcgaggtcagggagagagagccccggggcctgcacggcaggaccacgcccagcgttgtcgccacgctctgggccctgggccagcccccccatggcgcaggtgggcaccggagcacttcccctggtgggcctcacactcactcaagttcagggtggggcctgggtcaggggggcggagccagaccaggggcagcagcacgaagcttgcggtgagcagcaggctcagcaggttgagtagcagcaggaagcggaggaaggtgaagtaggaccgaattcctgtgccgaagaggcctgcagtgggagagcagggtgggtcagggaggccggggccggggctggggccgcgctgagagtccaagggcgggcccaccggacggcgtggggtgcccgccaggctcccacccgcccgagtccggaggtaccgctgacagtcacctgggggtgctgcgtgggcccgaggtttgcggtgcctgcgggcggaaggggtgggaggggggaggggccgattggtcgggggacccgggtgaaggcaggtgggatgatgccactctcctttttccgatctgggcagtggggctccagagagggcaaggggaggtgcgggtcgcgcgggtcctacccccgatctcgtagagcgccccctcccagagcccaaggccccgggccagccgctgcgctgcctcccgcaggcgcctttccaccgtctgccgccggcgctgccaccgctgccagcgcaaggtctgcacccccgcgggctcccgcagctgcctggacgggggtggtgacaggggcgcccctgagtcacccgccctgcccacccgggccaagcagacggggtgctcccacaccatccgacggggcagcctcgcagcaccccccccacgcaccgtctggcgcccgcgtggcacccaccagatgaggcgcttgtccatcatggcatagggcagcccgcgcacgggcgtcccagagccgcgcagccgctccatctctgcctcccacagctcctccggctccggcaccccaggggcccgctccgatgacaccgaccgcggcagcagcatctcggcgggcacgggtagaggctggggcgccgggctgccggtgggggggatatgagtccccggttggatgagccttaaggccttggctatggcctctgtgcacgctgggctgggggcgggcccttccgtcccctctgcgccggcgtcggggcctgggctcctgcagccctagggttcactt

SEQ ID NO: 7423 - DNA, 6000 bp, Homo sapiens
actttgggatggaggagggcggggccggggaagccttttaacagagtgccctaaaatatctcgggggctagggctacggaggggaaaggagaaatcagagacccttgtttggcaggtttgtcaactgcagattttttgcagggaaacaccccaccgtccccaccccaggacactacagccttagacctccctgatcctggctttggcaactggtcagcagcactctggaggcggctgttttgaagggccaaggagaggggctgcctgagaatgaggatggcagaaaggggcccacggttttccgcctcccaagactacgagggtcgggaggcccatgtaagggggccctcgctcggagaatgagaacttccctccctagtagccttcacccccctcaatgcctcccaccccaaaagatctgctgggcccacgttccagcgcaacgcggtggaagacggccctcatgtgccagtgcggaccctcgcgcccctccagcctgcagccagccggccgctcctccagcgcgcaggcgcaggacggaaaaaaaaaacacaaaaaaacaacaaaaaaaaaacccaaaaaaacacaaaccacagctcccagcagccctcgcgccgtccgcgcgcagccgcagagcagaggctgccgggaacgcgggcccagaggcggggcgagcgcgcgcggggcggaagtcggccaccttcctccgtcccggccgttagcccagccaagcccagccaagcccagccaagccccgccgatcgcgggcaccggagccagccccgcagcgggtgagtgactgcgcccgcggccgccggcgccctgccccagccacgggcccggacccccgtcccggagcctgccgccgccctccgaccctgccgcgtcccgccccctgacccgtcaggcccccttcccgtcccacccgtgcgggatctctgccccctgactcgcagactgggctgggactctgccctctgacctgtgggaaagtccccttcttccgacaggcggtggacaccaccccctctgacttttgggacacctcatccctgggactagcgtggggaccattaccctctggttagtgtgggcacccctcctctctaattagtgtggggaccattcccctctgattagtgtgggcacctcccccctctgattatgtgactcctccccgctctgattagtgtgggacaccccccttctaattagtttggggaccatccccctctgattactgtggggcacctccccgctctgattagtgtggggaccacccccctctgattcatgtggggcacctccccctctggttagtgtggggaccatccccctctgattagtgtgggacgcctccccgctctggctagtgtggggcacccctcctgggaatgaccccctcccaccaccttctgacttcaaatacccctcctctggtctatgcagggtctccttggactgataagggaattttctccctctgactggcacttggtcaaacctgtaacaggccaaccttccccaccccatcccagtccttgctctccctgccctcatccaatttggagccttcctccaggcacacagctcactctcatcttcctgcatgcaaatgattcgccctccccaccatacctgtctcacacccctactgccatccggtctggattctctcatccttggagactggtacctccttgccagtccatgttgcctggtgcctttgcttctccctccgaatggtctttcccttgccctctgtgtaccctaggcttggcacagagcacctgtgaccactcttccatcagcagacacatctctctcccaaacacctttcccccttagtgacccctggaaaagccgtctcttagtgtcccagctccatttcttattttattcttgaggttgtatgccctatggcctttcctaccacattttcaacaaagcagaggtttggaaatgtgaggctcttggtgtcaagtgaatccggctagctctccagtgtaagggcccaaacttgaaacaagtgtcaggtcgtagaaggctcctaaaaggaagcgggtgccgcagcccttcaggatccgctatctcccagctcttcctccctctccctctgaggagctttgctgagaaaggtccctccaggcctggaccacagaccctccctgcagccccaccgcaggcctctcagcaggacagtctggctggagcctgtggaacggcagtggggctcctcccaggtgctcctccctgctggcctcaatgagccctctatcctagcacacgcccctgctgaaaggcacactgaaggagccaaccctctcccctctggacgtggcaagggtttcctgtcggggcagccccaggcatcttcacggccaggactcaggtgaagcatggatttgtccaggcactgtcatgaggccaccgcagcagtgtggggaccaacttctagtgtcactttttcatgtccaaattaacgtgatcacaaaagagaatgacatgtcacaaggtggtagagggaaccctccactcgcagcgggataggacccctggaccctgggacacctcgctggaggggcacatctgaggcttgacgcttctgattgccagaggtctcctttcttccccttaggctataaccatattttcctagcccatggcagcttagtaaatgtgttggtgtaaaagctcttggtactccagaacgttttcactcacccgtcactgtgcacctggtctgcaggacccccctgagctgcagagtacgtgaggagacccagggtgtggtagcagcagttctcctggccctgtgggtgtttttaccctgccacctggatgtggctttcgaggtgtgtgtgcctgtgcaggctcccccaagtacatatggcccgtcctcggagtctcggtactttctggcaaccgtataggtagataggtagatgtataaatgctgtagtgttttctctttcaaaaacagaagatctgagacttggaactattgtccaggtcctgaaatgggtcagtactatcacaaggaggtcatttttctattgtttgttgaatggtaccagggatgccaaggacacacagcattcattcttttcactcagtgcactctgaactatcgagatttcctggaaagctcttatgaaatgccaatatcaagggaattagaaacttttatattaattcttaagaatgttcatgttgattttccttttactttaatcaagatggttaattaggaaaaaatcatcctggcagtagagaagtctgtttggggagacgttctgttttttgttttggaccctgctcgtctttgtcatgcgtgcagtggtcatgtggagcgcctggttcccaggcaggacgctgctccccgcgttcctctgggatggttttatgggaagtgaagaaggcgttgaagtctggcttaagacttaagacagtgcgtgatgccaccatgtgggagtggggcagaggtgagactgggaccccccagaatggctctgagggtgttgccgggttgagtgaaagtcctggcgattcggcctttgtgtcccgggagccgagcctggaggaaagcgtgaggagagaaggtggcagtaagcaggtgggctcgtgcaggtgccaccgcggtgtggaaggcagccctgatccaggtccatggggcgatgatcccatcccgttattttcacacactctggaaaaggacaccttcccagatgtgtggtgccatttggaatgtgcctttcaactgagaaggtcgccttttggctaaaattcctccaggtgtaacatcgatgatacaaattaagcagacacagcctctttacaaggcagtaactgcaaaccgtagagggttctgaagctgtgcgcccacaccatagacagtgactggtcctggcccttggaaaaacctggaggctctttcccctcttcctcctgtgattggtggaggaacagctccccgagatgtccacgtcctaccttctgagcctgtgaatatgttacattacatggcaaaggggaattaaggttgctgatcagccggccttaaagtagtgagatgatcctggattttcccagggagcccagtgtaatcacagggtccttaagaacagaagagggaagcagaagagccggagggagatgatggccaagagccttggggaagtgcagtgggcgggctttggagggggaggaggggccaccaggcagggaatgtgggtgcctccagaagctggaagaggcatgagaatggagccatggcccgtgtgaggcttctgtcccacaggacggtgcctgctgcctgccgtgtgctggatactaggggcggggacaggtgcagaagtcagtcagatcctgagcttgacctttaaggagcgtgctgtctgtggaggcaggatggcctaaccagactccctgtgaccttcttcctttctggtttccttgtactgcccacccccgaggagatttgccgtggaatttgcaggtacaatagttagccttgcaagtgccaaagcaggaatcaggtaacgttttcaaggagtctggcccatagcaggcattaataagtgtttctttgagatgcgccacccgtgttctctcaggcgctgttagcatgagtgtgtgaaggccttggcttctgccttggctgtgctgaagagtctgtaggtcagtggggtttgctctttaccatggcagtgaacacagtgggcactctgaggcctgcctgcctgctctctgggtgtgggaagggaaaggaaggtagctcttctccagagataaggggttggcgcacctgccacctgcctacccgtcccttccaaggaggtgggggctaggatgtggcggcctcttaacaggatgatgtggcttcctgccctgcctggatcctgaaagggaggagcctggcagccctcagtaaacctgctggttctgccacctgtcctattccactcctgcaggaagctggagaaacaaaccctcttggctgtctgctgtccagggagtcgccactcccttcattatagccttgctcagagtgcagcggcaggcctggggatggcctcgggaggtaggtggcccctgagcccttctcctgggaaagggcagcagcagggagacgcctcctgggtgtgcacagagaaaagcacagtttccctaactccccgctccctaactcctcgctctttaactctcacctccctaactcccccctccctaactcccttctccctaactcccctctccctaactcccttccctaactcccctctccttaactcctctccctaactcccccctccctaaatcccctctccctaactcccttctccctaacccccctctccctaactcccctccctaactcccccttccctaacccccctctccctagctcccctctccctaactcccttctccctaactcccctccctaactcccctctccctaacccccctctccctaactcccatctccctaactcccccctccctaactccttgctccataactcccccccagctcccctctccctaactcccctccctaactcccctctccttaactcctctccctaactcccccctccctaaatcccctctccctaactcccctccctaactcccctccctaactcccccttccctaacccccctctccctagctcccctctccctaactcccttctccctaactcccctccctaactcccctctccctaacccccctctccctaactcccatctccctaactcccccctccctaactccttgctccataactcccccccagctcccctctccctaactcccctctccctaactcccctccctaactcccctctccttaactcctctccctaactcccccctccctaactcccctctccctaactcccctccctaactcccttctccctaacccccctctccctaactcccccctccctaactcccctctccctaactcccctccctaactcccc

SEQ ID NO: 7424 - DNA, 6000 bp, Homo sapiens
aaggctgtgccccaaggggacccagtttgggggtggctgtgcccgccctggtcctagcatagccctggcccagagcactgctcccacaccctcgggcctcggagctcggctgtgttcatctacagggatctgtcacctgtccctccaggaaagctccttacgcctttgctctcctgagaataaaacttgctctgaatcctcctccaaacttctcgccccttgggtctcagctgttggctttttgcgacccctccttgtggcctcatgcagttgggtagcagcagccccgtctgtgagcctgctggggacaggcttctgtgccatgtcctctcccaggctaggggtccacccgccctctgagggtgtgtggctgggcccccgctcaccaaaagtcacgtgcatttggtggcagtgtccaagccttctctcaagatggtcaaccctgccccatgcggggtccacgtgtgcctcagcattgagagggtctgttccagggatctgtgtgggggtcgcagggcacagccgctccagcctcctgtgccaagcccctgggagcaggtgtgggagctccgggccagccctggcacgggcacctcccaggatgttcgtaagacacacgcttcctgcccgcgcatcttgccctgtggcctcaggacagccggtccgagggagggcaggtgcagcagccacgtcccagtcgctgcggcctggcttctccaggtgcagctcgccctccttgcacctgcagcgcggaaggcagagccaaaaggcgccccctgggctcccggagctctgagccacttcaggagttcgggcatgtggggttttgtctccggttttagtctggccatgtttgttggttccaattcctatgctctgttacctgaacctgtttgattcttttgattttcttctttctgaaaaagacttttcacggtttcctattctgcctttcttccgtatgcctctcaacgggacgagcagctgaaattaaaaagatagtagcaggtacgaacccaaaggagtgtgctgaagtcaagagcctgtctggcgggccacagacctgagcgcagcccctcggtggcacacctgccccagggacagccctgcatggggacacgtgtcaggccccagacctgcgcacgcacccaggctcagccacagcccctcaggcagggtcccgatgcccactctgctcccttgtgttacaaatgccgtggtccttctcagccctgctgtggccttgcctgtcatcagagggcagctggtctctgcaagcgtctgagtgcaggctgcttagggcaccagccaaggggggacgctgcctgcactgctgcctcatgggccaccttgacagatctgcatgggtctcaacaggtgggtggcttcgtgccttctgcagcccagtccccgtggtcttggtgggctctggctgtaggaacagcctgtctcctccacggtgcttcacatgtgtcccacgtggcttctggctggacgtggcatggctccttcccccctccccctcttttttcctcctcttcctcttccttcctccctcctcttccctcctccctccttctccctcctcttctctcctccctcctcttccctcctccctcctcttccctccctccttctccctccctccttctccctcctcttccctccctccttcatcctcctcttccctccctcctgctcctcttccctccctcctcctcctcttccctccttcctcctcttccctccttcctcctcttccctccttcctcctcttccctccttcctcctcttccctccttcctcctcctccctcctcctcttcccccaccttccttctccctcctcctctttctccctccctcctccccctccccctcctcccttctgtctcctctttcctcctcttcccagcaccaggcccagggctagtcctttgaggagcaagtgaggccatggtgcctgctctttcggaaccctgccctggagtatggggaggtgtcaccagcacatgggatctcgtccttgtaccattgacattccgtggttgagccccgcagcacccagggcgagcacgtggcccacggccgaggtggctggtctgccacctgcacttcctcctgtgaaaggaggtgtgcgggagacctgctctgcccgtcatggcctttccctgcaggcaggcgtctggcccggggtgctagcagggagcaggggctgctgcttgagggccggccccatggccctgatctccttggagccagccctgtcccccacatccaggggtctgggcgaggcccagggctgcgttcctgggagaatgctgaccctgcacttctctggctggtcatggtgtcaccactggggaggctgggccggcacgtcagtctatgcctggcatgcagggccgtccctgagatatttgctctcaccactcacaaaacatccttctcgctcctggattgaacttttatgcctcacagccctaacccatcatttttcaaagcttcctataataatttgaaaacatcttgtaaaaatgacataagtcacagccgcttgcggcaaataactggccagtgttgaagcgagtcagaccgggtgctcctgcaccaagtgtgtgccagccgtaacccgggcaggcctgtcctctggcccttgctgcaggcaccagctcttaacacggggtgcactggggctccccatcacgcaggacctgcccagaatttccacagtggatggtgttcaggagcggtggttaggatggctggcgggggcctcactgacgctccagctcccatgctccccttagaagacagcttttggccgggtgcggtggctcatgcctgtaatcccagcactttgcgaggctgaggtgtgcgaatcacgaggtcaggagatcaagaccatcctggctaacacggtgaaaccccatctctactaaaaatacaaaacattagccgggcgcggtggcgggcgtctgtagtcccagctactcgggaggctgaggcagaagaatggcgtgaacccgggaggcggagcttgcagtgagctgagatcgcgccactgcactccagcctgggtgacagagtgagactcccgtctcaaaaaaaaaaaaaaaaaaaaaaaagacagcttttgtttgtttttaaaattctcatctcggaggaaactttctagaagtaccaatattcttttcaaaacatagcttacagtttttcttttctttttttcttttttgagacagggtcttgctctgttgcccaggctggagtgcagtggtgtgatcacggctcactgcagcctcgacctcctgggctcaaatgatcctctggcctctgccccccgagtagctgggagtacagacgcctctcaccataccctgatcatttttatttttttgttttttttgtttttgtggagatgggggtcttgctatgtttcccaggctggtctctaactcctgggctcaagcgatctgcctgcctccgcctcccaaattgctgggattacaggcgtgagccgccgtgcccaggcttattttcttacgtgcttgtcctagaacaactgaatgtgtaaagtggaaaaaacaaaaacaaaaccccacccagcccagataaccatctctgacattctggcacattccttttgactgttgctctggacactcacttccatgggcaacgagcaggcttgctggggtcctgccgggtgcgcctggggcacagccagtgggagaactgatgcggcacagtggctggctgtgcgggagaggccatcccgggtgggcttccaggggcagtcagggcgcagcctctcccgggccctcaggcctgcgtgcatcactgagctgtccgggcttcacggtcacagtcatgatgggtgtcaccagtggccagtgttcgggcacactccctgcaggtgacctgtgcgttgccttgctgtgggccgcgccgtccctggcccagcacggtgcatgagcagcccgggcactctgactgtgtgctttccaaacccagaagctggcagggcggagatgctggaccacgccgtcctgcttcaggtgatcaaagaacagcaggtgcagcaaaagcgcttgctggaccagcaggagaagctgctggcggtgatcgaggagcagcacaaggagatccaccagcagaggcaggaggacgaggaggataaacccaggcagggtaggccgggctggcggatggagtggggtggggccaggcagggggtctcctgctgtcctcatgcggctgggtctgaggctcggtggcctctagacctgagcgtgagtctggttttggttcccaatgctgttgttgctggttcttctgagcccctccactggcagcctgtgtacagtgctgtggctaaattgatgaccgacttcatttgcagtggaggtgcatcaagagcccggggcagcggtgcccagaggccaggaggcccctgaaggcaaggccagggagacggtggagaatctgcctcccctgcctttggaccctgtcctcagagctcctgggggccgccctgctccatcccaggaccttaaccagcgctccctggagcactctgaggggcctgtgggcagagaccctgctggccctcctgacggcggccctgacacagagcctcgggcagcccaggccaagctgagagatggccagaaggatgccgcccccagggcagctggcactgtgaaggagctccccaagggcccggagcaggtgcccgtgccagaccccgccagggaagccgggggcccagaggagcgcctcgcagaggaattccctgggcaaagtcaggacgttactggcggttcccaagacaggaaaaaacctgggaaggaggtggcagccactggcaccagcattctgaaggaagccaactggctcgtggcagggccaggagcagagacgggggaccctcgcatgaagcccaagcaagtgagccgagacctgggccttgcagcggacctgcccggtggggcggaaggagcagctgcacagccccaggctgtgttacgccagccggaactgcgggtcatctctgatggcgagcagggtggacagcagggccaccggctggaccatggcggtcacctggagatgagaaaggcccgcgggggggaccatgtgcctgtgtcccacgagcagccgagaggcggggaggacgctgctgtccaggagcccaggcagaggccagagccagagctggggctcaaacgagctgtcccggggggccagaggccggacaatgccaagcccaaccgggacctgaaactgcaggctggctccgacctccggaggcgacggcgggaccttggccctcatgcagagggtcagctggccccgagggatggggtcatcattggccttaaccccctgcctgatgtccaggtgaacgacctccgtggcgccctggatgcccagctccgccaggctgcggggggagctctgcaggtggtccacagccggcagcttagacaggcgcctgggcctccagaggagtcctagcacctgctggccatgagggccacgccagccactgccctcctcggccagcagcaggtctgtctcagccgcatcccagccaaactctggaggtcacactcgcctctccccagggtttcatgtctgaggccctcaccaagtgtgagtgacagtataaaagattcactgtggcatcgtttccagaatgttcttgctgtcgttctgttgcagctcttagtctgaggtcctctgacctctagactctgagctcactccagcctgtgaggagaaacggcctccgctgcgagctggctggtgcactcccaggctcaggctggggagctgctgcgtctgtggtcaggcctcctgctcctgccagggagcacgcgtggtcttcgggttgagctcggccgtgcgtggaggtgcgcatggctgctcatggtcccaacacaggctactgtgagagccagcatccaaccccacgcttgcagtgactcagaat

SEQ ID NO: 7425 - DNA, 6000 bp, Homo sapiens
gggccccaggaccccgtgcagtaggccctgtgtctttagcgcccccatcacagccagcagagcgcagaatgcggaagcccatcctgactggcagccactcgtcacgtggaaggaggacacacgaccctcacccaagtcggtggaaagtcatttcagtgtccaaggaaggcaaacagagcagagctgtgtatttgcaggaatgtagcctttgatggggcggggagcaatacgtgaaatggaaatagagtccaggttcattctcctgccctcctggaaacatcagtgggatctatttggaccatttttctctgggagggtagaggcaagttcttgttggcagctctctagctgtgagtagagaaaaggtgtgagggtatggagaactgagacacatttcaggccagaaattgaatttaaaaattttttattattttttaagactagtcaagtacaatagtgaggaaaggggagagagtagaacaaggagttggatctgtaactgactgttaacaatcatctgaggtaactcaccaccttcggaccagccagaatttaattttcaagcaagaaacagggccaagggccaaatgggggcctggggcttctcattagggtaatggacttggtttgacttgggaacagcttgtgatgattgtctcagaagacagcggggcttcctgacatccccaggaaggtgtggttgtgatgggggtggcctcctgtcaccctgcacacctcagggagatttgcttggcaatcatttcgggtctgagagctccaataaacgtaaacttttatgtaaggccctataattggaaattatggatgtataatttatatatgacttaatgaatgatttatataatgttaagtgatgatttagatagaaaatgtgatcccctcttgcagaatctttaatgaaaagctttggttcttatgaatttatttctggagctctgtttgaactcagcatgtttgacataaatcagatctaattgtcattttatgattaatgaacatatgctggccgtttttccccataattaaactttatgttctgtgcatctgacaaagcaaaacaagttgagactttgacagattggtgtggggttcccgtgtcttcatatttgtgtgtgcgctcatttgtgcatgcctttattttattaatgtccaagtactcggtttctggaaagtcgggttttcagaggtgtgagtaagattctaagagttagcattcagactgtgaggattcatgtgcttttggaggatagacagggcacaggtccaacctgaggggaacgcagacccttctgcctgtcgcagatcgcgcctgagtgccaggccaagcgccatgggtggagaggaggcatttgatgtgctctcccagtggggagtcccagtgcccgagagcacgactgctttttcaggctgtggttataatgagctccaagaaatggtggaaggtggttttactgcaaaaatatgcacgttttcctttctgctatccatacacttcaataagatttgaagtaatttaaaaagtgaaggccggacgcggtggctcacgcctgtaatcccagcactttggggggctgaggcgggtggatcacgaggtcaggagatcgagaccatcctggcaaacacagtgaaaccctgtctctactaaaaaatacaaaaaaaattagccgggcgtggtggcgggcgcctgtagtcccagctacttgggaggctgaggcaggagaatggtgtgaacctgggaggcggagcttgcagtgagtggagatcacgccactgcattccagcctgggcgacagcacaagactctgtctcaaaaaataaataaataaataaataaattaattaaataaaaggtgagacaagcatgtgaaaggaaaatcattactactgatcgtctttgctcaccgctgttcccctctgactattgcaggacgtagacaagtttggcaacgagatcacccagctggcccggcccctgcctgtggagtatctcatcatagacgtaagtgccccccatgcacagcttgggcaggtggacccattgggcgccttgtaggtgggactgctgggtggtggctgctcaagggaggaggctgcaatttaaggcaccctctgccttgagcagtgcccaccccagaacaggcacccaggaggtggttgtagaatcactgagcatgcggtgttgctgaaatgctcacagttttaagggctttttgttttagtctcaggtttttatttccttgacgtcaacctaggggttaactgtccccatactaaagtacaaaggaccactgaccccaggctaggcagcctctggaaggcagcgaacccccattgcttgggtctccagtcaccggagcatcaagcagtcttgtccagatgtgctgtgcttggtgtgtggctgtcagctgtcctgcacgtgcaggtgcttgccctagccccagcacagctgccacagcccacagtgtgtctgggtcactccgtccagggtggtccccaggggacacacctgtaactcagtgttcttgagtgagggctcagcgtggtttactgggtggaactccaggagccacaaaggcccctggctcttccacatcttccctgtgtctcagctcctttttggaggcattttatggtcatggagacatggctgtaccattggccacagggcagcaaggatggcaggatgagcctttgcagaagccagtgcatcagccccaccggagctctgtccaaagcggacgggaggcggctcatttcctatgctgctgccacgccaggatctattcaggctgcatttgaaattggatgggcacgtgattcaggcagtaaaatatcattgcattcggaacagcaggtccccacgagccaagcccatcgatgcaccattccaactgacagctcccgagaacatatttattacctaggccgtgaaggcatctggtttttagactacctagggtgtaattaagatgaaaacagattgatggagcatgcacccaggaggagcaggcatgatttaaaaccagctttctcaggtcttctaccccaagcagcctccccacttctttcctcttcttttataaaggaagttaagtttttgccttagtgcagtttttcagaagtacttgtttgtgggagagcattctgctctgtgatgcccaggctccttgaccctgtggaagtgaggcatggggagtccttgagagcaggtgcccagagaggtgtgtcaagctccatgcccagccctgggccacaggcgctggcctcagccaaggttcttaaaccttgggatgggatggctgggcaggcaggaaaaggcaccagccagtgttactggggtttctttgtgggttctgggggcatcatctggctgatagacgatgggtagggtagggaaatggcttcagtgtaagatgggagctgatgcccttccttgggacatctgggatgggctgtgtggactttggttctgttcccctccaagggccagttacaaggccagcaagagcccccgtcagtcccactagctcactcactagcacgtgttctgggggtgccgccttcttcatttctaggccttcccaagggacgcgcctgagcaggccaggcttttgtctctgcaggaggtcagcacctcccctgtcttcagctgggacccagcactgtgtgtaccaacactatgtgtaccagccccgtgctgggcacccaggaggcgagtactccgatcatcttcatcctgaggaagagtaaagtgaggcccaggatccctaactgacgaggccatgtagccgacacgtggcaccgcggcccgagtcttcatgacccaccccgccgcttgcccatgaagggccagctcaggccagagatgctgctggtggctcagctgtccttccacagcggctggcgctggcacagcaaatcctgggccagctagctcaacaactcactgcctttgctgatgcagaaaacagaccagaaccacactcattctttagaaatagtcccaaaggaaccagaatagttcccctaaatctggaagaggtgtgacctctgctgctgctgttgtgttgcagagaaaagcagcatcaactcaactcggtgctgctttggggaggggtgtctgtcacgaagaataaaagtggtatttctattgattcttgcacatttaccactgtccctgtagcatctattgattatatcttaggtgcaaagtgccctctgttgtcattaaggcctgtctgagccagtgaaggactgaaggacttagctggcctttgggtatcagctctgagggagagagaagagctgaaccctgtgttcctcaagggccttacattcacccctgcctggaaaagcccacagctccgtggagtggctcccagcattcagaaggggcttagtgagctgctgaagggtgctttgtgtcttgaaagctggctgattgctcatttgccctccgaatccaatgacacgaatctctcttgagcaaagtcagctcctggggcggcctcctggcccttccgttcctttcctgtcacctggccaaggggccaaaccagcctttcgttcctccatagcagagggagagaacctgtgtgactctgaagggaagctgtgccacgaggggagtcccagtgccctttttgtccgacgtcgaggccggtgcacaggccggaggctgcccggatatggtgtagtttgtctccaggatggcggagtttccaagtgttcgtttagagatgacactaatagataacggttccctttgatggagagcttgtagaacattctcagaattgctaggagtcgttaatttgggctctgggagatgctctgggctggctgggagtcggccacaccattttcagcctcatttatcatgggtttgtgtttttcttcattagatcacaacaactttccccaaggatccagtttacactttttctatttcgcaaaatccatttcctattgaaaaccgggatgtattgggtgagacacaggtgagctctttgtctttagaaacataatttaaggtaactgctgattgttatctagtgtcagtattgtttttccagaaaacatcaagctttcaaatgctcccgattcattcttgtgacaggccagctagggcctactgtggggcactgctggtcacgtggacgcccttcccatggctaggtgatggacggccacaaaggctaatcccctgacgtcctgactggccacatcttcagtggacctcgtaattttcccaaatgtgttgctttgtgtcttctgccagcagcctcgtcactgttggtttggcctggcccctgcctggtcacctgctgcccttcttaggcaccttggggctgtgtggcccctctcggcctggcctcggctttcccgtgtgtagtgttgatctgctgcttagcgtggctcccgtgttggcctctgctctcactggcagatcaggccaggtccgatttgctgtcacgcctgcatactgtgtagacaggctgtgtacacatggttgttcttaaatcataacttgctaacagacatttcagaaggtggtcaaagaatgtctataatgaggttttcttcagtggctgacaaagcttcttctatgctttgatcccctcagtgcccatccgcccaggggacttggggtgctcacagaggtgcaaagccagttattggggtgcactcttgaagctctgtgtttggttctgctgaagatgtccgtgctgcatcacggctgccctgcacattcctccctcttgctgccctagatggagaatacagctcgacaggaaaagtcagacctgtctccctgccgtgaagggggccccaggcccctcccgcagcccactctccaccgggggaccagggcgcatttccatgtttgtgtctctgtctgagtcagccttttttttttttttttttttttttggaagacagagtctcactctatcacccaggctggagtgcagtggt

SEQ ID NO: 7426 - DNA, 6000 bp, Homo sapiens
cctcaatgttcatagcaactttattcacaatagacaaaaggtagaaaaaactcagatgtccatccaaccgacgaatggataaacgaactatggcatacacatacagttgacaattattcagtgagaagacagagcgaagcgccgacatgcactacaacatggatgaaccgtgaaaacatcctcagcgaaagcactcagacacaaaagaccatgtatcgtgtgatgccacttacataatacacctgttttggaaaaatttcccaaccgggttttacctttgctctcacactgcaacaaacgcagaagatttctgtgaccaaatgtggggacatctccccatcaatagacaagcaatcagttctgcagtagacaccagcaaggtgccctccaattcaattccaacactatctacccagggtgagggctcagttcccaaggctgactcttcctttcccaccagtccagacctctggaacttctgacccacaagcttcaagttgggttcccacgatcgaccccctttggattcaattaatttgctagagcggctcacagaactcagggaaacacttacttaggaggcttactggtttattgtgaagggcattttaaaggatacaaagaaacagccagatgaagagagacacagggtgacatctggaagggtcctgagcacaggagcttctgttcctgcagttggggagtgccaccctcccaggacagggatgagttctttttcaccttcctgccaccctcccaggacagggatgagttctttttcaccttcctgccaccctcccaggacagggatgagttctttttcaccttcctgcctgcctccacgtgttcagccatctggcagctctctggacctagtcctcctgggttttatgaaagcttcttgagatcagcattccttcccccagggtgtggggcaggaccctctctggaatgaggatgatgtgacccacaattagaaagacaggggaagattagaggccgccttggggcaggtgagaggaggcaggagaaggtcagagagattctgtttcctgaggcctgacatgccagatgtgataacaacagaatgcagcaagggctgtggagttgagtcaggaacccagggtggaaacctgtgtgtatacataacaccacgacaccagagaaggcaactcctacatacctatgataccacaacaccagagaaggcaaatccacaaagagggaaagtagattggtggctgccagaggcttggggagggggaatgaagatgatgcttaatttgtacaaggtttcattggagaggatgaaaaatgctggaataggctgggcgcagtggctcatgcctgtaatcccagcactctgggaggctgaggttggtggatcacctgaggtcaggagttcaagaccagcctgaccaacacggtgaaaccccgtctctattaaaaatacaaaaattagccaggcgtggtggtgcgtgcctgttattccagctactcgggaggctgaggcaggagaattgcttgaacccaggaggcaaatgttgcagtgagtcgagattgcgccactgcactccagtctgggtgacaaagcaaaactctgtctcagaaaaaaaaaaaagaaaagaaaaatgttggaataggtaatggcgatgggtgcatagtgttgtgaaggtggtggaaaccacagactggtgtactttaaggggttaaaatgatggattttatgttaaatgcattctccctcaataatgataaaaaaagaataggtttctgggattgaagggcctcaggggcctcagcatctgaagattcctcagttgcctgggctccttggacctcttgcagtgatgtggcaagggtagaccctgtgccggtcactggaggagcggggtgacgggtgggtgggggcagatactactgtgtcgtgtggcagcacagccactagcccagcagggccagggatgcacagaagagggaggagccaaggaaggcttcagagaggcagtgatgtctcagtaccgtcttgaaggatgagtagcagttcaccaagcagactgagaggtagggggacttgaggacacccagggaggaactgagggcagcagaagatggagctgggtcgggggagggccaggttccagggcccctggtgccgagcccaaggccttgcacttgatctctggagcagtaaaggctgttgaaggtaagtttgaaacaggagtgtcatgtccagggttaggcttttagggtgttctgacatactgtgcgtggtgagtagattcaaaaggataagactggaggccagggatcagtccctccccacctgtgctggacgcctggtctgcatcggttccattacctcccagcagcccttcccggctgccttcacttcccttccactctgctgctctgccggctgagctcagggtcctcccatccaggtgcccactcaaccactcccttcgagggcctgaggcttaacagtccaacctccatcactccctgcacaaacccaacctcacccaaagctcagtgggcttggctgggaccccaggggaggaggggggtcattccttcccactgaatacctgtcacgagccatgctgggtggtggagtttaatgttaaaagggcagattcgagagctggacaatttgggttcaaagtcctcctctgtctcttagttgctgtgtgactttgagcaagttcctctgtttctctgtgcctcggattttccatccctcaaggagttgggagagttgagggtggacgatgcgtgggcacatggtgactgctcggtaggtgtctgtaaccatggtaaagatgaagctgtgggctggcccctggggtcccagccgagcccactgagctttggggagggtgggtttgggtggggagtgatggagggtggactctcaaacctgaagccctcaaggggagtggtcaagagggtacctggatgagagaatgcagcgctcggccagcagagcagcggagtggagggaagtgaaggccgcctggaagggctgcggggaggtgaccaaccaatgcagatgcaggtacccagcacaggtgggcaggtgagcattcaggaaatggttgtctgggacccaccacccttcacaaagcacctggcaacactctccttgagcctctgtatcagtggaaggaaactgcttgacctggctggtgaggggagcccaggcagggtcgggggcacccctaggggccagcttgctggtctaaaccaaggccaaggccagaggtcttacaaaaaagcccagcccacaccaaagcataaaaagtgataacttgggccggacacagtggcttacgcctgtaatcccagcactttggaaggctgcttgagcccaggagtttgacaacagcctgggcaacatggtgagaccctgtcgctataaaaaaatacccacaaaactttgctggctatggtggtgcatgcctgtagtcccagctactcaggaggctgaggtaggaggatcccttgagcccaggaggctgagactgcagtgagctgtgattgtaccactgcactccagcctgggcaatagagccagacattgtctcaaaaaaataaaataaaataaagtgataattctcctttctcctctccttagcagtttggtgtgtgtccttcaaaacactgtggctgttcagccccttacattatatataatgagaggataaacatggatatgggtctatattctctagcttgcttttttcacttacaagtgtatcatccttccatgccattatataaagccacctcatctttttaatggtcatggtgttccatggtttggaggtctcataattcactcaccaccttctctgggtggttatgtaggaaatttctaaactttttggctgccctgagcacgcttgcccttgtagcttaggactcttggggagtttctccatcaggacagacaagcagacaatacttagcaggaataaatgatcagtcttgtgcttattgcaaaagcaggagcaacagataagctggaactagacttggcaggcaggcagagagaggccctggagggattcgctgcaagctgccgcagatgaccgtgggctcccttcatgggctcccttcactcatgtgcagtccgttccagtgctgcccagctcatcacatggttggtcatgccttggtcacaattctgaagcacttaagaaagaaactcataagctcatagatgccccacacacaagatacaaatggctccagtcgtcctgcttaggctctgctgacccctccacatcccgttcctggttctcatgagtctgagggacttcttccggggatggaagaggcttcaaggggtgtggtacggatgacttctcagctaggacggtcttcatgtttcttggggtgagtgaataggtgatcccgttgggtcaggtggggtgggaatgtgggtgtgactgggcttcgggtggcgtttcttctcccgcagacatggctgggcttgtttggtacttctccctccatgtcctccgctgccaccctcctcctgtccccgtccttcaggacagaaccagcaaatcagtctcagccccttaagagcacctttactggtgctttctttccctaggattttttttctcttttttcatttttttccatttaaactcagtggcaaaaatcccaaggacttttgatccaaaggcggcagttatcactaagtggtttatttccttctaagacctagccaacggtctcagagccaatgctgctggtacaactactctattaatgggatagttttggtaagtctggatcctcccagctgggtcctcctgatcagtgcaaagcagccttttgttttaaaacacattgcaagcaatggcttgggaagtaaacaccatctgaggctcgctggccagaggcaaggggagacggcaggcagttgagcctgcctgagggttctctcagcagtgacttcctttttcccttccttcttctgcctagtcctgtatgtgaggactattaattgttttttgttgttgttgttgtttgttttgtgagatggagtctccctctgttgcccaggctggactgcaatggcgcagtcttggctcactgcaatctctacctcctgagttcaagcaattctcctgcctcagcctcccaagtagctgggattacaggtgcgtaccaccatgtctggctaatttttgtatttttagtagagacgaggttttgccatgttggccaggctggtctcaaactcctgatctcaggtgatccacccgccttggcctcccaaaggcatgagcctcccaagggcatgagccactgctcctggccgaggggattaatttttacccgcacctcagggttattgagtaacaggctggctgggtttgcaggccagcgtgttcctggtggcagccgctcactcattaacacttctggaagtgctgcatgtctggttaaactgcaaatgctttgcaaagtcacgagtcatgtcactgagcagaggcgtgagactgccggccagccctgctgtgtacactgatagaattagtgagcgagcgtcccactctgatggaatccagatggaactcgtcactgtcactgcggtggagacggtggggccacatctgcactgaatcctactctgcgccttcaatggctgcgtaatggcggatggccatttccttgactaggatgagacattgcctactctgcgtggctgctgtgagcgtgaaatgggatcatgtgcggaacagccacgcatggtccgtgaaatgggatcatgtgcagaacagccacgcatggtccttggtgtgtgacagatattgggtccctctgtggtcccaggcagacattgcccggggtgggggccgaatgcatggtcaagttgaggggcctgggactgtttcacgggtctagaaaaagaaagcagaaacgctggaagcaggactttattgtccgacatggggctgcctctgagcctgggct

SEQ ID NO: 7427 - DNA, 6000 bp, Homo sapiens
tttttttttttttttgagacagagtctcaaaaaagaaaaaaaaaaaagagagagagagagagagatcactacgcatccaccagaatgggtaattatttttttaaatcaagttttagaaagcagctgctagactgtgtggtagggaatataaattggtataaaaacactgaaaaattatttggcttctaaagttaaaacatgtatttactttcacccagaaattctatagtggtgattgggtaggggcctaaaaggaatgctggtaatgttctgggtcatagatacaggtaggtaaactctgtaataatttactgtaggcactgttttgtatttatgtagtatccaatgaaaatgtaatgaaatttgggccagaaggcagaaagaactcctgggtacacactcactaccttagtccccctgaggtttaaataattaaaagtgtctgtttcatccttgcctttaagaaaactctccctgctgataactgagcagatcaaagatctaaaggttgtggtggagaagggtcatggagttgattacccccaataaaaacaaaaagaaaaacttggttttttttaagctgaaaaaggaggatggaaaagtatagtgggcaggcatagtaaaatcactacagtctactgcattcctgaaaggagaagcttgtgaggactcaccccttacccctataacctgctgtggtgatttcattacccatagctacttaaatcaatgagtatatcatattcaaaagctgaagggagaatgtttcagcttgggagtgtagtaaaagaattcccagtcctctctttggttccataaatatatcaccttgttctattaaagcacttggatgtgatttttaaatatgcccaacaaaatgccatcagttgatttctctaactaataaagaaaatgttcaagagttggtagtaaattcttggtgattatgccattagaatcagagtacatcgtttgtaagaaatcctcagcccggcacggtggctcacgcctgtaatcccagcactttgggaggctgaggcagcggatcatgaggtcaggagtttgagaccagcctgaccaacatggtgaaaccctgtctctactagaaatacaaaaattagctgggcatggtggcacatgcctgaaatccacctattcaggaggctgacacaggagaattgcttgaacctgggaggtggaggttgcagtgagctaagattgcaccactgcactccagcctgggcgacagagcgagactctgcctcaaaaaagaaagaaagaaagaaatcctcacatcttatgctcagcaaaagcagcagctcttcgctacttagcaattaatttgccctaggtgaaaccgattcctgttctaattccacactggaattctgttcattatttacattttttttaaatggaagcatgattcatatctcaatttacctagttccttacacaatatttattagccagcatttagaactggttaccctttcagatcagataaagattattgggtacactctctggcggcctttgagctgatttaaatattgttgccacacggttctagatactgatattagttgattggcttcctatgcacaagcactcctcagttacttacataattgaattaaacactttgtatatgttggagctactgcttttgttatataagcctgcttgccttttcacctactgtctcccaactttaactatggtatttccacatgggctggatttttttgtttttgtccaaagcaggcaagcgagaagtagaagtgaagaagagtttgatggtcttgccaatttccttgcttcatcatgaatctccttaagcttcaaattacaggctgttgagaaagccacaaaagtagacagtgccaagacactaagactagagtatgtgagagtgtaccattcattcattcattcattcaataaatacttactgagcacctactgtgggccagattctattcaaggtactaacattacagtgaacatgaacaacaaagaccctgattttacaagatattccagtgaggaagacacattaaaaacaacaaacaaatagatacatttatattaagaaaaataaaacagggtcagggacagaaagtagcagagactgatattttagacatggtggtcagggaagtcttctttagggaggtaatattgaagcagcaattgaattaagtgagaatgatagctggacactacaggcaaaggaaacagaatgaatgcaaaagccccgggctgggaatgtgtttagaatgctcagtagtgtacagcaaggaaggcactctggctgaaactcactaagtgggagaatcctacaaaaagaggttgaagatgtagtcacgggccagggcatttagggcttgtagaatatgtgtagaaaaattcacattttgaattttattctaaacgtgaggggaggctattggaaagttttaagcagtgaattaacatgatcagggtaccttcggacaccaatggctaggtggagaacaggctacaacaaagtgttatcagagtccagtcacgaaagataaactatctagttatttcatgcagagggaattttaagagtaatagatgtcaaaaagaataatggagtgacatcatagataaaaaagctgctaaaaatacccttagctggaaccaatggaactgcaccagcttctgtgccatttggagacactatcactttcatcctctgtctactagagaggtgccaccttgaccatggaaggaattcctagagtaaagaataatccctcctccactttcactatagaaatggccagcaactgccacacgattgaatccagaagcagtaagttactctccacctcctgccttctgatttccttatagtgccccctactggcagaagccagcgggcacgagagcctgggaaatggggttcacacactctaggtccctgcagtagagtataaaagggcaagtgtagaactgagaaataacaatctctagagtcaagagtagaagcagggggccggcgaggtggctcacatctgtaatcccagcacttcgggaggctgagggagggggatcacttgagcccaggagtcggagaccagcctgggcaacatcgcaagccctcatctctacaaaaaatacaaaaaaatttagccaggcatggtgacacatacctgtagtcccagctacttgggaggtggaggtgggaggatcacttgagcctgggagctggaggctgcagtgagccatgatcatggccactgcactccagcctgggtgacaagagtgacaccttgtctaaaaaaaaaaaaaaaaaaaaacccgaaagagtagaagcagggaaaccatcaggatgcccggcctgttttttctttttcatttttttcccctcagctgtggtaatttagccaattcaaagaccttgttctccataatttcaactttccttcagatttgaccaagtcaagtagagctggtcaaacccaatgggaaaaagaccaaaacaacaacagaaacaaacaaagaaacagttaagcaaaagaaatgatcgcacaatttgtattattgagcgctctaatggtaaggagaaattaagaccagctggttgttaatcttaactttagtcaccaaggagagtttccaagacaaaactccaattcaggtgcttacctaggaatagggtccaggctcaagactgctctttaccattttagaaggagaaaaaaaactcagactcaccttccctgctggaagccagatgaaattccagaaaggagttgcctcccctccatcgtcatggaggcaggaaaacgcaccttctttgttgggagtaagtaaaactgcagacaaagaggtgtacagcaaaataaactttagatctcaaccaaattttgggacatcagggattctctggagtggggtgctcccaggcctcagcaaattgtcctgtttgagcaataaaaatagcccaagctggtaccaagcactgatagatttgtcaaaggtcagggccacctccactgagtcacttcctttggctgccagcttgtaaaccaaaaccagctctcaatcaatttggaagtttattttgccaaggttaaggacatgcttgggagggaggtctgtgcctttatctaaagatgattttgagggcttcaatatttaaaagggaggagcgggctggaggggaaagagggagaacatggtcattactgaatccacacattgcacaaatagaaaaaggaacaggcaggggaatagtcaattatgtatttgcctcctgctgtgtaaatcagcacttcagtaagataaggtgaggacagagcagctacctgtggggacatttaaccttttatctgtagctatctgcttagggacatagagaaaggcagtttcttgcatgactcagctttttgcttaattttttccttttggcatagtgaattgagctcccacggtttttgttgttttgtacataagtggagagttcatttgggccagggccccgagttattttcttttcacaaatataccctttagagttcagaggaaaggctgggattagagccttctgtgagcactattcatgggattacatgagggagtggctgtgaaaagagggccccggactaagccctgggcacctgaacaagtgagaggtcaggaaggggagaaaaatccagcaaaggaaccccagaggacccggccagtgagctaaaaagaaaagtgcagaagagtgcagggaaatggtaaagaaaagaaagctttccacaagacaggaccgatcagctgagccaactgctgctgagtacagtgatgagagctgaagtctctcgcccgaaaggcaataaggcgggagggggaaacctgagggcagcgggttctctcttgggagcgggaacacggaaccatgggcagcgaggcaaatgcagcctggggagaagctctgagtaacggacgtgcgaggatgatgcttgtgcaagaaggaaatgaccgctgtcccggctccgcgggagacgaaccccggcttcccgccctcagggactagctctccagggaactgggacggtcagtgccggtcgaggcagctcctcgctgaaggaaggagcaggggacagggaagcggaatggggagcgctaggcctccaactacgtccatctggccatgtttgaagagccacaaaatggaggagggaacccctcagagcgtgccagagcggagactgctctccgtcgcagtcggggcgcttccggcagggcgcccactcccagccgagcgccctccgcctgctcctccaggattcctcttcgccctttctggggccgccccggggcgctctcagcaggatggccaacaccttccctccatccctacaccccgccgccccctggcccgtggccgcgctcggctcccgcactgctcactccaccccctacatcccagcccgctgccagagccggggagagggcgggggccgcgtgggcgaggccgtgaacagcggctgtcacgtgggccgcccaggccaataggggtgaggctttgggtcgagctcagtcctcccccggcgcctccgactggcagtgggactcagcgggcgtggaggtcgcggctgagcgagcgagccctgggcgagtgaattgtggctgtgggttgacggtggagacaccccccggagggaggcggagggaagggaggcgaggcctgcacctgcatgcttcccgcctcccactccccagcgcccccggaccgtgcagttctctgcaggaccaggccatggagctcgaagtccggcgggtccgacaggcgttcctgtccggccggtcgcgacctctgcggtttcggctgcagcagctggaggccctgcggaggatggtgcaggagcgcgagaaggatatcctgacggccatcgccgccgacctgtgcaaggtacgcacgcgtgcggcggggtgtggggaaactggcccccgccgcgcacttgtggactg

SEQ ID NO: 7428 - DNA, 6000 bp, Homo sapiens; identical to SEQ ID NO: 3672

SEQ ID NO: 7429 - DNA, 6000 bp, Homo sapiens
ttataatacagagaggtttatttatatttgtcataaaatgctttacagcttctttgtttacgtcagctacgttttcttttcatttactccatttgttgtattacaaagccttattctttcttttacttattaattttcccacatttgattttgaactttatattctaggattatagtgtcacctatggccattgtccggaaatcacagtatacacaagctgctgttactttcctagtgctgcacgactcccttccttgtgggcagacaataagagatctcttcttagtatgttagtggaggtgagtcttttccttttaactagaggcaaactcccaggaatatgttcagtgaaaacctttatcaaaacattgtcttttaccaaaaatgtatattatttattttaaatttatatagaaagaagagttttggtcattttatgtttcctaaatagatgccatttattcacatctctggaatctgctataatttaggtaatttgaccttgcaagatgctgcaagttctttaatttgaatatcacagagttactggagtcagtataccatggtgggaaggaaatcactcaaggcattggaagattgggttctaatgcttcaggctatgacaatatcagagttctcttttatttccagctctgtgagcctgaatattgaatgaatagcaaacaaggtcagagtcagtggggagggaagagaagaagcaggccatacagagtttgatacttgtttgtgtgtggtttttgttttgtttgtttgtttggttggttttggtcatgcctcaagctagtgcctctaccatgtctggcattatgacaacataaatttatattttaaacattttttcaggttcacaagggagttcatggatttgttaaagataagactggaaagccaatctctaaagcagtcattgtacttaatgaaggaataaaggtacaaacaaaagagggaggttatttccatgtactcttagcgccaggtgtccataacattattgccatcgctgatgggtaccagcaacaacattcacaggtaagaaactcaaattgagtagcatcatgtaaatttttattcttaataatacttctgttttattttgaaactcttgttagaaatcttgaagggaataaagaaattaaaagtgtgactgcctcttgattatgatatcttgttatccttgtaccccttgctaacaaaagggaaaattttctagcattttgtatactttagatggcaatgcatcatctccttagtttgctatatggggcctaataatatagcagggatacagtacaccttaagcagaatttgtcatgattcttacactttctccttctaggtctttgtgcatcatgatgcagctagttctgtggtgatagtctttgacacagataaccggatatttggtttgccaagggagcttgtggtaactgtatcaggtaaagacattttgatttttagtagtaaaagttaaaaacaatcttgacatttcaatatgagagtgggtcacctctctcatattgatcctgaaactaatcacttgtcttctaatgtctccttatctaaatgtgattttcctggacctctgttctcgcatatgttctcctggcttgcctttctctgccgagaccagctccatcaaggagaccctaacccagcggtgctagagaaattaaagacacacacagaaatatagaggtgtcaagtgggaaatcaggggtctcatagccttcagcgctgagaacctccaacagagatttacccaggtgtttattaacagcaagccagtcattagcattgtttctatagatattatattagctgaaagtatcctttatgggaaacgaagggatgggccaaaataaagggatgggttgggctagttatctgcagcaggagcatgtccttaaggcacagatcactcatgctattgtttgtggtttaagaacgcctttaagcagttttccgccctgggcgggccaggtgttccttgccttcattccggtaaacccacaaccttctagtgtggatgtcatggccatcatgaacatgtcacagtgctgcagagattttgtttatggccagttttggggccagtttatggccatattttggggggcctgttcccaacacttctctttcttcaggtctatactcaaacgtcacctccacggagaggctttccctgatcaccctagctacccctgtcactatctctatcctgctttttttcattatagcactttcataacattatatatttgttcatgtatttgtctatattcaatctctcccactaaaacataagttctgagagagggaggaatctacctgtatcctccaagcctagaacgatggttagcacgcagtgggtcttaatgaagagttgttgaatgaatgaatgatttgctttatattaaagtcataagttcctaggactttgacttatattagttccgctttttcaagatccaggaaagaggaaatgtttgtttacgctggaactaattcatgtcattgcttggattactgaaaggttaggaaggaaaaaaatgtggtaaaatgaatactctgctatactttatctatttgatacaaacagccttagtttatttctaagtgcagcttggatgaggcagaataaccaagttttatcacagggttcctgtgggagagacccttagttgagagaaagtagtatattggaaacatggcccaatcatagatcctgtgtggtgtgtttaaagggttcttagcttgtctcagataaagtgtaaataacttagtggttaaaaacacaggaggtagaattcagccatggtttaaatctggctctgtcacccattagctattgtgaacttagtttttattacttttagtttctaacacttttattttgataaccttgtacaaatttaaaataaacaaggagatttggatgaaatgaaagtttactggaaaggaaaagtataatagaagtcataaaaagcaggttgcagaacagtagacacagtataatttcattatggtaaaagaaaaaaaatacatgtacgtgcatatgcataaagaaagatctggagccaggcatggtggctcacgcctgtaataccagcactttgggaggccgaggcaggtggatcacttgaagtcaggagttctagactagcctgggcaacatggcaaaaccctatctctagcaaaaataaaaaaaaattagccaggtgtggtggcatgcacctgtggtactacttgggaggctgaggtgggaggattacacacacacacaaaagatcttataactaaaaatgatctctgggtaatggaaatgtaaatataggaggttttttggttttggcttttgttagtttgcttatctgtatttttaaactttgtatattgtacatatactgcttctataataataaaggttgttcttaagtgcatgaaatagaaataaaataaatgaggggtatattattaaaagttccattgtaagcggctgcttattaatatccttaaagtataatatcacccacatgatggtttttgtttgtcaggtgctactatgtcggcattgatcctaacagcttgcattatttggtgcatctgctcaatcaagtctaatagacacaaggatggctttcatcggctcaggcagcatcatgatgagtatgaagatgaaattcgcatgatgtctaccggctccaagaagtccctcctaagccatgagttccaggatgaaacagacactgaagaggaaacattatattctagcaaacattgaaaaacacattttgcatatctcccagcataagtaccaagcaaaattacagttcctcttgggagaacactgcattaagaagagagactctcttgcttcttcaaagagctttgggaaattaaattgctaaatttgtattctctgtgaatttcactggcagttttgaacttcccttccttaaagtactctaaacctttaaaaaaaaatctgatttatgcagcagagatgggacagccactttttctttttaatttaagatgagctatttggagcttatgtaataatggcataaagccaactagaggatgttgtattttgcacatcagatgtttactagtggctttagtatttttctttgttttaaatggccaaaagaatccagaaacattaaggcagggacagcagtcagaatcgacataaagctttaaaaactcaaggttttttcaacctactgaggagtacttttctctagttgttaaatagctggagtttttcttattcaggtttaatggaggttgaattgatttttaaacacatataacagtaggaaatgaataaatgggcttctgcatttggctttctacctgttccaaggctagatcggaactggtagactacgctgtaagcaggatttcactacctctcttaaggtttagcaaacttctaaatagcccattttaagggagaacttactaactttattgtgaaaggtctaaatgcccacttgaatgaagctgagagagagatctagcaaaagctaaaactcatgttgtctatctttgaacttggtaaaaacccacaggtgctgctgcttatatctgtgaagcactagcttattctaggaatgcctgattctttaatattgcctaaatcggaacctttttctatgttgcacacatggttttcagatgacccagccatctacaagatctgaattctactgaaaatatctagaaatgtggaagagacctacttgcacattcttaacctgtatttgaacacaaaatatctatacttcatgctccagcccaagcctataccctgtaatagcatactattattgaaatcgcttgaccggtcttgttcacataggcctctgggagtgatttggttctttgccctaatgtttcatttgacggtctctttttgatcaaccaatttttctaaaagttcagtcgaaagcttttaagtatagcttcctcccttgaaaaaaaatgtaaactatgactgctgagtgataaaacactgtggtgtgaaagtgtcatcttcactgccaatcaggcaaagaccggaaagatttgcattttattatgtctgtcttatcatgcaatggaaatgatgctttttgtaagtatgcatcttaccaatgatgtaacggtttaatacctttgaatgttttaataaccaagttgctgctgaacttatactaaatcaggggaccaaaaaacttgctcttatcttctcaaattgtattctatatccattaatgtatcagttatcccaaagccttcaggtggaggggtttaccaccttcctaggtcgttcaaccaggttttgtgaggaatgcattcaaagtggctttataaaagaagattttctttagcaagaataatgaggtcatgtcatttgttaataagtatctgtgataaatccgtggttcaaggttaagccattctggtattctggtattagcaactgtaaattctgccacctcatacatggaacagagcttgtgggatgctaatagttagtgaagtatacatgatttaatttctaataatctttatgttttctttaaggatggtggtgtattgctctttttcagctttatttttaagagtacagtcaggaaaccaacaaggggcctaagagtggctgcccctgcttgggacattacagcaagtgaaacaaagttaatgtgacaagctttgctttgttatcattggtcttcactagaggataccttttacatgtacttctctcttggatcaaatatgtctttaactgtacatctcagtggctggaggccatgccttttaagcatgtgtaaaatttttaaagaaatgaacatacacatagttattttagtaatatttcctgaaagaaaaaccaaattctgctataagtcttgatcttcaatgaacttttaaataatgcatttagctggaaaacaagactttcccagcttgtattacctaga

SEQ ID NO: 7430 - DNA, 6000 bp, Homo sapiens
gtcaaggaggtggcactggtaaacagtcttccagttaggaaacctgaatggctagacattagaattaagggttaaccaaaaatagaccaattttaacaaacacagaatccctcttggtattagttccaccccatactggattaagctgatctgcccctacctgaactgcctgcaagaagaggcagtaaattctttctggagaaagacaacatcatctagatcctcaaatgattaatacaaagttgtatctataatatatagcatccaatcaaaagttcttattatcaaaagacaagattaaattgtgaatgatcaagaaaaatagaaacaatcctatgggaagtacagatttctcagttatcagaaatttttaaagaatgatgatgggccgggtgcggtggctcacgcctttgtaatcctagcactttgggaggccgaggtgggcggatcatctgaggttgggagtttgagaccagtctggccaacatggagaaacctcatctctaataaaaatacaaaattagctgggcgtggtggtgcatgcctgtaatcccagctacacgagaggctgaggcaggagaatcacttgaactcaggaggcggaggttgcagtgagctgagatcacgccattgcactccagcctgggtgacaagagcgaaactccgtctcaaaaaaaaaaaaaaaaaaaaaaaaagccgggcgcagtgtctcatacctgtaatcccagcacttttgggaggctgaggtgggaggatcacaaggtcaggagttcgagaccagcccaggtaatatggtgaaagcccatctctactaaaaatacaaaacttagccagtgtggtggcaggcacctgtaatcccagttacttgagaggctgaggcaggagaatccttgaactcaggaggtggaggttgcagtgagccgagatcgtgccactgcactccagcctgggcgacagagcaagactctgtctcaaaaaaaaaaaaaaaaaaaaaagaatgatgatgaatgaattcaagaaagtagaagacaagatgaagaattttagcaggtttttttttttaagacagggtcttactctgtcacccaggctggagtgcagtggtgtggtgatggctcactgcagccttgacctccagggctcaagcaatcctcccacttcagcctcttgagtagcgggactatagggcgcatcaccacgcctggctaatgtttaaattttttgtagagatgaggtcctactatgttgcccaggctggcctcaaactcctggactcaagcaatcctaccacctcagcctcccaaagtgctgggattagaggcatgaaccactacatccagcccgataattaaaacatttaaaaattaaatcaacaatttcacttctggacaaaatggattagctgtatttctttctatttttcccactaagcacagcaaaaaaaaaaaaaatcatatatatatatttttaaaaagactcaaaaaggtggaaagaagaaggcagaccagctaaggacctcagaatgtaaagaacatgaaggtgagttccctgggtttcctttttgtttcctatgtcctatactgggtgctggagaaactggcaacctagaaatgccaaagggtgcagacaagaaaagtccaaaggaaaatggaaagccttctctctccagacaagggatgaggaaacaggtatcctaacaagacagaatacttttggacaataatttcaccactctggacaaatgccacagaaaaaactgaggcccatcttcactccttgccatcaaaggctgagtgaggaggctaggcttccacactcacctggctctaatgaagcactccacccatcccccacttggacttctcgtccattgcacagcagcaatgaggctccctgccatggtggcagtggggaccacatgcggagcagtaacaaggcaccccctccctggggaatcagtgaaggccaagggagagcctgaacttccactgccacctggaagtagcaagcatttccctatgtcccccagcagcatagtgtcagaggaagtctgcttaaacagaagacataaataagatcagaatctcataacaaatacctgaaacatcaggatacaatttataaaaattgtcattccaatagcccagagaacttcgacttgagtgaaaaaaagacaacagaccccaacatcaagatgacacagatgttggaattatctgatgaggactttaaagcagctctaataaaaatactttagtgagcaattacaaacaaacttagaacaaatgataaaacgagtctcagcaaagaaacagaagatataatgaggaactgaacagaagttttagatacgaaaaatgcaataattgacatgaactcaacgaataggctcaacagcagaatggagggaacagaggaaagacatactttctgtcagcaaatctgaagacagaatagtagatagtaccaaatccgaatgatggaaaatagactgaaaaaaaattagcataacttcagagctatgtgggacattaacacaagatctagcattcacgtcatcagactcccagaaaaagaagagaaacagtatgagacagaaaaagtattggaagaaacaatggttgagaatcccccaaatttggcagaagacataaatgtcagaatcaagaagctgaggatatcccaaacaggataaatccaaagaaatctacaccaaggcacatcataacttctgaaaactaaagaacagttcttgaaagcagtgagagagaaaatgtattttagctacagtggaaaaacaattccaattttagtcaatttcttatctgaaactatggaggccagaaggaattggcacatttttcaagtgctgaagaaagaaattgtcaacttcagattgtatatctggcaacaatatccgatcccccaagaatgaagggaaatcaagacattctcagatgaagaaaaactaatagaatttgtcaccagctgatctactctttaaaaaaaaaatggctgagggaaattcttgaaacagaaaggaaacgattagaaaaaggaatcttgggacactaggaacgaagaagagtaaaatatgcataaatcaagtaagctttcctcttctcttgaattctctaacttatgcctgacccttgaagcaaatattgtaacactgatgtggttctcctcaatgaatgcagaggaaatacttaaaaacaactatattataaatgagtgggggaaagaactttacaggaattaaggtttctacacttcactagaattaagtcagcaccggtagactgtgataatttatgtatctataaagtgtgggtttggacagcagattttatcaggttgagggctcaggccgagagcatgtagaagcagttagctcactctttctagatgtggcggctgacaaggacaaagagggctgggactagaactgctgtagacaaggaaagcagccagtggagaagagcgcatacgccaaagaacgtggatgatggagcacaggcggggaggtaggatgaaggaaatggctctgggaagaaagggtctctatgtctgagaaaggaagaaattggctgaagatacaaattagagacaaggtgagggaaattgagggagttgcctgaggatgattctcctcccagtcaagtaggcacctgctgagagaaaggataagccgagatgagggagatgatgatggtttggggcgcagaaagcgggaatgaaagacaggagctaaagccgaagttttttctctctcgctacttaaaagctgtaagataacgaattgatcagcaggtggcagtgtccgcggaggctcgcatcccgtcggccctggctctcaaggcggaaacacgcaccatggtgactttccggcctgcatcgcctctgctcccctatcccggctgacgttggacgacaaagatggcggcagggaccagcagttactgggaaggtgagggcgagaaggcctccgggtgcgtcctacgagggtgagaggggctgagtgaggacagatcttgggagaagcagcacaggaaagaaccagactcccggagcggccgagctgagcagcggggcttgcctaagtgggatccccggggccttggggataccgaacggtctggggtaggggtctggcctggccggggcgtgtgagcgggacgtggggcaggggttgggcagagtggacagagcggggatgtagaggaagagggctctcaatcgcctgggtagaattgtgttgagggagtaatggaactcggacgaaggggcttggggtacgaactctgagaggaaacgaatgttgagggagaagatccagagccccggagactggaggagtcagcgcattggagctgaggtcactattggaaaactgagtgggaaaagagaaggaggaacttgcattccggtccgtcggaggaagtatgaagagaataggagacagaatgtctcttattgggtctccatgacaactacaggttggggacttccaggactgggtgtttgaaggaggagaaaataacttacccttctgctctagagtctagaatcggttttattgaaaaagttgagagaacctgtgtgaattgcagttacatttgctatacttctcccaccaaaaaaaccttcctgtgatttgacaaatgcatttgtttaattcctgaaactatagtcggataaagtgagcttacataaaactcattcgtggattatgatgatcaacaagagcagagaaagctcacctttttctcccaactgtctctttgctttacagccgcatagaaactactttccaaattcctttgacctgtttttattgctatacactgaagcctctagaaaccacagtattgtcactatcagccccttggtctaagaaactcaattctaaatttatccagatttgcctatcatactttcaaaatgcttttacttatgtttcctactagagaagacaattattccaatcacagaaaagcgtgcttatagtttaaaacatgtattacaatgcccatttgaaatgtgtgtaccagctagaaaacttttttttttttttttttggagactcgctatgtcgcccaggctggagtgcggtggcgctatcgatctcggctcactgcagcctccgcctcctgcgttcaagcgattctcctgtctcagcctccttagtagctgggactacagatgcatgccaccacgcctggctaatttttgtatttttagtagagacggggtttcaccatgttggccaggatgttcttgatctcctgacctcgtgatccgcccgcctctgcctcccaaagtgctgggattacaggtgtgacccaccgcgcctggccgctagaaaacattttaaaattatgtagaagaggctactgatatctttattactagtcattagcctgtggttttttgaagcagcatgctataatattacagcggctcattactgacaacctactctgtgccagctgctgtaagcatatgattaccaatacataagcaaaccctgaaggtaggggtttaaaaaacaagaagctgaagttcataggttaagtagattgttgataaatcatagagtcagtaagtggctgtgccgagattcgaactggcatttggtctctgggcaaatatgctccactatgttaactacgctttctatttctggttgaaaagcatattgaaataatgttttgtattctttttgaaagagagattcttataccattacctctggtacttctgcccttttattttaaccttcacttcaccatgaatgagaatactcgtatctgtgtgtgggtgtccagactgtggcttctgtcacgcaacccttagatgccagactgctaaaccaatttctctacttgcctgtttgcttctgctattaaaacttatgtacttatttctatcatactcatattcgaccttgttagtagcacattgtttattgttagttttagccctccaaattacttt

SEQ ID NO: 7431 - DNA, 6000 bp, Homo sapiens; identical to SEQ ID NO: 761

SEQ ID NO: 7432 - DNA, 6000 bp, Homo sapiens
gagaagttaagtttatcagctcaaggaatcaggtaaggatgtcctgactcttaagtctatggatcccttgattcttttagatcttgttgtccagtcacactaggtatatgctgagacacgtaagtgttttctctttgaaaaacaatttgaggttgggtgtagtggcccacgcctgtaatcccagcactttgggaggacaaggcgggcggatcatgaggttaagagatcgagaccatcctggccaacatggtaaaactccgtctctattaaaaatacaaaaattagctgggtgtggtggcacacgcctatagtcccagctactcgggaggctgaggcaggagaatcatttgaacccaggaggcggagtttgcagtgagctgagatcacaccactgcactccagcctggtgacagagcgagactccgtcaaaaagaaaagaaaacaatttgaaatccctcaagtttaccataagaaagactccctatagagatcaagctgtttcccagcccaggagatataacaagagatccttaattcaagacaggtattcccatattaggtaaagcagtcagcaacttcccaggaaaatataaagccttaagttagttgaaatgtgaaacatctgaagtttaaccctctggctcataaatagctttgcctgttttggtgagcaaagagaaataatcttcatgcatagaatcctgatctgttttggagtgccaactaatatatcttttattttagccccaacccttttttttgagacagggtttcactctgtcacccaggatgcagtgcagtggtgtgatcgcagctcactgcagcctcgacctcccccagctcaggtgatacttacacctcagcgtcccaagtagcagggcctacaggtatgcaccatcacaccctgctaatttttgtattttttttttacagagatggggggcgggtttcaccacgttgcccaggttggtctcgaactcctggcctcaagcaatccactggcctcagcctcccaaggtgctggaattacaggcgtgagccaccgcacccagccttaaatgtttttatagagactaagtctcactatgttgcccaggctggtctcaaactactgggcttaagcgatcctctcattttggcctcacaaagtgctaagattacaggcatgagccactaagcctagccttattttagtttcttggctgctgtaagggaaacagaactttgtcagagtgacatgcaaaaaaattgaaatccatctcttttctctacagaaacactaaagctaaggaaataaaacatgtagccatttaaaatgctgcaatcgtgaagtccgtcttaaaagctcctctcattttgcccccctatgggactgtgacaacttagcagcagcaggacatgtcttaagccaagacgtaaggaaggaaggactccttacaaagctggacctcacaaaaacgacccgagagactcattaactcttgatccctaaatgaactggtaggaggaccataacaacagaggcaggaacttggccaaagaactctaaccaagccagacagtaaaagggcatttgtaagggatgcccctatcactgccctctgctatggccacacaagaggaatccaggacacatgaaaaacataaaaccacctccctccaaagcttctaaatctccatcccattttcagcactggaaaaatcatacataaacaaggctttttcatactaacagagcctaatgtttattcttttttttgagacagagtttcactcttgtcgcccaggttggagtgcaatggcacgatctcggctcaccgcaacctccgcctaccggattcaagtgattctcctgcctcagcctccaagtcggtggggctacaggcatgcaccgccatgcctggctaattttttttttctatttttagtagagatggggtttctccatgttggtcaggctggtctcaaactcccgacctcaggtgatcagcctgctttagcctcccaaagtgctgggattataggcataagccaccgcgcccggccaatgtttattcttctaaggatgtctgatatggcaaaaagttaaactgatttttttgtttatttcacttattttccttttttttttttgaaatggagtctcaccatgtcgcccaggctggagtgcaatggtgtgaccttggctcactgcaacctccgcctcccgggttcaagcgactctcctgcctcagactcccgagtagctgggattacaggtgcccaccactacgcccagctattttttctatttttagtagagatggggtttcaccatgttggccaggctggtctcaaactcctgacctcgtgatccgcccacctcagcctcccaaaatgatgggattacaagtgtgagccactgcacccagccaattttccttttgatttgtgcaaaaaagtggtatataataaataactatgtttaagtctgtcgaaaacagtgctatatatgagaaacataaaagtctgataagaatgcatttttttctttttttaattgatttttttttttttgagacggagttttgctcttgttgcccaggctggagtgcaatggcatgatctcccctcaccacaacctctgcctcagcctcctgactagctgggattacagcatcaccccacctggctaatttttgtatttttagtagatggggtttcaccgtattagtcaggctggtttcgaactcctgacctcaggtaatccacccgccttggcctcccaaagtgctgggattacaggtgtgagccaccacgcccagtcttttttctttttttaattaatttttttctgtcactatttgaactacaggaataatgcatgttgtcatgtttaatttacagttacattttcttagtgacagataaaataatttgcattctgcaatcaatgacttttttttgagatggaatctcactttgtcacccaggctggagtgcaatggcccgatctcagctcactgcaacctccacctcctgagttcaagcgattctcctgcctcagcctcccgtgtaactgggattacatgtgtgtgccaccacgccccgctaatttttgtatttttagtagagacagggttctgccatgttggccatgctggtttcaaactcccgacctcagctgacccacctgcctcggcctcccaaagtgctgggattacaggtgtgagctactgcacccagcctaatgacacttaaattccatgaaataaggtagtttaccttattttgttgtactgctatcaaataccatgttttgtgtgatgtggtcacattacagcataacctattttattatatgtcttcaggttcatttactccaattttatgatagactatcctctaaggctgtgattgaagaaatgtatttgcttaagataggaggctatgaaatgaagtccaaaatagggacactctacatcagagatttacaatgagtagggtgagtttttaaaattacctatggccagcccggcacagtagctcacgcctgtaatcccagcactttgggaggccgaggtgggcggatcacgaggtcaggagatcgagaccatcgtggctaacagggtgaaaccccatctctactaaaaatacaaaaaaaaaacaacaattagccggatgtggtggtgggcacgtgtagtcccagcaactggtgaggctgaggcaggagaatggtgtgaactcaggaggcggagcttgcagtgagctgaggtcgcgccactacactccagcctgggcgacagagcgagattccgtctcaaaaaataaaaaataaataacctgtggccaaatccctatttacagtataaagaaccactgaactctttccaaatacaagtaaatctctacaattaatttaagctccgtctgcactgggaggaattttgtttcccattgtgcagctctttaatgatgtataagggttgatgatgcttagctttaaatatctaggaagaagtaggaacaacatgaaagctcaaaattaagaacagagactggactctggtgtcctggcttctctgatatcccaggggcctattacactttgtcaggcccctcagctcccagcagatcaggaacttgagatctggctgtggtaaccaccctcaagcttgataactattcattgcgtccgagtacttcttatatttcgaactcattagatagtaaaaatctcagaatcctgatttcagatctcatgaactaattctacatcaccgcctcaaattacccagcctgaagacacaacgggcttggtatgaagatataaagtatgttgcaaagagactgagggcactgtagatatcttgaacaaaagggtcagactaacccgcagctgataaggaaagggctccaaacttctagaaccttcttgtcaattctgctttaggattagaacaagtatgactacccacaactctgttccaaccccacttccaataatctggcctaactgttgccagaatctagagcgttctcgaaaaccactcactcagcagctcccttggctagtccgactggcaatctcgaaccactgcggctgcttcggagtgccaacagcgcccaagcagttgccctcttccttggtgcttaacttaagaaagaacagtgctgggaaggataaagatcacccaggaaggacaggggaagaggagtctgacgtagagaacacgagataagcccctcgctcttcctttttttctctgtcatctttgacttctgggataaccgggggcaaccaggtcaattatggagacacacaatcacttcgaacccagactagtgatcgctggggtataattacaagggaaaacggggtgaggagagcaaaggttttggagacggaaagtgcagacaggcaacaatgcacagaagttaacaagagaacgcgggggtcgggggcgatgtaaggaagtcgtcatcgacgccgcgccgcttcccccacctcgcaccagacctctgaaattgccctcggagactcggcctctcctataaggacgatcgtcctctcagctggagaacaaggccatgcctcagctcctacgccaggcggaagcgggagaggaaggccgacccccaagagcgccccttcagggggtccatccggccttgatctcagatgggggggtgtttgcggagggcggggcatcgcctcaacagctgggggctgcatcatggcaggaacgagtttccctgagccacggagctgcaggtcgcctcctctactaccctgctacccggttacctcttcgcctcttggtcgtcgagcagctccggctcggtcgccgccattaccacatcgcactccgcggcagccgccatcttaccgccgggaccagagagctgggtgggaggccggcggtgaagagcacttccggttggagcatagagcagctccgcggcgccgcgcccagaagggctccctcgggctcgtctaccagagagaggctccgcttggggccagagcggcctcccgcccccggatgtccacggtggtctccgcgccggggcgggagcccaggggctgtgccggtgcgtaggcggcgccactttacccgtgggtgggaaggcggggtgtaccggtggtagcctctctagggcttggctgctttcagtattccaagagcctcattgccatagcaacttccaatcctagagagtcttcctgaaaggctccgtggagtctgggttgcgtggggaccaggtgacccaagactctgtagggaaggagtccccactgctacctttccgaccttggagtgtgtccacagcttcttcccgggaaagtcaagagacactttgagctcagttcccccagctttcatcgttctctggaagccctgcccagtcaagccaggggaacgcagggcgtcttcaccctgcgcctttcatccactccggatctccaaacaccaactggttcatcaccctaatgacgctgacccttttacaaggctc

SEQ ID NO: 7433 - DNA, 6000 bp, Homo sapiens
tgaggtcagcatggtgaaaccctatctctactaaaaataaaatattagccgggcgtggtggcgcatgcctgtagtcccagctacccgggagactgaggcaggagaatcgcttgaacctgggaggcagaggttgcagtgagcaagctgcactccagcctgtgtgacagagcaagactccgtctcaaaaaaaaaaaaaaaaaaaagaaagaaagaaagaaacaaacaaaaatagttatgtgggttttcgttgacatatttttgggaaaccttgatgtatgtattcagaggacttctaagccataagagacccaagtgccttgaggagccacatacttttccctgcgctgcttatttctgaggtggttaataatatcgactctgggaagattgatttttcaagactccttcccatttcttaatttatttctgcttacttagtttggttttttatttttagcagacattttagcaaagcagaaatatatttttcctgtggattttagacttgcattcttatatttacgaacttacaaaaacttatccgagaattaatttttttttcaaatgcttaggcaaattaagtatgatcaagtcttctttattgtgtgctgtaaaaatggagtggcggcaagaatgtaatacagggcatctgactgctgaggaaaaaaaaaaataatacaggctgggcgaggtggctcatgcctgtaatcccagcactttgggacacagagtcaggtggatcacttgaggtcaggagttcgagaccagcctggtcaacatggtgaaaccccatctctactaaaaatacagaaattagctgggcacggtggcatatgcctgtagtcccagctacaggaggctgtggaagaattgcttgcgcccgggaggaggaggttgcagtgagcccagatcgtgccactgcactccagcctgggggacatagcaagactccatctcaaaaaaatagatggaatgacagcaccacagggctacaatcagcgaaacatagactgtgggaaaatatataagataaacaacccaatttcttcaaaagaaattttgtaatgaatgaaaaaggaaagatggaaggagaacctgtagtttagagactcaagagatatatctacaatcataatgtataagccaggcacggtggctcacgcctgtaatcccagcactttgggaggccgaggcagacagatgacttgcggtcaggaaattccagaccagccagggcaacatagtgaaaccccatctctaccagaagtataaaaattggccgggtgtggtggtgcacgcctgtagtcctaaggcaggaggctaaggcaggagaacagcttgaacctgggaggcagaggttgcagtgagccaagatcacgtaactgcactccggcctgggtgacagagtgaagaccctgtctcaaaaaaaaaaaaaaaaaaaaatggtttggacacagatcagagaaatttgaatattgactatatattttatgatattaaagaatcattgttagctgggcacggtggctcacacctgtaatcccagcactttgggaggccgaggctggtggatcacgaggtcaggagttcaagacctgcctggccaagatggtgaaatcccatctctactaaaaatacaaaaaaaattagccaggcgtggtggcgagcacctgtaattccagctactcgggaagttgaggcagagaattgcttgaacccaggaggcagaggttgtagcgagccgagatcatgccactgcactccagcctgggcgacagagtaagactccatctaaaagaaaaaaaaaaaaaagaaatcattgttaatgcatttacgtgtgatgacaatattgtggtcatgttttaaaaataagtcctggccgggcgcggtggctcacgcctgtaatcccagcaatttgggaggccaaggcgggcggatcatgaggtcaagagatcgagaccttcctggctaacatggtgaaaaccccaccttgcaataggccgagatttcaccactgcactccagcctgggtgacagagcgagagttcatctcaaaaaaaaaagaaaaaaaaaaaaagccttactggccgggcgcagtgactcaagcctgtaatccaagcagtttgggaggccgaggcaagcctcaggccagacctgaggtcaggagtttgagaccagcctggccaacatggtgaaaccccatctctactaaaaatacaaaattagctgggcatcgtggcctgtgcctgtaatcccagctacctgggaggctgaggcaaggcaggaggtggaagttgcagtcagcgagatcatgaacactgcactccatcctgggcaaaaagagcgaaattccatctcaataaataaataaataaataaataagtcttttccttttagacatccacactgaaatatttacaggtaaaatgacatgatatctggactttttagtaatgtggagatgagtgagtggcagtaatcttttttcatgactataaggtgatgttaatttttgaagcattctcctcaaaagcaagattaaaaaaaaaaattttgtcgaagcagagtgataggtgcctgggagtttgttgtaccatcctgtctgcttaagtatctgtttagaattttccataataaataatattgattaataaataaaaattgtcgaccgggcgcggtggctcacgcctgtaatcccagcactttgggaggctgaggcgggcgaatcacgaggtcatgaatcgagaccatcctggctaacacggtgaaaccctgtctctactaaaaatacaaaaaaatagctgggcgtggtggcaggcacctgtagtcccagctacttgggaggctgaggcaggagaatggcgtgaacccggaaggcagagcttgcagtgagctgagatcacgccactgcactccagcctgggtgacagagcgagactcgtctctaaataaataaataaataaaaattgttttttaaacagaggaatatttttccctttgagaattctttataatacctatttgttttctcgggttatgacagatttggaacattgctaccaataaactgacgttcttgaactcctttaagatgaagatgtctgttatccttggtatcatccatatgctgtttggagtcagcctgagtctgttcaaccatatgtgagttgttccatttctgtcataagaatgtgcatagtttagagaatgcttttgtgtaaagaaatcatgacatctttggggagggattaataactcagaacctcattctacattatagaagtgcttttctaaaaatttaatggtgtggccaggcgcggtggatcatgcctgtaatcccagtactttgggaggccaaggccggtggatcacctgaggtcaggagttcgaaaccagcctggccaacacgatgaaaccccgtctctactaaaaatacaaaaatcagccaggtgtagtggcacgcgcctatattcccagctattcgggaggctgaggcaggagaattgcttgaacctgggaggcagaggtcgcagtgagacaagatggcaccactgcactccagcctgagcgacagagtgagactctgcctcaaaaaaaataaataaataaataaatttcatggtctggccgggtgcagtggcttacacttgtaatccagcactttgggaagatgaggcgggcagatcacttgaggtcaggagttcaagaccagcctggcccacatggtgaaactccgtctctactaaaaatacaaaaaattagccgggtgtggtggcgtgcacctgtaatcccagctactctggtggctgaggcaggagaattgcttgaacccaggaggcagaggttgcagtaaaccaagataacaccactgcactccagtcggggtgacagagcaagactccatctcaaaaaaaaaaaaaatgttgatggtcttaaattagacttaatattagtcctttaacaatttactgttccagtaaagatccttgaaaaaaacttgagcaattttcatcaaaataagtgaggtctctttttttccttgatgtgcaactcacataaaattattagctgtggactgggtgtgggggctcacacctgtaatgccagcactttgggaggccaaggcaggcggatcacttgagcccaagagttcaagacaagcctgggtaacacggcaaaagaccccatctctacaaaaaaaaaaaaaaaaaaaagttatgaactgtggtctcaaaatgtactagatttttccattctctttctcatggagagaatggtggggatggtattggagccgttcaaggttcaaaagtttaaggcctggcacaatggctcacatctgtcatcctgcactttgggaggccaaggcgggcagatcacctgatgtcaggagttcaagaccagtctgggcaacatggcaaaaccccatctctacaaaaaaatgtaaaaattagctgggtgtggtggcgcatgcctgtagtcccagctactcgagaggctgaggtaagaggattgcctaagcccagggaggttaagactgcggtgagccaatattgcaccactgtactccaggctgggtagcagagtgagaccctgtctcaaaaaagaaaaagcaacagcaaaacaaaaccaaggttcaaaagtttgaccgtgatagttaatcctgcattgtctctgttgtctccagcttctggttgctgctgcttaaagtgataaagacagaattgagggggtattaagtagaaaaatctagtgaatactccattcagtgtaggagtggccctaggcccatttacccttaacatttttttctctctcctttttagctatttcaagaagcccctgaatatctactttggatttattcctgaaataatcttcatgacctctttgtttggctatttggttatccttattttttacaagtggacggcctatgatgctcatacctctgagaatgcaccaagccttctgatccatttcataaacatgttcctcttttcctacccagagtctggttattcaatgttgtattctggacaggtacgtcagcccagaggcagactgtctgagatgattatacttgatcaggaagccagatgtttctctgaccctaaaaaatttataactgcccttctatgggacaattctagggctttgccacaaaatgtgataattattttgagaaattggatagtgttattcatagattagtaagaaagtactgttgggggaaatttgtgccatatttggaaactgcgtatgtgatcggtagacttttatatgatgtaccttgtccttcttcttactctgcagaaaggaattcagtgtttcctggtagtggttgcactactgtgtgtaccttggatgctgctgtttaaaccattggtccttcgccgtcagtatttgaggagaaagcatttggtaggtgtatttctattgctaaaagttactagacttttgttttgttcaagatcaaggcaattccccagtggatataattaattgtgcacaaatctatatattctttttctttttctttttctttttttgagacggagtctcgctctgtcccccaggctggggtgcagtggtacgatcttggctcactgcaacctccacctcccaggttcaagcaattcttttgcctcagcctcctgtgtcactgggattataggtgtacgccaccacacctggctaattcttgtatttttagtagagacggggtttcaccatgttagccaggctggtttcgaactcctaacctcatgatccgtccaccttggcctcccaaagtgctgggattacaagcgtgagccaccatgcccggccacaaatctgtatactattaaaacgcatttgtggccgggcgcagtgcctcactgctgtaatcccagcactttagcactttgggaggccgaggtgggtggatcacttgaggtcaggagtttgagaccagcctggccaacatggtgaaaccccatctttactaaaaata

SEQ ID NO: 7434 - DNA, 6000 bp, Homo sapiens
cctgtggctgccccctggaacccggagcactggctacagcgcccacagctgactcggcaggtcctgggaaaggaggacctgacagctttttccttgggaagccccctaccccgctacctctacctggctagcaaccagactaatgcgtggggtcaccagcgcgggtaccgaatccagatccacagcccccttggcatacacatacccctggagagtgacatggagagggccctcagctgggggaggtgaggagggccctggcctgggtggaaggaaaggacagcccctcccctgccccagtccttggagacaaactcccttcccacggctaccattcatccctgtacctcccctcaaacccaagttagatacacggtgggaaatggtctcacacagaatcggatctaagggactcctgggccagtaaaggcacttgacatttcccaaaaccaccttcttatgattcctggccagataccagcttgtggtgacccagagaaaggaggaggagtcacagagcagtagcatctatcaccagaatgacatctggacacccacagttacctttgctgacttcatcaacaatgaaaccctcttaggagaggttggttgccctagggacataggaaagggacacctgtgggcatggcatcttggctgcccagcctctggccaaaggttagagggaatggctgatttccagttcgcagattcagaggccatggagttttctgatgaccaacacaggtcatccctcctggggtgagattagctctgggacactggctcccccctctccccgcacagctgcttacatggattgctccacgtgttgtatgggcatgaggctggggagagtggaagccaggctgagactggaggctgggattgtgactgaagggtggttctttgggtcacgcttccatagtcctccagctcctccttcttcttgcaggatctggtggcttgggtcacagccagcttcctgcacattccccatgccgaggacatcccaaacacagtgactctggggaacagagttggcttcttgctccgaccctataacttctttgatgaggacccctccatcttctcccctggcagtgtctactttgagaagggccaggatgctgggctctgcagcatcaatcctgtggcctgcctccccgacctggcagcctgtgtcccggacttaccccctttctcttaccacggcttctagtcctgagggtgtggcgggcggcgtggttaggcacatgtacttttccctgtttctactttctattctccgtgtttttatcacacctgctccccagattcccaccccctcaatgttcctctcacacgaaacccccatcagtccctttggttaattcttacttcctgttcatctctaaagtgttaaattataaaaatgatttttaaatattcaaagaaaaatatcacaaatcctactactcagaaataggtggtcacattacatcagacatctctttatgcatgtgcattcaaaaggaagagtagatagaattttgtaaaacagatgttgtatgtaatttataataaaaagtattagaggaattttacttgaatttattgtttgacctgttaagtatctagagtcctctggagaatactaaggagtctggccagggaaattagcgctgggggccagagggcaagggggatagacctggccaaggaatgtcatttggaaagctaaaggggcagggggtgggggtctttggaaggaaaacgatagtttgaagttacaggaaaatatctggccctgactaagtgggggactggggaagaagctgggctgaggtcaggagaggctgctctgcacagatcctgctccttcccagtgctgcattatcttgaaattttccttccccttccccctagccccaactctccccaactccaaccctgacccagaaagtagagtgatttggaggctggaagacaaaaccatgtaaggtctgtggaaatcacagctgttcagacccgcctccaaccccggccaccccgcccccttgccctagccttcctgtgtccttcccacccttagtcccaggcatctgactaccgggaacctcagccagagtccgggagccccccaccccgtccaggagccaacagagcccccgtcttgctggcgtgagaatacattgctctcctttggttgaatcagctgtccctcttcgtgggaaaatgaaccagaagacaatcctcgtgctcctcattctggccgtcatcaccatctttgccttggtttgtgtcctgctggtgggcaggggtggagatgggggtgaacccagccagcttccccattgcccctctgtatctcccagtgcccagccttggacacaccctggccagagccagctgtttgcagacctgagccgagaggagctgacggctgtgatgcgctttctgacccagcggctggggccagggctggtggatgcagcccaggcccggccctcggacaactgtgtcttctcagtggagttgcagctgcctcccaaggctgcagccctggctcacttggacagggggagccccccacctgcccgggaggcactggccatcgtcttctttggcaggcaaccccagcccaacgtgagtgagctggtggtggggccactgcctcacccctcctacatgcgggacgtgactgtggagcgtcatggaggccccctgccctatcaccgacgccccgtgctgttccaagagtacctggacatagaccagatgatcttcaacagagagctgccccaggcttctgggcttctccaccactgttgcttctacaagcaccggggacggaacctggtgacaatgaccacggctccccgtggtctgcaatcaggggaccgggccacctggtttggcctctactacaacatctcgggcgctgggttcttcctgcaccacgtgggcttggagctgctagtgaaccacaaggcccttgaccctgcccgctggactatccagaaggtgttctatcaaggccgctactacgacagcctggcccagctggaggcccagtttgaggccggcctggtgaatgtggtgctgatcccagacaatggcacaggtgggtcctggtccctgaagtcccctgtgcccccgggtccagctccccctctacagttctatccccaaggcccccgcttcagtgtccagggaagtcgagtggcctcctcactgtggactttctcctttggcctcggagcattcagtggcccaaggatctttgacgttcgcttccaaggagaaagactagtttatgagataagcctccaagaggccttggccatctatggtggaaattccccagcagcaatgacgacccgctatgtggatggaggctttggcatgggcaagtacaccacgcccctgacccgtggggtggactgcccctacttggccacctacgtggactggcacttccttttggagtcccaggcccccaagacaatacgtgatgccttttgtgtgtttgaacagaaccagggcctccccctgcggcgacaccactcagatctctactcgcactactttgggggtcttgcggaaacggtgctggtcgtcagatctatgtccaccttgctcaactatgactatgtgtgggatacggtcttccaccccagtggggccatagaaatacgattctatgccacgggctacatcagctcggcattcctctttggtgctactgggaagtacgggaaccaagtgtcagagcacaccctgggcacggtccacacccacagcgcccacttcaaggtggatctggatgtagcaggtaagacattttggtggggagaaggcttctggaagaagggctgaaaagttgtttccattagctttgggttttatgtagattatcccagaaaggaagacgtggatttttgtacttccccttttgctggatgggagagagttggctgctgagttttatttggatcttagctcactggctgggtgcaaagctgcagccttcctctacgtgacctcatccaaagatcttgggaaatggccgagctcagggaggaggcaggatttgggctaacagtgtccccattgccctcttctctcccttgtacttatatgggctctgctgctgggagcagccttctgtttgtcagctcagttctgtgtctggcctgtggtggtggtgttttggaggatctctttgcattctaccacgtccctggcatgtgcaggtcagtcattccaggttgtacatttcctttggagatggaccctcctccctgattttccttctttctctgggcacaattcacctaagtgtgaggggtcacatggatcccgtggagcattctggatagatcctggagtctggtcacagagagagccaaggctacatgatggcttggagtcttcatctttgtcttttcactgtctttccccacattgagtcagtcaccaggtgtttttttttggttttgttttattttgttttgtttctgttttgcacctgcagtatctcggcaggtcagactgtcatgccgtgcaggtgccagccctctctctgctgtttttgctcttgttgctctcagagccaagagccactctgcacccagagggcctcccatccacaccagcctgccctttactcagctctcactttcgtcatcacctgtgggatcctgtctgcagaaccccctcaaaactctttccttcacggtgcagctccaccctgccttgctgtgctctgcacagctacacccaaattctccatgtccctggacacgcacttcacatgttacagtcaggcatcctcctgtttgcttatgctttgtctctgcttagaatgtccttccatatcatcttttctggtaatgtcctttaaggccaggctgaaaagttgcccggaagggcccccttttcctgcctgcaactgtattcctgtgatccggaagttgcctaggccatgctcctctcacaggacaggccagtcagtggtttgtctgtctgcgtggaaagcaagagggtaaggatgatcattcatctctatccccagggacgagtacagtcctctctgctaatgaatgttgaaagaatgaatgagtgaaatggaatgaactccctgatgaagtattttaatttacaggtcaacagctttggctaaaggattggaggtatcctggggagagggaagagaaggaggggcacactcagttctgggctgctctttggcccccactctgaagccagatgggggcagagtccagaggggccagggcagttgcctgacaggccctcccctatcccaccctgagcaggactggagaactgggtctgggccgaggatatggtctttgtccccatggctgtgccctggagccctgagcaccagctgcagaggctgcaggtgacccggaagctgctggagatggaggagcaggccgccttcctcgtgggaagcgccacccctcgctacctgtacctggccagcaaccacagcaacaagtggggtcacccccggggctaccgcatccagatgctcagctttgctggagagccgctgccccaaaacagctccatggcgagaggcttcagctgggagaggtgagtggcgggcagtcagagaggaggggggcagtgagagtgggaaaggagtgttggcggacactcagctcacactgtaggtgaggggagagctctctcaggaaggcttttcttttccttttttttttttttttttgagatggagttttgctctgttgcccaggccggagtgcagtggagcaatctcactgcatcctccgcctcccagtttcaagcgattctcctgcctcagcctccccagtagctgggattacaggtgcacgccaccacacatggctaatttttgtatttttagtagagatagggtttcaccatgttggccaggctggtctcgaactcctgacctcatgatccaccctccttggtctcccaaagtgctgtgattacaggcat

SEQ ID NO: 7435 - DNA, 6000 bp, Homo sapiens
gagtccgggtaaatggctgggctaccctattcctccgaaccagcatccccaccatcaacatggagaacaagaccacgtgggtgagtgcgcatgttcactaggacagcagtctccagccagagcttgagagtacagggcatcttttaagaggacactgacgcacttcagccatatggttctcaatcttggccacacggtaagagtatctggaggagttctggtgtctggactgcacccagagcaattaaccccgggtccctgggagtggattccgggattgctgtgtttaaaggtcccccaagtgatgctaatgtgcagccagggctgagaaccactgcattagcttccttgatctgcacaacgcctccatgaagagtagggctgggactgcctctctattttatggctgagaggctgaggcctagagagacttgagtggcctccccaaagtggcacagcttgtcaggggctggaacgtgggtctcctgattatctcacccattgtcacatccactatggacctgtgagcttcccgccacgggcaatatgtatgtatagagagaaaggcaggatatcaaggcagaatggagggaggttcagccatgagaacctggtgagtattgacagatgatgtcatcatctacgtggcagaaaagagaagcaatggaaaagctattattttattttattttgcttcagagatggtgtcactctgttgccccagctggaatgcagtgtagtcctgaactcctgggctcaagaaatcctcccacctcagcctcctgagtagctgagactacagccatgtaccacgatgcccagctaatttatttctttattcatgtatttatgtatttatttatttatttattttttgagatggagcctcactctgtggccaggctggaatgcagtggcgtgatcactgcaagctctgcctccctggttcatgccattctcctgccttggcctcccaagtagctgggactacaggcgcccaccaccacgcccggctaatttttgtatttttagtacagacagggtttcaccttgttagccaggatggtctcaatttcctgaccttgtgatccacctgcctcggcctcccaaagtgctgggattacaggcatgagccactgtgcctggcctaattttttatttttagtagacatgaggtctcactgtgctgcccagcctggtcttgaactcctggtctcaagtagtcctcccacctcagcctcccaaaacactgggattacaggtattagctaccacacctggcccaaaaagttattagacccaataagataattcaggaagtccaagaggtcaaaacaagatcaaaatacccaaaccccctaggtttcctacatgctagcaataaccaatcaaaaggatagttgaaaagatcccattcaaattcatcagaaaagtgatagagcatctgggaataaatataacaaatatgcagcaaaaacttgagaaatgattagaaaaaagtcaatattgtattatcaagttgtcagatcttccacccaaattattccagtctcagtaggattcaggaaacttgaaaaagaagttcccaatcttgaatctgagttgcatctagaagaataaatataaaattgctaataatttgttgtgaaaaggatataagtgaagatacgtgggagatacttatagggagatgaatgcagggttggttatgtacattattgtacatttcctaagatcaattaatgtagtatagaagaggtagaagaagggccagaaagatcagtggaacaaaatagaactttatggtacagatggcatttttaatctgtggagaaaggtagattattaagtagtgttgggagaacacatttggaaaataaagacaaacctctacttcacaacataaacaaaaatacagttagattaactatctacatgtagcaattaaaacctaacatgccaggatacaatatacagaacactttaatagtaacctttaattatgggaagagtgagttataaacccagaagtcacaggaaaattttgataaattagactctatgaaaatttaaatctgtatacagcaaaagagatagtaaagaaactaaaagaggctgggcacggtggctcacacttgtaatcccagcactttggagactgaggcaggcaggttgcttgagcccaggagttccacattagcctgggcaacatggtgagaccttatctctacaaataaaaacaaaaattagctgggtgtggtggtgcacacctgtagtcccagctacttgggaggctgaggcaggagaatcgcttgagctcaggaggttgaggctgcagtgagtcgtgatcatgccactgtattccagcctgggtgacagagtgacatcttgcctcaaaaaaaaaaaaaaaagaaactaaatgggcaaatgatatactgctttttaaaaatgtttacagcatatatgacaaaatattgatatgtattttttaatatataaaggatatcaattggcagcgtacatagggtgaaatacaaatgttcatcttgctcataaagaaatataaatcatagcaacaagatttttcttgcctatcagattgggaaatattaaaaaaaataatgctggccaggcgctgtggctcacacctgtaatcccagcactttaggaggccaaggcgggtggatcatttgagttcagttcgagactagcctgggcaacatggtgaaaccccatctgtattaaaaatacaaaaattaactgggcgtggtggtgcatgcctgtaattctagctactcaggaggctgaggcagaagaatcgcttgaacctaagagagaaatgtagtgagccaagatcactccactgcactccagcctggacgacagagtgagactctgtctcaaaaaaaaaaaaaaaaaaaaaaaaaagaataatgctgtctaatgctgatgaggtggagagaaatgctattgatttggatgataaattggtagattcttttaggagacgaagttttcagtatctattaaaatttaaagtgcccatttccttagatccagtacatgagaatatattgtaaggagctaataggacaagtatacaaagataaatatatggggatattttagataattatttataatggcagaaagttggaaacaatctaaatgtctttcagtaggagattggttcaataaattatggtacatttccttcaatgactgtgcagtcctcagaagagattaggctgatctttaccaattgacgtgaaaagatgatgatattaagtgaaaaaaaaacaggttgctggctgggcatggtggcttatgcctataatcctaacactttgggaggccaaggtaggaggatcgcttgagcctaggagtttgaggctatcctgggtaacaaagtgagacccatctctacaaaaaaaatcaagaaattatctggatgtggtggcacatggtcccagctacactggaggctgaggcaggagaatcacttgagcccaggaggtggagtctccagtgattcatgtttgtgttattgcactccagcctgagcaacacagtgagaccctgtcttaaaaagaaaagaaagagaccgggcgtggtggctcacgcctgtaatcccagcactttgggaggccgaggcgggcagatcacctgaggtcaggagttcgagaccagcctggccaacatggtgaaaccccggctctactaaaaatgctggggtggtggcgggcgcctgtaatcccagctactcaggaggctgaggtaggagaattgcttggacccaggacacagaggttgcagtgagccaagatcgcaccactgcactccagcctgggcgacagagtgagactgtcttaaaaaaaaaaaagaaagaaaagggaggaaggaagagagggaggaagggaggttgctgaagggtgtatgtgacatgatcccatttatgtagatcatattaatattccatatttaaaactatggaaagagattcaccagagattacagagatcgtaatttctagatattaaaattactgggaaccagctgggcatggtggctcacgcctgtaatcccagcactttgggacgtcgaggcaggtggaccacttgaggtcaggagttcaagaccagcctggccaacatggtgaaacccgtctctagtaaaaatacaaaaatgagctggttgtggtggtgggcacctgtaatctcagaaactcaggaggctgaggcaggagaattgcttgagcccaggaggcagaggttgcagtgagccaagattgtgcccctgcactccagcctgggcaacagaatggaactctgtctcaaaaaaatatatatattatagatttataatatatattagattatacattatagatttataatatatattagattatacattatagatttataatatatattagattatacattatagatttataatgtatattagattatacattatagatttataatgtatattagattatacattatagatttataatgtatattagattatacattatagatttataatgtatattagattatacacatatagatttataatatatattagattatacatattatagatttataatatatattagattatacatattatagatttataatatatattagattatacatattatagatttataatatatattagattatgttatattatagatttataatatatattagattatgtatattatagatttataatatatatagaatatgtataatatatatattagattatatattatacatgtataatatatatattagattatatattatacatgtataatatatatattagattatatattatacatgtataatatatatattagattatatatattatacatgtataatatatatattagattatatatattatacatgtataatatatatattagattatatatataactgggaacctttagttttctttatatcatctgtatttttaaaaaaatcatcaaaataattttaaaagaagtgaaaatcatgtatagtcagaacaaacacggctgggcacagtggctcacacctgtaatcccagcactttgggaggccaaggcaggtggatcacctgagttcaggagtttgagaccagcctggccaacatggtgaaaccctgtctctactaaaaatacaaaaattaattgggcacggtggtacacgcctgaaattccagctacttgggaggctgcagcaggagaattgcttgaacctgggaggcagtggttgcagtgagccgagattgtgccactgcactccaccctcagcaacagagcaaaactccatctcaaaaaaaaaaaaaaaaaaacctcatatacacacacatccgtatttatctccattgtaggggaagaaaaagaatgggactatcagccgggcatggtggctcacgcctgtaatcccagcactttgggaggccgaggtgggcggatcacctgaggtcgggagttcgagaccagcctgaccaacatggtgaaacctcatctccactaaaaatacaaaattagccaggcgtgatggtgcgtgcctgtaatcccagctactcgggaggctgaggcaggagaatcgcttgaacctgggaggcagagctggtggtgagccaagattccaccattgcactccagcctgggcaacagagcaagactctgtctccaaaaaataaaataaaataaaataaaataaaaagaatgggaatatatgctatgaattctttgtggggtttttttggtgaatatttatggagtgtttgctgtgtagcaggtgttgctctaagcagttttcttatatcaaacacacttaattctccccagcaacctatgagagaggtaatattcccattttacagatgaacaacagagaggttaagtaacttgccaaggccaaacagctcgtgaatagcaaacctgggctagaacccaggtaatgtggc

SEQ ID NO: 7436 - DNA, 6000 bp, Homo sapiens
atggtggcccctgttcctccgtccattctacatctcatccatcagacaccagctaggtgtccgtgtgtgccagctgctctgctgggccctggagagatggagctgacatgtctctcatcaaggagttcactactagaggaacatccagggccttggagcccagcccattccactgcagggcaaatggaatggctgcatgccaggggccttggagctggatctgaaagcatggatgggatttggtcaggcagggcaagtaggatgggggaacggaggaggaggtggctggacatgctgttcagtcaccaccaggccatctagggaagtgcctggatttgaggagaggcagcaggtaccagagcacttagagccaggaagcaggggcgcagcagcggtagaggcgccccgctgcagggatcccttcaaggaagaacctgctgcacatgcagcgaggtgacagcctccagctgtgggcaccttcaggccctgcttcagctttcaagccagggactgagtgtggaggtggctcagggctcaccagctccaggcagtacatgtgccggagttttcccaggagccggccaggacttcctcgaggctgtgctggaggtggacgctcttcttgcccctctccttgcatggccgtctcctttgcggtccaaagcctttccctgccagctcctgccccatcgttcacaggggtacccgcagtgaatctcatgccctctcactctgtcttgatctgcttcctagaggacctaagcagtattggggtctcaggcttcacctccatcatcccccatgggcactcctccttcgctgtgaggtggcctcagtcttcccacatggaaatgctttggattcatctggaagttagagtcttctgaagaccactgtctccttccagccctcggtgggagtgctgggtcttaggtggacacttgtaccctcggtggggtctttgcacccttcccttgggacacacgtagatatttattttaacatctgctgaaaaaggaagtggtatctgagtccagaacagaaaaccaagcacactgccatgtaatctgagagccagtgggggacgggggtgttggtatgatggagggaggcccagtgcgccctcagtggctggccagggaggtgctcccatggtggtactgattgtgcggagtccttaggtgaaaagcgcttctctgggtaaaaggtgggcaggaacatctaggtctgagggtgcccccaaccaagatggaactcaaggaacaggaggaggtgagggtctgccccagtgatgtgtctgcatctctcttacagaaaggaaggcagaggaagccacggccactggaccctggcgagggttccaaggacacagacagttcagcagggcgacggggcagcacaggcagaaggcatgggcgctggcggggccgtgctgagagcccaggagtgcccgtggccaaggtggtacgggcagtaaccagccggcagagagccagccggcgggtcccacctgccccacccccggaagccccaggccgccagaacctgagtggggcagcagctggggaggcgctggtaggggcagctggcttcccaccacacggagatacagggagcgtggagggcgccccccagcccacggacaatggcttcacccccaagtgcgagatcgtgggcaaggacgcactgtctgcactggcccgggccagcaccaagcagtgccagcaggagatcgccaatgtggtgtgcctgcaccaggctgggagcctcatgcccaaggctgtgccccggcactgtcagctgactggtgagggacaggggtgctccagcccttcccaggcgggggcaggggggtggcatggcccggatcctcacccctatctctctgaggaagaaagagccaaggggatcctacctccctgcctaagtcttcatccagtgtacttactaagtggcagaggcagagtggggacccacgagcatggagctccaagtctaggtttcttcggaaggcaggcagctccctcttcccatctcacccccaccctgtgacctagggtgggcctcgccaacgcctgtcctctgctctcagggaagatgagccccggcatccagtgggatgagagccaagcccagcagcccatggatggccccccggtgcgaatcgcctacatgctggtggttcacggccgcgccatccgccagctgaagcgtctcctcaaggccgtttatcacgagcagcacttcttttacatccatgtggacaaggtactgtggtggggagaggccaaggggtctgggatgagcagagcagaaacagaaggttgcagacagacagagtctctgacctggcccaggtagcctaggagggaaactgaggccctgaacaggggagtggcagcacgagccagctcagccgcttaggggctggagccctgccctgtgctttcctcgtcttgtgtcccttcactctgtcctggggtgggattggggatggcgataacactggaggctagctgagtgtctcctccccaccagcgttccgactacctgcaccgggaggtggtggagctggcccagggctatgataacgtgcgggtgacgccctggcgcatggttaccatctggggcggggccagcctcctgaggatgtacctgcggagcatgcgggacctgctagaggtgcctggctgggcctgggacttcttcatcaacctcagtgccactgactatccaaccaggtgtggggatggggctctgagtcctctgcatgggaggggacccctgtctgggcacctggggttggagggctttggtggaccttctctgccccataagcgtaactctgggatccgccctgctcagacatgggcccctgggccccagctatgttttaggggaggggttggtgtaagatgatctaagaattgagcatgataggagatggggaggaggaggagccagaggtctgtacctggtgttctgggtcagacagcaaggggcagaggaaggatggggtggtcttcctcaggggcctctggtgctcaccaccccagacatcagccaggggtagggcacatggccagccagcaatcaggcagagaagaaaagccagaaggtccgctctgggccagtgactgagcaactatctcatgtggctgcctgtcaccccattccttcaccaggaccaatgaggagctggtggcattcctatccaagaaccgggacaagaatttcctcaagtcacatggccgggacaactccaggtgagggggtggggaaggaggccctggccccagagtcttgtcccaacccctcccacacagttgggctcggtggctccagccctgggtttcaaagcctccacaccagtcacaggttgaggagtgttggttgccaggcgggtgaaagagcttagaccccaccctgcaggatccccagccatggcctctctgctgcccacaggttcatcaagaaacagggcctggaccggctcttccatgagtgcgactcacacatgtggcgcctgggcgagcggcagatcccagcaggcattgtggtggatggcggttctgactggttcgtgctgacacgcagctttgtggagtatgtggtgtacacagatgacccgcttgtggcccagctgcgccagttctacacatacacactgctcccagccgaggtgggtagcccagcaggcatgaaggccagggagggcgtgggttgggctgcctgcagctcaccttccactctcccttgctgcttgcagtccttcttccacacggtgctggagaacagcctggcctgtgagaccctcgtggacaacaacctgcgggtcaccaactggaaccgcaagctgggctgcaagtgccagtacaagcacattgtggactggtgtggctgctcccccaacgacttcaagccacaggacttcctccggctgcaggtgcttgcccgaggccccaaggcccctggctaggtcttctcccctggcttttcaccaggaaaatggcagggtgggccagtaagagaatctggggggccacggcctgcagcaaccctcaggggtctggggctacaacagcagcaggaaaagccgcaggaggctgagctctaggcagtgctgaggggccagccccaccatgccctctggggcttccagagcccttcaccctccttgcctctcccactccagcaagtctccagacccaccttcttcgcccggaagttcgagtcgactgtgaaccaggaggtgctggaaatcctggacttccacctgtatggcagctacccccccggcacgccagccctcaaggcctactgggagaacacctacgacgcggctgatggccccagtgggctcagtgatgtcatgctcactgcttacacagccttcgcccgcctcagcctgcaccatgccgccactgctgcacccccaatgggcaccccactctgcaggtgagacccccttctgacatacagcaggcccttggggtgtggtgccctagggggaggccaaccagagagtgacgtcccctgcccacaacaaggccccagtctgaagcagggaaaaatgcaaataccgaaaagacggctagagccaggcatgcaggtgctgtgggggtgagatctggggaaaggaagtgcctggggatgggactccccagagccccctccctgggactccaggccaagtcaggtgtgctgatggcatctccctttctccctgctggcaccttaggtttgagcccaggggcttgccgtccagcgtgcacctgtatttctatgacgaccatttccagggctacctggtgacgcaggcggtgcagccctcagcccaggggccggcagagacgcttgagatgtggctgatgccccaagggtcgctgaagctgttggggcgcagtgaccaggccagccggctccagagtctggaggtgggacaggtcccccacttgctttctcccaacccccacccagacttggggtagtgggaagagagggacagacaccaagggaggggtaaggttatttttcccagtcatggcagccatggtgatgcccccatgcagacatcctgtgtcaccccccagcctgtgcacactgaggagcacctcctggttggggtatgcagaggacatgcagggagcagggagggaattatcagttccactacaacacaagcccaatcttccagactacagagatttcgcctagaggggcagggacattcgagttgggccatgaaactacacttctgagtggctcctcatagtctttttttttttttttttgagacagtctcactctgtcgcagtggcacaatctcggctcactgcaacctctgcctcccaggttcaagcgattctcctacctcagcctcccgcgtagctgggactacaggcgcgcgccaccacgcccagctaatttttttttttgtatttttaatagagacggggtttcaccatgttgaccaggatgatctcgatctcctgaccttgtgatccacccgcctcggcctcccagagtgctgggaatacaagcgcaagccaccgcgcctggcccctcctcatagtctctttctcagaggctttggcttcatgtgggaatggtctctgggcaggactttgaacctcatccctgccgtattgtccccaataagggggactgacctccactgcctagcagtcagaatggaagcctagaacgaatctcagagctgggagagatattaaaggtctcctagtctgaccccttcattttgcagatggggaaactgaggcccagaaagagacagtgactggcctgagattacacagtgagaggcagcttcagaggagggagaaggacctttcccccacactcctgcccagctgcctctctctctacaggttggcactgattgggaccccaaagagcgtcttttccggaactttggggggttactggggccgctggacgagcctgtggccgtgcagcgctgggcccggggccccaacc

SEQ ID NO: 7437 - DNA, 6000 bp, Homo sapiens
atttatttatttatttatttagagatgaggtcttgctttgtcacccaggctagagtacagtggctcgatcatagctcactgctgccttgaattcctgggttcaagggatcctcctgcctcagcctcccaagtacccgggactataggtgcacatcatgatgcctggctagttaaaaaaattttttttgtagtgatggggtctcatcaccttgcccagacccatttcaagactcctaggctcaagtgatcattccatgttggtctcccaaagtgctgagattacaggtgtgagccaccgtgcctggccccataacttcatttttgtgtgaagttgcccagcctaaaggctggccactaaatggacacttaaaaactctctaatagtgtggattggtgggcagtctgattcctctggcttaaaccaaaatgcaaacatgaaaggaggcatggccatagacccccggtgagaattctttactgtgatgacacagaagctgaagagggatgaaaaagcagtttgaccagcaagcttgctggttccctaggccaccctttcttctctccttttcagttcctccttccctctaacttggagctgctaactccagcccatctaactgtttctgattaagaaagcttcaagccttataaggccctctgttgcctatggtttatgttggctggagagcaaggttgttttttgcaaagtctgattcaaagaagtggcaagggcttacgtaggctgtgtgtgtccgcctcctggggctggactgccttattggaacaggttcctttgagggagcctgagagtaaggggggcttattatcccttacccttagtggtggctctgtaaggctaatgtgtggtgtggccacagggcttcctggcaagtgtattcgctgagaacttaaaggtaaaagcaagcccctgtttacctacacagtgtacctgtcatgctaccagccacagaggcatcctgtttcaggaatcaagtctggaagcagcttctgcttattaattaagaactaaagccccttggctcttcaggcacatcgctttcccctctggagaaagtttggtggaccgtgtcccttggggttcttgcgagtccgactggccttccgcgcagtgatgttggagagccctttttctgagagccatgctctgcctcatcttcacctcccctcttgctacctcttgagtcagccaagcctgttcctgccttaggactttggcacatgttcttcctgcctggaactttctccccgctctcctcctgcttccccccagatcttggcacagttctcaagtgttccagttctgatgccacctcttccaagaggcattcccgcctcattctgtctgcagcttccccttccaagtgctccatccagcctttctcatttcaaccacagcacacagaaaaggactaggtgaccgttcctcaactctcccagctggtgccctgctacacgcacagggatataggtaattcatcacatgcaagggcagccttagggctcagttctctcaatcagttgagagaggctgcaggtctttatatttaagtcgcggaatctttgcagtatcttacctgtaatttgactctctacccttccttccacctttgcttcctgagggatctctttgccttatgtgcccagcgaacttggctcacagtgcgtgttaaactctttgttaaatgactggccctgagaggtccagccatctgatgctggctagccctcaatgccttgcttccagagggatctaacctgtcaataagcatgctctctttttgatattactattatgtcagctgggcagctgggggtctctgaagcaaaattggcatcaattattataggaaaataaggccttacaagtttgtacacagatgagttgacattaatgcaaatttaggatggttaataagaaacataaagctgtgtggtaatagagcatgcattgctacttgtatgtatcttaataacgtgttttctatcaaaacattacttgtagaaaggatttggcttttgactgtgtacaaggcttgaaaggacagtcctttgcccactgccccccacccccattactttcaattcttccagctgtccccaccattgtcagtagtattattttctttctttttaaggattattatctgatttgtttttctgctgtgggagataggatttagctcgttcctatgcttttttcttccctcatcatcccagtgtagagatagcccaagttttggtcaagttgatcttcagaatatacattattataatatgaaccttgtttatggctgcaaggtttttagtttcccatatttcttcttttccttcattttcttcttctcctctcctagttaatttccttagtttcttttgcttaattttctgtctctctcaccagttccctgaccacctcgcagcctccaccattgctgtggaatgcctgtcattgggggaaagtggctctcactgtggctccacataccaggtactcgcaacggttccacgtttctcctgggcgcatcccttttccctggctctgcttccccttcagccttggaattccctctccccttctcttgtctcgtttctggatccagtgcccctcctttcttggttgatttccttgtcttgggggagcccatcgttcagtagcttgctgagaaggtgtgcgtggtttgtggcccacaagaagccagccgatccatgcagggacaggcacctttgaaggcatggattgggccttcagttgggtggctgaagtcagcagacaactaggcctgtggagcccttccgccaggccaggccagcagaaggtctggcttcactttttagagaagttataaatgtggcgatctggatttgggtaccagggagtggtgaaaatgggtcccccccaactttttttttttttttttttttttaaagacaggtctcactgtcccccaggctggagtgcagtaatgccatcatagctcactgcagccttgatttcctgggctcaagtgatcctcccacctcagcctgctcagtagctgggacaagaggcatgtactactatgcccgactaattcttttaaatttttttttgtagagatgaggtctcaccacattgcccaggctagtctcgaactcctgggctcaagtaatcttccaacttcccaaagtgttgggattacaggtgtgagccatcgtgcctggctgaagatgggtcttgaatgaaagtctatatattgaatggggcatcccaactctccttggctcccataatgctggcattcaggcttatattctctcattcctaccccaagatactagaacattctagtctgaggacactggcaccccattttctgttcctccttcacccctaacagggcacttccatgtcctatggacaaaactttcagttggtcagtagcagagagtggcagtaacaggcccactggagaaaaggtcattgcttgttttttgagacaaggtgtcactctgttgcccaggttggagtgcagtggtgcgatctcggctcactgcaacctctgcctcctgggttcaagcaattctcccacctcagcctctcgagtagttgggactacaggtgtgcgccactatgcctgggtaattaaaaaaaaattttttttttgtagatacaaggtctcactatattgcccaggctggtcttgagctcctggcctcaagcaatcctcccgaagtgttggggattgtaggcgtgagctaccgtggtggcctgtttgggctttttttttttttttttttttcttctgccctccactactccccgccaagactgaaagtgcctcgagggcagtgccttgcctgattaatttgtgtcccaccatgcttttctctgtgagtgccagtaattatttgttgaatagaaattaccttctatgcttttatgtgatttctggggtggtcgtagttcactgtctgccattaggaagatcagggtcttacctctttggttttgcccatgtgaggtgctgcgaagggtttcttgctgcacaccaacatcttttctgatgtctttactggcttttaagtcaggttgttgtcagattgccatttcatactttttgggcagttttgtgtaatgtcttctgtggtcgtgggcgggaactccatgtacccaggaaggcattcctggcacctgtgttgtgaccatctttagaaacctggcggaattcacttgtaaagcaagatggttgtcaaggccagaggtgaggggcaaggtgagtgtgacatagtcttcaaagttttaaaatccacacccctacccccaaaatgaagtgattaggaagacctttgtaggaggtgctgatgatttttccttcacgaaaagaggcatgtgacttggacctgccatggatttggccagcagagcaggaaagagactgggcagttcaacctcgggtactaagttttccagagcaggagttggtttaacttttagttgggctggcggagctcttactttgaggccatgtccagagatggtatttctggcttttggcttgtcttgtcttacctagagcacctggtagtggattcagggttttcattttggccgtagaaggctttgccaagcaggtactcagacactactgggttaagcttctggccttccttctgtgaattgggctgggaaagtgtcccgagttcctgacagctgctctacgtggaagggcagaagcacccacaaagtgtgctggtctggtggtgctggcccccctggcttctctgtgggccatcacaatggagggtgggggacagtcctagacaggacctcacaaccccactgtgagctaatttgggatctctagggtacccacatgaagtcatagcttactgtgacttacacaggcccctgaggatgaaggtaacagtcctgtgagcactgaggctgggctgggaccaacacctgagccatggctccagcactctgattcctggcccagccatgctgctgagggtgcacagcccaggcctaccatcgcccccacccttggtggcagaaccgagcactacccagcaaggtaggtgttggcggctgcagcatgtatccagccctcctgttcattggggccttctgggaacaccctttagagctgcattgtccagtaggtagctgccagctgcaggtggagagttcaagttaacctaaagtagaattcagtgccctagtcacactggtcacatttcaagtgctcagtaacctcccatgactaagtggctgccagtattggatagcagtcactcttgagggtcaccgagacctttacctcttgtgacctactctactttaccatgttgcaactgctgcgactatggctcctgtggcaaaggtcaaactctttgtctcgcctgaccagcacttcagctcctaggatttcttcctgttttactttgggactcactgttccctcccatgcccaaagatattagaacctcaatttatgtcctgtccccctccctacccacccactgcagcctaaggaaatcctggccctctttgagaaagccttcctgggctccctttgcccacttctcagctgcttgtggcgcaggggtgtgtgtgtgagtgagtgagagagattgattcttccatcagaatcgtgtgcttctggtgatcagaatcttctgcttatagcaacttaaacatatttgaatgaatgagcaaggtgaatgactgtgacctgatgaggaaataggtaaatgcatctgatacaagccaagaggcgcttttggaatcttgcggagaactccgagtttgtgattttcctcgaccaaactcccatggaagggagtatgcctctgcctggccacagactgctgtcattctctgaatgcagtggctgaagtgctgggctttaggttctgattccctgcccttggaagacccccttcaaggggaagagtccctcagcaggaacttaatgagctgggcactctggaggt

SEQ ID NO: 7438 - DNA, 6000 bp, Homo sapiens
caacagcaccggctccttcttctggctcagtggggatgaagtcatgtacacccactggaaccgggaccagcccggtgagccccttatttgacttgccttggtgaagcgaggagggaggccagggtggactggccctgccagcaccgagccccagggcttccccataaacagatcattggtgcactgtggtgtagtgtctatgagcacaagctctgaaaccaaactgcctggctccgatcatgactctgccatcttttagctgtgcatcctctgagcctcagttttctcatctgtccagtgggaataatgatcctttcctcatagggatgacatgagtcttaaatatgtgtaaagtgctaatatgtgtaaagagttaatgtgtgtaaagtgtctagattacttctctatctgggctcacaaaaaagaaacaaataatctcttctctatctggactcatttaaaaaatgtgttcagaatactgagcgcaatacaagtgcttgttattactattattaccatttcacattcattatctttctaaccccttcaataacctgatgaggtagatgatgaagcaggctcggtgaggttaagcagcttgcctgagccctcacagtgggtgaacccagagccagggctctgcctccattcccttcctccctcctggctccaaccccagagagcatgtctctgaagaggtggccaagctggttcccagtgtgagggccgtgctagtgccctgccgggatgtgagggaggaccagactatgaatccttctcagagcctgggtctcccttccctctccttcagggtacagccgtgggggctgcgtggcgctggccactggcagcgccatggggctgtgggaggtgaagaactgtacctcgttccgggcccgctacatctgccggcagagcctgggcactccagtgacgccggagctgccggggccagatcccacgcccagcctcactggctcctgtccccagggctgggcctcggacaccaaactccggtattgctataaggtagggcagcctgttggccgggtagggggcagggggaggacaggagcaaagagacagtttggatggaggtcccagtgggaccagccacaatccagagacacaccaggctgcagacgggtgatttctggtgagacttgtccatggaatctggaggcctggtgctcagtaatcatttgaggaattgagggaaccacagatcattgatttcagaggttcccaaatgttggggccagcctagctgttcttcagaattgcttggggaacctgataaaaataaaatcttggccgggcgcagtggctcacacctgtaatcccagcactttgggaggtcaaggcgggtggatcacgaggtcaggagatcgagaccatcctggctaacatggtgaaaccccatctctactaaaatacaaaaaattagccaggtgtggtggcaggcgcctgttgtcccagctactcgggaggctgaggcaggagaatggcatgaacccaggaggcggagcttgcagtgagccgagatcgtgccactgcacgccagcctgggtgacagagcgagactccgtctcaaaaataaataaataaataaataaagataaaaatctaggctgtcacaatggagatttagattcattaggtctggattgggcctggtaatctgtatttttaatcacgctaggtttgggagccactggcagagtccgaggtcttttattatgcacagaaactgaagtctagggagaagaagggacttacccacgttaagctgtggctctgctgggattagagcccagatctccctgctggtcaggggatggggctcaggggccctctccagaaggtgactgtgccagctcccctccccagacctctgcagatgaacaggattgtccttagctagccttagccccctgtccagtaaggctccaggcccctcctctgccatggtgggaaaggcagtaggtgccccctgaggggtgggccagtggggacagcttagacagctggactctgcccctgcaggtgttcagctcagagcggctgcaggacaagaagagctgggtccaggcccagggggcctgccaggagctgggggcccagctgctgagcctggccagctacgaggaggagcactttgtggccaacatgctcaacaagatcttcgggtactgagccgggctgaggcgtgttaggagggcacccgcacacgtgtaggagcaggcatggccgacagacccttggttttgttgggcgagcagggggatggcagaatgtgggtgaccccagggaggcctgcatctgctgctggtgccaggaccatcttgtcctcactcaagtagccatggtgccctggcatcttgggagaacaggctggtgtgatccatgcactcataggagactgtgttttgctcaccatcatccccccagcaatgctccaacagacccacaaacttacatatgtaccccccaccccattgcaaaatctcccacatgctggtcctggcaagtgtttcccctcaccttacaccatcctacaatgacccacactcctcaatccacagtttttcctgagagataggaggagaaaggccgcagctatgaggatttgcccatgggcctccctctgagacaccacctctgtcctgggctctgagcattagcacgtggaatcccctagcactgggaaaatcgagatggatctgggcttcctgatagcttaattgaagggatctctcctctcagcaaacattgaaattacattatttgtctcataattacaatagctcatggtcatcacttctcaccacgtaccaggcactgtgctaaacatatagtcctcactcaagcctcccgacaaccctatggagcagacgttaacccctgacccttgtgggttgatagagaggttatttgcccaagttcatgggtgaacggatacttgaatccaggtttatttaactccagagccgtagatccctgccacctcctcatctgaacttcctaaactccgtaaagtaaaagcctgcagaatcttgctggacagggcacccccacccaaaaggaacccaaacaaaggggaggggccactgccccttgagtggatggcttggtccagctctccccagctctgtcttgtggggagaactttaccgaagtgacctcaacgctgtatcgatgggtcaatgtgaagcccagatggagaggccccaggccctgggggctgccccggtcacagctgcaagggacagggggcacgtttgggttcctgcccctctcacttcccatctcttccgtccccactcctgggttgtgctgaagtgaatcagaacccgagatccacgagcagcactggttctggatcggcctgaaccgtcgggatcccagagggggtcagagttggcgctggagcgacggcgtaggggtgagggggcctggggtacttgggactgcgaggccgggagcttggtgggcggggcctgtttggggcggggcctggaggtgggcgggttttcttgagggccgggcccccagtcggagccggcttcaggaaagcaggtccgagaggggtcacccggcccccggtgagaattcgcagctcaggccaggcctcttgttcacctgttccgggcatgggggcggcctgcaccttgcgcctcacgttcctcttccctccacccgcctcctccagttctcttaccacaatttcgaccggagccggcacgacgacgacgacatccgaggctgtgcggtgctggacctggcctccctgcagtgggtggccatgcagtgcgacacacagctggactggatctgcaagatccccagaggttggccggagtggcgctgggggacgcgggatggagcgaagggtggcggggccaggaattccagggagggtctcctttcctcacaacgtctttgtccttgttcccctaggtacggacgtgcgggagcccgacgacagccctcaaggtgagcaccccccagcccatcccgctacccatcgcgtgggagagggcgtcaactctggggtaagtcccgagaggcctgaatgaaatggaggggatgaggagttccggtcgagagaagggggacggggttggctcggacggaggcagccacagccctgtttgcttccgtgtgggaggcgaggcaagcctggggcctggggcctggcacggtgcctgcctgggtccggtgtgcctgcaggctcgcctgctgccgcctggctctgccccggccctgccgcgcccgcctccggggcctggcgtgcagcctctgcctggccgccgctcccacgcccgcgctgctcctgcaggccgacgggaatggctgcgcttccaggaggccgagtacaagttctttgagcaccactccacgtgggcgcaggcgcagcgcatctgcacgtggttccaggccgagctgacctcggtgcacagccaggcggagctagacttcctgagccacaacttgcagaaggtgggcattggattgagcagggggctgcaggctgggggagggcaggcccgggatgagggcagggggctgcctacccacacctgcccgcctggcttctccagttctcccgggcccaggagcagcactggtggatcggcctgcacacctctgagagcgatgggcgcttcaggtaggaacccaggcaggcagcagatgtggaagggggctggctgtccacacacggagcacagaggcagacttgcatttgaatccagccctgccccttccttgctggctgtgtggccttgagcaagatacttaacctttctgggccttggttttctcatctgaaaatgggaatatgaggcctgcctggtaagatttttgtgaagattagaaataacatatgcgaagtgcttacgcagcatccagcacattagttactaaataatggcagctcctgttacgtctggtgtcattcatcatgactaaggccctctcggggaagtgggcagaacatatgatgatccgggggcctctttgtatttggtgcctacttaccatgtactggggggcttgaggcaggaaggaccaggagcacctgggactcagaatttgagcttgtctttttgcccttgggcttcctgccctggagtcctcaggcttcttttctggagcagcaagtgtccagggacagctggggccttatctagaggcaccaggtccttgggtctttgactgccctgagctcagtagctccacccctcagcctacagccactaaaccccagaacctgggcccttccctgcccccattcctgcggccttcattgctgcatccggtggaggcccagctgggggccggtgctggagttacctctgctccatgccattgcagatggacagatggttccattataaacttcatctcctgggcaccaggcaaacctcggcctgtcggcaaggacaagaagtgcgtgtacatgacagccagccgaggtgagggcaaggtgggggcagagtgcgcagtcagctgtgcaaagggttaatgctgggcgagcctgggcagaagtcatcagtctgttctcattctctttgttcccacaacccaataaaggctagactcagcgaggggtggacctgtctccatggtccagaagacttgaattcggagctggacacaggccctgagcctctgcccagactcctctcagggcatgaggctgagtgtgctgccagccatgccctgccctgctctgccctgggggtgactgccctcccctcccctttccgcagaggactggggggaccagaggtgcctgacagccttgccctacatctgcaagcgcagcaacgtcaccaaagaaacgcagcccccagacctgccaactacagccctggggggctgcccctctgactggatccagttcctcaacaaggtaggaggtggcaatggggcacccaagggagtcaggggagaggacgtgaacagggaaaggctgagcctcaggagtcctgg

SEQ ID NO: 7439 - DNA, 6000 bp, Homo sapiens
ccgactgtggacaactctactaagtttgacttgtgttttatcttaaccaccagatcattccttttgtagctcaggagagcaccctccacctcatttgctcacagtagcctctaatctttgtgctatctctcagttccctttgggttccatgtttgccttattctcctccatgcctagctggatttcagagttaagtttatgattatgagataaaaactaaataacaattgcaaaaaaataaaataaaaagaaagaagaggctgggagcggtggctcactcctctaatcccagcactttgggaggccgaggtgggcctaccaaaggtcaggagatcgagaccaccctggctaacacggtgaaatcccatgtctactaaaaatacaaaaaaaattagccaggcgtcgtggcgtgcacctgcggtcccagctactcggaaggctgaggcagaggaatggcgtgaacccaggaggtggagcttgcagtgagccgagatcgcaccactgcactccagcctgggcaacagagcaagactctatctcaaaaaaaaaaaaaaaaaaaaaaaagacggaaaaggcattatatatttgtgaagacatggacagaaatgtgtcctgattgtggtgccacaaagcactgagcctactagaagacgtcagcaaaagatcccctgaaaagtgactccaagccattcactgcaagggatggttacacagatgcagaatacagaaggtcaatagtagcttaatgctacatcacagcttaacactacatcatccacctcacttcatctcaccccatcgtatcgtgtcactgtgctcaccatcacaagaacagggaggatagcacaggaagatattctgacagagaaagagagagaccacatttacataacttttattacagtatattgttataattgttctattttattattagttattgctaatctcttactgcacctaatttataaattaaaccttgttattggtatgtatgtataggaaaaaatatagtgtatatagggcttggtactttcttcaatttcaggcatccattgagagtcttggaatgtacccactgaggataagggggggctgctgtacatactttgcaaatatcttctctcatcccatgggttgtcttttcattttctttctttttttttttgagacggagttttgctcttgttgcccaggctggagtgcagtggcacaatctcggctcaccacaatctctgcctcccgggttcaagcgattctcctgcctcagcctcccgagtagctgggattacaggcatgaaccaccacgcctggctaatttttgtatttttagtagagatggggtttctccatattggccagcctggtctcgaactcccgacctcaggcgatctacccacctcggcctcccaaagtgctgggattacaggtgtgagccactgtgcctggccgtcttttcattttcttgatggtgtcattgaagcacaaaagttttaaattttgatgaagaccaatttatctgttttttctttcatcacttatgcttttggtgtcatatctaagaaaccattgactaatccaaggtcacaaagatttattgcctatgttttcttctaaaagttttatgattttagttcttacatcaaggtctattttaagtcttttgttttgttttttgttttttgttttgagacagggtcttactctgtcacccaggctggagtgcagaggcacaatcatggctcactgcagcctcaacctcttggcctcaagcaatcctcccacttcagcctcccaagtagctggtattatagacatgcgcaaccatgcccagctaatttttttgtagagatagggtttcaccatattgcccagactggtctcaaactcctaagctccagtgatccgcccacctcagcttcccaaagttctgggattataggcatgagccactgcacccagccccaaattttgtatatggtattagaaaggggtccaacttcattcttttacatgtggaaatccaattgccccagcaccatttgttaaaaatattttctttcccatttaattgtcctagtgttcttgtcaaaaacaattgaacataattgtatgggttcatttctggactctcaattctattccattgttgagcatatttttaagggctgtttttctctcctgtggtaactggtgacctgtacttcctggaagagagatgaaaagattcccaagccaactgagttacctcacgtgggtcaggtctctgtggctctctgcactggcctattcataatgatatcctcctgcaggatttgagccttctcctttgttgtgacggcagccgaggaggtggctgactgcccagacagccttatctctttcctacctttcaaggttattgtaaataccaaattagattgtttatacacaagaatttagcactaaagcactatacaaatgtaagctatttatttctatttatccttctccttcatgaataagaccctaaaaatagaagatatttttaatttttactcactgggctcaaggttgcagtgtctgtattattgcaaattccaaattaatgaagtctggctcttcttatattattcctgcaaaaggctgtgtgctcaccccccggagtgtgaatacgagtgtgggtcatttcctctttcctctgcacccttccttcgatgaggttttgccctgtgctaggcaccatgctaaactctgagaaaaccacagagaacaaggcagacgccatccctgccctccagtaacatacaatttagtgatgaagctgggggatttaacaagccattctaataaagcgttacagtgagggaggtgcagggtgatgcctccagcagccctggtgtcagctgctccaggtccaggggaagacttccattatcttccaaccctgtcggaagtggaggcggaggctgtttattgctgacacagtccctaacccagggtctatagacattgtggaaatgccttggagtcagacgggagaatgaaccagcagaagcaatgcccgccctccaccctcctgaagagggttctcaggaactctttggaggcgaggccagcctctggctgagggcctctggatacaggttaggcctcaggctcttctcctctctactcatctctcctcccttggcccctccttcagaggctgacagagccccactctcatctcttccccacccaagcctctttccacagaaagactgcttcctcccaggagacagcagctcatttgcacacagacacccacagccctcaaagcctggaaggccaagctgttaggacccctgagagcagggtggctcctgggaggagagcccaggccaccaccttgccctccctggcccctggccttcgatggggctgctctgatcacaaacgtccaccaacgtagccggcccagaagtgcacccatgtcctctggtatccactggctctccaagccaaactgggcagggaggagttgtgagggaaaactgcaggtcaggagggaggctggcaaagcgggccagggccaggcctgaccccagctctcctctcccggccccactgccggccagtgtttaacaaggccctgccttctccctctagtgctagggacagccaccttcttcctctccccaccgccccctctcccctgcaacacgtcatctgacaagtcagtgcgatctcactggaggtgcatctcacaggaacgcggggtcacagcctcctgcacacactccatgctgcacagcaaggtgcacgtgtccctcagagccccagacaccatcccccactcacccagaagcccaagtgattcccaacagcccccagcagcctaatgggttggggtcttgggagcagctgtccctggctccttccctgatcccaccgcccagcctcaccccacggttcctccattgccccacctcccactgcgccgccgggcctctgccagggtcaaggggcttcccccctctggcagcagacgccatggtgccgaggtggcctccacaaccgccctgtgcgccaataggacaagactgtcctccctcccccacacttgtcactttgagggacacgtggatgagacaggaaaacacaggggagtgtggagacctgaggtgacttggagcaagcctctcaacctgagcggcaatttcttcatctgtaaaatgagggggttgttctcatctctgaggctttgtgtcgctctcaaagcctgctagcctcgggttctaggactctgttgggatcgtgtgtgatgttttctgctgagcgactggcagcctgtgtcctcggggggaaagagggcaggcgctccaaagctcctgcgctctgtggctccccctccctcgcagccccaagccccaggtgtgccggccgccctgagcccctccagcacctcccggaggcgcctgcaagacacctaaggtccccgcctccctcctctcccccccgccacacccctacccccggcaggcgacgtccccgcccctcgaccatggcctggtgaagaagccggccaggcccgatcagccccatccccgccgcacgagcggcgcctgcggacagctcctggggccccggccttgtcactccggaggcgggaggctccggggggtcgggctgggaagatcgagccggaggccgctaggctcccaggccccggccgaggctgcgcggccgcacggtgggcaggctcgggtgttccggcaaactgccgggtccccatcttctaaagagaggaggccctttctccagcttcctctgcgggagcccgacccagccccatcccgccacccccgggctgcacctcggcccctccccggcccgcgcccctgcccggggcgggccaggaacctcggcccgcgccgctggggactctggagcggaggaggaagcgcggcggggcgggggcgggggtgtgtcgggttttataacccgcagggcggccgcggcgcaggagaaggggcagagccgagcaccgcgcaccgcgtcatgggggccgcctcgggccgccgggggccggggctgctgctgccgctgccgctgctgttgctgctgccgccgcagcccgccctggcgttggaccccgggctgcagcccggcaacttttctgctgacgaggccggggcgcagctcttcgcgcagagctacaactccagcgccgaacaggtgctgttccagagcgtggccgccagctgggcgcacgacaccaacatcaccgcggagaatgcaaggcgccaggtgggcgcccgggcccgggcgggggcggggcggggccgcggcggccaatcacagcacgcggccggcttgtggggcgggcaggctggcgcccccgacccgaaccccaccccgaccccggaccctcgccccgacagtcagccgcggggcccgagcgccgggctgcgcgcacggcctgcgctcccagcatgcacgagttggatggatgagggtggctgctcccaggccgcgcccgccttcgccgaaggtgctgggcttggctctggggcccccgcgctctcgggcagctgccttctcacctccggacgctgtcgctgtcaccgtcaccgcactgcactgtccatccaccctccactcgcccggcctcttttctggtcccaatttctgctccaccattcccatgaggcagattccctccagaaggaggaagcgcggcttccgcaaactaaggtctcccgcagggatctccccagggcccgggctctggaagcccttggccttcctcccctcccccagcaccgtggcttctcctttatggcctgcatctaagcagggtcctacaccctccctgccctcctggtgcccaataggaggaagcagccctgctcagccaggagtttgcggaggcctggggccagaaggccaaggagctgtatgaaccgatctggcagaacttcacggacccgcagctgcgcaggatcatcggagctgtgcgcaccctgggctctgcca

SEQ ID NO: 7440 - DNA, 6000 bp, Homo sapiens
gagttcaacaaacaccttcaaacagccctgaaggttgcacaggtgcattcacatctctgatctcattttaggcctcccagcagcctgaggagtacagggcaggctggagcgctgtgttcccatttcacggccaggaaactggctccaagcaaggacgcacctgcagctcagggctctgaccttccccgccgtgcggcaccattgtcatggtcgtggggcttccctgaggcaggcaccctttacccgcctcccaccccatcctgatccatgatgctatccctgataattacctgggattcatcggagacaccaaagggcagtgccagacagaggccgccctcttcccaccaccacctctatacatccctggagatgggcgtggggtgaggttgagaagtggcttgatgctgtactgatttttttatttttcctttcttttctttcttttttttttttttgagatggagtctcgctgttgttgcccaggctgcagtgctgtcgtgtgatctcggctcaccgcaacctccacctcccggttcaagcgattctcctgcctcagcctcccgagtagctgggattacaggcagctgccaccgtgcccagctaatttttgtatttttagtagagacgggggtttcaccatgttggccaggctggtctcgaactcctgacctcaggtgatctacccgcctcagcctcccaaagtgctgggattacaggcgtgagccaccacgcccagcctgattctttttccaggtatgcagaccactggcctctcgttgaatctgttttttgttgagttgtaactttgttgaaatgcacaaatcttaagcgcttctggtgccttgctgagctccacaggcccccggctattgagccaggtcccgtgccaggctcctctctccaaagcagagaagttatttccaggccaggcccctgtgattgggtttggggcctgcatggagcagtggcaccgtggacaggaaaccctgggggacgctgaggctcccaggcctctgactgtgaccaccacacatctgcctacagcttcctctttctcttcctcttgaccacggtacacccaggaccaagcaggagagcaggtaaccagtcatcgtgaccagctggtgtggactgtgtatggcccggggaccgtgggacatgctggggcatggggtgctgaagctgcctcagcctctggggggtgcaggaggagtggggaagcttccccagagatgggcaggaggccagggcatggtcagtccccaggcagcgtcaggctcttgcagctggtctcacccaggctcctggggaaaggaagcgagatcttcctagtcccaaacctctgtcctttcctaatgcccctccccctgcaaatctcattcagaccctgagtacacaactcaaagtacacacagcaagagtaccaagaggcagtaagttccccccagaggtcagcctacccccactctccatcctgtgctcagcagctgacaagctgttcatcccaatgagggggccacagtcacgccgccctgatcccgcctctcagctctgcgtgcccagcctctgggctgcccttgagtggcacccatggggccaaggccctccttgcttcaagctcagggggaggaaggaacagagtggatggggaacagcccaggctgccctggcgggagggtggctctagagattgggctgctttcaaaagggaagttctgctgagaaactacagcccatccactccccacatcttttctgaggactgggtggttcacaggactcaatgctgctgctgcaggtcttcccagaaagcacccctcattggcctctgagcacgtgtgtccacaccaggaagagactccagagctgatcagaagttttgtggctgctgtgggaccacttctcaccctcacccctgggaaatgggcctcagccctgtggcctcatctcctcctccccctgagtcatgtcacctgatggttatcgggacacagccggaatgtgcaacttccggcaaaaaactctcatgttttgtggttattttgcaccattttgtttcttcctttgggtttgtggacaggatggggtgagcaggatgggcgtggcagggtctaagtcccctgatcccttctcctttgcagtaagtcaggtgtttctctatgtgcctaaggagaattgcatcccatagattaaagtgtaaagcgcacttcctgtggaatccaattttcctattacctttcatcaaaagtagagatatattccctcagaaaaaactgacctgaggatgttaaggaacactgacatttcagtatttgtataatcataataatatttattcccacagaggagctgtcattattgacgttttacagaagccacaggctttgctcaagttcattcggtggtaagtggacaagccacgccagaacttagccttctgcttctctgtctggcctggacgttcaagattgcagcagcgcctttttggtcatggttgaatcaaaaaataatttttgagaaactttgcaatgatcaggccacataagccaccgaatatgacacatctcctgcatttttatgttcagctcaacagtgtcatgatccaaagtgtcttggatctttttttttttgagacggagtcttgctcttgtcacccaggctggggtgcaatggcacgatcttggctcaccgcaacctttgcctctcgagttcaagcgattctcctgcctcagcctcccgagtagctgggattgcaggtgcccgccacattttttttatttttagtagagacagggttttgccacgttggcccggctggtctcgaactcctgacctcgtgatccgcctgcctcggcctcccaaagtgctgggattacaggagtgagccaccgcgcccggcccgaagtgtcttggatcttaatgaggtttagttaatctatgactgcatcatcatgaaaatttccacaatgtccaccaggctttgtcattgaatcttccagcagcagagcccataggtctccttggcttcctgacaccttcgtgggcaaggcgcccctgtgttcagaaggaagaggaaagtgacaaattccaaaaagggccagagggaaggatattcttgggatcccatagctggcacagggctccatgtgggtggacactctgagcttggggactgcaagctcccaggtgacgcattacacattaggagtggcatttcctgtgcccacctggtcattctgtgcaagctggggcacctactcaaggcacgtgtgtgagactgtgtgtgtgtgagtgtatgtcactgtgtgtgaatgtgtcagtgtgtgagtttgtgtgtgaatgtgtgagtgtatttcagttgtatatgtaagtgcgttgtgtgaatttgagtgtttcaatgtgtgaatgtgtatgtgtgtttgtatcagtgtgtgtgaatttgtgtttgtgtgtgaatgtgagtttgtgaatgtgtgtgggtgagagtgcctgtgtgtttgtgtgtgtgtatatgtgtgtgtgcatgaacgtgtgtttgtgaatgtgtgcgtatgtgtgtgtttgtgaatgtgtgtgggtgtgtgaatgtgtttgtgtgagtgtatgtgtgtgggtgtgtgtgaatgtgtgtgtatgtgagtgtgtttgggtgagtgtgtgtgtatgtgagagtgtgagtgtgtttgtgtgtgtttgtgtgtgggtgtgtgaatgtttgtgtgtgtgtgtgtatgtgcatgaacgtgtttgtgaatgtgtgtatgtgtttgtgtgtacgtgtgtgtatgtgtttgtgaaagtgtttgtgaatgtgtgtgtgagtgtgtatatgtgagtgtatgtgcatgaacgtgtttgtttgtgaatgtgtttgtgtgtatgtgtgagtgtgaatgtgtgggtgtgtgtgaatatgtgtgcatgtgagtgtgtatgtgagtgtgtgtttgtgaatgtgtgtgggtgtgtgaatgtgtgtttgtgtgtatgcgagtgtgtttgtgaatgtgtgggtgtgtttgtgtgtttgtgaatgtgtgtggctgagtgtgtttgtgtgtgtttgtgaatgtgtgtgggtgagtgtttgtgtgagtgtgtatgtgagtgtgtttgtgaatgtgtgtgggtgagtgtgtttgtgtgagtgtgtatgtgagtgtgtgtttgtgaatgtgtgtgggtgagtgtgagtgtgtgtatgtgagtgtgtgtttgtgaatgtgtgtgggtgagtgtgtgtgggtgtgagtgtgtatgtgagtgtgagcgtgtgtgtgtttagagtctgcactctgtgtggatcaggaaaggggtccttgcaggctcgctgagtccctgctctgtgcccagccccgagttggctccaatggggctatatagaaaggaaggcatggccggaggacctctgtgtcaagttgaggacacatttccaagactaggaaccattcagggactctggagtcacgatgacaactccccttccctcagccccgaagcccaggcctggacctccaagggactcagggaagggactcaggaaaggggagttccccctggcagcctcctcgtgggcaccaccgagggtgagaggagccagctcagcgggtcccacccccagggttgcccaccttgaccacaaggaaaggagggaggagttattgggccttccactaggaggagacccggggaagtgagagtcggggatcagtcctgcaagctacggagtcactacagggagaggtctcatcactagaaatagccgaagaacctgcagcctcaaccagcgttaaggaggacgtgccgtttctagggagtcttagtcggggctcaccagcttcctgcattttctgaccggctccaggaatagaaccaaaagaagctgaacaaggaagcagcgcggcaccaagaaaagcagaagtcggggccttggaggcgtgactttcccctcgggtccaggtagggcctggagctgctgcaagtgccgcctgtgctggggaagggaccatgtggctgccttgggctctgttgcttctctgggtcccaggtgagagtttcccttcccgggaaagtctgcggcagggagggagggtgcgaggggcagggccgcagggcaggtatcacacgagacgccccgagtctggactccgtgcagaacgcagaatgcggtgcgctctgtctaccacataagatggacagatgaaggtccacacccctgggagaggaaggagccagggcctctcccggctctgcacccacgtaccttggctgaaccacagcggggcaagtgataaggggtgggtgcagaaaagggaccttttaggttttcagttgaattcttacaggaagggggacgagaggcaggatgtgtcagggtgggtggagagtggcagccactgactgcgaggggcatgtggtgagggtgggggagatgccgggctcactgggtgcagggtatggaggaggggggtgtggggagggtgggggagatgccggcctcactaggtgcagggtacggaggagggggtggggcggtgagggagatagggtcggggtggggagcagatcgatagtctctggaatgcggagatttaaccagggcagcccagcggctggggcctgagcagggggaagtcccgaggcagccttggctggggttagcccctgcatgggcctgagaaccaggggtcagtcctctccaagaaggggatatgggacagaggggacagaaaaggtggtggggagggcgaggagggaaaagatcgggcagagaagcgctgagatcttctttagggagaagcgtggagttgagtcttccctgtccaagcgcagggattcctcccgcagagtcacctgctgtgccttcagtcacgtccaccgctctcctcagacagctcctgtgcagactcctcaggcctagtcctagggtattgtacgtctttgtggttgctttccttacagatcggaggttttctgcaattatatttgctaactact

SEQ ID NO: 7441 - DNA, 6000 bp, Homo sapiens
aagtttttcaaacagactgcttctttctgctcaaaggactgaacttatggctgtgataatagtgttaaaaacttttaaacagccagtaaacattgtttctgattcagcctatgtagtgcaagccatgcaaaatattgaatgtgccttaattcgaaatgtgactgatggaacaacttaatcttttatttcattctttacagaaagcagtgcaataaaggcattcccctttctataccactcatatgagagcacgtactaacctccctggtcctttaactaaacttaataaaagggcggatgcattggtgtctgcagcctttgctgatgcacaaacatttcattcttcaacccatcttaatgcctcaggccttagaagaagatatggtctatcatggaaataagctaaagaaattgtgcaacactgttctgcctgccaagtcctgcatctgccacataaaagaacaggagttaaccctagaggtttatctccaaattccatctggcagatggatgtaacacgtattcctgcttttagaaaactgtactttcggggccaggcacggtggctcacgcctgtaatcccagcactttgggaggccgaggcaggcggatcacaaggtcaggagatcgagaccatcctggctaacatggtgaaaccccatctctactaaaaatacaaaaaattagctgggcgtggtggcaggcgcctgtagtcccagctacttgggaggctgaggcaggagaatggcatgaacccaggaggcggagcttgcagtgagcagagatcgtgccactgcactccagcctgggcaacagagcgagactgtctcaaaaaaaaaaaaagaaaagaaaagaaaattctcctttgttcatgtttcagtagatacctattcacattttacttgggccacatgtcaaacaggggaagctacagctcatgttaaaagacatcttttatcttccttttcagttatgggaatcccagaaaaaaatcaaaactggtaacggcccaggatactgtagtaaagccatggctacattttttcaacaatggaatattacccatactacaggtattacatataactcagaaggacaagcattactggaaagagctaaccatactttagaaactcaaatataaaagcaaaagggaggggaccaggaatataagacaccacatatgcaattgcatttagctttattaacattaaatttttttaatttacaaaaagatcaacccgtgactgcagctgaacaacacctggcaggacaaaaggaaaataaaaaggctggacaatatatatggtggagggatgcacatacaaagagctgggaaaaacgaaagataatttatggggaagaggatttgcttgtgtctctccaggtgacaatcaggtgcctgtgtgggtgcccaccaaacatctgaagatctatcatgagccacagcatctagtggacccacctgtacagtgcaaattgaaggtttaaggattgcttttatttatttattttgagacggagtttcactcttgatgcccaggctggagtgcaatggcacgatcttggctcactgcaacctctgcctcccgggttcaagcgattctactgcctcagcctcccgagtagctggaattacaggcatgcgccaccatgcctggctaatttgtgtgtgtgtgtgtatttttagtagagatggggtttctccatgttggtcaggctggtctcgaactcccaacctcaggtgatcctcccacctcagcctcccaaagtgctgggattacaggcatgagccactgcgcccggcctatggattgcttttaagcttcaatttgctttctctgtgccttctgttagaaggggcctgcttctcgttatcaaggtaagttttaccccgtggtaattaaccaaagaggcagaagctgagttacaaatgcttcagcaatggcctgcctcccagctgcagccacaaaagtttttgcttctgtttcagtagatttactaacatgggggtgagggtatgcttgtgtttttgcaggagatgagcaaaccgtgtaggtgccctcaaaatgtgtatgaccatgaacaggagactggaaggagccatggatcccaatcatggaccgggttcccccagtacgagccatgctgagaaactgctggaacaccaggattttacctatagatgcttaacggaccaatgctttctgactgaactcctctctaccctgaatagaagagaccctaatagggaggcaggaatatcatcaccccattcagcatgaagaagttacagaaaacggaccttcatccttctgcaacccctaggattaacggtcctctcgtaaaagggaaaggggagatatgtgggaagcatccaaaccagagcaattccattttgaaaaaggcctaagaaaaatgaagctggatcaccaaccagcaattaagagctgcacagcctgaaattgccttgctcaattaatttaaaaaagaggccaccttatgctagtaacaatgatagctgtggcagttttacaaaaaagagaaggggggcatgttaggagaaaagctgagtgttgggagagaagctcaggcagggcttgcatgtccgccagacttactggctccttgcttctagcactcccattctctcaagcagccatatgtttcttattcacttgatacactgtttcctttcaacccccacatcctcaccacttgtttccttgtttgagcaccagtaaatagcgtgggctcctggcgctcggggccttcatagcctccacactcgcgatggccccctggtcccactttctctctcaaactatctttttctcattcctttgactccgccagactttgtcgcccccatgacctggtgttgggtctgatcaccccaacaaaaccactgggtatcttgagtgagaaaaagtattgtgtgttaggtgctgcattaggcagtggattttagaggcacgaacagtaagttggaactggaaggagatttttgcagtcgtctcaggctagcattgcagtagtagattgctctggcatgtataaatttcttaaactgttctatatgattttgatctattttatatgagtacatgagtctaaacaaggggaaattcatctataaatgacttacaaactacaaaaatttgctcacttcagcagcatgcatactaaaactggaatgccaggcacggtggctcatgcctgtaatcccagcactttgggaggctgaggcaggcagatcacgtggtcaggagatcgagaccatcctggctaacatggtgaaaccccatctctactaacaatacaaaaatacaattagccaggcgtggtggtgggcgcctgtagtcccagctacttgggaggctgaggtgggagaatggtgtgaacccaggaggcagagcttgcagtgagccgagatcgcaccaccacactccagccagcctgggtgacacagtgagactccgtctcaaaaataaaataaaataaaattggaatgatacagagaagattagcatggctcctttaaagtaaagacgtggtccctgtcctcaagggactcagagcctaggagggggctgaggctcatatgcaggacgtacaaaatttcctagttcattcagtaattcagcaaatgctaagtgaatgccaggcactcacagcgtggggtggggaggagtcagaagtgaacaaagcaatattcttccagataattgacatttgatcaggtgataacaaaagctgagaggaaaaattgattcctcttacagtagcaggacctgaagcacgatgaatgacataagaaaggtctcagtagattgctggaggcagaggagtgactagttctagctggagggttggagaagatgtgcttgagatgggcctgaagggaggggagaactggcagggtaacagcatgtcacttggaggctccagtggtggccaacagcaaaggctaggaaaatggcaactccgaggcctgcctgcgtctggacaggaaacttgtgattgagagaatgggctctgaagcaaactgctcagggtcagctcccatccgtccacctcccccagctgctatctaacctctctgaaccttagtttccccacctataaactaggggggtttttttgttttgtttgtttgtttttttgagacagagtctcactgccacccaggctggagtgcaatggcgcaatctcgggtcactgcaacctccgcctcctgggttcaagcgattctcctgcctcagcctcccaagtagctgggaactcaggtgcccgccacacccagctaatttttgtatttttagtagagatggggtttcactatgttggccaagctggtctcaaactcctgacctcaagtgatcagtctgcctcaacctcacaaagtgctgggattacaggtgtgagctactgcattcagcctaaaccagaggttatgttattagcgccttcctcatagggttattgtgggatttcagtgaataaatacgtggttagtggcactgagctagtacttggggaatgtcagccatgatttgtagcccaatttggctggaacccagagggcaaggagctgtgcaagatgagtctgccacattgactgggatccttaagaaaggacttaaaagtgacagctaagacatttagtctttcccctacagaggctgtggcaggaagactgctctgcccacgacagaacgaggagactgtaggaaagtgtgcatggctggcaactgaccccctgtgagcagtcagggacacgttctggaactagggcggcggcagcagggatggggaggaaatactggatgctggaggattatgaggacagaaaattggcctgggtagtgtgggagtgggggtgtgacatggatgatgctgtgcactcacacagcaacgtcatgaaggggagtggccttgggaggacagctgatcagtgtggttttgccttcgaggaggggtgcccagtggtgatgcccaggagagggaatggaaacctggagctgggagtgaggttagagctgtaagatccaagacccagggagacaagaggaccctggggacgaataggaacagctgagcaaggcaaggctgagccccgggcgggcgggttgggggaacatgcctagctagagggcggcagcaggaaagcagagaaggcatccctgcaggttggccctggggcagagtgctggatcccagcaacggacaagttagttaacttaaaggggggcatcctcaaggcagtaaactggagccaagtgggttaaatccttcttgctgctattaaggggaggagacaggtttctgcagactctacattttggagagaaacagaaaagaatgtccccaagtctcctttgccctgcgatgctggggcagattggcaaggtcccaagagaagcacaatggtaaccgacgctgcccttggctgaacttcttctgttaaatccttcggatgtgagtagacttttatttaataattttttttcttttttttctttttttcaaatgagactgcatctcgctatgttgcccaggctggttttgaactcctgggctcaagcaatccccccacctcaccctcccaaagtgctgggatgctgggattacaggcgtgagccaccgcacccggtctgtagcctttaataatggattttaaatgtgtgtaacattttaaaatgtgcttattctttgttagaattagggtgaaatatctacttggctgattttcctttctatctatacttgtagtatctagtatatatatatttctactattacaactggaagaacttgttccccctggttgtacattccctcatgataagcaagattttcagtgtttatgtttcaatattcatgattaatacttgtctgttctccttcacttcctacgctactttttcctaaaattcctggattttttatcagttctgtagaggcggacagcaaggctcagggcggtaggaaggaaac

SEQ ID NO: 7442 - DNA, 6000 bp, Homo sapiens
cagagtttgcagtgagccgagatcgcgccactgcactccagcctgggcgacagagtgagactccgtctcaaaaaaaaaaaaaaatgatgctgttgtgtttcacagtagctgcctgttccagcaacctgagtgatttctttcttctttttccccagatgttgtgactgtgacagactcactggggtttgtacatgctggggaggagccttcctttcaggggtgaccacattcatctgggcatgcctgcagtactcttggcccatggacctgaaggagaagcacctggtaggccatatcctattaccttataggtattgtctgtgtgtctctgttgaactctttcctacttgtttttgcctgggagatccttaactgggggctttaaacaaaagttgagagaggaggcaaggctctgagtcttgggggatgcgactgtgacctcttggctggaaagcacagactcacagagctatgaataaaggatgaaggtggacctattaacacaaccgcatgggagcagggtttctgatttaggctggctccaagccagtcttccacttcttgcccaggggtgtgcaatttagtttgtttgccctttgctagggcgatgtcctaacctgctgagccatgctgagggctattgggcacctccctgtggttagagaagagcgccccaatcagacttcaaacacagctgcctaatcagccggtggtgagcagccaggtggcctgggccagccataagattggtcttctcctcccagcctggtttggcccagcctccatgtatactatctttggatggaggtagagttgtcaatcagaaaactcctctcccttgacaaagactgccccagaggaagtccttttgtctcttgcctagcttctgccacaccttcctaatagatctttctgttttctgtaatcccagctacttgggagactgaggcaggagaatcgcttgaacccaggaggcagaggttgcagtgagcagagattgcactactgcactctctgctcatcagcctccacatggctgccacaaaactggtcagtggttccataccacctacttaacctttagtgtgtacaaagccctccagaatcctgctcctgcccatggatttggtgttcctagccttcctgctttgactttagcactagttattacctctaaaatgcttcccacccctttttctggaaacttcttctgttcttccttcaagacctagttttgacatcattttctccagttaagtcctccttccttccagaggtccttcctttcagcatttgtagtacctccaccattgtactcgctattctattgaaattaactcatctcttccacttcatctcaatatccctagctcacagcaccgagcctggcatgtagcaagggcttagtacatatttattgacctgaacttctgaatagtgatcttccttccagggagatcttgggaaggtctagagagggggctgtgggttcactccctgggcctctgctggcaccaggctggctgactgctttctgttcagctccaggcttcctatgtctctggaccagctgtgcaataggtttctggaattgaacttgaagcaggtgtgcttggcctcctgttcatagccacctctgggtgctcagcagatatccaccctagcagtgattggcacagagggaaagctacacttgcctctctcttagctgggagttaaggctgctgcaaacagctgcaagggctctgcactgctcagttccaaggagtatgtccccagaggctctgctgttatgcaatgcggtggcctgcctgggtgaggctgaatcccccaaaacagaggatggtattgtcttctggttccagccagaaccactgaacactagtgcctagtgtatgggggaaacaaagttctgtatcgaagggctgggtgctctctccagcctgaggaagaagacttgagaacccagctggatagctctcaggggccatttttcctggagggtttctctttgtcctcctcctctttctggataggtgagccctgacctggaaagcatcgtcagtcatccttggcagtcaccatattgtggaatggcagctttgggttggcagagctttaggcaccagggaggtggccccggcttagagaggcttattgtctagtagaggaattgatagtacaagcaggctgggcacagtggctcacgtctgtaatctcagcactttgggaggccgaggtaggcagatcacttgaggctaggagttcgagaccagcctggccgacatggtgaaatcccgtctctactaaaaatacaaaaattagctgggcatggtggcgcgtgcctgtaatcccagctacttgggaggctgaggcaggagaatcgcttgaacccgggaggcagaggttgcagtgagcagattgcactactgcacttcagcctgggcgacagagcaagactgtctcaaaacaacaacaaacaaaatggatagtacaagcagttaagtaattggacctggtagggcctctagctgaggtaactcatgagttgtataaatggacttataaagatgatctcagccaggtgcagtggctcacacctgtaaatcccagcactttgggaggccgaggcaggtggatcacctgaggtcaggagtttgagaccagcctgaccaaaatggtgaaaccctgtctctactaaaaatataaaaattagctgggtgtggtggcacacacctgtaatcccagcactttgggaggccaaggtgggcagatcacctaaggtcaggagttcaagaacagcctggccaacatggtgaaaccctgtctctactaaaaatacaaaaattagccaggcatgatagtgcatgcctgtaatcccagctatttgggaggctggggcaggagaatctcttgaactcgggaggcagaggttgcagttagccgagattgaggtcacaccactgcactccagcctgggggacagagcagaatctctaaaaaacaaaacaaaacaaaacaaaaaaccaaaaacagtcagaaggtgtcttggaggagtaggctttggaggagctggcatagtggtcattgatggtaggagggttgtcgtcccctggcttagctcaggagcggtttagctcttgatggttctctgcttctgatccatcagttcggtctctccttcaaagccctcacccctgtccccggtcctccagcccacagtggccctgctgtggcagtgacagcctgggttcctgctgcttgggtgcagggctcccttctccatttgctgaggtgggtagtgtaggaagggaggcagggcccagagagggctgtgctggggcctgcacagcacgtgggctagtccctgtgtgctgttctttttggggcctgtcacatagaagggacagtgtttgtggacttgtagctcccacccgagcagtgcctcagggacaggagagaggggacaggagtctttctctttggctacagccagattgcagagcagcagcatcctcacagtggctggcgtggaagctgacccccactgccaacctttccttctctccatggagtcttcctgttcttaacctctggactgcccgggccctcccttctgttctcactcagcactctgtttgggggccgcacagggagttgcactcatgaaagggaatggggaggctggcttgggctgctgaggctccttcttccctgcagcttgagatggtgtcgtctaggaaacggagggccctggagaaacatgctcaggctccagctcacactctccagctctgggacctgttaggctgtttcctctcccctggggtgtgtaaccccattataaggatggttttaggcagagaagtgtcccatccactccccatgcctcggcccctgcttcacccagggtgcctgtgctgagagcatcctgtatgtcaaactcgcggtccctgaatgatgcctctggagccatgactcactcaggctctgcctgatgctctggcatgtgctgaggcaggagccccaggtatctggcctcctttctgcctgggggatgcagggcctgggcattcccgggcagcctcatgggcccagcagcacttgggccggtgtgtctgaatgtattggggcatcaccggctgctggcccggctcttccctgcatggctgtgagggtctccgtgctacctggcaggaaggtgttggagtcttcagaggccctttgggctggctcttccctccctactggatccttccttctgtcagctgcctggccttgggctttgccttcctagaagtcactgctcaaatcttctcagcggccagtccatcccgtccccctccacacaggatgtgctactattaataacccacaagtcccctctcccctccttcctgcagctgtaactatggaaagggctgttggcttggctccatgctggggagttgccgtgtgatttggggacttctcatggatgatgggctcacccagtgacttggggacaaaggacaggtagtttgggaagagagctgggatttgtgtgtcccagggttccccttgatactggcagttgtcttcaggtttctgggacaggggcagtttctcctccatctatccctctgtctgtccatatcctggctgcatggtgcccctcagctaaccccactgtggcctcctctgaagaacaggccaagctcctggatatctggcagcgcgttggacaaactttctcttctcaatgctcctgtttcctccctccttctctttcctcttctcccctccctcccgcccttccagggctgctgcctcctcctccctccctgaatctgcagcgtgactagaaataggctgaattaatcagcagattgaagctctgctctgctgcgcctgattctgtgcagcacccggcttcttgctcacacactctcagctgtctccgtctcttctctcctcttctctctctctctcttttcaccctccccgctttgagggaggtgttggaagttcttgcagctgactgcttgtggctcagactctggcccatgctctttaagcaggcagagctatggatgccccatcagggcaaaggcaacaaagtgagtatgctggcagggcttttacgcttctctttaaaatgctgtgttccctgctttgtgtgggagtcttcgggttagcggttgctgtgagagtcctgaagacaatgcaaaatgggaggctgcttgaatgagcatgggtagctgggacctgggaaggggattgggaatgagagccagaaggccagtgtgcctgggtagctgccagccaggtgcccgagtcacccagagcaggactggacccaagcctcccaggggataccctgccaaggcatgtgaggacctgggtttccatgcacaggtgacagaagctcagggccaggatgccatccctcctcagggccaatgaaggcactttgaaggcacaaggaaggaccatgtggggaactaagacaagagccaccagggtggggaggattttttcctaggtcctggtggctacaggaggtggggaagaatgtgggtgaaagtactaaggtcagcatgagccaggaaaaggaggaagcagctctgctcaaggctctgatttgcctggctgcagacagtccatctgtgtctggcccaactcagaagagtgtatagtggctgaatctctgcttccgtgattcgggcattgtgtggagtccagctttgtgtcgcttccatacctgcactgacgacgacagtggggacccagagagggggccaggcctgaaatggagtctcactatgttgcccaggctggtctcgaactcctgggctcaagcgatccacccgcctcggcctcccaaagtgctggggttacaggcatgagccaccatgcccagccagccgttctaattagtagttatctgctgttgtcaaggctgaaggtcaaggtctaaattcataacctgtctacctgagcttaggggaccttgattct

SEQ ID NO: 7443 - DNA, 6000 bp, Homo sapiens
caaccaaactgggactccttccacattgttcccaaatccaggagcaagcctctctgaacactttctctgtgcagaacagctctcagatgaccaggaaaggtggcgactcacacatttgcaaccagcacccctgcaatcactctgagaggtagcagtggaggaatctgtttacagatgacagcatggaggctcagggaggctgtgtgaccatcccattcactcaaccacccttttattgagcacctgctatgcaccaggcatggtgctaggtgctagagagtagctgcccttggagtcacagtccaacagtgtggcgagattcctaaacatcatttcaaaccaatgtggcaaatgccatgtaaaagccatggcccaagggttatggggacacataaaccaacttggggtgtggagaggtcaaggaaggctctctagcacgtggttggtgcaacgtcttcaaggacaagaaggataaactgggctcaatgtcatgggaagggaccagcctgttgaaaaagcacggtggcttgaaaccgcatggtttggacagtgctgtgccagcagtctggtgttgtttggcattgctggccagtaagcctagagaaaaatggagccctggctgggcatggtggttcacgcctataatcccagcactttggaaggccaagacgggtggatcacctgaggtcaggagttcgagaccagcctggccaacatgatgtactaaaaatacaaaaattagccgggcgtggtggcgggcacctgtaatcccagctactcgggaaacaggcaggagaagcgcttgaacccgggaggcagaggttgcagtgagccaagattgcaccactgcactccagcctcggcgacagagtgagactccatctaaaaaaaaaaagagagagaaaacaaaaagaaaaagaaaaatgaagcccttctctgacctgaacacccgtggtaagcagtggcaatggagagactgctctcagaggactgacgggagggaggggccagctctgtaaccagcttgttaagaacaactgtaacaaggcatcgagtgccaatccatgccaggtcggcactgacctctccagggtatcactgttcacactgtaaggagatttaagtagcttgttgaagggtgcaccgaggacccgacccttcctcggctctccctctggatacaacgtgaggttaggggttggaggctgagaggaccccgtgaactgcagagcagagctgggacggggagtcaggcctcccgaccgggccgggggcactccctgggcccatgcctcgcgctggcacggagagcggggaggggggtacgcggctgacgaccgtcggggcagcagcagcagcacagcccggcgttggctagcggcccagagtcggggcagggagggttcccgtgcggacgggggctaagaggccgcctccagcccggggcagtccgcgcacccgagcctggagcccggagcctggaggggtggggaggccccgcgcccagggccggaccggagggagagggagagcggtggctcctcccccggcccccgccgctagccgatcggggcgctgggcgggcgccgcgggagccgcagccctttccggggggcggacccggctccggcggcggcacccagctcctgccccgacaggtgcgcgccgcgcgaaggaatgcagccggtctgactcaccagcgcctccttcctacctgcgcgcccgccccataaagcgctgcccgcctcgtccccacccccccaacccccgcgcccgccctcggacagtccctgctcgcccgcgcgctgcagccccatctcctagcggcagcccaggcgcggagggagcgagtccgccccgaggtaggtccaggacgggcgcacagcagcagccgaggctggccgggagagggtgagtgcccgccccagctgggcagccgcgcaggggagctggtcgggcagggccggtggcttttgtctccccttcccctccctgaaggctgacaggccccggtccctctgtccacgctgcgcaggacaggtgcccagcctccccggggtgcgccgggggcagctggcagccaaggggcagggcagctagagaagggtggtgcccatcagacctccaggccagaggagcgccttgggtgcgcctgcgggagaagtgggcagaggccagtggctggtagccctctggggctgggcccctccagggtttgcaaagaaggtggagtagacaccagcctgagtgctgggcccagcccatcatggcgcatctaatgataaaccaacattcctgacttttatgtgaaatttcgttctttctaacattggctcctacttttaaaagccaccctgagaggcagacgccatcccggctccaggcagggcttgctctatgcggtgccacagtccatctggggctggggagtccctgattttccttttctcttggccaagcacaggcctgccttcctcccaaagtcagccccaggcgccttccttcaggaagctctacaggcctcacccaccagccccagggctgtgcccaacactgccacctcctgcagcatccgccctctttcccatggctcagcctctggggtggccctctggctgggactggggctctggggctcctggtgactcccaggagcagggacagggcttctcctctgcccccatggccttgccacaccctgaggacaaggaccaggcacaggtggcatggttgttgctgtccgaaacagagctggcagtgaaggcttggagtctccatcctgggggctgagggaaggacagcaggagggacaggaggggaggtatgtctgtctactcgaccctgatttctcagggagacagaacagccaagggcctggggtccccagacttctggccagctgcctctctggggcgaggaagggcctgggtccctgaggggaggagatgtgacagcgggagaggatagtggacaggagcaggtgtgcccagaggggtccccaggggttgggatgggggccaggggagctctgagcctgtgggtgggtgggcatggcctgtgtgtgtgtgtgtgtgtgtgtgtgtgtgtgtgtccctgtgggggggaaactgcctgtgctgcagtgtgatggcattcagggtggcagtcacacactccagggacctgctggtacataaagtcggggcagcctggtggggtccgggccgcctggagagtaggtgtcctgagcgctgggcccagcccatcgtgatacatctaatgataaacacaaattcctaacttttatgggaaatctcgttgtttctaacattggctcctacttttaaaactttctaaacaaatgaagccaaacactcttgggtgcctcgccaaccctctaactgccattttgtagcttctgcgtggaggctgccatggaggttaaaggcagggcctgcagagcagggccctgtcctggccctcccagtgctgtccgcgggatggggaagttccacagccttctgtgcctggtctctcatctgggaaacgggcagaatgaaatcatctcccgccgggctcctgtgctgagcaatctcctccgtgaagccctgggctcatatggcagtcacagtgtgggaatcagcactgcctgaggggctgtggccagggacagtgggaggaagagctgggctcagctctccaggcctgtacctgcctgtgtaatgatgcctgggaggcctgagcctgcagcctgtattgtgtagcatgtgggtgtggcggctacaccccgaggctgcaaggaagtcatttccctctaggaaccctgctgtccccaccctttccctgctggctcagggctgcctcccagtccctgtgccacaacaggtctgacctgcatgtgttggcgctgctgtggcctcctccaggctgcacgccttagaagcaggctacgccttcctgcccttggcctgagaagggcttctccagcacctcggggaccccagcccccagaccctggggtggccactgccccagaagccgggctgagacaggattcaatggggagggcccgtgggcagggcagaggcttgggcccctgggagacctggccctagagaaagaggcgcggtgctcacctttgccccggccttgcaggcctggatggctctgccgccagcctcttttcttgtccaggcttcaggctgagcatctcttagagggcctcagggatgtccagtcctgccctgaaggccgctgaggacttaggatggtttaatactgaacccacagccgctggggacgccttgaggggagccacagtgtgtgtgcatgtctcactctgggctaacttgtgaaagggtgaacagctcaggggcccagaaaacttaactctggggcaggcagaggtacaggggagggcagatgattcagaccccaccctgatgggccgggcagtcactgcagaacccaacccggtgcagtaagccactgcgggcagctgtggcccagccccaggccccagatattgggaggggcccctctcctcccggctgtgccaccctcaccaaagggtaagtgggccaggacagaaggagcaggaggcagagctgcggccccctctcagggaggcaccctcattggatgaccctgtcatggccaagcctgacccaggctcactgggagctaaaaggcaaagaagaataaacccacatctgccctcagggagcccagtgctgagaggcctggcactgggacaaactcgcaaaccagagtccttgagggctggagggggcctcccggggcagggcataggccactgcagggatggcacggaacagggcagcggaaaaggcaggagtccgaggcccagggccctgcctctggcggctgggcgcccttggtcacattgttggtgctcagagcctcagttcccacagctgtgcagcgagaggaagctgacggcaccgaccatggctgtggaggcctcatgtgtcaattgttgctgttctgcaggaggaagaggatggcagggccacgccccagcccatgggccaggctgctcctggcagccttgatcagcgtcagcctctctgggaccttgggtgagtccacgttgccctgcagccccctcctggcaggatcatcccttgggcaggcattgcccttgcacggggatctcacggtgtctcacctaaacacgcttggccattcagcaactgaccactgcccaccttcagggctggaaaacttgaggctccaagctcttcagcctagagaagcttgagccctgaccacggggcctgagaataggagcgaaggaggctgtgtctagaggaaagaggagacacccacccaggactgaggcacccagaggatgcactgaggccccagaggtgtagtcaagagggttataggaatttggagaagagaggcactgctgacgtgtcacttgctctctgagtgtcactagtggacaaatcactggagccagctcctaccacttgaattttgtctgttagagggggtcctgctggtggcttgaaatagaccacgacagaaatgtttacaccacagaaattggcaaacgctacacgtcaagcaccagagaccagagccgttgttatttttttatttaattcaatgtatatgtagaaacatgctctcactctgtcgtcccggtgaaatgcagtgatgccatcgtggctcactgcagcctcaacttcccaggctcaagcaatcctcccaccttagcctcccatgtagctaggaccacaggcatgcaccaccatgcctggctaattaaaaacaatttttttgtagagacagtctcactatgttacccaggctggtctcaaactcctgagcttaagcaatcttcctacctcggcttcccaaagtgctgggattacaggtgtgagccatcgcactggccaccacagccattgttaaacactgaccagcacaccattgcctgaagcccaggagacctcttactgtgtacaccaggtgcacacagtaggt

SEQ ID NO: 7444 - DNA, 6000 bp, Homo sapiens
ctatttatttatttacttatttattttttctttttgagacagagtcttggtctgtcacccaggctggagtgcagtggtatgatctaggctcactgcagcctccacctcctgggttcaagtgattctcctgccctcctgcctcagcctcccgagtagttgggattatgggtgcatgccaccacgtgtggctaattgtttgtattttttggtagaaattcggtttgctgcacccactttacagagcaagagactgaggtccagagaggtccccacacttctttctttccccacttgaccacattcttggaatgaccgctcaggatccaatgagcattagttctgaatgttccagcagcattgaccctgtctcagttctgtctcccagtgacagagcgagaggtcactgaggacatcaagaagacctggccagcacacgacagctgctctcatcagaccatgcacacctacaccccaacacctgtgcacagacacccctacacctgtgcagacgcacccctacacccgtgcacagagacacctgtgcagacacaaccctacacccgtgcagacacacccccacacccgtgcacagacacctgtgcagacacacccctacacccgtgcagacacacccctacacccgtgcacagacacctgtgcagacacacccctacacccgtgcagacacacccctacacccgtgcacagacacctgtgcagacacacccctacacccgtgcagacacacccctacacctgtgcagtcacctgtgcagacacacccctacacccgtgcagacacacccctacacctgtgcagtcacctgtgcagacacacccctacacctgtgcagtcacctgtgcagacacacccctacacccgtgcagtcacctgtgcagacacacccctacacccgtgcagacacacccctacaccttgcagtcacctgtgcagacacacccctacacccgtgcagacacacccctacacctgtgcagtcacctgtgcagacacacccctacacccgtgcagtcacctgtgcagacacacccctacacccatgcagacacacccctacaccttgcagtcacctgtgcagacacacccctacacccgtgcagacacacccctacacctgtgcagtcacctgtgcagacacacccctacacccgtgcagtcacctgtgcagacacacccctacacccgtgcacagacacctgtgcagacacaaccctacacccgtgcagacacatcccaacatccatgcacagacgcaccccaacacctgtgcacagacacaccctcacgcccgtgtacacccccaaccccacataaccggccctctcataaccctacaccatgcatcacacccaaaccccatgaccaacacccaccacaggcagcagtgtggtgggtcaggccccactgggccacggtgcggcttctcctgcccttttcacctctgccccctacctgggctgccactccctgggaaggaccagcagccaggttaatatgtatttttctgactttgggaggccaggcaggtgaatcacaaggtcaggagttcaagactagcctggccaaaatggtgaaaccctgtctctactaaaaatacaaaacattagctgggcgtagtggcaggtgccggtaaccccagctactcaggaggctgaggcaggaaaatcgcttgaacttgggaggcagaggttgtggtgacccaagaatgcaccactacactccagcccggtgacagagtgagactctgtcaaaaaaaaataataataatatgtatttttctgtgagcctggacaggttctctggggcgagtgaagggagggcgcagatttgggccatggtcctggtcctgggtctaggctctgtgtggtggagggcaccagcctcccctggcaccgtcctggctgcatcccccatccagcctgggcacgtcccgccacacgccccgcgtgggtctggagtctggggacggtgtggccacaggtgtggaatgacaggctgtgacagttgtgtcaccagatcctctgggcagggagctgtaaggcaggcagggtcaggagctgggcagcccaggaccccagggaggcggggctgtggctcggccggaatgtccttccccgtgactcggctttcttcccctgacccggccagtcctggccccagtcctgtccatggggcggcaactggtgctgggtggtacggccaagactgggtcaggacggggtggccctgctgggatctggaaaatggtgtgcggggttcccaaggacgcaggatgtgggctgtgtggctcccccgaccctggaaggttccctgggacctgagatctggccctgataggtccgggggcctgttctgccaccctccctggggcagcggctgtggtgacccttggagaaaagcctctccgcatttcctaagtcatttcaggacacagaggtagggactctcggggcagcccatggggaggaagcagatcccagcctccccttcctgcccgcccccctcccacaaaggttgctcttggaaaaggtgggactgcgcaccccagggagcttaagcctgccagggagcagggtgggaaggacctgggggccaggcccctaggaggacattccagggcctggagggccctgtagctggaactgggaacaaaaggaagttggggcagccaggggcaggtggaggcacctgggtctgggggagaagtcaagactgggggctgtggggtcagaggggggcgtcctgtgaagctgctcactggccagggatggtgccacctgtccacacccccacctcctttcctgcagaaaagggcggcctgggcctggggtctgacccagggccactgtgggggagcaagcgttggagccaggtgtggggtgggtgctcccaacaccacccagagtggggtgcagagatgcggacacacgtggcctttcccaccccttcccgcagctccagacccccagcgggccaggggatcgcaccatggccagaagtgcctctcccctgcaccatcgctgtctctgacacatccagggttgttgagggaggggcatgacccccagaaggcatcttacccgaaaccaaagtggtattccgtgcccaggtgcccctggagccctgtgtcagatggagcctggccacctgggccctggtgccaggcctggaatgccccccgccaccaactgctgggcctttctaaaagctgagcacttggaggtcaggggtacctcatgctaccggagtgccagaatcctcggagaggggcccagggtctcggaggctctggccccaccccacagcgtcctgttctgtccaggctccgggtgagctgtcccaagtggcctgcttgatagctgcgctgcctgtttcctctgggtaacaacctggcaggcccccagccccagcccccagcagccatcacatcactgtgaccactctgtggtcttccagtccccccagtcaaagcccacagacttgacctctctgctgggagccagtgctgactggcctgcctgctcccctcccctctgagggcagggaggctccaccccagctctgggtggacagtcctggggcccacacccaggggaagccatgcctaagagggggccaggcctgggggtcagaaccaaaccacaggtgctccctgggacccctggagggatgactgggcgtcttcccagctgggagaaaacctggccctggcaggggcgcccctttgtccttcaggaggcaggagggggcagtgaggtcccaggctctctggctctgtctccctccccctgttgctgctctacggtgggggttcagggttcagggatcagggccaagctgtaggcagatgtggaaggtgtctcggtggcttcagtgggggccccaagcccagctggcaggcctggtgactcaacaatctgggatggggagcacggtaccctcgcctccccggcaggcaataccccataggggacccattcccgcagctgtccacggtgcctcgcacccctctgctgctctccctcctcagaaactgatgaatcgcctggtgcaggaagatgggagcaccacctgccctgggcgggagcaccacctgccctgggcgggagcaccacctgccctgggcgggagcaccacctgccctgggcgggagcaccacctgccctgggcgggagcagcacgggccaactaagtagagtcttcatctgtgaagttggaggccccctcaccacttgccacaggcctgtgttctgctcacaggcacgtgccctcatcttgatgtttggggatgggggtggttgggccccaggtaggggtgagggccagacccagcctctgtgaatgccagcgggagggtgggcttgtaacattacatagaaagaacaggcggccttactggacctgatgtcccgcaaggctgggctgcagatggagagccaaggcccacacggcctcactgtcaggggtggcctccccttgccctctggaggggtcctccattgataccccctgcctcctttgtgtgtgaaggcacgggcttaccagtgcctcggtccccgaagcccccgggtccgggaggggccagttaaagcattcctgtggccctggcagggtggccctgacaactagactccttggtccaggccaacaaaggccttactccctggagccacctcaaacctcagcacccaaagcggcccgttatttccatgttgcaaatgagagaaaacaggctgggagaagcacctcacgaggtccagcgggtgggcagccctcgcctccccgaaggtgggagccgccccggcctccgcgtcgggttctgggccgcgagaggggcggggcaggggcgcagggctggagtcggtggctttgtagggccccgcagggcgcggagccacctggggaaacggaagttcagggagggcgaggccgtgccccacatccaggcagcgcaggccgcgggccgctcccctagccaggaagagccgccgtccgcaccgggaccggagaggaagcggaggtctgaagggggacaggtcggacgtggcctcagagagggaggatgtgggccccggagctgagccaggcggccggaaccccacgggacccgcgcgcacctccccaccaaaggggccccggcgttggggggcgaggggtcgctgccctggaggacgttgggacctgccgcgctgcgctccgaggcggggaaacggagggacggcggggcggaggggcgaagcgagcctggactccgggggaggcgaggccgggaagacccagtcccgaggagcagagggggcgggccagctccgggccgggggcgccgacggggccggttccggttgggggggtccctgggcccggcggggttgcgggacgcgccgtcggggagctgcggcccgggagcccgtccggaggcggcgcggggtccgggcggggcgcgcaggggcggcgccaggcggtgacgtgcgcgggggacgtgccgcgccagcgacccgagcacttaaagtcgcccccggcgcggagcggaccggcagaggcgggcagaggcggcgagaggcggcgagaggcgggctgaggcggcccagcggcggcaggtaggcgcggccgcgatgctcgcgcgcgggccggggcccaggagctcccccgtgccgggcaagggggcgacctcggggtccgcgctctcacccccaccccgcccactttgtccatcaggtccgggggcgcccggggcatggactagccttctcgaccccgagcgggccccaccgagggctcccgagagccagccgcgcccctccgcgccctcgcatacctggctgcccagtctcgtctcccccggtccggcccggcgcccacccgtcgggctgccctcaggggctgggctcgggccaggagatggctgcgccggcggccaagcccggtccgggtataaatagctcggtccgcggtggcggggggcgcgggctatatttggt

SEQ ID NO: 7445 - DNA, 6000 bp, Homo sapiens
aggcaaagatcccttaaacaaaacattaaaagcactaaccataaaagaaaagattggttattttgagtacttaaaagactttggccaagtgcgatggcttgtgcctgtaatcctagcactctgggaggctgtggcaggaagactgcttgagctcagcagtttgagatcagcctgggcaacacagcgagaccccatctctacaaaacaatttaaaaattagccaagtgtggcacgtgcctgtagtcctagccactcgggaagctgagacaggaggatcagttgagccaaggagttcaaggttgcagtgagctatgattgcaccactgcattccagcccaggtgacagagtaagaccctgtctctaatcataataataatttaaaagagtgatgataccaagtgttggtaaggatgtggagcatctggaactttcatatgtgctggtagaaatggaagttagcccagccacattggaaaactcctaggcagttagccaaacatatgcctaccccatgatccagcagttctactcttgagtagcttccaccctagagaaatgaggactttatgaccaccaaaggcatgcgcacgaatgttcacagcaggtttatgagcaggaaacaagctacagtgagagagagcaggagagacgaatgttcacagcaagtttatgaagcaggcaactagctacagtgagagagagtaggagagacgaatgttcagagcaggtttatgagcaggcaactagctacagtgagagacagcaggagagtttgttgagagggaaaggagagcattgactggacgagagcatgaggaaggcttcagggatgccagaagtgtgctctgtcttccgttaggcagcaggatgtgcacatgtctggatgttgatcaaatggcatacgtggtgtttgtgtactctgtgaaagttatacctaatttttttaaaaagaaaaagaaatagaacatgtgtccaccttgttccatccctcctgatagcctgagctgtctcccctgtgccacctcattgaagaattttctatggtgggaccaatatggttcacctatgtggttttgttcacatggttctttgtcttctaggagtgtgggcctgtatcttatttacgcaaaattttcatcactgttgatagtcatcatgtccccaagaattgtaggaggctcctcgggaagtaaagggcccctctcaaagatttccattgctgggtgatcagccttcacaggcatggcatactggccacccttgcacccccacatcccatcaacaacattagccagcccacactgccccagaaattatcgctgaggcagaaatgaatgtggcaatagccaccccttgcccaatgtctcatgcctaagaagatgaattatcaactatttcaaagttgaaaactagcagattttcatgataaatgggacctttctgtcttgtctttgcacagacagccgccaaatctgtcaggctcattcccgccttttctgactgccttgctttatgtataaaacctgagaccagggttttcacctctcagtgtctggtaaagacagaattttatggtgactggccagggaatgaaagtgtcatatctccctgtatatgagggacactagagaattatgcctggtgcattcaaacccttcctgtcatttaagactgtacaattatttatgcatataatgtatctctgggaagtagaaaagtaggaaatatctccatatgctttaaaatataatgactgattttttttttcctaccaacaaatgaatgctaagacatggctttgattttgacaaggctctcaaaatttgctacatggaagacagagttgagtcctgaatggtagtctttaaacaaaaattccagttaattaatgtacagaaaataatgtaaaaaacagtaactaactactcagctcagcaaaatatgtaacatgtttccacatttactttacatcttttttttttttttttttttttttgagaaaatgtctcaccgtgttgcccagtctggagtacaatggcgcgatctcggctcactgcaaccttcacctcccgagttcaagcaattctcctgcctcagcctcccgagtagctgggattacaggtgtgcaccaccatatctggctaatttttgtattttagtagagatggggtctcaccatgttggccaggctggtctcaaattcctgaccttaagtgatcctcccacctcagcctcccaaagttctgggattgcaggcatgagacaccgcgcctggcccattttttttttcttttcttaagagacagggtcccactctgtctcccaggctggggtgcaatggtgccatcatagctcactgcaacctggaattcctgggcttaagccatcttcccacctcagcctcctaagtagctgagactacaagtgtgtgccactgtgcctgtctaatcttattatttttgtttttgtagagacaaggtctcactgtgttgcccagggtaatcttgaattcgtagcctcaagtgatccttctgcctcagcctcccaaaatgctgggattacaggcatgagctgccacaccctgcctgctttagatcatttttatgtaaagtaaatcattacagttattgctgaagaccgcccccatgaaccccaccctgcccatctcttcctccatgccccaaagtaaacactgtcctgattttgattttattctcatatgtgttttgatatatgtgtatatattcacaaatgatatatgattttgttttgcatattttaaaactatataaatggcattagacatatcatttccccacttgcttttttttgcccaacttactattttctgagatttatgcatgttaatgcatgctgtgtgcacccattcattttcacctcagcagcatattccattgcacgaatgtgctgtcatttgtttattcattccactgtcaatggacgtgtaggttgtttccaaacttttgcttttataaatagcggatgcagggaacgtttttacatgggcaagaattcctctaatggatataagtattaatgctgtgttatgggtgatacacatctccagctaaggaaatgttgctaaatttcccccaacgtgcttgaactaacttctactgtcaccactagtctgaatttcagtgtggccgtgcccacactagattatcaacctgtttacttctgactctgatgggtgtattacggtgtacatttgtgaatttcagtgccatggccgtgcccacacttgattatcaaataatctgtttacttctgactctgatggatgtattatggtgtacatctgtggttttaatttgcatttcccagttactaaccaggttgcgtgtcatttcatatgcctttcgggcatttgagtttcctcttttgtgaatccggtgttagtattgtttgcctgttgttgtgtcgctgttgggatagtttgtgcttttcctgttgatgtgtaggaatcttcatgttcggaaccccgttcccttgtcaacgttgcacgtatcttctcctgatttatgtcttgtcttttactttgtttgtttcttctgatatagatgcctttcattttagggtaggtggttcattctttctgatgtttgacattcttctccacccataagcaatgaaaataatctctgtattttcttcttcttcttcttttttattttttattttttatgtatttatttttttgagacagtgtcttgttctgtcacccaggctgtagcgcaaacctcccaggttcaagcaattctcctgcctcagcctcccgagtagctgggattacaggcatgcgccaccacacccggctaatttttgtatttttagtagagatggggtttctccatgttggccaggctggtctcgaactcctgacctcagatgatccacccgcctcggcctcccaaaatgctgggattacaggcatgagccactgcgccctgtattttcttcttaaagtttttcttttttatatctaagaatttaatccacctagaatgctttagaggcttgttctgggttcctccgaggaaaagcagcagtcatttccactggaattctggaaagtgcgctaacgccaggctcttcacgtgggccttgagcaatcagtgccattccccctcctggaggtttgcatacccttttctctgagcccttggccttttcaacaaagcagacactaggatagtaagaatttctatctctagaaatccagaaaggtccaaaatgccctgcactttgctggctacagttgaatgacctgcgtggtgcaggcctttgactagctgcatgaaattgctctgaccttagtgtaattccttaccacacctaaattattccacataaaacactgacgtcttccccatgtttctaccattgttaaaattacaattgccataacccttaagttcatagtatctgtcgttacttagtttctctttaatcattaattcttctgtccaaagcaaagtaaataggaaattggaggatgcaaagtgtcgcagggcctgaagggtcccatttctcacctacctgataggattacagaaggctttcccaaagaagcaggcagtggcagagagtacaggccttgccctgaatataagtttggccgttatcaccggagttgagtggtggcattgggagctgtcaccccactgctgccgttgtctgcttggtgaccatgtggttccattctcctaagccatctcaacaggccagagtacacccttctgtcttcagccatttctctgctccctggttgccaagagcagcggcggcagcagagcagggcagtcagcaggagtcagtgtgagctcgtcaccaaaaccacccagggacatttacctgggcaaccggaaatggaattccagcttcccttccaccttttgtctaaccccgttacctgggcaaccggaaatggaattccagcttccagtccaccttttctctaaccccgttacctggcaaccggaaatgaattccagcttcccgtccaacttttgtctaaccccgtccgttgcatgagatgagtttggtgagctgttaatcctctggaactttttctcatctgtaaaatgggaacaataaataacatccagggtaggtaaggctttactcagattaaatgtgacaaaacgttcctcatgtcattcccggcagtcagtgagcctttaggactatgggtgtccttctagataattggcatcccagagaaccagaacaaacaaagaggaaaaggtagattgttgccaggatacaatgtttacatttgggtaaatctcctacatcctcagtaacatccagagaaattcaaagtaaaacaataatgagttactattttttgcctaatgaataatcaggatttgatgagttttcagtgctgataagggtgcagtctgcatggctggcagaggtgtaaatgggtccattccattggaaagatcttaaagtttacacaaccacacacatcacagagtactgcacagccattaaatcacgattcttctttagagatggggtctcgccatgaggcccaggctagagtgcacttaaaaaccttgatttgttttttaaagactgcaaagatgggaaaatagaatataaaaattgtgtatattaagtgagaaaaccaggttataaaattgaatatacatacagtatgattctgatttagttttatggaggagttgtggtttgttactgaggcagggtctccctctgtcacccaggctggagagttacagtggcacaatcttgagtcactgcagcctcaacctcccaggcttaagcgatccacccacctcagtcttcctcagtagctgggaccacagatgcgcacccccacgcctggctaatttttgcattttttgtagaggcggggttttgccatgttgcccaggctggtctcaaattcctgagctcaagcgatcctgctgcctggccctcctgaagtgctgggattacag

SEQ ID NO: 7446 - DNA, 6000 bp, Homo sapiens
aagctcccaaattctagcagaggaagaaaatagaagcatctcacaggatcttcaaaaggaagaaatgtgctagatcatgtgtcggcatgctctgagaaagtggcaaactacccagatacacggggtgccttcttatgcagagggctacaggcctctcatggttgctctgggtacccgtgatcactgtgttcattcgtgtggccctcctagcttttccggtgactctcgcgttcgttttcttgccgaggactcacggcagcctcataagggaagcagtgcatagttgtatccccgtttttcgggtaaggaaaagtaaccccataaagcaaaaccagatgtctcatcccagcccagagccctctgcgcagctgtgtggctgctgcattcccattcactcacctctgtggtcttggcagaaatggagtcaccatggggttgtctgaaccttaacatgggaccacatattttatcaccatttttctcttggtcttgagaggagtttgtggcctttgctacgtgcgcactgttttttaagcttcagaggagtccgcccctgggagggagtgagcagcacgtactcagcagcaccttgcccaggagcagggaaacaggaacaggcagcagggaggggctccgtgttgaggtccccggtttacagagacctgtgtgcagatgcctggccctgtcgcattctagcagggtgactgggtgcattctccctcataggcctgcttcctcatttgatagtgggaagaataaccctcatcttattgtatgattttcagagttaaatgaaagaaacccggcatctgggatagggaagcagagggagcgacagttagctgtaattgttcgtagggaaggccagcaggttggcctggccagagcatgggttcccacgggctccacggggtggaagaactttctggagcgtgttcctaatactgatttttcttctccatgtgtacacaactcgtaggtttagatttagttacattgggtgaaaagagctttgtcctttgtggagaaaccagtgtttcatgccagaggaaggcaactgagaccacagtagatgattccctctgtgttgaatccctcccccacctgcgcgacctcagctctcttgcagcccaagctctacgtgggaaagactgtgtcttggaaacggcagctgctctagaattctttggctcgtggccacatcctttattggaagatgctacaggttgtccacagttctctccagagcctcggggcccccgtatgtctgtggggactttgtgaacagatttcctgccagcggtctgttctgcccttggctgtcctccgccctccgtctgtggctgccgggctgggccgggtgggaagtagccctgcgcgtgcttttgttttccagtgctgctcctggcatacatgaaagggaacgccaacttgtgccgcgccatcgtccggtcgggggctcgcctcggggtgaataacaaccagggagtcaacatcttcaactaccaggtcgccaccaagcagctcctgttccgactgctgggtgagtggcccgctctctgctctcacagtgcaagcacagtcgtagtgttgggatcgccatgtattgtattggtgatctttcaatctcatgatgccttaggatcggaaccgctcgtttcctggcagtagctgggaccatttctctgaataagggaaggacttttgagcgtgttgggaaggtcactgtgaacagtctcttttcaaagcactctgccttgtgcatttcccacaccccacaaccttctagaaatgccaaagctccaggcaggccacccttcctgtgtgtcctggccacttacctgcacacctgtcctcttgagactgactcagatcctccagaaccttcaaaatggcctgctgctccagcccctatcagctctccttcccctgtgacccttttgtggaaaggagtgcttccctcctgatttcatatttgtgaatctttactcttccctgctgaggtgacagaaagaatcagaatgtctcgagtgcctgtgctgtgtcatcacccacagtggggagagacaggcaggaaaacaagctccgacatccccggtagccatgggatggcgatgcacaggacctgcccagggggcacagctggtctgtggtggagtcgggttgaaggacagcatttgtgacatctggtctactgcaccttccctctgccgtgcacttggcctttgaaaagctcagcaccggtgcccatcacagggccggcagcacacacatcccattactcagaaggaactgacggactcacgtgctgctccgtccccatgagctcagtggacctgtctatgtagagcagtcagacagtgcctgggatagagtgagagttcagccagtaaatccaagtgattgtcattcctgtctgcattagtaactcccaaactagatgtgaaaacttagttctttctcataggttgctctgcccatggtcccactgcagacccaggcactctccggaagcctggaaatcacccgtgtcttctgcctgctcccgctcacatcccacacttgtgttcagtcactgagttacagattttgcctcctcaatttctcttgtcttagtcccatcctctgttcccctggccagtttgtctagctgtgtggtctctgttctctccctaccgtgccttccatcccagccatccctgactacgtgtttcccccacagacatcacactggttcacctcgttgaccaccgtttccttctccccaagtctcccgggcaagggctgattctccagtctcctctgggaagctggccctgaaccacttagaacctatcgctccttcgtcacctatgtcatgtggcagcgctgcctcacttacgggtctgtgttcctgctgcctccaagccctggggcttgcgtggcgccgtcgcggtttgacgggaccgggcctcccccctgtgttgcagatatgctgtccaaggagcctccgtggtgtgacggctcctactgctatgagtgcactgccaggttcggagtcaccactcgcaaacaccactggtaagaccccagcgtcactggcaaggagcgaggggactgccgctgatgtcattgcttccccccttctccaggacaggccgtgaacttgcctgggtcctgcacattgatgggcaaaccttgaccaaatggagggatgagatgagcacacccaaggatcctactgaggaacagagatgtagggaaggcagggagcctgcagacgggtggctttcctgctggaggctgaaggtgcacagtttccaggcagcctgccaggcctgtgccatccttcctgacttcctgcctgcaccaaagctgagatgagctactgccctcatggtgtgcctcagtatgggccgctttgccgagaactaaggggctgttcccattaaaatgagatagataggtcgggtgcggtggctcatgcctgtaatcccagcactttgggaggcagaggcaggcggatcgcttgaggtcaggagttcgagaccagcctggccaacatggcgaaaccccgtctctactaaaaatacaaaaattagctgggggtcgtcaaaaccctgtctttactaaaaatacaaaaattagctgggggtcgtggtgggcacctgtaatcccagctacttgggaggctgagacaagaggttgcagtgagctgagatcacgccactgcactccagcgtggcccacagagcgagacttcatctcaaaaaagaaaaaaggaaaaaaaaagatagtgctgagctgctctctttttgtttgtttttgagacatagtcttgctctattacccaggctgagtacagtgacacgagctcggcttactgcaatctccacttcgcgggttcaagcgattcttattcctcagcctcctgagcagctgggattcaggcatacgccaccacgcccagctaatttttgtatttttagtagagacggggtttcaccatgttggccaggctgatcttgaaacccgtgccctcaagtgatgcgcctgcctcagccttccaaagtgctgggattacaggcgtgagccaccatgcctggcctgagctgctcttgatcttccaaaaaaaaaaaaaaaagccttcttcagtattgctttaacttgatgattgactagagttttgttttcatagactaaaaattctacatgaattgtggtaaccgggctggcagttggcagagttgccagagtagcattgcgggcgccttggctgccaggccctgctgcggttgtcctcacgtgccaggaagcagagtctgtcgttggcgctcctctcatacttcctttctttgcttccacagtcgtcactgcggacgtcttctttgccataaatgctcgaccaaggagattcctattataaagtttgatctgaacaagcctgtgcgggtttgcaacatttgttttgatgtactgactctgggtggggtttcttagtgagccccccggagggtccaggccacgtccttggtcacctccccagcagctgctctgctcaccagcctgaccccacccagagcaggagctggcgggtgtcttcctgcggcaatagactggaacgattaaggaccatggtgtgatagatcccatttcaaatgattccatatgattgtcagtgtgtgtgtcagactgtgatcgatttcactagatgtctcactcatcagaccaggccattgggcctaagtggtaaatgtgattaggaattagacctctccccattctgctagcaacatacagggacacttggaaaaccatttccccttccagtagcttggtgtccatcccagagcattcatgaagtcttcccgcctgggctgactgatgaggcagagcctctcagcgtaggaagctggctgcttaatgagctggctttactctagggtaagtggctgtggacttttctgcacagtgttttcataaagataataggatcctcttgccctgaagtctttttttctttttacgctaagctgtatttttagtgagctaccccttttaaaaaggtgaaatctttcttaacagggttcaaagatgagagctgaaaaatcgtggccttaacaactgaaagctttacagtgttcatgctactgaggtgtcaggagtgcagctgggccgcttgacacctcgtagcagccgtctcattctctcgtcttgctgcgtcctgtctgtggagtcctcagtcactctgctgttggagagtgctggaggaaatgcacttttactgtgctgcactttttatagagctgcattgtcggtgattccaatttaaaaatccatattcaaaaataccctcacacatccctgcatcagtgattctaatgatcagctttgactggacctcagctcacacgaatctccaaggaaaaactctacagagcatcttttagagcaagagattcatacaggccaagtgatgagagggggagtcaccaaggcttcagccccaagggcatctccagcctcaggccggcaggtcctatgtccttgacacaaatgcttcttgctgaaatcctccctagtgatgctgcgagtgctgttggtcccagttctgtgtagcttgccctgccccatgaagggccaccagccaagggccctggccacgtgtgcgccaccttactttggaagtctctggcttgtgtgctggatgaggctgccagaacttgttgggcgttcatcgctgttagtacatatattaaccgtgaggtgttaaacttttcttttgaaggtttggccagtttctaaaaaatgcacatttaaagagaagcatctaccacggctttaaaacaaaacaactctgagatgaacaatatgtgttatactcagagattaacaatctcaatcatacatactgattctttcagacatttaataaccactacatttttttgcattaatgaagtttgactatatgtgtaaagggactaaatatttttgcaacagcctgttctttgttcattc

SEQ ID NO: 7447 - DNA, 6000 bp, Homo sapiens
tggacggtgctttcgtcactatgaagccaacgtgtgtcccagttaatgctttttgccttgaatttatctgatatataaataccacggtccttgatttttttgtcacttgcatttgcttgctgtatctctgtccatccttttgtttcttacctttttgaatctctgttttaaattaatgattctcagtcttgactgtacattgcaatctcttcaagagttaaaaaaaatatatcgactcctggatctcgcccttaaaaatgctgatttaggccgggtgcagtggctcacgcctgtaatcccagcactttgggaggccgaggtgggcggatcatgaagtcaggagttcgagaccagcctggccaaaatggtgaaaccctatctgtactaaacatacaaaaattagccgggcatggtggcgggtgcctgtaatcccagctactcaggaggctgaggcaggagaatcacttgaacccgggaggcagaggttgtggtgagctgagactgcgccattatactccagcccgggtgacagtgcgagactctgactcaaaaaaaaaaaaaaatgctaatttaaattaatcttggcttcatcctggaccattccctgaggggcagcacagggcagctaagcttaaggtatttctcctatataggttttttgttttgttttgtttttgatacaagatctggctctatcgcccaggttggagtgcagtggcatgatctcagctcactgtaacctgtgcctcccgggctcaacggattctcccacctcagcctcccaagtagctgggactacaggtgcacaccaccatacctgggtagttttttgcatttttagtagaaatggtgttgtgccatgttgcccaggctggtcttgaacccctggcctcaagcgattcgcccgcctgggcctcccaaaatattgggattacaggtgtctgagccactgtaatccaaaaactgcacctggcaggttttgtttttgatgtttaaaaatctaataagtaccttttcttttaataggtgagtgtctcatttacattctaatagatatgtttaaccctagtcctttcttttttctgctttacatgcttcttaattttcttacaattgctatgtgagaggtgttctttttgttttcttctttatggtattttggaaactatgtagtttatttagagttattccagtgattacttgtataactttaaataataggctgaaaattattggctttgaaaactaaaagtttgtataacttccataggaaaggtgaggagaccaggatacctcttattcccatgtgtctgagtctttcctttcctaggttccttaagtgttgtatctgaaaaaaaaaaaaaattttttttttttttgagatggagtcttgctctgtcgcccaggctggagtgcaatggcgcgatcttggctcactgcaacctctgcctcccaggttcaagcaattctcctgtcttagtatcccgagtagctgagattacaggcacccgccatcgtgcctggctaacttttatattttttagtagagacagggtttcaccatgttggtcaggctggtcttgaactcctgacctcgtgatccgcccgccttggcctcctgaagtgctgggattacaggtgtgagccaccacgcccggcccctcaagtgttttatctgaaattttttgtttatttttattttttgaaatggagacttgctctttcgcccaggctggagtgcagtgacacgatctcgactcattgcaagctctgcctcccggttcaagcaattctcctgcctcagtctcccgagtagctaggattacaggtgcctgccaccatgcctggctaatatttatatttttagtagagacaaggtttcaccatgttggccaggctggtcttgaactcctgacctcaggtgatcctcccgcctggccttcccaaagtgctaggattacaggcatgagccactacgcctggcttttttttttttttttttttttaagacagagttttgctctttttgaccaggctggagtgcaatggcacgatcttggctcactacaacctccgcctcccaggttcaagcgattctcctgcctcagcctcccaagtagctgggattacaggcatgcgccaacacgcctggctaattttgtatttttagtggagatgaggtttctccgtgttggtcaggctggtctccaattcccgatctcaggtgattcacctgccttggcctcccatagtgctgggattacaggcgtgagccaccacacctgggcttttttttttagtatgtagctcaaacttttcatttcctttccttatcatgttctcttttttttttatatcttctttcatgttttatgtcattctttttaaaatttttgaagcatgtaaagaaactgttcttgggagcggggagggagagcattaggagatatacctaatgttaaatgacgagttaatgggtgcagcacaccaacatggcacatgtatacatatgtaacaaacctgcacgttgtgcacatgtaccctaaaacttaaagtataataataataaaaaagaaactgttctccaacatcccctcatattccgaaacaaggcttcttttcaaagtctatttttcacctctctttttgatatcacagttcatttttcatctgcctcatcttcctctttctttttgggggcataagttccatgatgattttctccattacttttgtgaatgggcacagtgctttctttcctatggttcacccaggaaagggggaatgaattctcccggactgtcttctctgatcatctggcatgatttgattcctcctctcagtctttaacacggcgggctggatactgctaatttgtagtctgctcagttgttctgtttctcgtggtgatgggagggagggctggcagcaggtagcagcacatagtgtgtgttgtctccaggcactttctctccaactccgttgactcctctgaatttggggagcagcctcacctgcctctgagggctgccccttcatgcatgggactttgtcctatttgtgggattccagaatttagggatgccccagtttctgatgctcaatcggaagaggtgaataactgcaaccttagttgtttttctagagagtgagagtagaattaggcaattgtccttcaaatactgttggaaggaaaattccaggctgtcaaagggaattgttaagtgtgcacgttgctcaacggatccatccctctccactttctccacaaaaccaggtgaccacaccttcccctcctaccctaccgaaccacgggacctaggtccccaggaacagctgtatgtgtaagagaaagccacttggaggggctaccgtgctgggagtgtgggtgcgcgtgggtcccggggagctatctgcaggctcgaagtccactttcacccaagcccctggcaactggctgtccgggctgcttcctcacaccccggtgtcttcctattttgccccgattgtcagactccacgtagctagatcataatggggccctgggcagtgggtccaagcttagaagctcccgggcctgacagatctcaggaaatgacagctacacatagaagcgagagctaccaggggccaatgtacttgagaggccagtgaaactgagatcttcagtgggtctggggtctggggggcagtaagagcagggaccagggtcgggatcccaggagttcgaggctgtgggcagaagacagggagagaaccggaacttgggtagagccataagctgggaatgaagggggacaccggcccagggctgtgaacaggggacagtggccactaactcaggtacaggattggctctctggctctgcaactccctgcaaaatgtggtcactgcagtgcccatcttagagagcttctgaggattaaatgagatcatctttgcacagacagcacgaagtctagcctagcaaatgtgcactgaacagtagctagagtgacggaagaaaaagctaggaagcagtcttgtcgggagctggtgcttcagcctgagggcagatcaggctggggaaggctgagaggggccacagttccatgcctgcatggagggaggagaaaggcacaagagactagaaatttcctgtttgcctgtgtttccagaaattcattgtacaacacacgaaccccttcaatacctggataggtctcacggacagtgatggctcttggaaatgggtggatggcacagactataggcacaactacaagtaagtggcctcttccctcatctccttgttagatttctctggggacagccccctggcctttcactccaagctaccctgactcgtccctcagggaccaaattccccaatcctctcctccccagactccaacccctccaaagctgtgctcttctgggctgggggtgagggttgctgggactgggcataggaaacatctttctctgcggttgggttctccccagactgggtagcagggcacaccccagctccactctcggccttcaaggaaaatggtcatgaagaggaggaggatgggtaagtcgctttctcaccaccgtggcagagtccgagttttctcttgcctccttaggaactgggctgtcactcagccagataattggcacgggcacgagctgggtggaagtgaagactgtgttgaagtccagccggatggccgctggaacgatgacttctgcctgcaggtgtaccgctgggtgtgtgagaaaaggcggaatgccaccggcgaggtggcctgaccccagcacacctctggctaacccataccccacacctgcccagctctggcttctctgttgaggattttgaggaaaggaagaaacactgagacaggggtatggggaagagctgagcaaagagagaaaggaggtagtttaagagtccctgaccctggaggactgagatcccacctccttctgtaattcattgtaattattataatcgtcagcctcttcaatggcgtaggaaagaagaaacaaatgcttgaatctctgtgtggcctggttattgggaactgagaaacagcatgcaaagaggagggagaggggagggcatggaagacgcaaggcgcgcatcctagacagctgctccttggtccctaatcccgagggacattggtcagggaaacgggaaaggggcttggagcagacaggcttagtggctggcactggtgggaaaggggtcggccgggctgtggctggagggtccgcctggctcccagtgagaggtgacagcgtgctggcagtcctcacagccctcgctcgctctcggcgcctcctctgcctgggctcccactttggcggcacttgaggagcccttcatcccgccgctgcactgtgggagcccctttccgggctggccaaggccggagccggctccctcagcttgcagggaggtgtggagggagcggcgcttgcgggccagcgcgatttccgggtgggcgtggactcggcggaccccgcactcggagtggccggcctgccccaccggccgcgggcagtgatgggcttagcacctgagccagcagctgctgtgctcaatttctcgccacgccttagctgccttcccgcggggcagggcttgggacccgcagcccgccatgcctgagcctccccgacccccgctccgtgggctcctgtgcggcccgagcctccccgaccagcgccgccccctgctccagggcgcgctcagtgccatcgaccacccaagggctgaggagtgcgggcgcagggcgcgggactggcaggcagctccacctgcggccccagtgcaggatccatggggtgaagccagcggggctcctgagtctggtggggacttgaagaacctttatgtctagctaagggattgtaaatgcaccaattggcactctgtatctagctcaaggtttgtaaacacaccaatcagcaccctgtgtctagctcagggtttgtgaatgcaccaattgacactctgtatc

SEQ ID NO: 7448 - DNA, 6000 bp, Homo sapiens; identical to SEQ ID NO: 2849

SEQ ID NO: 7449 - DNA, 6000 bp, Homo sapiens
ctacaaaaaattttaaaaattagctggatgtggatgtggtggtctccgcctgtggtcccagctacttgggaggctaaggtgggaggatcacttgagcccagcagttcgaggctgcagtgagctttgattgtgccactgcactccctcctgggtgacagagtgagaccatgtctctgaaaaaacaaataaaaatttaaaaactataacatttttggggccgggcatggtagctcacacctgtaatcccagcactttgcggggctaaggccggaggatcacttgaggccaaaagtttgagaccagtctggaaaacatggtgagaccccccccatctctataaactagatataaatatatataaaactataacattttaaacaaatgtgagcctgcagctgcttatgttgcctgtgtggaaatgaagctacgccagaggcaagcatagctgaagaacagagagacagatccccgatggcaacttttgaggacctggatcctgctgtttctagctgtgttctagttacaagattcttctttttcggtttaatccgtttgaggagggttggcaagtgtcttggtcattaagtccatcacagcaaagatcatgctgttttaataatctctctttgtgtttattattgtagcttctgataccagcacaatgcctggcattgtagaatgagagagccctcacttaacaaatgagaaaaatgaggccccaggagaaaggcatttgctccaggacaccatgcagagtgggaaagctgggactagaacccaagtctcctggctgttaggccaaatcagttgactcaattaaacaaatgtttattgaacacctgctacctgccaggctctgggcttggcatgtaatatggaaggtaataagatgtcaaccaggtgccgtggctcatgcctgtaatcccagcactttgggaggccgaggcaggtggatcacctgaggtcaggagtccgagaccagcctgcccaacatggtgaaaccctgtctctactaaaaatacaaaaatcagctgggcttaatggcaggcgcctgtaatcccagctactcaggaggctgaggcaggagaattgtttgaacccaggaggcagaagatggcaccactgcactccagcctgggggacagtgagactccgtctcaaaaataattaaataaataaataaaaaggaagatgtgggttcttgacaacctctctatctagaggagaattcctccccctttcaaaacaacaggagcttgttaaacccagtgaatctctaatgaatggagggttggagagtgagggaccggaaccaggagtcctttcacgcacccaatcccaggagattctgatctgcctatgtcttctcccacccatacagggctctggcatgtggcacccccaccacccacactgccctgcttcccagtggccaggggcctgggcctgctctgctggctggttccctggtcgaaccagtaaaaagtgatcagtgcttcgccagcccaactaggactgtccttacagaatactgggcacaaaggtcctgcccaaacacatccttcccgttagcagtctgtctgcctgctatgcactcaccatagtttattattcatttgcctgcctcgttcctggcactgtgcttggtacttgttcagagagaacttcacatattaaaaagataccactttatgtgtttacattatgctttaatacaaaaagagacaccttcttgaccgggtgcattggctcacgcctgtaatcccaacacttcaggaggccaaggtcggcagatcacctgaagtcaggagtttgagaccagcctggccaacatggcgtaaccctgtctctactaaaaacagaaaaattagcagaggttgtagtgagccaagcttgtgccactgcactccagcttgggtgacagagggagactgcctcaaaaaaaataattaaaaaggccgggcacagtggctcacacctgtaatcccagaacttcgggaggccaaagtgggcagatcacctgaagtcaggagtttgagaccagcctggccaacatggcgcaaccctgtctttactaaaaatagaaaaattagccaggcatggtggcggacgcctgtaatcccagggactcgggagcctgaggcaggagaatctcttgaacccaggaggcagaggttgcagtgagccgagatcacgccactgcactgcagccccggccgacttctaaaccagtaattgtctgaagagaaaaaaaaattacgaaataaggccgggcatggtggctcacgcctgtaatcccagcactttgggaggccacggtgggtgggtcacctgaggtcaggagttcgagaccagcctggccaacatggtgaaatcccgtctctactaaaagtacaaaacgattagccgggcgtggtggtgcactcctgtaatcccagccacttgggagtctgaggcaggagaatcacttgaacccgggaggtggaggttgcagtgagccgagatcgcaccattgcactccagcctgggcaagaagagcgaaactccatcttaaatataaataaataaataataataaaaataaaaaataaaagaaagcgtttatgaaagtgtggtctcggccaggcgcggtggctcaagcctgtaatctcagcacttcggaaggccaaggcgggcggatcacggggtcaggagatcaagaccaccctggctaacacggtgaaaccctgtctctactaaaaatacaaaaaattagccgggccgggtggtgggcgcctgtagtcccagctactcgggaggctgagggaggagaatggcgtgaacctgggaggcggagtttgcagtgagcagagatcgcgccattgcactccagcctgggtgacagacagagactctgtctcaaaaaagaaaaaaaaagaaaaaaaaaagaaaaagaaagtgtggtctctgttgcctacatcaccatcaccttgagtcctacatcctttgaatgagtcttgggggtgtgccctagaaaatcattggccaattcccgaagccagtacatgtagaagccaaatctgagttatgcaaatacattatttttctattgttcaacttacctctatttgggtctccattctacctgcctgcagaaaacattctctcagtcacttccaggtgaactccgtcatcccactccttctcccacctccaccattgatctaaatttggggagttcctctgagccacagcctaggtggggtggggtgggaaggggctgctggatgagagtcctctttctgagatgaatcctcctgggcccttcatctccgtgggtcacacatgccctcatttctactctgctgctgccgtccccacgatccaatagcaatagcacgacccctggccttgaccgtgtatctggggctctgtcccttccacatcacccccaaaccagcatcaaatgtcttgtctggctctgcactaggctcccctcagttagtgcagggtgtccaactgggggcggaagggcttcctgtgcctgcctcttccaatcctccatgtcttatttataccctgacagacactgagggttttgaacttaaaaggctggaatttggcatctttgttctctgactagaaagaggaatcatttgaagaccaaaaagcaggagccagcatctcacagcatgatctgagacccccgtggaagctgctcttttctttctcatcacataggctgagccacccgggactgtcagtgcacaaggaccagggacgcggctgctcctctgagggggaggaagccaagagtatcttctcttagattgggctgagttcccacacccagcacacacattccctgctcactcacctcccacagacagctgggaaatgacacctctggtgacagagccactctccgggcttctgtggggagcgggtggggcactgcagtgggggaggatctcacacccggaggccctgggaagccagggtgggggagggaggaagctggttcctgtttgtcttagagatcaaggccatcagcctccctgcaccttccagggatgtagtaagcacccccaccccagggccaaagggcctcgcctaaaatgcctcctgcacccttgaggcttgctttgaccccctgcactccaccagagcgacagctcccctggtcccatcttctctgacaagctgggtgggagtgtatacagctgctgggtgtgcttagagggcctaatggagaccagccagggataatctcctatgttatccacatcaagccatttaacaaatatggatttagtacctacatatgcaatgtatttggggtccagagagaggagggcaacggtccaaggtcacacctgcgaggcgaatacgcatgtaaagcagcaccttgtaacctgtgcccactgtgcctactactaaagaaaaaaaaatgagagaaaaagaaaaaaggctttttttttttttttggcccaggccctgtgcctgggaccaaagcctgagccctttcctgcagtcgggtcgctgacctaagcctggggcaaagctaggtcttggccagtcagcagccaccacgtgaagcagcccctgcccccatcacccccggcagccttgtgccctcctcctcggggtcctcagctcaccccacctcagtcgggcctgctccagcggttaagtacccctagtctgaaccttaatcgtgaggcggggcagccccctccccacaccctgtagacactcccccgtcctccgccccctggacttgtttgggcgggaagagcctgcctcatcttttcttcctaccctcctacccagtggccagggaccccaggcttcctctgagacatccaccagcggtgatgggttgggaccaatctcccccactcctctccaccctagcagtaaggtccccgctctcgatactgccccagcacctgcactggccctctctgatttcccaactccagcccattccaagtgctgaaggcgggtcgctaggtgctgggacctgggcgcggggcaagaccttgggctgtgtggggtgcaggctggtttactgggttcacgattgagggagtggtctgggggttaggtgtagggccaggctgcgttgtgctctaaggggcaggcggcaggcggtttgggggggctgtggtcagacagggtggggtggcggtgggtttggggaagccgcagcagcccgccttggggtcccgcgagtgccgagggagctgccggggcatggtggcgcggggcccgtggtcctgcccggcacgacccccgccccgcagcgccccgcagcgccccgcccccgcggccccgctcgcgacgcgtctcccgcggcgccccgcccccgcccgcagtgcccggatgcgggtgacgcgcggccgccatctttccgtcccgggcagccagcgccagtcggagccagcgcgagccgccgccgccatcactgccgctgccaagtcctccacccgctgcccccgccatgtgagtcggccgcccgccaccctcaccgcgcttccctgcgccggccgccgcccttggcaaccggccgtcgggagtgcccggggtctctcctgcgttccccgcgccccggggccaggcccaagccggtgactgcgcgcgggcggccgaggagccccgcgtcccgggctggccggctcgggcgatggccgcgggaaggagcggacccagtgtcctcctgcccctccccgcccctgtcaccgcggccgcctgtcttttcgggtcgacccggatcgcatctgtgaggtcgccctcagttgacaggcggggaaactgaggccgggggggcctcgctcaaggtcacgcagctcatcggcggcagggctggaccgagaccagggcttacatcgggtggccttcctcccgaaaaggaggactggagggacgaggatggacaggtggatgggcggagccctggctgcggggccgggaggctgcaggccctgggtcttaatccgtccctgctcctcaggtctg

SEQ ID NO: 7450 - DNA, 6000 bp, Homo sapiens
cttatgactgtaccaaaagttactcaatcattcctctagtctttgagatttaggatgttcacacttttctttgttataaaacatatcacctttatttggctatgaataccattatagccaaatttttgcatatccatgactttctaaagatacatttctagaattttaatttctgagcccaaaatttaaagtaaaacaattatatgaggcccaggcttaccactgaaaccctctagattagatatttcctagtctaacaatgaagagtaaacattcttgaagttttgcccggctttcccttgaacgtctcgaaaggatttgacctttgtctgtgaacttccctggattagctgaggtttcacacttgataagtggtgcaggaactcagagatgaagaaaacatctggtctccagttcattttaagtacaactggtgctccctaggctcagaagtgcacacagaatgatgcattgtggggactatgatgcgtcgtggggcttgtcctcccagggtcccatccaggaccgtttgcgttcacctcgtccttgctggagattaatgctccatttcttggtgtggcttcgactgcctgaagcaggcatttccttgggttacatgggccttcctgtgcacctctctcaataaggacaatctctcacatcaagccaaggctgcttttctcgacatttctatgcctggtctgcagtggcctagaaaatccctgcattcctccccattccgtccattcccgtgtggcaagattgctctgcttccccattttatttgaacctatgccctactggagcagaagcattttcacttaggagtaaacagtcttagaaaagttttagagtttgcaatcccaagtacacatccatttctgactcttgcttaaattgctccccaatcctctagctgctaactcatgagatgtcagagaaaagactgctttcccccctccacttgcatctgtggaatctggctttcctaagcaacaatgcatttgtgaacagagaatcctttgtacttggtctggtcccactgccacaacataataattctgtgacttctctctcccacaggtgaaggagttaatatacaatttactccaagatacctttctatattttaaagatgtcatttagggaacagtcctgtgccaatgtgagtttttttttgtgtgtgtctttatgttgctttctgactgcgtctgtgttgttcataaagaatatcttctagggattgggacctgtcataatttcaaacttgcttatttgtagaagattctgtcacagaagtcaaactggctccttctgttccttttcttctcccttctccttctcttccctcccctcttcctatctatatctccctccctccctctctccttccatctttccttccttccttccttcctccctccctccctctttccttccttccttccttccttcccctctgccttctttccctgccttgcttgttctttcaacaagctgctctcactcgacatcaaaacagtctagctgagtctagatgaggcaggactgacttttgaggacccttccaggccagctgtgtccagggctggccaagaactcccacacaggctgctggctatgaggacacaggaaagacttcattcttagtgtaaacacttttcagatattgactgagcacctggtgggatagatgctgcaacaacaacttcatcacctggacaaacaccaaattcagacttgcctctggttttctctctggggagcctgcacagtgaaaaaattacaggtttgggagtcagaggaatggacttttttaagccccagccctggcattcactagctagtccctggaggaaacactgtaaattttccaagcctcagtttcttcacatagaaaatgattataatgattcctcttaaataagatactgccatatgttaacagcattttattagctataaagtgcggaagggtttcctccctcttcaagagtctgctgggattccactgtcatggacaacatttcattcttatgaaattaaaatctcacctacaggcaggattctgccagtgcttatgctatacagacatatggaatgcaaatgtcctcggaggagcacacagccttgttggcaggatgagacaggattcttgaaagctgtactaaatgtgactggtgctgaaaaaaaaatggatgtcttaggatatgttcttgctttttaatggaaaaagaaacgtgaatgcataaatatgtataatgtgagaatatctttcatacaaataggacattaaatgatagtgtctatggaagcatgatgagaagatatgctaggaacgtgctgggcacaattaggggcacggtagaatgtgagatagtccaggctgtgagtacgggatctgtagccagaatgcctggttggaatccagcctctgtcatttctttgcagtgtgtcttgagaaagtgactgaacatctcgctgtgcctcagtttctccctcttctaaaagaggatgatggggtgcctatttcatacggttgtgaggattaagtgatttgatgcatataaaatattcaagatggtgcctggcatatgctaaacacgaagtaaatataacctattatcatcattatcaaggacttgcggataactgatgctactgagccgatggagcgtggtgtagcagaacagctcaggtgctagaaatagccagtctcattgactcaactgtgtttcctcagagaatcccgattctcatttttcctatctgtaaatggaagggaggatagcaaataataataaatgttatttggtgactattctatgtgtttattttgcaagaggctcagtgggatatagcctacagctttgcagagacattgctcaacacagatgcatgggataggggtcccatttggctgagaaaaggttattggaaatgggagacgaggaaggagttttcctcacctgactctgggaagggaagagagtctggcccagatgggtaaagacaagtgtgttggcatctggtagacagggccagtggcacacaacagtgaacagctctactgctgacagccaacagggacttcggggtttggctgctggagatggaggacctgggcaaaagagacgtgaggccaagagagcaggtctcagaatgtggagctcatggaaggagagagggagggctaatcagactgctcctatctggccagaagccatgccccacactcaccaggccctaccccttttcctctgaatctttagctcttagatcagaaataatcttacgtgtcttcaggcttgatcctggcctgacggacagcagcctctgtcgtgtagcctttggagctgatcatggcagtacccaggaaaagactgtctggagaggctgcaaaaaccatgctcactgttcccagtccccgtacagaccatgtcagaggaggactgagggaggctcctctctctctctctctgtcacacacacgcacacgcgcacacacacacacacagatacacgcgcacacacacacaccgttttgcctggcagaacagacttataacttgcataatactgcagcagcccacactgtacctcatctccatttgggttccacaacagaagggagctggaaggaaatcagcgacaatctaactccacatgacaacctggctggacaacgaaacatccagcggggagaaagacactggaaattacccatacctgagccccatcccaaaacacctgagtcagcttctctgaccatggcccaggctaggtcatttgcaaagctcttgagtgattctaaagaaccactgctgtgaaaaataaaaatgatttcagcaaagagagaaaggtgaaactattttattggcactggctgtgatgctggctgtgagcagatgctggctgtgggcagaacaggggagagggccattgagaggcccttgtgactggagagtccaatcaaacgtaaagtgtgtgacagggagggactcctccaaattctgcaggtctctccagactggggatccctaacacaagaggaagtcttatgccccaagtgccagaattccaggaaactcatgcaatgaaaccagtcctcttgtgtcagagtttgcagctagaagcggttcaagggatggaggactctctgggagctggagtggtacgctgcaaagaacctaaatatgccataacttcctttacttccctctccaagaatttccaattgctcttccagcctattctgcctgacaggttagaaagttttcaatagttttcaatagaggttcgtttacttgcattgaattatctcatgaaggtcagcttgattcgggcacattaaagacagagtcggaagaacacatttccctaagttttattctaatgtacaacacatgtgatcatttgcgatggggtctaggcagacaaggcaggtaacagggagtccttccaaccaggggttggaacaaaggaggcttgatttggtgactcttgagacatttggctcactgctgtgatgctgtgagagattagctgtgcaatgtttgggctccttaaaaggaagtttatttaaaataaaacttacctgcacgtatgtaacactgtagacacagatccttcccacagtatatttaatctctgcagaattcactgggaggggaggggagccagtgggacctcttggctattacacaggttggcacttccagagagaacagtcttggcatcacaggcttcaggcatactcaaagctcttctcccttctgattccagtttctccatgccctgcagggcctcttgggattattgtattctggaaagcaaacaaagttggacactgtctctttaaataatagaggctgagaacctctcaggccaccatgacatatcccagcattggaccagcccctgaataaactggaaagacgcctggtctggcttcagttacagggagcaccaccagggaacatctcggggagcctggttggaagctgcaggcttagtctgtcggctgcgggtctctgactgccctgtggggagggtcttgccttaacatcccttgcatttggctgcaaagaaatctgcttggaagaaggggttacgctgtttggccgggtgagttttattggcaaactgtgcctctgggtgatgtgtgcctatgctttacaagaattgcctaatttcccaccccctgcaagccgcaaatgaaaaggattgcaggagagatggtgcatttgtgttggaattgactggagattcagagggctttttatatccttggttaaaaggtggatatatactctggctggggaggtggggggccatctgagagcatctagaaaccctaatgcatccagattgaaaggaagaaaggaatctagatgctttttcccccatggaaaatagctgtgcacacacagctggcaggtggccttggtaagcaggttagggagaagctgccacctgtggcagagccttggccagccgggctctgggtgtggcaagcctggtcagcaggcactgagtagcacttcctctgccaccattgagaaccaggcaggaggccagaggcagtgagggacagatgggttgggtttacctgtctggcagtatatggtgtggctgtgacctgggtggttattgattaaactattgggttcaaaagaaaggaagaagcgagctgtagcacccaatatatgcacttttctgtatgtgtattagactttattaaaaagtttatttgaaaatcacaaaggaagggaaagaaaaccctgagttagatatgctcatatttctaaagtgcttacttagaacagtcctgagtatgttgtgatcacataagtgttggttaaataaataaatgtccaaatggcataaaacaaagtaataatttctagagcaaatctaacttataaaatgacctgtggaggaaagaaaacactgccatgtctttagacttttttttctacttgcatatgcactttcatt

SEQ ID NO: 7451 - DNA, 6000 bp, Homo sapiens
caatgtgacatgttgacccactgcagatcattccctgaccacagagcgctgctcccgagaaccctgcacccctcaatggagtaaattaccataaagcctcttccttacccatgctttggggtgttaacagctgaggctattcgtcggtgacctgtgggactcgagctattcctgcagctcagcagacctcctggccgtggtgggtagctcctttcctttagtcagattccgaggcctctgcaacctggagccttggagtgggggttccattagaattactgggtagcagaaagccgggacctctgttgtatgaaggaggttggggctgggagtggatgggagaccgccctttggtcacaggtgtgaaggggaggccatcaagggagactctgacacccggaggcagagcctggatgtgggacccaggactctcctactctgctcacgtctgacctggatttttggttcttttttgccaatccagtttcaggagggaggtccaccctcctgaggggggttttggaaatgacagctatgagaaagggactatcatgtctctgagtggggatcggggagctgggaggggcttccctctgctgcctagaattccactctgaaccattagtcattctttccagcgaagcaggtgcttctccgggcaacataaatcctcctcaaggtgactgaagtgaccggatggacaccaccaccctcctgagacaggctgacctgaggccattgggacctgggcacaggagggagaggggggagggggtggatacgttccagctttgaccagttcagccctaattgggagactcaggtggatgtcagctgctgctgggttcccccagtgttagttgcttaatctttcagtgctcagtttccgtccttcatcttggctcccacagaaggtgaaaaaagcatatttcttgctcactttcccagtttccttgggtttcaagacccagaagcactcacttttatccttgtcccatttttatggggctttctgtctggtagggctggccttgctcaggctggctctgctcctcactgcctggggtctggaggctttgctcttttatctggaaagtaggctaacaacaaggctttacttttagggtggctgagagtatggccagagataggtctgcgctcactgacaggtcctgtgttttcttagatcccctagagtgagggcctccttagtggagctcagctaaggtgactaacatcgagttgaattccttatgagaggcagcatttcccccagggcccagtggggaagtagtagagagatcatttacactcaggaagatgcacctctcttagctgtagagttgaaggggcgccagtgatatgggaagtgtttttcctggccctggaaaatgccctctgtcccttcctggccccaggctcagtgtccctaggcctttcctgctttcccctttcccctagctgagcggggctctgctctgtgactcacactctgccctttctcctctttggcttggctaacagcatgctggtccataggtaagggtccatggggagggctctgggggaagtccaaaggcaggaggccactgaggtcctttgctgtgccctggggagcaaccggcaaagccagggttggaggagggagtggattaggtggttgtgtaagaggcggaataacagatgggccacgggaggattggtaatgggaatgaggcaagggaggggtagggtgaggccaggttttggctgggggctgaatggggaatggggagtgggagggatgggtgaaaactggccgctggcccactcatagggtctgctgtgcacatgcagggagataactcactcttggtgcacttcgtaagtgccaggcatgaccaaagccacgactcttccctgagccagctttccaccctccccccaccaggctgtcaagggacagggccttggaattggatgcgtgttttttgtttttgttttttttttgagacggagtctcgttctgtcacccaggctggagtgcagtgggacaatcttggctcactgcaacctccgcctcccaggttcaagccattcttctgcctcagcctcccgagtagctgggcctataggcgtgcgccaccatgcctggctaatttttgtatttttagtggagatggggtttcaccacattggccaggctggtctcaaactcctgaccctgtgatctgcctgcctagcctcccaaagtgctgggattacaggccaccatgcctagactggaggtgcttaatagatgttatcatcaagctgaagataaggccaggcctcaggttaagccccaggttctagaagctttggggctgcatcacaggccttccctcccctcccttcccctcccttcagggcaggacagcctgctctgagcctggcccagttgtccttcatgagcggccagtgtctgctctggggagtgtgggcctaggctcacagccccaggcgttgggaggcacctgctggagcgccaggccttgttggctgcaggcgctgggcaggcactgcgcagttcccagaggctgtggccacagctaggcaagtggtgcttccctgggttccttcttcccgccatttgcggagtggcttttcttagtcatttgtttactgatgcccacacctgctgccgtggccactctttcactcagctattctgtctacagattccagtagcagtgcacctttggtcctatgtcagctcattcatcccttaggaggggcctgcattggagcattttgtttgtttgtttgttttcagatgaagtgttgctctgtcacccagtggagtgcagtggcgcatcttggctcactgcaactcccacctcccgggttcaagtaattctcctgcctcagcctcctgagtagctgggattataggcatgcaccaccacgcccagctaatttttgtgtttttagtagagacggggtttcactatgttggccaggctggtctcaaactcctgacctcaggtgatccgcccacctcggcctcccaaagtgctgggattataggcatgagccaccacgcccggcctagagcatttaacatctgcttagccctgcccttggccctacagtgagatgattgtttgcacctcagggatgcaggctgatcaggtggggaggccacacgtgggaaggatggcaggccatagcagaagatggctttatactgatagacgtctgagggacatcccatggtcacaccctgcaagtgacctggtagcaggcagagttatgtcaggagactgtcgtttggggaagcaaggattggagtggaggctgcgcttgccccccagggctggctgaccctgggcagaagcaccatctcctccccaccgcttccccaaaatgtgggagatcaaagcgctctttgaaggaatttactgtatttccaaatgcaatagaacaaaacacaccattatgggaaagatcacagctctgatggactttacacttattttttttattttttgtttttaattttttaaaaaaatttttattattatactttaagttctggggtacatgtgcagaacatggaggtttgtacataggtatacatttgccatggtggtttgctgcatccatcaacccatcatctaccttaggtattcctcctaatgctatccttcccctagccccccgccccctgacaggcctcggtgtgatgttcccctccttgtgtccaaaaatgtggaacgcttcatgaatttgtatgtgtcacccttgtgcaggggccatactaatcttctctgtattgttccaattttagtatatgtgctgctgaagcgagcacaactttacacttattttataatttagtatttttaaaaaattttgagttgcatgtggagagacaccataatatttttcagtgcattttagaaaaagttttttattttaatttatttttaaattaattaattgtttattttttgagacagggttgcccaggctggagtgcaagtggcacgatcacagctcactacagcctcgaacacctgggctcaagcgatcctcttgccttggcctcccaagtaactggaactacgcccagctagtttttacatttttgtagagacagggtctcactatgttgcctagactggtctcaaactcctggcctcaagtgattctcccaccttggcctcccaaagtgagcccaggagttcaaggttgcagtgagctatgaacgcgccactgcattccagcctgggtggcagagggagactctgtctcaaaaaaaaaaaaaattgtaaaatctgaatatttgatactatattttatgttgttttctagaaatttctgtctaggtgctgaatcatgcagcctgctcttctactcagccgtgtgtttcagaacgtttcacagtgctgtgtgtagacctcgtgcttttttttttttttttttgagacggagtctcactctgttgcccaggctggagtgcagtggcgcgatctctgctcactgcaagctccgcctcccaggttcatgccattctcctgcctcagtctcctgagtagctgggactacaggcgcccgccaccatgcccggctaattttttgtatttttagtagagatggggtttcaccgtgttagccaggatggtcttgatctcctgacctcgtgatccgcccgcctcggcctcccaaagtgctgggattacaggcatgagccaccgcgcccggccgacctagtgcttttaactgctgtagtttagctgctgtaggaatgggccgtgggttttttttttttttcttcatttctttggttgctggacacctaagttgtttgtcattgttcctgacgttttcatgcaagatgatggcggggcgggggcagtgtccacgtgccccccgtatgcgggtggcgtggccgggatgtgggcacacactttttcagtttaccccgccccactcacaccctcgtgtgcactcaagattgtcccctgtcgagtgtgggcgaggagaggcacaccactattgttttaatttgcttttacctgattcctggtaggttgagcatctcttcacatttatctcagctgcttgggtttcctctggggcctctgagaaccctcatccaggagggtctcggtcacaccagggttggtgtcacctcccttcagggtgccaggcacccctcttcagaggtgctgatttcctcatctggcatccaggcacatttctgcggccgccctcccaggacatgacacagctcattaggtttcagctttttatcttcccttttatgagactacactgtagtaacctttgccggacttggatgttcccaggcctcccagtgtgttcccagagggtaactttttctccgactcctgggggctcacaggccctgctgtgtctgggtggtgctgatgctagctctgtccctgcaggcagacttctgcgttatgacccggctgctgggctacgtggaccccctggatcccagctttgtggctgccgtcatcaccatcaccttcaatccgctctactggaatgtggtaagtgatgtgcctgacactgtccagacgggagtatctcactgcttggtgagccccacatgcaggggatcgcggtggttgctgctggctggccagacagacagacagctctgctcttccctcccgtgtctgtcgctggctggtgtggagtactaggcgcttcctgccgtcttgccttggggatccagcagccattgggctgcccaggctggcgtcaggatggtccaggactgtaggggtggccctcctaccctcacaagaacctgcaggagaacgctgccatggtggggctgccattggtcacatgtgcctggcagtctggtggccttctcatgcatgaagtgggttgcccaggaagtaggggctctcttccctctctgccatgtcacacagtaaagccacttgcttgtgaatctcccacccctcgtgtgttccacaaacatggttatttttc

SEQ ID NO: 7452 - DNA, 6000 bp, Homo sapiens
tatctcccttctaccattcgacgccagggagataatgactgtcctgttttctggaggagtaaacggagggttggagcggttaaggctcgctcagggtgccagcgaaccagtgatttcgaacacagagttctggtgtgttgggccaggacttctctgctttgaccctttaacgaagggggcgggagctgagggccagtgaccgccagtaaccccggcagacgctggcaccgagcgggttaaaggcggacgtccgctagtaaccccaaccccattcagcgccgcggggtgaaactcgagcccccgccgccgtggggaggtggggcgggggccggggccgggccctagcgaggcggcagcgcggccgctgattggccgcgcgcgctcaccccatgcccggcccgcagccccgaagggcggggcggggcgggacctgcaggcggggcggggctggggcggggctgggggcggggcggggcggggcgggcgcgccgcagcgctcaacggcttcaaaaatccgccgcgccttgacaggtgaagtcggcgcggggaggggtagggccaacggcctggacgccccaagggcgggcgcagatcgcggagccatggattgcactttcgaaggtatttttggaggcctccccaccagccctttatacaatgcctccgtctcctgcaggttctcctggggtgggcgggcatgcgggctacgcaacttgagcaggaaagagccccttcccgagggagaaggtgtgacagttaccagctcgctggggaagtggagggctacctccaaccaaattagtgtcccctgcaactcaagggggaagggtttgcttagagacccaaaagcagcatcccgacctaagagggtttggagggagagggtggtcttctctacattctctgcacccgctttgggacaggaccaggaggaagcagggaggagggcccgttgtccctctgccacagcgtctgccctattcagcacccctgcctattgtgggcatcttagacttttcaggaagacagtgggagccctagattgtcaaaattgtcagtttttctttcaggcctcagtttcccccatctatcgaagaggctcacacggactggggtaaagggatgggaaaccctgcagttgaaagtccattatgacttgatgacttgtgacctggggggtccacaaaccaggagagtttctacttgagaagccaggaagactggggctgccaccccatcctgttctgccaactgctctaggaaattcccctcctgcagtagcttccctgcctgggtacctgtcagtaggcaatgttgggtctccactcggtgccagctgcctgccaagcaaagcctcgggcagccgtaccaaaaggggtttagtcttttctgttgtacagatgaggaaactggggccagtgagaggaggctgttggtccaggctccacttcaagctggtggtgggcagggctgggagctcaggctggggatcctgagagcactggaggcccccatgggtcctgtagagcattctgacccagtgggtgccaccacgagtgggttagagggccctgggctgagccagataggctgctagtcaccagctgggggagagggcccttggccaggtggggctgaggtgggagtgtgtcccagtctgtatgaggaggaaggagtcaggacagacagcacttgcttttacagagatgaaatcaaagccctgagtggccaggcctgggtcttgaggctacttggctgcaggcaaagcctggacttgagcccagaactctacacagagacacactggttggccatgtggccagcagctggcttggccctaagccttggtctgttccactgagtaatgggttggtgatggcagcctggctcttggcttcttagtggggcaagaaaaggcagagagacaatagatttgggattttgtagacctgggtttgaaccccactgcatgctcttgggctgcttgtggtcctccctgagcctcagtgtcttttcttgtctccaagatgaggtgagctaatcttttgaggtagtctagggtagtggccagtggttggggcattggagtcaaaatagggtctggactcagttgagtctctgactctataagaacttaggccagtaagtcacctctctacagctcagtttcttcacgtgtagaatggggccaatgatcacatcaccctctcagctgtgggtgaggattaggggtctagcctggccccatcaatgtgggtagccccacagcgggcctggcttttggaccagacccacccttctgacatgggcccccacccttagagtccttctagtgtggatgaggaccctgctctgatctggggtcctcttgggggacttccctgtctgccattctctttggggatcctgcgctgccctaggaagagtgggcccaggctgcacagttggtccttggtcacagaggatcccaccacttcttcagggcctcaaggcaatcctgcctctctctgcacccctcttccccctgtaaactgaggggaggggaaaatcacccactcctcagcagtttctaagttgctttgtcaaattcagtgcccagaggatcctgctgggggtgcgttttaggatgagaccaggagtggccaatggtggggtgtggggcccatcgctcctatatgaagaccccctctgccctagactgctcctccctccccatccccatctccatcccaaagactggagctgctggatctgtggatggaggcgtgccccccgtttcacacattgagaaacaggccccaagtggagccagggaaggctgcacctgggcctctggattccttttgttctgtgtggggttgggggtgatggactgtggagagggcaggagagctgtctggaagggttggtcacctcatgggcaaatgcttggaagctggtctgagtccacggtgcagtgtgtatgtgtgtgtgtgtgtgtgtgtgtatgtgtgtggactcagaggtggatgtcttgtagaatgcatgccccatgaagacaggagtaaaagtttaccaccatccacatcaagctacaggacactcccagctccccagaaagttgcttagttctaggcagggatttcccttattcacagccgggagcagtgcctggcatagtgtgggcactcagcactcagcacatgctcactggatgagtgaatgaatgtgagcctgctgtttgctgtggactaaggatgtttctagatgtttgggcaaataccggatggtgggaagagctcaggctctgaagtctgcagtcttgggcccgaccctgggctcagccccagcctagctgtggggcaagattgtgagccttgtggtgcccaccttgtccaggtattgtgatgcactcgcagcagcaggcattgctttagacagcacaggtgctcgcaaaatggctgtatgtccgggaacaccagctcctgtgggtggctttctgtcctggtggcattgcccacacatacagctgtgtgccaacaagggttgtgcaaataaggttgtgtttggatgtgtgtgatgccctgtttgggggtcagtctctgcctcactcacgcaccctcttctccttttcacagacatgcttcagcttatcaacaaccaagacagtgacttccctggcctatttgacccaccctatgctgggagtggggcagggggcacagaccctgccagccccgataccagctccccaggcagcttgtctccacctcctgccacattgagctcctctcttgaagccttcctgagcgggccgcaggcagcgccctcacccctgtcccctccccagcctgcacccactccattgaagatgtacccgtccatgcccgctttctcccctgggcctggtatcaaggaagagtcagtgccactgagcatcctgcagacccccaccccacagcccctgccaggggccctcctgccacagagcttcccagccccagccccaccgcagttcagctccacccctgtgttaggctaccccagccctccgggaggcttctctacaggtaagggggatgtgtggcgggaggggacacccggggtggggcttccaggagcacaggaagaagcttctgctgtgatgtgagtagaggtctgtgcaggctttagaaactggggctccactcggctgcttgagatgccctgttactagcagtcctggtgtgcttgttgccggggtaggcgcaacctcgcactggaggcctggcttgaagccagtgcatttgcatcagagcccaggcagggactgtccataggaagccacatggggcaatgactcatccaaggccagtcggtgatagagacctgaagagcaggttgaaagtgggagagggaggtctgtgtctgcagccccatgctttatttctgcaggaagccctcccgggaacacccagcagccgctgcctggcctgccactggcttccccgccaggggtcccgcccgtctccttgcacacccaggtccagagtgtggtcccccagcagctactgacagtcacagctgcccccacggcagcccctgtaacgaccactgtgacctcgcagatccagcaggtcccggtgagggggtctggccaggggttggggagggggcagccccagcccagacacacagcttacagccaagcctctcccaccctcaggtcctgctgcagccccacttcatcaaggcagactcgctgcttctgacagccatgaagacagacggagccactgtgaaggcggcaggtctcagtcccctggtctctggcaccactgtgcagacagggcctttgccggtgggtgacgtgggcagggcataagggagtggggtctacacacacacacacatgcccacctggtaacatgtgcctggccctgcagaccctggtgagtggcggaaccatcttggcaacagtcccactggtcgtagatgcggagaagctgcctatcaaccggctcgcagctggcagcaaggccccggcctctgcccagagccgtggagagaagcgcacagcccacaacgccattgagaagcgctaccgctcctccatcaatgacaaaatcattgagctcaaggatctggtggtgggcactgaggcaaaggtgtggagaggcctgcaggggcacagaccggggtgtccctaggaaggaacagatcaggggcaactggaaggaagagagggagtgagactgagcctggacaagcagggaattggaattcagcctccccaggcctggccagcctcgtttatttagttaaactggtttgcaggcctcttcaataaaggtggggctgtgctaggcattggggatgcagcaatgaacaagacagacaaaaattgtccctcaaagaagagccgaccttctggtgggggagatggacagtaggcaggatgaataagtgctcgagaccaccacgtttggctcgttgcagagaaagcaggaagaggatggtgagggtcccctggtggtagccagggaaggcctccctgagatggcggcaggcacagcagcagctagccagaccctgctgtctgcatcttacattctaaccctatgcccggcctgggaggtgggtgctactaggcgaggaacggttcaggtagaaggaacaagtgcaaaggtcctgaggcagtaatgttgcaaagcagctccgcacccccttgctagggctctccaaccccacaacccccgacctgacaggccacctgtgcgctccccctccctcccacaccgtgcagctgaataaatctgctgtcttgcgcaaggccatcgactacattcgctttctgcaacacagcaaccagaaactcaagcaggagaacctaagtctgcgcactgctgtccacaaaagcagtgagtcctggctttattgagctccagtctggcctcttctctagccttgctccacctcccggccccaccccatccctagccccaccccacccttggttctggcccaccctctgccctgccc

SEQ ID NO: 7453 - DNA, 6000 bp, Homo sapiens
atctgaaatatattgttgtgtcatatccatcgctccatcctcttccatagtatatcatttcattatttctttcctcaaacttggccatggcctctttttttaaaacaagagacagggtctcactctgttccccaggcttgagtgcaatagtgccgtcatagcttactgcagcctcaaattcctgggctcacgcgatcctcccacttgagcctcccaagtaggtaggactacaggtgtgcactgccacgcccagccaatttttaaatttttttgtagagatggggtctcatcacgttgctgaggctggtctcaaactcctggcctcaagtgatcctccttaattggcctcccaaagttctgggattacaggcatgagccaccgtgcccagccaccatggcctctcttgatcccaaaccgtcatgggctgttccctcttcctgcagtgctcgttctatctttaacctgcagtacttgcctcactgactcctcttcatccttggcctcaactcctttcttcagggagggtcttgctcacccctcactgtaaactcccacagctccttgctttttttttttttttttttttttttgagaccatctccctctgttacccagctagagtgcagtggtgtgatcacagctcactgcagcctcgacctcctgcctttcccctgctgaatgactgtcttccccattagagagagctcgcgagggcgggtgctctgatgccttactctctgttgaatttcaaaactgtttgtagaattgagttgaaaggaatgcctttcccccctttctggatgtcactgggatgtcctgtgtaacctcttcttccttccatctttccatccttgcccttcctagttcttggcacagctgaagatcatggactacagcctgctggtgggcatccacgacgtggaccgggcagagcaggaggagatggaggtggaggagcgggcagaggacgaggagtgtgagaatgatggggtgggtggcaacctactctgctcctatggcacacctccggacagccctggcaacctcctcagctttcctcggttctttggtcctggggaattcgacccctctgttgacgtctatgccatgaaaagccatgaaagtaagtcagagcctgcgcctgctctgcacagccctgccctcatcctaccccctcagctcattgtttagatccttctaggggcatctggacctccacctcattcattgctgcctttgacctctttctgcctccagattcccatccagggtcaccacctgaacctggggctcctcctctgccaggctttcctatacttccctgcttgtcctggctgactgaagagtggttctgctctggttcatgagatgaaccaaactttattcatactgtcctgtcagccccacagagtgactgtgaagatccaataagataagagctatgacagctggaaaggactccactggtccttttctcagccccaacatgataaggatggagctgagccttgtgtctgggggttgtagcagtgcccagctgctgtctgcccttctcctgccccctcttccttcttccctgctctccttgtccctccaggttcccccaagaaggaggtgtatttcatggccatcattgatatcctcacgccatacgatacaaagaagaaagctgcacatgctgccaaaacggtgaaacacggggtgagtcctctccatcttcatccagggcccagctgggtcggtgcatctgtgcttaccctcagaccccagggagggcagtctcaggcctcctgctccaaggaacacactcctgtctccttcttcccaggagagcagactggaagagcagcctgcctgccttgccatgttccctgccttcacccacctgctccctgccaggctgggcccaatttgtttatcccccagttctccagccctcggggccaagcctgccagtgtctttccccagggcctgctgggcctgttgtgcatcttgttgaagggcgagtaatagctttgtttccatgcccatactgctccccacaggcctgtttccctgtgggcctgaagccctgttctccatgtagtggcccccacagagatccagagccgcgttgccacctccccactgcctttcttctacttcggtgcaggcctggggttataaatcacaggagtggggccaggacagttcaggacttgtatgccacttcctgaggtggtctgctcagtcttggtggggttgggggtggtattcagctctgatactgagtaagaggcttctgaataccctggctccccccatgtgcagcctcctgattggggcacaggaactcaacctgaatcagcctcttgtgtattacaggcaggggccgagatctcgactgtgaaccctgagcagtactccaaacgcttcaacgagtttatgtccaacatcctgacgtagttctcttctaccttcagccagagccagagagctggatatggggtcggggatcgggagttagggagaagggtgtatttgggctagatgggagggtgggagcagagtcgggtttgggagggctttagcaatgagactgcagcctgtgacaccgaaagagactttagctgaagaggagggggatgtgctgtgtgtgcacctgctcacaggatgtaaccccaccttctgcttacccttgattttttctccccatttgacacccaggttaaaaaggggttccctttttggtaccttgtaaccttttaagataccttggggctagagatgacttcgtgggtttatttgggttttgtttctgaaatttcattgctccaggtttgctatttataatcatatttcatcagcctacccaccctccccatctttgctgagctctcagttcccttcaattaaagagatacccggtagacccagcacaagggtccttccagaaccaagtgctatggatgccagattggagaggtcagacacctcgccctgctgcatttgctcttgtctggattaactttgtaatttatggagtattgtgcacaacttcctccacctttcccttggattcaagtgaaaactgttgcattattcctccatcctgtctggaatacaccaggtcaacaccagagatctcagatcagaatcagagatctcagaggggaataagttcatcctcatgggatggtgaggggcaggaaagcggctgggctcttggacacctggttctcagagaaccctgtgatgatcacccaagccccaggctgtcttagcccctggagttcagaagtcctctctgtaaagcctgcctcccactaggtcaagaggaactagagtacctttggatttatcaggaccctcatgtttaaatggttatttccctttgggaaaacttcagaaactgatgtatcaaatgaggccctgtgccctcgatctatttccttcttccttctgacctcctcccaggcactcttacttctagccgaactcttagctctgggcagatctccaagcgcctggagtgctttttagcagagacacctcgttaagctccgggatgaccttgtaggagatctgtctccctgtgcctggagagttacagccagcaaggtgcccccatcttagagtgtggtgtccaaacgtgaggtggcttcctagttacatgaggatgtgatccaggaaatccagtttggaggcttgatgtgggttttgacctggcctcagccttggggctgtttttccttgttgccccgctctagacttttagcagatctgcagcccacaggcttttttggaaggagtggcttcctgcaggtgttccacctgccttcggagcctgccacccaggccctcagaactgagccacaggctgctctggccaggagagaaacagctctgttgttctgcattgggggaggtacattcctgcatcttctcaccccctcaaccaggaactggggatttgggatgagatatggtcagacttgtagataaccccaaagatgtgaagatcgcttgtgaaaccattttgaatgaatagattggtttcctgtggctccctccaaacctggccaagcccagcttccgaagcaggaaccagcactgtctctgtgcctgactcacagcatataggtcaggaaagaatggagacggcattcttggacttcactggggctgctggattggatgggaaaccttctggaagaggcagatgggggtcaaaccactgccttggccccaggaaggggccataggtaggtctgaacaactgccgcaagaccactacatgacttagggaacttgaaaccaactggctcatggagaaaacaaatttgacttgggaaagggattatgtaggaataatgtttggacttgatttccccacgtcataatgaagaatggaagtttggatctgctcctcgtcaggcgcagcatctctgaagcttggaaagctgtcttccagcagcctccgtggcctcgggttcctaccggcttctctgcatttggtctgctgatcatgttgccataatgtgtatggaaagtgtaacacattcttactggttaaagacgactaccaggtatctaacttgtttaacattgagtttgtgtgtgtgtgtgtatgtttgtgtgttttgtatattgtttacattttgagaggtagcattctgtttcaaatgctttttgtttttctgacagtattgttgactgggtcataacattttgagctgtggtttggtggattttcaatttttttttttaaaggtcattcgctgtgctatcttcaaaaccttgagtttggcccccaatttttggcattcaaatgtttaaaagctatttatcttggtttatacaagtttcctttctcttctttttgtcatggtattctatttggtctgcagtttgaatgtagagaaagtggactgatcccccaagcgttgtctgcccccactctttcctccttgggtcccgccattcttttactgggcagtcgagggcattggaggggaagtgactgccctcagcctcactccctggggccatgaagaaaagctaaacagtctcatggcatctcagaataatgttgggtctcccaagaagaaaggtgtaagaataacgacatggctgattaggcgaggccaggatagggctaaggccaggattcctggctggcatccagtcaccccttctcccatccttccccctcttcttccacaagtccgcagccgagacactgtagtctcccagccacagtgatgagtgccctggagactccactgacctctagatgaaggcccctggccctggttcctgttaattaacctctgggtctttgagtcccccagcacaaacttctttcctgtaccctgcggcttggggtcacagggcatgccgggaagccacagctgaggggcgcagactgaagcagtgctccacctctccttctttagctcaggggttgctggtctgtggcaggcgccacgagtggcccctgtggctgttctcagtggcagtctcttaagttcccaccacaggcagctctttatcccctctccctacttgactctttctcttgcctgtgcttttggcctcaaacaggcctgctggtagcgctcagggcgtgaggctacactcctgccctgcctttcctgtcttcatggtctgccagggcataccttggggaggtggaccaaagacccaggactttttgcagtagccagtcctaccccccagttgtctttttaccaattcagggtgggagagaaaactgcagcaccccagcatgtgagttactcaggtgttgggggctagaagggacagtgcgtttaaacaacactcagagctctggccttaaacctgtggccccccaagtctaggagcctcatctcttcctggcagtcatgcgggcaggaggtcctgaaagggaaaacccattcagacaactgttccccaatctaccagccatctgcaggggtcagtgaccgtggccctctccctcctctagaatgtg

SEQ ID NO: 7454 - DNA, 6000 bp, Homo sapiens
ctgtctcaactaaaaatacaaaaattacctggatgtggtggcgtgcacctgtaatcccagcccactcgggaggctgaggcaggaaaatctcttgaactagggaggcggaggttgcagtgagccgaaactgcaccactgtgctccagcctgggtgacagagtgagactctgtctcaaaaaaaaaaaaaaaaaaaaagtatagaaaataatataaggaacttcatgtcctcatcacacagcttccataattatcacctcatggctcatcttattatttccctatggttcccagtccagattatttcgaagcaaatgcaatcactgtatcatttcatccacagatattttagtatgtatgtatgtctgaaaggaggactttttttttttttttttttttgagacgaagtctctctctgtcacccggggtggagtacagtggtatgatctcggctcactgcaacctctgcctcccagtttcaagtaattctcctgcctcagcctcccgagtagctgggattacaggcacgtgccaccatgcctggctaatttttttctatttttagtagagacgggatttcaccatgctggccaggctggtctcaaactcctgaccttgtgatctgcctgcctcacctcccaaagtgctgggattacaggtgtgatccaacgcacccagccaaggaagactttttttttttttgagatgaagtttcactcttgtctcccaggctggagtgcaatggcacgatctcggctcactgcatcctccacctcctgggttcaagcgattctcctgcctcagcctctcaagtagctgggattataggcgcctgtcaccacgcctggctaatttttgtatttttagtagaggcggggtttcaccatgttggccaggctggtctcgaactcctgacctcaggtgatctgtctgcctgagcctcccaaagtgctgggattacaggcatgagctaccacgcccagccatggaggactttttaaattaaaaaaacaaccttaccacaattccatatcacgcctaaacatttagaattccttaatatcgttgaataccttgtcagtattcaaatttgcctgataacttaataaaatctttttttttttttttttttttttgagacagagccttgctcagtcacccaggctggagtgccaatggtgcaatcttggctcactacaacctctgcctcctgggttcaagcaattctcttgcttcagcctcctgagtagctgggattacaggcgcccatcaccacacccagctagtttttgtagttttagtagagacggagtttcaccacgttggccaggctggtgtcaaactcctgacctcaggtgatccgcctaccttggcctcccaaagtactggggttacaggcatgcgtgaccatgcccggcctttttttttttttttttttttttttttttaaagtcagtttgcttgaatcaggatccaaataagacttttagttgatatatcatttaatttattttaatctgtaagtctctccccctcttttttttcctttttttttttttttttttttgagacaggatctcactctgctgcccagactggaatgcactggcacgatcacagctcactgcagccttgacctcccgggctcaattgatcctcccacctcagcctcctgagtagctgggactatagacacaccaccatgcccaactaatttttgtattttttgtagaccacggggttttaccatgttgtccaggttggtctcgaactcctggacacaagccttggcctctcaaagtgctgggattacaggcgtgagtcaccatacctggccccagttttatttgttaagggaattgggtgtttgtcctaattttcttcattctagactttgctgactatatccctggggaatgtatgttatgctattttgtgtcctcatcttttcatataacttagcaaacattccccatactgccacagggttttcacaatctgtcctaaatggcttcatactattccatccagtggatatactgtaatttttttcttgggcatttggttgctttcagtttttcactactataaatattgctggaatgaacatcctgacacattgcagcttttcctgtacatgggatgacttccttagaatatgctaccaaaagtgtaattatggctctgaggcaagaagaatttttcagcttcttggcacacagtgacaagtgtttgtccaagggtttgtatgtcccccagcacgaaataagagagctgtcactcactctgaatagtgcttagggctattcacagctgaagaacgtttggggaagatatgataattatgagggccaagagagaaggagaaagatgacaacagggactcccgctaaataaagcagaaagtgatctgcaatttaccacaaacctagagtgagtcagaactctgttcattcctattgtgaaaaaaaaatcctcgataacaggagttattaatagtgcatgacatgttcagtaatctttctgttagactctgcattagtcagaaccttatttgagacgtggactcagtctgggtcactgaacttcatagagatgtcaggaaactgaccaagatccagagggatcgatcaacttgatggaggatgaagaatcccagagaaaaatcaaaggagtcaagcaggcacacttcggaaaaaacagagacacctttcttgccttaatgctggggaggtttctgtgaaaagaacaacactgggtttgcttatgtctgcagaaagatgactataaggaaaggcacctccacaaaccaggagaaacttccacaggacataggcagagctatttcagactcagatgattatttcgatcttggaatgagcccttttggggccattggccctggaaatattgaagaagctgcctgttctgctctgggtggttcaaatacccacctgcctggtgaccactaagtgcctctgggggtcccactccagctgtgtgacaactgtttcctggcagccccctggggaaggaaaggtaggtgtagtccgagtaaagtgctccgcagtttccctgggctagccttttccttcctgttccctcactttcagttcagggtgccatgaactgccattcagagtcaggttggcatgccatgacatcatctgaccttgctattccagccctgccctgcatagagtggacttagaaagaagctgggtaaggagttgaaactacccagacaagacctcttggtgacatggagaatgggagtaaccgaggagacctcaagagccatttagttcaacctcctacagtaatattaagtagattcctacaatgcaacaggtgctttacatacattcttttgggttcccacaaccttggaggtggggtttcacaggtgtggaattggagattaagacaagtaatttgcccagggtcacactgccaataaaggagggcctaccccatgtctaccaggcagtaaagtctgtgcccttgcctttagacgatgcagatgtgaaaactgcagaccagagcctctcattcaaagccacacaagctgacctgagacagaaactcaggctccttactactgatggaggaatctatgatacgtagcctcttctcacgtcaggtgcggggcggccaaggatgtggcccggtccggggcagcctgggccaagcgtgactgagaaggagaaggcaggctccgttccgggccctccagaccctcatcccagccaatgttgtgaaaagcgctctcccaggagggcccagcagggcaaagggccgggctagtctgtttctggaggagccaatctggggccagggcggaggcagccaggtgcagtggaaaaatcctgcagttggggtcagaatatttgggtttcgatccagtctaggacccagcaaagacctacagaaagttacttacaagtccgagtctcctcatctgcaaaactggggcacggataaaatacacttgaagggcacagaagcaaaagttggaattgttacgcaccaaaattctatcatccgatctgaccatcacgtcacggtacaacttccaaccgtgcgtccccgaagaggccgggaacggagcccaggaaaaactacaactcccaggaggcgtcgggagggccggcccggagccagcggaagaaactacaactcccagaaggcgtcgggcgtgccggcgcggggcggtgacgtacggggaccggcgcggagcgctgattcggccggagctgccagcggggaggctgcagccgcgggttgttacagctgctggagcagcagcggcccccgctcccgggaaccgttcccgggccgttgatcttcggccccacacggtgagcccggaaggaaccaagaggccccagggctacgggaggggcgggagagaaggtgggggctgctggggaggcgccccgggctggagagacgggggcagagggagtggggggtggagggagtgcatcagccgagggggtgcatcggctggggaggtggccaaggaataaagtgcgagcgggaggccgggggtggaacgtcgggaggagcgcctcggctaggggtgggaggcggggagcggctcggcttcggggataaacgtttggctgcctccagggctgggtgaacgcgtggagatggctgtggggtcccggaccggaccgggttccgagtgcgaagacccaggctggggaacagagcgggacccctccccccggccccgcacccgaggtctcactcagaaaaccccaacaacagtgaggactccgcctcttcgctcctcctctcctgtgcttagtgcgggttcgcctgggcactcgctttccgctcctaccgccctcccccagtcggggtggctgggccaaagttgagaggttatcagctgtggtcctgcagcttggggggtgggcggaatggacatggcattgtgacgtgctgccccggactccccgttggggtccccatccaggcctggatgttttgtgctcctcttccagaagacaggaggtttgctgttgtgagggctgctctttcctgggggagggaatgggaagggctcacctggtggctgccctggtggtgctcagccttggcttgagtgtctggcatactggctgggcccggatatttgtatgtggagccaagagggtggggcgggaaggagggggaaagagctaccagcaaaaaagtggttaacacaacagagttgctgcaggctctggtttgaggcaggttatgaaaccacatcagggcccagcactaagcagccacctgccagctatggcagcagaagttttcggctcaactcctgtagacctagtcgacctctgccagcctcttctctctgtttctccccatctagggtaggggccagttggttgttttactaatggaagtgatatgtatccatagtcacacgaaagtctcaagagtgtttcctcattgccagtctttttgttagtttattgatctcttctttttcaggggtctctggtggtttcctgctctcagggcacctagtgtttaggcttcaggaagaagcttctgagggtgttggctaggacctaggtctaggcttttcctaggctcatcaagttttgttggctgccctgtgaaagccagaaaggcgtatggggtcctgtgatctgggattccccaaggcttttggcactcctggacaaatactaggaagggttagtggactttctataccagcacccctgtaggtgcgggttacagagaggtgatggggtggcagtttcaggtcagacttgggaagctctttccctctccttagtcagagttaagtccttcagagccctcacttgtcagccacatgccgccctcccctctcaggtggaggcttttgcgtagcagctgtcccaggggctgctagagtaactgaagccccaaggccctgggaagataaacaatctgagccagctctggctttctagatacttgaatttctgttaggctcaa

SEQ ID NO: 7455 - DNA, 6000 bp, Homo sapiens
aagagagcctcctacccagacccatgtggcatctgtcccttctccctaacaaatgtgaagtgcctggccaagggccagatgtgtaataggtgctcaatgacattataatcttataaaaatcttcctaagccagatctcgagtttagacagcagggttggggggtggagtggaagaggctgggagcctccctgtggctcctctgcatccatcgaggattgaggagctatgtgtgcttggcaaagggcagggggaactgtaatgcttttgttcagagctggtcattaaaggtaactctggaaaccaagcctattgggagtggtggttttgtttaataaaaacgagaaacagaacaagcagagccgtccctccttgccatcccctgaggtccttcctttggcttaggagctctgccagagaagtaggggtgggacaagggtgcctggcctgtgtgcccagggtggagggagatgattttggattgtgtttgtggtggttgtaccagcaagcagatgggtgggaccaagacagcactccaaggctgtgagtcatgggggaaacctggcctggagtggagaggaaaagctaatggtgaaataccctctccagagccagcctattggacatcatcccaggattcagctcaagttgtttcgtctcctgtcccctgaccttccaccaagaaggcagctcctatggtgtaagccgtcactccaggggaagcctacgatgaatggggttagagcccccagatcccttactggtctggagagatttctaaatccaggaataaacctccccttggccaggcacagtggctcatgcgagaaatctcagcactttgggaggccgaggcaaggggatcacttgagcccaggagtttgagaccagcctgggcaacatagtgagactctgcctgtacaaaaactacaaaaattagctgggcatggtggcgtgcgcctgtagttccagctacttgggaggctgaggtgggaggatcactagagcccaggaggttgaggctgtagtgacctgtaatcatgccactgcacttcagcctggttgacagaacaagaccccatctcaaaacaaacaaacaaaaacacaaaaatggccagatgcggtggctcgtgcctgtaatcccagcactttgggaggccgaggtgggaggatcccttgaggtcaggagtttgagaacagcctggccaacatggtgaaaccctgtctctaccaaaaaatacaaaaactagccaggtgtggtggtgcatgcctgtaatcccagctacttgggaggctgaggcaggagaactgcttgaacccaggaggcagaggttgcagtgagccgagatcgcgccactgcactccaacctaggtgacagagtgagaccatgtctcaaaaaaaaaaaaaaaaaaggccgggcacggtggcttaggcttgtaatcccagcactttgggaggctgaggagggcgaatcacatgaggttgggagttcaagaccagcctgatcaacatggagaaaccccgtctctactaaaaatacaaaattagccaggtgtggtggcacatgcctgtaatctcagctatttgggaggcccaggcaggagaattgcttgaacctaggaggcggatgttgcggtgagccgagatcgtgtcattgcactccagcctggggagcaagagcaaaactccatctcaaaaaaaacaaaaaaactaaaaaacaaaaacctcctctcactaggattgcttccttatgttgtagtttgagacctttcatgaggcactaggaagatggcattggctataagaagtctgcagctctctccccagtcccattcacttccaagttcagctggcaaagacctttatctaggaagccacaggccaggaaaaccagccagctcagcctttaggggtggggtggagcaggcagcaggggtaggggagaagcgggggatgctgggggtagggcagagagacaaagtggatttgttttccagcagctggggctgtttcctgactattccctgcctgtcacccttaatccctccctagcctattcacattgtctgagtttagtgaaaggaggggctctctccaccctttggtggggcgtgggtgggtttttaagtctgggaggttatgaaggaaagatcagagctgaattttttttaatatatatatatactggggctgcaggtaaattctgggtggagatggatgaagagggtttagatcctacaatgatgtataagtcttaaatgatatgcactccagtagcaggcagggtaagggtgattgtaggagccccaaagtgaatgactggaaatcagagggaatgcaaagagaagttgagactctcctacactcagaacaaggaaaacacccttcaatgcctcagtgaatgataagaggcagagggataaacaaaatgccctaggattgcccatgatctgcactaagccgtctatggcaggtagagactacaagtcccagcatgccctgtgcccaggtcaccttgcctgctgggaggtgtagttgggtaacagagagctggaggtggcttggtgcccagcagagctgatgcccagatgagagaagaggtggagccagcattccctctttgtccctgctaatgctattgacaagaagggaaggaagttgggagagggtgttcctagttttcagtgtaaaccaggaaactctggggggatgttgatgggagggaagaggaaagaggttgggggctggggaaggaatttctgtagcaggtggtgcagagataccgagcagcctatgtataggggtgtgtgtgtgtggtgtcagtgagaggactcagtttatgttgccttaatttcttaggggacaggatttttcttataattctgggaaatggtcttcagaaaaccctttagaaaagcgactatctctcgttccttcatttgaagtcactaaagggagtctgggccaaagagatcctattgatgatcttggtctgccctttccctttctgtgctcagcctcccctgctctctgatgagggtggaggtgggggagggagtgatccagagattctgaaatgttggccagagtcaagatcttggaaaatcttcccggaatggaaagcagttctggtgctaagtcctccaaggagaagacagaaaagcaaagaactggttctgagctccagggtcatggggaatctgagaccacccatcctactcctagacccctgagctcaggctttgtgctgggggcagggggtagggaaagcaagaattgaaaagtaatctctcttctatcccaaagtagggaagtcacaaccagaagaaatgtccagactggggagaaaacatgtccgtggctcccagccagcttcttcctctttccaatatcaatttctaaatgtgggggagggggagaatgaccactggtggagccaaacagtatgaaggagtcaaagaaggtggaggtgggggagggtggaccacagttctccatctctaaggctggttctgaaatagcttgaggccaggagcagtggcttatgcctgtaatcccagcactttgggaggccaaggcgggtggatcatttgaggtcaggggttcgagaccaatctgaccaacatggtgaaaccccgagtctactaaaaatacaaaaaaattagccaggtgtggtggcgcatgcctgcagtcccagctactcaggaggctgaggcaggagaattgcttgaacctgggaggcagaggttgcagtcagcagagatcgtgtcactgcactgcagcctgggcgacaaagcgagactccatctcaaaaaaaaaaaaaaaaagaaatagcttgagtctaggaaatgcacttcctttactttacctgcttgggtgggtaggtgcagctgtgggctcaaacccctacccgctttcaacttagacactcccaccacttgcttttcggcctggctcgggcagtgtgcgatttgcggcaccagagggcgctccgcccatttccaaagtggagctgtgtctcccgagggccgtagtggtttaatatcatctacgggtggaaagggatcaggacagggttggacgaccacagagattttagcccaagtgcaattattacgcaaccccatctccgacccgaagtttggtcccctgctcccgcggtctgtttagtcaccattcgttcaacacacatgttttttagagaatggcggcgcgaggccgggcgcagtggctcacgcctgtaatcccagaactttgggaggccgaggcgggcggatcacctgaggtcgggagttcgagaccagcctgaccaatatggagaaacaccgtctctattaaagatacaaaatttagccggcgtggtggcgggcgcctgtaatcccagctattcgggaggctgaggcaggagaattgcttgaacccgggtggcggaggttgcggtgagccaagatcgcgcccactgcactccagcctcggcaacagatcgagactccgtttaaaaaaaaaaaaaaaaaaaaaaacaaggagagagagagagaaagaatggcgacgcggggttggggggccggagatgggtgatatgttgcccaggctggtctcgaactcctggactcaagccatcctcctgcctcggtctcccacagcgctaatattacaggcgtgagcctacacacatttattgagcgcccgccagtttcctggggaccacgagcgtcccatgctcccctctctccaggatcgtcaccaccctgactcaggctcgcccacatccgcctcctccgacgcctctcatgtcccttctcctcttcccttaggatgaagtgaagctgccggccaaactgagcatcagcaaatcgctgaaagagtcggaggcgctgccagagaaggagggcgaggagctgggcgagggcgagcggcccgaggaggacgcagcggcgctggagctttcgtcggacgaggcggtggaggttgaggaggttattgaggagtcccgcgcagagcgtatcaagcgcagcggcctgcggcgcgtggacgacttcaagaaggccttctccaaggagaagatggagaagaccaaggtgcgtacccgcgagaacctggagaagacgcgcctcaagaccaaggaaaacctggagaagacgcggcacaccctggagaagcgcatgaacaagctgggcacgcgcctggtgcccgccgagcggcgcgagaaactgaagacgtcgcgggacaagttgcgcaaatccttcacgcccgaccacgtggtgtacgcgcgctccaagaccgcggtctacaaggtgccacccttcaccttccacgtcaagaagatccgcgagggccaggtggaagtgctcaaggccaccgagatggtggaggtgggcgccgacgacgacgagggcggcgcggagcgcggggaggccggcgacctgcggcgcgggagcagccccgacgtgcacgcgctgctggagatcaccgaggagtcggacgccgtgctggtggacaagagcgacagcgactgagccgcccccgctgccacccaccccattcctcgctccttccgaacttcctctttcgcattctctctcggctcgagctggctgagatttttctaaattgaaaacacgcccccctccccacacctccaggaactccactcccagtcttagagctgttaggacccgatggggaggcagcccccgcagtggacaacccccgcttggacacagtccgagtggaatgggaagggaatggtcaatccctgtcctggttgtccaagtcgggatctcagaggaaattgcagtgattccacggttaggcccccctgggggggctgccttcccctcagcctctccccacaccacccacccagctgctgtcattccgctcactgagctcttcttcattctcaccctgatccctgggggactcaaagccaaaactgcccaaagaggaaagattgaatcctaaaggggatccctgcccccatgggaggccccctactaga

SEQ ID NO: 7456 - DNA, 6000 bp, Homo sapiens
ccctaagtgctggggttacagacataagccactgcgcttggccaggagtttcctttttaaatcagacccctcaatgagaggccccacagatgcagcctcttgcagacctgccagcccaattctggagccaggtttgttggattcatcctgtatgcaaacagcttctccttaaggctttcctctgaattcagctctggccccaccctcaaactgacttctaaatgatcccactcttgagcaggcgtctaagaggaatattttcgggaggtagttgtagttcatgttactgctgaaggccacccacctcacctcccctccatacactttccgcctggtaaatacaggatatcctgtccagggcaagaatctgatgtaagagcctggattctgcggggagggcccttccctctctctccctcctcctccttcctggtgtctgggttggggaggggtcatggccctgatttggatggcctgagggttagcatgagccagggtaagtgagacttgttctgggtcaaatctgggactggccatgaccctaaatgaccaatgcactcctcgcagctctcctgggttgttctgtatctgctagtcctgagtccctgggtggagggcttccgttcttgttctccagacctcatctcaggccagaacttggaaggaaagaccccagcatgccctcagttctcgtattcagtggagtgtgggggcttgaggacatgaaaaagggcgtaagtggcagtcccatcccccttccccatggaccctaactcttgttaatatacagaattcccatcattcctggcagggatcaagacagacccagattgtcccagaacagcacccacacctccctcttcatgctcttcagagagcgcagagaagtcttttctcctgacgctccctccttttccctgcccttcccttgaccccacttgctaagctggagagaaaggttctgttatctttgtcccctttccctcctgcacagaggctctcgtgggggtgggggggaagccttttactgctgcgtaggcctctgtagcccttcttgtctgttgcccctcctgcaccatctctgagtgaagatgttttctgggctcccagtgctggctcaaacacacttctcccgaggtgaccacaccctgctgtaagcgctcagagaactttgcctgcactttggtatggccctgaccacacagtgccgtcttcttttggttgtgtgacttccttgctgctattatattattattattattattgttagctaacattattaagtgcttattatgtgccagacattgtgctaaaattttttttttccatttggaaaaactgccctaattgacagataagaaaactggagctggaaaagtggagctcaaaaagattaagtaatttttatgcatccgaagtcacacagtcagtaaacagttgagaccgcttttgtaaccacagcagtttgatcttttccacaatacttcatgctgccctaactgtaagcttcttgcattcagggatcttacacaatagtgacatgtaagatctgtaagaagatgataaggatagtatctgcctcaaagaactgatgtaagggttaattaagcattatatataaagcacttgaaatcgggctcggccctcagtcagcactcagtaaaggtgagttgttattgttgttgatgatgatgttattattattattattaccatgactattgctgcttctcctgctacttcatttggaagaaggtagccttgtacctagggggaaatcagtaaatagcctgtgggtgaatgaatgagtgactgaatgatactcttctgttcttcaaggcaggagaccgggtgatggtgttgaaccggtcagggatgtggcaggaagaggtgactgtgccctcggtccagaccttcctgattcctgaggccatgacctttgaggaagctgctgccttgctcgtcaattacattacagcctacatggtcctctttgacttcggcaacctacagcctggccacagcgtcttggtacacatggctgcaggtgacaggtcccctcactttatcaccccttaccccacccagatttccttccaggccccttccctgcagcctgtctgggttgttgtcatggcaacaccaggctgccttggcctgtggctcccagaggcctctgctgtgtagttgccgtggtaacattcaggcaccaggtctagtctggtgtgctatccttagcaacgtgccctcaccccacacccccacctctctagctaccttccccaccacttctcagtcatggaaattagacacggccctaaaatgagcgtaggcaaaatgaaggtgacaggctgagtccctgggaggctagaatggagtggttggtggccagggcaactccatatcccctgcttatgggtgtcttgctgcagggggtgtgggtatggctgccgtgcagctgtgccgtacagtggagaatgtgacagtgttcggaacggcctcggccagcaagcacgaggcactgaaggagaatggggtcacacatcccatcgactatcacacgactgactacgtggatgagatcaagaagatttcccctaaaggtggggggcataatatgggagggggtagggaggcacaggacagggaggggagctccagatctgtggatcctaatgttgttcttgggttcccctactctatgacaggagtggacattgtcatggaccctctgggtgggtcagatactgccaagggctacaacctcctgaaacccatgggcaaagtcgtcacctatggtgagttagtgggccagggatggagagagcatgtgagggcaggagggagggtctaaggggtgggatatagaggccagggcttttgaatgaagaaggggtagggactcaggtgctctgtagacgatcagggttaggaatggtcctgtatgctgcattcagattgctgactcttgggtaccagctcttttcattctctgtcacaacttttcatatgagtgatagtaaattctacattcttttttttttttttttttttttgagatggagtttcgctcttgtcgcccaggctggagtgcaatggcatgatctcgatcagtgcaacctctgcctcctgggttcaagcgattctcctgcctcaccctcccgagtagctggaattacaggtgtctgccaccacgcccaactaatttttgtatttttagtagaggcggtgtttcaccatgttggccaggctggtcttgaactcctgatctcaggtgatccagccgcctcagcctcccaaagtgctgggattataggcgtgagccaccacgcctggccaaattctacattcttgtttggggattattcttgaacaaccagcctgccttctttctgtcctacctccctgagcatcttaggcagggtgcattttcatttaaaaaagtatttcatacaacaaaataagccaggcatggtggctcatgcctgtaatcccagcactttggaaggccagggcaggcagatggcttgagcctagaacccgcctcccgggttcaagcgattctcctgcctcagacttcctgagtagctgggattacaggcatgtaccaccatgcccagctaattttgtattttcagtagagacggggtttctccatgttggtcacgctggtctcgaactcctgacgtccagtgatccgcccacctcggcctcccaaagtgctgggattataggcgtgagccaccatacccggccaacacctggctaattttcgtattttttagtagagacaaggtttcaccattttgggcaggctggtctcgaactcctgacctcaagtgatccccccaccttggcttcccagagtgctgggattatggatgtgagccatagcacccagcccctagagcaatttaaagtcagccagggttggtttgggcctggtaaccagcagtttgagaattatccaatcactccctggcactggtgtggagaattgcaaggggatcacagggaacagagagcacagatgcagacacacagggatgtgcctgggggggttcacaggctatgtcaccttgtccttcaggaatggccaacctgctgacgggccccaaacggaacctgatggccctggcccggacatggtggaatcagttcagcgtgacagctctgcagctgctgcaggccaaccgggctgtgtgtggcttccacctgggctacctggatggtgaggtggagctggtcagtggtgtggtggcccgcctcctggctctgtacaaccagggccacatcaagccccacattgactcagtctggcccttcgagaaggtgaatgtgaggactttgcagggagggcttgggtaggactcatgaaggctggggtcccaaggggcagattcctggggaagaggagggctgcctgcatcacactggctcttgttggatgagggttggatagcactgggagccgcatctttccttcctccccaggtggctgatgccatgaaacagatgcaggagaagaagaatgtgggcaaggtcctcctggttccagggccagagaaggagaactagggcaagtggctgtgagaccctagagaccagcgaagggagaagttgggaagctacgttctgttggccaccagacttgcatttcagcctctgtcataatgctctgccctccctcccccgaaggtctctgtggtgatgaccgctctcccctgcccctccccgcttcctgacctctgaagaggttgggaagtgaccatttggatgtctgggccctgccaaggcgacagggagggtcagagggaggccggctgcttcctgcccccaccctttccccgggcctgctgtgctgcttttgtgccaaggttagccagtcccccctgttgtgttccatgtgctttcacctctgcctcatctttcctcccgtccctgccccgccacctccccaaagaattgaaacgtcagctcaggatatggggccaatctctgtgagtccagcatgtacctgtctctccctagtgtcccttcagcctgggctgaccagtgcccgcctctgggcttgaccagttcccaatctcgtcctctgtccccaacttcttaagcacaattgggcttcttccatctccaggttttctgccattcttaaccaaggctgcctcttccaacagggcgggaatcagacctactcccctaggtcacaactctgggaaggatacagagcccccacccttcactgagttctctggatttgttctcagtgccttagcaacgaaaacctgtgcttgtgtgtgtgtggcggcggggagggaggatcctgtttcccacctccttctcctcccctgtactccccagtgccttccttgttctggtggagctggggtttctctcctccccagtcccacaacactgccaaaaatctgtgtatgtgccattgggtggggcagccccaagcctcctggggaggcagggcaaaaacaggtgccctcatcgtggtctgtgccatgtcccgtctctatggtggttgaggagaaaggcggggaagcttcctcagccttgcagatatgtgtggcatttactagccagagctctgaaaggcagtgctgtctgtttcttgtactgggaccaaagtaaaaatccaagcacattccccttgcagttaggggaggccctactgccttctcaaagcagagaggcagcttatcaaactcagcccaaaactctgtttacatgggtggggagatggagcagggaagtacagagtgggatggtcaggacctgggccattgcaaccaaaatggggacttcctgggtagggaggtcactccctctactcactgagctaggattagggagggttattgccccaaccattgcaatgggaggtggagggacaggctcagcctcctcattgtctaaatgaggcctaaatgtgtgaagtgcgatttctgcttttgtgtaccccaccaccccattaccacagctgccttt

SEQ ID NO: 7457 - DNA, 6000 bp, Homo sapiens
agctttcgcatctgtagaatggattaatgacattactcttcttcctcttagaatccccaaaccacttcacagaatgctttggggattctaagagttaaggcagtacagttctttgtgcagttcgggctgattacacaaaggtggtgccataccactaggaagttgtccctgtcatctggtcaatcccctctcccgccgtgtcttcccagctgtgctataccttctaggctcagatgtcccgctcacccttatctggcctggccctggccagctggctagctggccaggtgtttggtgcacttccaaaacttggggcagcgatctgggtccaggcccttatcagtgctaggcagcacaaggcctgcagctggggggcggcctggctggcgggtggcaatctgggtcatgggtgcgccctgtaagtctccaactgagctcaaggcacctctgttttcccctcttctctctcactgatgtctcagaaccctggcaggaaggcactcccattgtacagatggggtgactgaggcctacaggctggaagctgcccaaggcccttcagccagtcagtggcagagaggcagcctggacctctggattctgcagctctgagggcccctctgaccattccactcctcagataggcaaccaaggccacagtcccagccccatgggtgggacttttagtacctaaggcttagacaccctggaggccttagcatctgaggcctaagaaagtgcatgggcaagtccagagaaggaagaaagtgaataaagatggaagagaaagaggaactttgggagaagcagagagggaggaggaaaaagagagagaagaggtgggtcatcagggtcctcaggagcaaagccaagccctgcagtagggactacctcgtcctcaggtccaggacccctcccccgcaccccatcacttgccccacctgccaaggcaggggtctctcccattctccagtctggtgagatccagtaatcccctccctacccccaggactgcagggtcacccattcctcagaaagaaggctgtttgcacatccctttctttcttttttttttttttttgagacggagtctcgctctgttgcccaggctggagtgcagtggcgcaatctcggttcactgcaacctctgccccctggttcaagggattctcctgcctcagcttcctgagtagctgggattacaggcatgcgccaccacgcctggctaatttttgtattttcagtagagatggggtttcaccatgttggccaggctccctgccccatgccctcacgtggcattttcccaccttgctcagcccacctgttcagctccacccaggcatgcctcacatctggactcccagcccttcacatctcaccagtgcttggctgggcacggtggctcacacctgtaatcccagcactttgggaggccgaggtgggtggatcacgaggtcaggagattgagaccatcctggctaacacagtgaaaccccgtctctactaaaaaaatacaaaaaattagctgggcgtggtggcgggcgcctgtagtcccagctactcgggaggctgaggcaggagaatggcgtgaacccaggaggcggagcttgcagtgagccaagatcgcgccactgcactccagactgggagagagagcaagactgtgtctcaaaaacaagaaaaactcacctgtgtttttaggctagcgccagtgacccctcctccggtgactccacccccgagtgctgcaaacgcgtcctgctcttcttcctgccatacagatccttggcactcagcactttcggcccctggggtccatgtcacctcggaagcactgaggctgccctgtgttcccagtttgcctccctgtcgcggctaggagcttccccagagtagagacgggccttgttcagctcagcaccccctcccaccagcccccagtgctcagcaccccctcccaccagcccccagtgatcagcagcccctccccacagcccccagtgctcggcaccccctcccacagcccccagtgctcagcaccccctccccacagcccccagtgctcggcaccccctccccacagcctccagtgctcaacacaatgccaggcacagagtgggaacctttgttgaaccgacccaattgcctgtcacctcaatgccctgtgctgtagtgggcgaggagggaaaagaggcacctccacacccagtctggggccaccttaggtgacccctgtcctccccttggacctgccctcacattcctggggaaggcacaccttcctctctgctagggacacaactgagaaaactgagaccccgagctcagaggcctcttggctggggcctagtcatcctggctccccagtctcagagccccaaccccgcaatagggagccattcttacaatcattcagtaaatgtttattgagcacctactacgtgacagccactctgctaggagtagtgaatttcgtggggatgggacatacagggtcttcgcactcaggtagtttcccttccaaaagcattgtcagataatatgaacacaaatcaatcaagaaaccacgtattggtttttttgttttgttttgttttccttctaaagagtctcactctgtcacccaggctggagtgcagtggtgccatcttggctcactgcaacctctgcctcccaggcttaggcaatcctcccacctcagcctctcaagtagctgggactacaggtatacgtcaccacacccagctaatttttgtatttttgtagacatgtggtttcactatgttgcccagttggtctcggactcctgagctcaagcaatctgcctgcctcagcctcccaaaatgttaggattacaggtgtgagccaccacgcccaaccaagaaaccatttaaaaattagtcaggcatggtggtgtgtgctagctactctggaggctgaggtgggaggttcacttaagtctaggagtttgagactgatgtgagctgtaatcatgccactgcattctagcctggataacagagggagacccgctctcaaaaaaataaaaaagaagaaagaaatcagcagcccacactgagatagtgagaccctgtttctacacacagatttttttttttttaattacctgggcactgtggcatgcctataattccagttactcaggaggctgggccaggaggatccctggggcccaggagttcaaggctgcagtgaactatgatcatgccactgcactctaagcctgggtgacagagtgagactctgtctcaaaaaggaagagagagagagaggaaggaaggaaggaagcagggatggaggaaggaaggaaggaaggaaggaaggaaggagggaagggagggaaggagggagggaaaagaaaccagaacatgacagattgggtcaaggtggtggccagggagggcctctgaagaggagacatttgggccgagatgtgagaaggtctgaggtattggggggagggtgtccgggatatggacagctggatgtgcaaaggccctgggacaggaaagggcttagtgagttctaggaaccacaggaggccaataggctaggtggggagagagcgagagagacggagtgcaagatggggtcagggagagaagtaggaccacatcgtccagacctgcggaccactcccaaggatgctgcagcccatgcccggtgggcagcagctatttctgagagaagagcatgtgtttagagcccctcaggggagctaagcccccctgaagaagagaccagcaggtcccctggtattagctgagtcccagggatgggcaagaaaagaagccaggtgaagactagagaatgaaggagggagatggacctgagggtgacctgcccatcttccccaaacatccttcgctggtgccagccagacttacctcttccctgcactgcccctctctcccagcccctgctcacctaccctcacacctgcaaatccagctcgttctccctttccctccacacttccttcctctggccctaccacctccaacacgtggatcccctccactgacatgtggccccctctggaggaggaccaggagaccctgggatgccctgtgccccactcagcctgtgccctctgctgcagggacccgcggtgcgggttatgctgggggctcagatcaccgtagacaactggacactcaggaccacgccatggaggagctgcaggtgggtgttccctggcatcagcagtgctcccacctggaggctctggggacctggtcctagactcctatcttcgttgggggtggaagagcccctcacagcccagcctcagcggccacttcccacaggatgattatgaagacatgatggaggagaatctggagcaggaggaatatgaagacccagacatccccgagtcccagatggaggagccggcaggtgagcccctctccctccctcagctgggatgagctgctgagccctagacagggacaggaggggcacttgtcctctccccttctccacagtcctcctcccaagcaccacgggccgttctcccctcaattctggctgattgaaggataaacagagctttgtttgaaatgatcacaggaggtggctgggagagcaggggcagtcacccatccagtgcccctgcaatgtgagaagggcgggcagccagtttgggacaagggcgtgagcccacatgccatctgtgcccatccaatgccagcttccaggccagaaaatgggcttgttcttggggaaagaggtcctgagaaatgaggggcttgtggggaccctcctagatagaaagacaccaggaaccaccctgccttccctggcctgtccaaggtcttaggtggggagccccaggcaggacctgtttactgtcaacaggacttaagtgctggagattgggattaaagttaagaggcccctcttggaaatgagggctgggggtgggaggggtgggaatataaggggctgacccaccctggtgcctcagctcagtgagacactgtgctgacgggctcattgaggcaggtgggaggagagaagggagtctggtctcagaggtggcaggggagggaggaggtcctaggaggatcctgaaaattgccactcagggctctgccgtcaccttggagaggtcccttcacttcatcactgcggaggggctaggcctccctggctgaatcccgggtgtcctcgacaaggctcagatagggagcccaaggctaggcccagcacacaagtgtggggagcctcattctgctgagtggccagtgtgggatgcggcaccagagacccagcccagggcactgggaaggaggggcatctgcccatgcctgggtctctgaggctcacagtggatggtgaagagcctcaggtgggggacggtcaggtcaatactaaccgacctctggttttcagctcacgacaccgaggcaacagccacagactaccacaccacatcacacccgggtacccacaaggtgaggaccccagcctcctccgttctttcccatgctgcctttgggacccaccatttgatcagggaagagaggagcaaggggatagaggcagcttcaggctgggggagaccctgcagcagatagaggagtgaggatcccaggaaacaggtgggagggacgccccactgatggggaggcctgggcccctttccaggagcaccctgggcagagataacctgattgacaagggctgagtccccaggccctcaggccctggctgggctgtcgggcgtcactggggaagcacagaattaaagacttgttctcctctgcccaggcccctcaggtccccactgggcactgaactgtctaagtggttagaaatttggggtggccctcagctatggcccttggagcaaccacctggcctcagggacatgctaaagcacatccacgaacaatcttagaggctggagactgacccaatgactccaaagtcccctttagcttcggcccgccaggcctctgcttccca

SEQ ID NO: 7458 - DNA, 6000 bp, Homo sapiens
atgaggtcaggagatggagaccatcccggttaatgtggtgaaaccctgtctctactaaaaatacaaaaaattagccgggcatggtggcacgggcctgtagtcccagctattcgggaggctgaggcaggagaatcgcttgaacccgggaggtggaggttgcagagagccgagattgtgccactgcactccagcctgggcgacagtgagactctgtctcaattaaaaaaaaaaaagttcatttttactactagatcccttagtaaattagtgttatttggaaagagtattcatttagataaagactagaaggacataaggaaaaccaaaacatttgtaagtagctgtgattatgggtttttttgtgtgtgtttgtttgttttaacccatttatgcctgagattgcaattttttgaatttgaaaaaatcagaccttggcaatgatcttgaacagtaggatataaataactcccacatgcgtagcgttccagtaatggaacaataggcataaatgggttttaatgttatgggttttttgttttgttttgttttgatttgatttttgagacagagtcttgctctgttgccaggctggagtacagtggcgcaatctcgactcactgcagcctctgcctccctggttcaagccattctcctgcctcagcctcagcttgtagtcctgagtagctgggactacaagcgtgtaccaccacacccggctaatttttttgtgtttttagtaggggcgggtttcatcatgttggccaggatggtctcaatctcctgacctcgtgatccatccgccttgggctcccaaagtgctggcattacaggcatgagccactgctcccagctgggtttttttgttttttgttttttgttttttttttttagagttttgttcttgcccaggccggagtgcaatgggacgatctcggctcactgcaacctctgcctcccagatttaagccattctcctgcctcagcctcccaagtagctgggattatgggcacgtgccaccatgcccggctaattttgtatttttagtagagacggggtttcaccatgttagctaggccagtctcgaactcccgacctcaggtgatccacttgtctcagcctcccaaagtgctgggattacaggcgtgagccaccgcgccggcctattttttttcccacagaattatattaagagaaagaggccaggcatagtggctcatgcttgtaatcctagtactttggaaggccgaggcaggcagatcacttgagcccaggagttcaggaccagcctgggcaacatggcaaaacctcttctctgcaaaaaatacaaaaattagccaggcatggtggcgtgcaactgtagtctcaggtatttgggaggctgaggtgagaggatcacctgaacctggggaggctgaggctacagtgagcccaggtgccgctgcactccagcctggataacaaagagagactttgtctcaaaaaaaaaaaaaaaaaagaaaaaaggccaggtgcagtggctcacgcctgtaatcccagcactttgggaggccgaggtgggtggatcacctgagggtcaggagttggagaccagcctgaccaacatggtgaaaccctgtctctactaaaaatacaaaattagctgggtgtggtggcacatgtctgtaatcccagctacttggggggctgaggcaggagaatcgcttgaacccaggaggcggaggttgcagtgagctgagatcgtgccattgcactccctccagcttgggcaacaaaagcgaaactccatctcaaaaaaaaaaagaaagaaattatattggctgcgtgtggtggctcacacctgtaatcccaacactttgggaggctgaggtgggcagatcacttgagctctggggtacaagaccagcctgggcaatatgacgaaacctcatctatacagaaattagccaggcatggtagtgttccttcacctgtagtcccagctactgcagggggctaaggtgggaagattgcttgacacaagaggttgaggctgcagtgacttaggtctgcaccactgcactccagtgtgggcaacagagcgagaccctgtttaaaaaaaaaaaatgaattaattgatgtccatccagtatagagaggatcaggtatccagatccccgctcctccccacacatgcactgatcagagctgaagacctggggtatggaggggagtccgtctgcagatctccagcgagttttgtggagaaaacccctggttgttgtggatcttctcaacattttgtggtcaagagcatagaccgtagcgatactcattccgaagacttcagagtgtgggtatagagtacccatactctgtggctcttaggattgtctatggaaaaccagactgtaagggttcagcattttccacgtctgcagcttaatcagtacacaatacttactaatggatgtgttaaaatggctgctttagaacttacataagctctgaaggatttatcaccaattcttccccccaagaaaattttattgaaaagctcaactgttgagaaattctttcataacaataattacttaaaagatacacatttggccgggcgcgatggctcatgcctgtaatcccagcactttgggaggctgaggcaggcggattacctgaggtcaggagttcaagaccagcctggccaacatggtgataacctcgtctctactaaaaatacaaaattagctgggcgtggtggctcacgcttgtaatcccaggattttgggaggccgaggcgggtggatcacgaggtcaggagatcgagaccatcttggctaacatggtgaaacccagtctctacaaaaaaatacaaaaaaaaaatagccaagcgtggtggcaggtgcctgttgtcccagctgctcgggaggctgaggcaggagaatggtgtgaacctgggaggcggagcttgcagtgagccgagatcatgccactgcactccagcttggccaaaaaagcgagactgtctggaaaaaaaaaaaggctgggcgtggtggctcacgcctgtaatcccagcacttcgggaggccgaggcaggcggatcacctgaggtcaggagttcaagaccagcctcaacatggagaaaccccgtctctactaaaaatacaaaattacccaggcgtggtggtgcatacctgtaatcccagctactcgggaggctgaggcaggagaattgcttgaacctgggaggtggaggttgtggcgagccaagatcgcgccattgcactccagcctggacaacaagagtgaaactccgtctcaaaaaaaaaaaaaaaagatacacatttatctttgtggatggagatataacagatgagttagttctaactaattgtattttcataattttggcttattggaacaaatagaaatttcaggctttggggaaaatctgagcctgcagagaatttgtggatgagaatcatggagttctatgttggaaacctggcttacatcaccatttaaagattttatattatttacttcttgttttgaggttttataacttgtatattcaatgagaaaagaggtggtgagctcagttggaaaacagggctagaaatgggagctgtactggaaattttattgtgttagagtctccctctctcgcccaggcaggagtgcagtggtatgatcatagctcattgcagtctcaagctcccaagttcaagtgatcctcctccttcagccttccaaagtgctgagattacaggtgtgagccaccatgcccagctggattcttttgtttgtttgttttgttttgttttgagatggagttttgctcttgttgcccaggctagagtgcaatggcacaatctcagctcaccgcaacctccacctccccctcccaggttcaagcaattctcctgcctcagcctcccaaatagctgggattacaggcatgcaccaccacacctggctaattttgtatttttagttagttggtcagtccatgttggtctggctggtctcaaactcccgactgctggtgatccacccacctcggcttcccaaagtgctggaattacaggcatgagccaccgtgcttggccgggattcttcatatgtaaatctttttgcttctttattttttgaggtttcgctgtcacctaggctggagtgcagtggcacgatcacaactcactgcaacctctacctcccgggctcaagtgattctttcacctgagcctcccaagtagctgggaccacaggtgtgcgtcaccatgctaattttgggggtgtgtgttgttgttgttgtttggtgaagactaggtttcacatgttgcccaggctggtctcaaactcctgaactcatgtgatccccccaccttggcctcccgaagtgctgggattacaggcgtgagccagagccactgtgctgggccgtgtgtgtgtgtgtgtgtgtgtgtgtgtgtgtgtaagagacagggtgttgttctatctaccaggttggactgcagtggccaccactgccaccacacctggctaatttttttaaaatttggaaagatagggtctcactatattgcccaggcttatgtgcaaatctttatgcggcttcatgccttcactttttttttttccattgttcctttggaaattgttccagttttttttttcctgtatctttaaacaacaacacaaagcacccttttaattaagttactataaacacataacattcaggaattgttttaaatttatttgctaaatgtgggcgccttatggatgacatttggccagagctatgcagagttgccagagcttaataatgagcaataattcatcttggaaacttttctgttttgctgtttaatccagtacagatgcaggtgttttctttctgtgactttttgtgagtagttgtatctgtaaatcacctcccatggagacgggtgttcctgtgactgagagccagctgttgggtgttttagctaaacagcttgctcctagttagctgctcaaatccccctgagaggtgtatcggctgcttcagggaatagagcagatggggtgaaggtttttgcaaggcctttagtgacctgctttcaatttgctgcaattcttctgctttggctttttcctataggtgccagagttcatctgcttcatatttttactactgacgcatcttcctgtcgtatattcttagactgtggtgacttaagaatctttgggtcacctgttacatggtttctcctgccacctgtatggggaggagaagactggtattcaaactcaagcctgtttctatcttattctcattgatttttatgatacatagaaaactttgtttctttctgaaaatggcattttagtgattcattgttttctgtgggagaaagcttatgacctgctcttttctttttcccttccagagggaatctggaaaaattgcaatcaaaacatcatttctctaagaaaattttgggtaaccgaagttctggacaacaggtaaagtgtgtttaaactttggtggtgctgacaaatcatctgtaatctgcagaagtaaactgggagagggaggaggacaagttaaaaattaagtctactttgtgtcggggctttattggggatttcccatatattacctcatttaggtggtttttacctggatcctggatgtagatctgggaatctcagaaagaatctgtcctttaaaatgctgttttaaatggatttgctgttgattggatttaatgtcctcacagttcagtttagcaatcattttttaatgtctaccataaataaggtacagaagtataatttgtagattctgttatatagtaaaggggtacaatatttattgcaagaccatttactgggcttctaagtaaaaccaaaatctggtatgcgatgcagcctagctagggaagatcttcctagttcccttctgtcttttgttttagttcttaatgattgccagcagtttgtagctgtaccatcttcttaatcccttttag

SEQ ID NO: 7459 - DNA, 6000 bp, Homo sapiens
agaggaggaagccgctcagggaggatgcttcagaaatccatgaagcagtttccgtgagtcgttgtccagatatcaagctgaatgttgtacgggccaaaactctgcaagctccagttgcaaataactcttagaaggctggaagataaatggaaattccggacagttcccagtgctgaaagacattgaagttccaaccaagcagagttcagagatggtgctggacatcccaggcactcagctgaccctgccaaggccacagcttaggagtagagctactctatccctagagggagggctactctagaactgccataacaaggcccagacaaaccttgaaaggataaaattgatcctccagtaaataaaccgcctaacagaacaaaactcaacaatttttaaaggaatacaacagaatctttactgtaacaacttagcatgtaccataagtaaatattatcagaaataaatcaataataatgtaataaaataaataataaatatataataaatattaccagatgggcaagaaactggaaagtgacacatacctaagggaaaacagatcaatagacacagatcaaaagacgggagagatactgagattcacacacagggagtttaaaacagatgaggaatctcagaaaatacctggagactatgaagaagaatccacatggagattctagatccgaaaactgtgatgtcttaagaaaaaaaaattattggagggatttaataacagattggatattgcagaagcaaagttcagtgaacttgaagccaggtctgtagaaactatacaaactgaagcatgagagaaaagagtgatttaaaaatgaacaaaagaagaaagaaattggggcagttttttgttttgggttttctgttttacagtttttcttttcttttttttttttttttttgaagaaataatagttacaacttttccaaatttgatgaaaaatatcaacctagagatccacaaagcacgaggaggcctgagcagtataaacacaaagaaaactacactaagacacattaaagtcaaattactaaaaaacaaaggcaaagacaagaccttaaaatcagccagagagagaaaaaagagcaaggagagaagatgaccactgacattttatcagaattcatgggagcaggaatacaatgtaatggcacatttaaaatgctgaaagggtccgggtgctgtggctcacgcatgtaatcccagcacgttggaggctgaggcgggtggatcatgtgaagtcaggagttcaagaccagcctggccaacatggtgaaaccctgtctctactaaaaatacaaaaattagctgaatgtgatggcagaactcctgtaatcccagctactcgagaggctgaggctgaggcaggaaaatcgcctgaacccaagaggtggaggttgtaggaggttgtagtgagctgaggtcgggccactgcactccagcctaggcaacaacatgagactccatctcaaaaataaataaaataaaataaataaataaataaaatgcggaaaggaaaaaacaaaaaaaccctgtcaacttcaagttgaagttagcacagtttagtaatattaatgtcaaaaatttaaccagggaggccaaggcaggcagatcacttgaggtcaggagttcgagaccagcctagccgacatggcaaaacccgtctctactaaaaatacaaaaattagctgggcgtggtggtgggcacctgtagtcccagctacttgggaggctgaggcaggagaatcactggaacacgggaggcagaggttacagtgagccaagatcgtgccactgcactccagcctgggcaacggagcaagatgctgtctctaaataaataaataaataaaccaggattgctagaaatgatgaatttgtatgtaaatacatggctgtttttcatttcttaatttcttcacaagataacatgggggtttctaacatgtagaagtaaagtacatggtaacaatggatggggtggagaaatagaagcacattgttttaagggtcttaaccttgtatagggggtataataataaaggtacattgtgatgagctaaggatgcacactgtaatccgtagaataaccaccactggccaggcgcggtggctcacgcctgtaatcccagcactttgggaggccgaggtgggtggatcacgaggtcaggagttcgagaccagcctgaccgacatgatgaaaccccatctctactaaaaatacaaaaattagccaggtgtggtggcacacgcctgtaatcccatctacttgggaggctgaggcaggagaatccacttgaacctgggaggcggagtttgcagtgagctgagatcatgcactgcactccagcctgggcaacagaacaagactccatctcagaaaaaaaaaagaataaccaccaccaccaccaacaacaacaaaagcaaaataaatgttatagttaagtagtcaagagaaaagataaaatggaatcccaaagttattcaatttagtctaaagcaggtgggaaaattggaaaacggaaacaaaggatggatgaaaccaaatagaaaacagagagcaagacgggaggcttcaatacaaccatatcagtaattaggtacctcatatataataacaattacatcacaatggactgaacactccaactaaaaggcagagattgtcagactggataaaaaagttttctcatctgtataatggagataatagtacctaatttagggtcgttgtgaagattaaatgaataaatatatgaagtgcttcaaacagtgcctggcacatagttacaataatgataatgataatgaaaaaaaaattctgttttgatacagaattaactatgttctaggtctttgaaagttgaggtaaatgtggtatcttgaggatactagttaacagaatgcatgtcaaaactaacctgcgtacttggtttggtgtcttgcttgttttggcagaaaggaaaaaaaaggatattttgtaacagtgactggccatgtgattttgttcaggccacttcactgctctggccttagtctcctcacctctgcaataagggggttgtgttagatgagtgactcttactatttgggagtccctgtgcccctttgcgaatctgatgagagccttacccctatcctagaagagggctcctaatacacacacaaatacttttgtataatgtgtattcattgctgtataaccttgaggaattaataacgtgtggtattttgtctttgtttttactttttaaataaaaataaatctagctgaagtcctttcttaccaaggttaggaagaaatccaatgtcagtccatttggattggctccttccccatcttttgatcccacacaaaacatgggggcttctgtgaactttgaaaaaggactgaagctcacagctggccctagatcctcacacctggtccttagctcatgatggtctattgttgccttgcttttagccgagggccttggggcccattctaatcaggtgcctgagttagagcttccctttactcttgcggggcacacaaggctgctgcccagtgcccaggcctctaggacacccacacacctatccccttccaaggccctgccgtgatctgccttaggtttccattcactctgcagaacctgtctcctttctattcctagtcctcagaaatccaggggactaacttgtttcttcatcagcttctaagcattgcctctattctctctcctcattcatacaagccattttaatcttgtagatgggccttggtctttgaaaaccaagaacagcctaaaaaattctcccttctgccctaagacacacaagaatattaacttattgctaagctaagcaatggccaggctcgaatacaaaaaggcctggagacatctagaaggctaggaaatatcttgtactatgtgatctgtgatttcagaggtcacttctagttacggttttcctgtgtcagccttaaggaatctataagctcacataagcaggggaagtctcaaagcagcaatcagtgtagaacagtgtttgagaaggacaaagggaagtaaataccctgcctgagatgtaaattataaatagagtggcttgggcctgccttagtagggaaggaagcatttaaaggggaagatgagaacagaggattgcactttattaaaatgaactcccatgtctggctatgattgcagtttgcttaaatatgctgtaaatgagcagaatgttctgctttttcatttgggacctgtaatgtgattgcttgctcaactcaagagtgtcagtccaaagggcaatccaggtcgatgtataagagactttttttatgtttggttcatgtttacagatcaggattgtgttcacacagcttcttcattgtctagaaaatcaagagccttagagagaattacagttatctgtagcttgccatgcagagtaacatcaaaccctttttatttttttttctctgttgacagaacaacaccgatggacttcaggaacttgcctgtgggggcttaatttattgcttgggagttgtgttcttcaagagtgatggcatcattccatttgcccacgccatctggcacctgtttgtggccacggcagctgcagtgcattactacgccatttggaaatacctttaccgaagtcctacggactttatgcggcatttatgaccaatctgtactaattctccaaaccagtattatttcaattatggcacttgggagtggggtgagagctaaacattgcacagggaaagaaaaaaaataactgcactgactttatatcttttgaatataattactgtgaaagtataaaggctgtgttctggaattttctgcctcacagcaaataaataaggtagtgaattaattattcattccattccactatcatgaaggactctgaatagacttggccaactgatgtttacaaaccagacttttatattttaattttacagattttactacatgatttttctaaattactatgtcaggttgtaaaagtcagtgcaataacaaaccttcctttttaagaagaaaattgtttctattactttcccattcactaggtaaagaatcatggacagaacttacactactttttaccatgtttcatcttggcataacatggttcttttttaaatagaaactttagttttttgtaaatttttaaaaaaatatttcattgatatgcatctctgcaggtcctcattcatgttgtaaatttttgcagcaagcagtcaacattccacaaacgaacaaacattatacctcttctgatagttttattaagcatggagaaattgccaatttttaaaaactgcagttttccaaacttttctgccaacctcttactctgaattcagtgctgctttgggacatatacttgacctagcttggtttaccagtgatggaaaagtattttgatatcattaactttttcaaaagatccaactttttctctatgcctttgccacattctcttcagggtctctttccacagtggataaatgttttttctgtattatgacagtattgttgtgatggccatctgctggaaactcctgaagagcattatgtattacagtgagcagttgtattgcctgtttggtgcccaatggttaagtcattgtcacttagctttatattgtcagtttgatatttattttaaattgtggaactagatgcataaattcacatttctgcctttcctttgcatcttctcatatattgtgtttttttttttttttcctagaaaaaatatttaaagcattgtttgacaggtagaaactcatgtatctgtagtccatgagttatatcctggctcagtggagtgatatttatgtattatttttacttttctctcagtgtcttatattaagattaacatgttgttaatagttgctttgttgattaatctctcttgttggtgttttaataaatgaaataggcttgcctttagatcgg

SEQ ID NO: 7460 - DNA, 6000 bp, Homo sapiens
gggaaatgagggccacgattcaaagccttgcttcctagggagaaatctcacccaatgtccaggtttgcaaatgcagcagacacatttgtgggtgggtcagattctgtccagagataccagaatgtctatccctgtacacccccacctctggcatgggacagcccttccctgcacacaaatgggttatcaattatgtccaatgaatggcctcacgagagtcctgttgcggaagggatcttccgcttatctcctgtaaagcacagagccacgctcagaacctacggactgtggtcgcctgcaggccagccatgggctttcctttcatccttacacttagattttgaagcctcgcctttgaatcagaagcaggctgctgtcattccagaggccgctgttcatctctggcttcctcccagatgcccaggtgccccgggtgcctgggctgcctaggccagggcacccgccttaggagcaaatggaaatgcatcttcctcggcttgtttgccctcctgtaaccccttccctcttgccttcggtcagggcctgctgtcttgcacgcaccagtgcttagtgccatggtggaaccgaggcggggaggacgcaggaggactggcacaggagggggggcaccgcccgggagcttcccctgcgtcaaagcagcttcctcagtgagctccaacacagacccttgctggcctcagtctctggaaagactgacagcaccaccctagttcctgggccttggaaaggccaaagccacgagcaggcagccactgttcggcaggagagctagagatgctattgcccacagacatcaaagcaggggtgccgtcttccgtgtgcatgctgggacgggtcttggaggcccagattagctcctggcttgaacttgtaccacccttacctgaaaattgggtctgtaccaaagctcatctgcacgcccctttagggcagggaccaggccccctctgtgtggccctagcacctggccaagtgcaggtggctgcgggttgagttgagctgctatttgctgatgggaatttgggggcctgtcgcttgtcctctttgagcctccatttcctggcctgtcaaattggggcaatgctcctgttatccacacagtgtcatttaagggtgacattagagatggcatgaagtgcccagcacagagcaggtgctcacaggctgttgggtccccaccctactgacacaccaagcacacgtctgccctgccatggtggggagcaaacaatgttatggttccgactccccgggaggccaggccgggcatttcactgtaggatgttgaagccgcaggcagtcgtcgctgcgagaagagagcctggctctgatgtccactgtcttccagggagcctggtgggaaggaaggagtgggcagcggcccctcgctctgcgggcctctcctgccctttgtactccacgaggtgtgaggaagttgccgggtcacccagcagagggagaggtgatgtcccctctgttcttcctaatttgtagctaatcagattctgcctgcagccaggctctctggggatgaatctaataaaggaggcggcgacctggagaggaggacagacaacaagtgaccaggggggacagcacttctttcagtacattttcctgttagactcggggtattagagacccaaagatacccaaggaggagtgagagcgtccctgccttcgaggagcagacagggcaccgcgagggtaaggaggctccgggagagcctggggacagagtgatctgcgcaccgcggtgcctgaggagtggaggcaggggtgtgggcccacagcagggagccaggctgggccatgtccttggattctgtgagcccaggcgtctcctctagagggcctagcaggaacagtgggggctgcagatggaaacgggcaggatcatgccatgcagttggcatttcactggcactcgggggcacttacgcaggggacagcatgatgttgggagctggctttgtccctggcatgtctgtcacgttgaagagggagaagctgcaggccctgacttgggtggggcagtgaggatgctcaggagggaagtgaggggaggggtgccagcatgcggcggcctgggcagccttctgtggaggagctgaggtgtcacctgggcccggaagaagggcagccctgctagctagtggggagggcatgagagaacttggcgacgatgggagagaaggtgacttgggacgagctgggtttgaagcgtctgtgggatgtccaggtagagatgagtagtgaaccgtcagaaatggggcttgaatttggggtggcggggacagaactgatacccgtgtaggtgacagataaggacagaggcaggagttccaaaaataggatttattgttggctggggcttctggaatcccgtattcccgtccaccctgggaatgtggattggagctatgtttctgggagatgatttgatggaatgtgtcagaagtctaaaacagaacctagcccttgtttcaggattccctgcagagaagtttgcagatgaccacatcctgttgtttatttggtggaaaactgaaatcgaaagctagctaaatgctgaacaatgggaactagttggctaaaaaatggccgtgcaatgcaagagtgtgaggttacgaaaatgatgatgtgggcgcgtatccattgacacaaacatccatgtgtgctacgccctcagttaaaaagcaggttagaaaatggaataaatgatcctgcttctataaaaggatgcatatgtgttttaggaagaaggtgtgtgaggatatagatcaaattctgatggcctgtcattttaccttttttgctgatccatattctactgcagtgcgtgtggattattagcacacacacacacccttttttttttaattaaaaaaaattttttttgagacagagtctcattctgtcacccaggctggaatgcagtggtgcgatcttggcccactgcaaactctgcctcctgagctcaagggattctagtgcctcagcctcccaagtagctgggattacaggtgtgagccaccatgcccggctaatttttatatttttagtagagatagggtttcaccatgttgtggctggtcttgaactcctggcctcaggtgatccactcgccttggcctccccaggtgctgggattataggtgtgagccatcgcacccggcccacacacacaccccccctttaatggtggagttgccaacagttgtccgatgtggcagagagaactggggagcagagaaggagcccatcactgggagggactgaaaaccagctcctgggcactgcagggcagagcgtgtgccgggtgtgaagggggtcagtgcccctgtgctggccactgtccccctagttctgatacagttgctgccaggagaggctggaccgtggcaaggggccagtggggaaccggggcgggatggggggcagcagcagtgctctggggtctgcttgtggtggccatggtggtggcagttgcagtggcaactgtgggccatggcagcacttttccgtggcgcacaggccgctgccgggtgaggggagagccccgcttgttctcctcctgccgcctctcctcccatccccagctgctgggtgctctccggccggcatgaagctgtgcaggcactgggcactcccttgggctcttagcggggccttctcattgctgcttcgctaggaaccacccgctctcctttcctcctggagggccacgtggggccgagcacctgggacagccgtgctgagctctacccggccccttcgcaggcctcgtttctgggggccttcagttttggaaacctccctgagggcccctctagagtgcgggtccgccccgcccctggtgtggaggggaagtgccctgtccctgtgtgctgacaggtccctgtgtgcagcatggtcggggcacttctactctgcaggcgcggccgggcggggagcggggtggggggcgggcgggggcgtggggggagcggggctggctctcctgggtgtggggtggggaggcctcctcatcgccagcatggagttaaaaaccaggatgggggagggagacttcccatttctcccgagatgtacttcatgacgcgtctggagaaaaggtgtgaccagccccttccttcccgtcaaggagcgcgcttgcctgtgtaactcacctgtaaagcccacccagggaaggccagggcctcatgaaacagaaaacaaagccgggcactgggcccttgagctcactagaatttggggtatctttccttgcaccctcaccgcatatggaactcctggcgtcgtgtcccaggtcacgcctgtccccgtggggaggctgggcccctccccccagccactcccgagacttgagacctctgcctcaggacgatgggtgggaaggggcttgcgggtaggagagcgagcgctgcttccagcgggagcctcgggggagggtggcggggccgccgtgggaggagccgcgccgcatctcaggcgcagtctctaggggctgtgcgcatccgtgggggggacatgcgcatctcaggggggctgctcgcatctgggggtgctgtgtgcatctcgggggggctgtgcccatctagcggggtggctgtgcgcatctggagggggctgtgcgcaacccggggggggtgttgcgcgcatctagcaggggcggctgtgcgcatttcggggggggctgtgcatatctggggggaccgtgcttatctccgggggcggctgtgcgcatcttgaggggtgtgtacatctcggggggcctgtgcgcatcttggggggctgtgtgcatccgcgggggctgtgcgcatctcggggtgctgtgcgctgctcctctgagctctgctctttcttgcagcgtttgcctcagcatggagggcggggccgcggcagccacccccacagcactgccttactacgtggccttctcccagctgctgggcctgaccttggtggccatgaccggcgcgtggctcgggctgtaccgaggcggcattgcctgggagagcgacctgcagttcaacgcgcaccccctctgcatggtcataggcctgatcttcctgcagggaaatggtgagtcccatgggccgctcctcttttcccgggcttgtgggggtccctgagaggcagtttgcaggggtcttgtcacccctgcggtctcttctggttggacaaatctaagattctagaaaagacagagacagaagctggttcagagcctggggagatggaatccaaacccaggctctgaggttggtgagtggcagctcctctccagcctggtccagcattttcacctcgtttccacacacagcatccaaggcgggcacttcttgcagcagagggaaaggaatgaggctccgagccaggccctgctgcaggggtggtttgaattgagggaaaaaaagtaatcatatgtgagagtttgtatgcgtgcgtgcgtgcgcgcgcatgtgtgttgttggtcttggacttggcagagctagagcgcctccccctggggcaggagcaaggcagtgcttggcctccacctgcctccaggccagggatccaggaagcgggatctgcatccggttgacccgctcttcctagaggtggtcctggtgacagccattcctgagcagcagaaagctaagaggcattcctcacgtgacctggccttgcccacctcttctggacgcgggagatcaggctgggatcacaaggttctgcttgggagccaggcgcctgcttgctaggagtaggaccatctgcccaggcttaggtgggggcctgtgtgaggagccacgtggctaacaggtgaactcagaggctgcttgttgcctcagtgtgaccaacagtggacctcaaacacagcctggaatttgcaggacacctgacaagaaggtgggtggaggggggcgtctgctgggccgggcagctcctttaggtggggacgagggcagaggcgctgccttcactgcc

SEQ ID NO: 7461 - DNA, 6000 bp, Homo sapiens
gggcaaaatgcagtcaacactggtggttttattgttttattttgttttgttttgtttttgagacggagtttcgctcttgttgcccaggctggagtgcaatggcttgatcttggctcactgcaacccccacctcccgggttcaagcgattctcctgactcagcctcccaagtagctgggattacaggtgcctgccaccatgcccagctaattttttttattttttagtagacccagggtttcactatgttgtccaggctggtctcgaactgctgacctcaggtgatccacccacctcagcctcccaaagtgctgggattacaggcccccggcccccgttattttttaaaaaagtaaaacaccacagccagaagcagggaggctgaggcaggcagatcccttgggcccaggagttcaagcccagcctgggcaacatggcaaaacctcatctataccaaaaatacacaaattagccaagcctcgtggcccatgtctgtagtcccaggtactagggaagctgtggtaggaggattgacggagcctggaagggcaaggatgcagtgagccgagatcgcatcactctaccaacagcctgggtgacagtaagaccctgtctcaataataacaataataataattggaattcattcaattattattagtatattctttaaaagcctaacaagttacccagataaaagtgaggatgttatttccagtagaagcccaggtgtgaggccctgggatgcctctatgaggtgcagtttgataaccactcaaaaaaacattccatggctatccaacccttgacttcagcagagctgagatttgatgcaggcaaatttgagatgttcttggcctgcaaagtctgagtgtggtgagtggtggacaggagaggtgtcagtggatggcggacaccgtggtccaggggctgtgggagttggaatggagcggttctcaggcagggaaaggcagggtggaatggcctcaggacaagcacatggtaggggagggggctctccaacgagtctctccacccgggcccactctaggcagctcactgctctggtcccagagggtccttgtcccccaagcagaaattgggctcctgggcctatgcccccgcccatccagataagtagatggaagggggagggtttgaccgccccaactggggccacgggattcaagggacaacttccaaaagaacaggggatttctgcacagacaacaaaataaatggccaattgagcagtgttttcaagctttttttaattaggtgtcacaataagaaagaaattttaaattacatcctgtatataaagtcacacagctacaccagaagttttttgttgtgttgttgttttgttttcttttgtttgagacaggctttcactctttcacctaggctggagtgtagtggtgtgatctcggctcactgcagccttgacctcctgggctcaagtgatcctcccacctcagcctcagctgggactacaggcacatcccaccatgcccagctaatttttgtaatttttttgtagaaatgaggtttgacatgttgcccagggcggtctcaaactcctgggctcaagcagtccacttgcctcagcctcccaaagtgctgggattacaggcgtgagccacctcacctggccccagaagttttataaaccagtatctaactctaccacacacaaaacactgtttgtctttaatttctttttcttttttttttttttttttgagacagatctcaaaaaaaaatccagtctgttgcccaggctggattgcagtggcgtgatctcagctcattgcaacttccgcctcccagggtccaacgattctcctgcctcagcctcccaagtagctgaagcagtcgtgcaccaccacacccaactaatttttgtatttttagtagagacgggatttccccatgttggccagactggtctcgaactaatgacctcgtgatccatccgcctcggcctcccaaagtgctgggattacaggcatgagccaccgcgcccagccttgtcttttatttcattctgggatacaggggtgtccccagagtcttagtgcagttttaataaataacttcagatgtttaaatgtacaaacctacaaaacatcagttgaatatttacttatttaaatttcttttccacttagtttcctgacagtcaagtgctagattttttcattttaattctccgcatgtgctagtgtctggagggacaggcaggcaaaggacccctttcctgggctgaattgacctcccttgaggtcacgtgtgcacaaaatccagttctttggaacctggtgaagctggaatcaccagtgcaatcttttcccgtcactgaccaacagtcgataaaaggtttttcgaagtttgaacaactagagccatgtatagcactagagggggtactgtaagaatctgagtgagagatatcaaggtattttaaatgtaaataacctttcaaatgtcattttttggtacatttgtagtatctatacttctgaagttattaaagcctcaaacttcaccaagactttggtcgcccatttttttttttttttaacaatactagtaaggccttctcatttgctttcctgacccatcaatgggtcatgaccacagctttttaaaaatcagacttccaggccgggcgcggtggcccacacctgtaatcccagcagtttgggaggccgagacgggcggatcacctgaggtcgggagttcgagaccagcctgaccaacatggagaaaccccatctctactaaaaatacaaaattagccaggtgtggtggcacatgcccatagtcccagctactcgggaggctgaggcaggagagtcgcttgaacctgggaggtggaggctgcagtgaggcaagatcgtaccattgcactccaacctgggcaacaagagtgaaactgtctcaaaaaaaaaaaaagaaaaaatcagacttccaaagtcaagtacaattttttttttcttttggtgacagggtcttactcttgcccaggctggaatgcagtggcacccccatggcttactacagcctcaacctcttgggctcaagcgacgcacctgcctcggcctcccaatgtgctgtgattacaggtgtgagccactgtgcctggcccagaatctaaatgtgtaccagcctctctgtgctcaggagggcttgggcacgtcagctgatactgggtcctttggggatacggatctgccctggctcatggactcctcgccctggagtgcaattatttgtttgtctttcctactggaccacgagctccgtaaggcagggactgtgctcattgttgctgttgtttttcatttaatctttgtgtcctttgcacataataggagaactggcctcctgtctattcttgatattgggcttagttccggggccgtgccctgaataggtcagtgactgtttgcctgtcattaaagagagacatcaaccatgagaaaaaccaactgtttttctgtccatgcacacaacactccacagaacccttcacttctgataccaaatatgcagccagccccacccctgcaaccaacaccttctccagccacccagacaccaagtgggtgtcctcccgttcaactctgacattaactgcctggaatcagtgcagaccccacaggttagggcccagtcccacagactgccccctacttcaggggccaatcacaagtatcaggtcccctcgttccccacactttggtcctacttgcctacaaatcaagggttccatgaacccctcctcaagttgagtaatttgctacagcgtcttacggagctcagggaagcacttatgttaactggtttattagaaaggaagtgataaaggctacagatgaacagccagatggaggtacctaagtagagtaaggtccagtagggtcctgaatgcaggagcttccgtccccatggagttggggtacgctaccccctgcgcacgggaatgcattcagcagcctggaagctctccaaaccctatcgggatgttgacggaggcctcatcacataggcgtcatcgattcttaactcaatctccagctcctctccagtctctggaggaagctggggggtggtggggctgaaagttccaagctcctcattgcagcttgatctctctggtgatcagcccacccaggagttacctcattagaacaaaagacactcctgtcacccgggaaattccaacggacttaggagctctgtgccagggactgggatcaaaaccaaatgttagaacaaaacatgctgctagcacccctgtaacttaggaaattcaagggacttaggagctcagtgtcagggctgggcatggtggcatgcacctgtgatcccagctattccagaggctgaggcaggaggatcgcttgagccctggaggtcaagactgcagtgagccgtgattgcaccactgcactccagtctgggcaacagagcaagatcctgtctcaaaaaacaaacaaaataaaaactgtgtcaagaactgggggccgaaaccaaatatatatatatttaggatgttacattctttctacttttttttttccaagtgatccttctgcctcagccttctaagtaggtgggatcacaggtgcgtgccaccatgcacagctaatttttaaattttcagtagaggcgaggtgtgcactatgttgccaggctggtcttgaacttctgggctcaagcagccctcccacctcagcctcccaaagtgctgagattgcaggcatgagccaccacacctggcctcttactttttttttcttttttagaatatataagaaaataaataaagaaaaaatggggtctttggatctgactgtccaaagacaccattagcatttaaaaaatatatttagtcattcatgcatattaatggaaagtccaaattatactgaactctataagacggaaaggaaaagctgccccccaagctcctttcccaagaggtagccactgctgacagtttctcgtgggcccttccaaaaaacaaaccttttctctgcattttcgagcacatgcgtgcatttccactttgccatttacagcaagatgactgcgctgctcacgtggggctgctgcttgcatttttccctcgatttatcttgatgtacttttcatgtcagcacctatcaacgcctcctttttttttttttttctttttttaagatgcagtcttgctgtgtcactaggctggagtgcaatggcgcaatcttggcttactgcaacctccacctcccgggttcaagcgattctcctgcctcaacctcctgagtagctgggattaaaggcacctgccacaacactcggctaatttttttttgtatttttagtagagacggggttttgccatgttggccaggctggtctcgaattcccaacctcagctgatccacccacctaggcctcccaaaattctgggattacaggcgtgagcgaccgcacccggtccccagttctgtcttttcaactgcacgcggtcagagtcattatataaaaatcctgatggacatttctccagtctggagcagatccctagaagtgggtttgctgtgtcaaatggagcggctcctcttcctgcccccggaagaggcctgcccactccgacctcagccatagagatactttgctgtgcaaaatttgggaaacgtcaggacacacaggcaccacttcgccatagatagcactaagtctgtgtgtacaaagtgcccaacagggaagacgctgtgttgcctgcgcagctccccccaggcagcattttgtgtagtcaaggaagtccctcaggccaggcacagtggctcactcctgtaatcccaacactctgggaggccgaggcaggcggatcacctgaggtcaggggttcgagaccagcccggccaacatggtgacatgccatctctactgaaaacacaaaaaaattagctgggcttgggtggcgggcgcccgtaatcccagc

SEQ ID NO: 7462 - DNA, 6000 bp, Homo sapiens
ctgggagaggcctgcggccgagccaggccccgcagtgagccgagcagttctttggcgccaaggcacagacacgctggcctccaggcagtcagggcagcgcagactctggtccctgcagtcatttgcattaatagaaaggcgccaggggacagacactgccaaaaacaacaacagatacgaaaaagaaggagtgtttttatttggtttggatgtgtttggtattccaatgctgcaggagcctaacccagaggaagtggagactcctttactgcacatctgtctgctccaggccaggcactgttctaggagccaggatacagaggtggagacagaaacaaacaaaccgataactgtatacaatactctaacgtcaggtggggacaagggccaaggacccagggacggagggtgatgtctgcagcagggcagtcagggagggcttcctggatgaggtggcatttgagtaaaatacagacctgtaccctgtctatgatcctatcccacttcaccccgtcagccttcccctcccacctgactctcctgcgcttctctctttagagggaccacagagcaccagcctgcatggaacttccttcctcactcagcttcccacgttgccagctgggacaggggagatggagtaattttgctgtggaaagacttcacgtcttgccgaatgaaagtaagcaaagatactgctagagtcgggaatctagagtcgggaattcattaagccaagggagtaagaatggccacagagtagtgaaatactgtttcttctggaaaagtcagcctccagcgcctgcagcttccggaactaagatgtgactgggcttgcggaggcgctgactcctctcctccctccctggctgtgcaggtcccgcctgtctgtcacgctgatgcccgtgcagctgtctgagcacccggaatggaatgagtctatgcactccctccggatcagtgtggggggccttcctgtgctggcgtccatgaccaaggccgcggacccccgcttccgcccccgctggaaggtgatcctgacgttctttgtgggtgctgccatcctctggctgctctgctcccaccgcccggcccccggcaggccccccacccacaatgcacacaactggaggctcggccaggcgcccgccaactggtacaatgacacctaccccctgtctcccccacaaaggacaccggctgggattcggtatcgaatcgcagttatcgcagacctggacacagagtcaagggcccaagaggaaaacacctggttcagttacctgaaaaagggctacctgaccctgtcagacagtggggacaaggtggccgtggaatgggacaaagaccatggggtcctggagtcccacctggcggagaaggggagaggcatggagctatccgacctgattgttttcaatgggaaactctactccgtggatgaccggacgggggtcgtctaccagatcgaaggcagcaaagccgtgccctgggtgattctgtccgacggcgacggcaccgtggagaaaggtaactggaccctgaggttttatggaggtgtgggtggggagtgggagctcagggcctggctggcaaacacaggcacatggtaaagaattcacacacctagaagccagggatgtggtgagggagcacgtctccctcttgctctgacctgcggcccccttacccttagccaggagcatagcctactgtcacttcacactgagcagtttctaggaggaagagcttatcgctagaggcctgtgggagacgtggggaatctctccaagatgttttcggctgtatccgctgctgctctcggagcctctgggaacacgccctttttacaccttcaaaggttctcaagaccacgctaggatgtgcctaccaggagccttgccctgaaagccatggggacagatggttctcactcaaaacccagactttggtttcatgttactgaagggtaaactgctgcccagccctcctctccctgaaccccagcagggggagggcatgtgtgagctgtgccaacccccctggagtggagcctgatgccagcctttttgttcaccagaaaggaggtgctgcttccacagggcagggacaggctttggggaggcacggtggccagtgtcttcctccagagaggagctggggaggtgccaaggacgctggcagaggagctgccagctcctctgagctccgtttgtctgagctggcggtggatccccaccttctagaaagctaaatgccaccgcaggctttctgaggtcaaggaggaactgcactaaacaacggcccacacagttcatggccggccaggccctccccacacccggtgataaaatcttcagtgtttgcccagggctgggcaggggacggacctcacctgaggtatcaactgaggcgttggtcgcctacttcctgcctcgcacttgtcagggttttaggcaaccctagtgtagttctgtccttcccttggatagggaggaaagcggggtacagggagctctggggttgggctgtactcaggtcatccgggagggatggaagaccctggcatggagaatgtctcatcgcacaagcagaccaggagaccgcaggtccctccagggccctgcagagaagctactacagtctcgggcagttcagagggcacagctccagctctcaggggcaagaagctggcaaaatttggggaaagcaaacagaagttagaacaccagggtgtagggatgataagaatacacggtagaacacaggctcccacacagcctgaactgtggcagccttcaaagttaggcttattttaaataaatcagtttaaaaaaagcaaaaacagcttctgaacaaatccattgaaaggaagactgggagccccagcaccaagcccctctccggccactggagttagagtgatgctcggtgagacctcaggtgtggccgagggcagcacccgcactcccctgggacacacgtgccccttcagagtgctgtcacttttcagcttttctagcctttaaggataatcctaaggttggggttacagcttgaggagcggggagttggggatcagaggagacttgagagtggtcactgaaccttcaggagctgaggggagggcagccggccggccctgggcgggagccaggtgcgggccggaggggaggcaggtgtggagccgggcgggagtcaggtgcggggtctaaggacaggtgcggggccgggtgggagccaggtgcaggggtgcggcgggagctgggtgcggggcctaaggacactctgcttggccaggcttcaaggccgaatggctggcagtgaaggacgagcgtctgtacgtgggcggcctgggcaaggagtggacgaccactacgggtgatgtggtgaacgagaacccggagtgggtgaaggtggtgggctacaagggcagcgtggaccacgagaactgggtgtccaactacaacgccctgcgggctgctgccggcatccagccgccaggtaagagacgcctgccccagcccacagtgtggcttccacagcccagtcgctgggaacctgcttcctcctgcatttgcctccaaaaccgttttttattttagacatagtcttgctctgtcaccccggttagagtgcagtggcacgatctcagctcactgcaacctccacctcctgggttcaaacgatttttctgcctcagcctccccagtagctgggactacaggtgtgcaccaccacgcccagctaattgtatttttagtggagacagggtttcaccatgttgcccaggatggtctcgaactcctgacttcgggtgatctggtgatccacctgcctcggcctcccaaagtgctggcattacgggcgcgagccaccacacccagcctccaaggccgtttcttgcttgattttagtgattttggttgcctctgatggtggcttccctcaggccagtggattctggcggcaaatgagctgttttctctttcctgccccactcgccctggcagctggcctcctagcatcccagcctgtggcccggttgtctgcactggtgggtcaggccctgtccctacccctggcgctgggccgtggtgttccacaccaacatagggccagcagcactttggcctccccctagtcaggatggagtaggccttaggtgcctgaggttcaggaggaagtgactgagtctgtgcctggggccccagacgctgtctcctcttccttgcagcctcaaggcagcctccccgccgatgcctccccacatccaatgggggtttgttccctttccttgggttcctctggatcagccccgaggaggctccgatgagcccaaatccctgatgcagctcacaggcagctctcggtggaacgggaggaggcttcaagggagcgggtgctgcaggttccctgcatgggataaccgagaacacagaaccttccagaatcctggagagcagggaggggcgggttgctgtgagctggtgggccctggtggtcgcagccccttgcctgctactgcgcacggcctgatggtgtggggctgggcacaccaggccgcatgcgtgtctgacccgcggtcacccggttcccaggctacctcatccatgagtctgcctgctggagtgacacgctgcagcgctggttcttcctgccgcgccgcgccagccaggagcgctacagcgagaaggacgacgagcgcaagggcgccaacctgctgctgagcgcctcccctgacttcggcgacatcgctgtgagccacgtcggggcggtggtccccactcacggcttctcgtccttcaagttcatccccaacaccgacgaccagatcattgtggccctcaaatccgaggaggacagcggcagagtcgcctcctacatcatggccttcacgctggacgggcgcttcctgttgccggagaccaagatcggaagcgtgaaatacgaaggcatcgagttcatttaactcaaaacggaaacactgagcaaggccatcaggactcagcttttataaaaacaagaggagtgcacttttgttttgttttgttctttttggaactgtgcctgggttggaggtctggacagggagcccagtcccgggccccatagtggtgcgggcactggacccccgggccccacggaggccgcggtctgaactgctttccatgctgccatctggtggtgatttcggtcacttcaggcattgactcaaggcctgcctaactggctgggtcgtttcttccatccgacctcgtttcttttctttcctatgttcttttgttcagtgaatatccctagagctcctaccatatgtcaggccctatgcctcaccctgagaacgcagtgagcatgaggtggacctgtttgctgggaaccccaggtcacccccttttcttcctactctgtgcctggagcatcatgtccacccctgcagatccttggaaaagaaaatgtttatgttgcagggtattgcatggtcacgagtgagggcaggcccctggggacacatctgcccacagctgcacaggccagggcgcaggcacatctgttggttctcaggcctcagataaaaccatctccgcatcatatggccagtgaccgctttctcccttcaagaaaattctgtggctgtgcagtactttgaagttttaattattaacctgctttaattaaagcagtttcctttcttataaagtggaatcaccaaatcttatcacacagagcacagtcctgtagttacccagcccgctccagcagtgcgggagattgtaaggaagcggtggcggctggtgaagcaagtctcacatgtcggcgttcttggccaatggatacaaagataaagaaaatgttgcctttttctaggaactgtcagaaatcctcatgcctttcaagacttctgtgaatgacttgaattttttattccctgcctagggtctgtgaacgaggcctgtctcttccctggggtttctttccatggcctttatttctcctctt

SEQ ID NO: 7463 - DNA, 6000 bp, Homo sapiens
atcgcttgagcctggaaggtcagggctgcagtgagccgagatggcaccactgcactccggcctgggtgacagagtgggaccctgtctcttaaaaagaaaactttctcagtagggcatgcaggagagctccagcagggtggcgttgtccccacagtcagaggagagaagggagaagcatgtggccctgtttctcacggaccattcggtgctctgtggaaggaactgggagcctctcccgcctcccaggagacagcagtggtgccagccacggcggaggcaaaagcagtggtgaggaggttccgcctgccggaggctgtaccagggcctggctgtgttgccagcccagacacccgggtaccaggagccagatagcctgggattccccctcacattcgcaaagatcagaccatgaggtcattggtcagctgtgtgctcaagattgggctgtaaagccaagcccttcatgagtaatactttctcatggcagcatcaagggaaagtcagaaatcagctcttagaaaagttgcctaaaagcagggactagctttgaagtcacgtcagcggccattgttctcacctcttgcgagtgtggcgccctgggatcccgagcctcctcctgaacttggggcggcacttgagtggatgaggcactccgtccgtgggatgccgggagtgtgtttaaaagtcacttcgtctgggggccgtctgatgtgactgtctccacctttactgatcacaaagtgcacagagggagccatggcgggtccaagccggcagcccgcagagccaccttgccgactcttggggtccggacggcagcgtcgctggcctccccgcccgtccgtgctggcctccggtctggggtggacgccagccttgaatgtggggttggggatgcattagatgttgccccttcccctccaggtcaccacctccaagtccccgagcatgtctgactccaaagaccgagccctgagctgtggccttggcagccttggggcctccatgcccgactagacagcagggaggaaagtctgagggatccgcctccgccgtggctgagttgtggcctctgtcacttgttaggaaggtgtgtgtttttgtgggtgccaggagctgggaacctgcgtcagcacctggcagtgaggagccgctgggacagcataaacacagcattcctggcaccacgtgccaatgatggtcacgggtcgtggtttcttgtgactggagatgattttttttttgagatggagtctcgctctgtcgcccaggctggagtgcagtggcacgatattggctcactacagcctccacctcccaagttcaagcaattctcccacctcagcctctgagtagccgagaatacaggcgcggcaccacacccggctaattttgtatttttgttgagacagggttttgccaggatggtgttgaactcctgacctcaagtgatcctcctgcctcggcctctcaaagtgctgggattaccggagtgagccatcatgcctggcctggaggcgatttttgaagccaaatgagggaggatggttgccctgcggcagcaccctctgctgggtgttcctgggggcgtgcgtggagccatcccccttggccgtggccgcctctactgtggcttagccgggtgtgttgctggccttctaggagaagaaattcggatgccagagatctcctccctcccgaggagctcagtcgtgagctggcgggggcactccccatacagggcccctttctgtctttgcgcaacctgtgttcatgttgagagtggaagcggctggcagcactcggacgtttttcagttgctgattttgaagttttgtgttagttttactgcagccaagaggcactgccggcaaactgtccctgacgcaaagatgggctccgttgtggagaaggctgtgtgcattgcccgcagacagctgcagagcgccgggcatgaaggctgtgagtgcagcccttggctggtcagctgctgcaggcggcggggagccaggacactcgcacagccttcctgcaggtgcccgtgcaatccagcaacacttgcagaacgctgagaggcgtggcgttcccgggaggttctccaaagggacctctggggcagctcccggctcaccgtgctcacttcccgtcccgcggctcctgcacccacacagagctccccctggagccccagactggtcattcacggcctgaggaactgaattttgctcctgctgagaaaatgactgctctgaggcaacttgtcctatgacaacggagatttcctttgttttgctatattttcccttcccctccccagcctccctttcttcacttagtaatccattggacaggccctcttgattgacagttatggcttgtttccgcatggggcctctgccgaagcctaatcgtgtgatggagaccagtatgttttcacctgctcaggcgggtggccatacgcttatagaattggtcacttgggccaggcgcggtggctcacgcatgtaatcccagcactttgggagaatgaggcgggtggatcacttgaggtcaggagtttgagaccagcctggccaacgtggtgaaaccctgtctctactaaagatacaaaaatcagccaggcattgtggcaggttcctgtaattccagctacaggaggctgaggcatgaaaattgcttgaacctgggaggcagaggttgcagtgagccgaaattgtgccactgcactccagcctgggcgacacagcaggagtccatcttaaaaaaaagttgaatttgttactttaactaaactgtagagcctagcgtctgctttctgttaactagtttattacccagtagggtggtaccttccctctacagtttgtctaggactctcaactccaaactgacaacagtgtaactgtctgtttccctagactaacatatcaggctgctcttagaaggctggtagaaagctaagctaattgtccccattttcttctcctatgggagctggtgaggccccatctgctgctctgaactggactctgtgtgaattcttcctcagacagcttcacctgagtccccctcggctgcagcgcctgtctcagtggacatatggccttgctgggacagggaggtggtgatggcggtggtggtggtggtgacggaggtgacgacgatgatggaggtgatggcagtgacggtggaggtgacggtgatgtaggtgatgattatggaggtggtggcaatgatgcagcgatggtggtggggatggagatggtggtggtgatgacgataatggaggtgatggcaatgatggtagggttggcagtgatggtggtgatggtagtggtgatggtgatgatgatggtgatggtggtagggatggagatggtggtgatgatagcggtgatggtgatgatggtgacggtgatgatgatggtgatggtggtagggatggagatggtgatgatggtgacggtgatgatgatggtgatggtggtagggatggagatggtgatgatggtgatggtgatggtgatgatggtgatgttggtggtagggatggagatgatggtgatgatggtgatgttgatggtggtagggatggagatgatggtgatgatagcggtgatggtggtggtggtggtggaggtgacggtgatgacggtgatgatggaggtgatggtaatggaggggactgtgggagagtgggtcggtgggctcgtgccgccatctggtggtaatgactgagtattacatggagtctagttctccctgcccccagttaggtgtaaatcgcattttgacatatttttgttgtgaatacacatgaaaaatgacagttttctgtgctacttagctgctaatgatcgaacaggaaaaagaaactgctttgactctgccatttggctggaaaatatggtaacagtccagggagagctgccccgctcctggagctgcttggcagtgcagttccctaactgtgccctgctcccagcccaggatccggttgtggccgtggctgaggatggccgggagaagccgaagctgccgaaggagagagaggagctggagcaggcccagatcaaggggcccgtggatgtgcctggacgggaagatggcaaggaggcaccggaggaggcacagctcgatcgccctgggcaaggtgctgggcactggctgggggtgcggatggggaagggcggccccgggtcctcctttgcaggctggacaccctgcggggtggctctcagggctgtgtgtatctttttcccttcagcccagcctaagttctggtcctttttgttttctctgtctttcaattcagatgaatgtcctgcccctcccagagcaacttgtttgcagctgcccctgttgaactttagcatcagctgtgcttggccaggcagcagggaggccggcaggggaggtggtatctgttggcctgtgtcacactgttgggagccagaacccagggaagaacccagttctaattccctgggaagggaaggaggggcctcagcctgaccccatctgtcccccgtgcccttgcagggattgctgtgcctgtgggcgaggcccaccgccacgagcctcctgttcctcacgacaaggtggtggtagatgaaggccaagaccgagaggtgccagaagagaacaaacctccatccagacacgcgggcggaaaggctccaggggtccagggccagatggcgccgcctctgcccgactcagaaagagagaaacaagagccggagcagggagaggttgggaagaggcctggacaggcccaggccttggaggaggcgggtgatcttcctgaagatccccagaaagttccagaagcagatggtcagccagctgtccagcctgcaaaggaggacctggggccaggagacaggggcctgcatcctcggccccaggcagtgctgtctgagcagcagaacggcctggcggtgggtggaggggaaaaggccaaggggggaccgccgccaggcaacgccgccggggacacagggcagcccgcagaggacagcgaccacggtgggtgtcagcctgggctcgtgtcggaagacactcccctcttgggctggggaggctgggcaggggcagcagaatcgatggttcctccctcagtccccagtctctctccctgcaccagattagcatgcaaatggagcgggccccggcagctggtggggacaggaagaggctggtggctgacagctactgtaatatctgtcacacagttgtttgccagaccactaaatgtcaggtgccgcgctgtgctcgtgtgtctgggcgcacacggggggcggcgcggggggcgcctgacaggtaacacgttgttaagtgcccgtctaagagctgcttaggacagttcttgcattttaattgcgaaggcagttaccattggctcattgccacaagcctatgaggttgttaaatatttttttattgcttcgctagtaatcatcaggttgaatataaactgtgctgacgggggtgtcactttagaaacatctgccacttccttttgtcccgcccttgccttctgtcccccaaccccccaaaccctcccttgactttcctgcaaaaccttctgagtcttcaccgtgtgtgcaggtgggaagcctcccctcccagcggagaagccggctccagggcctgggctgccgcccgagcctcgcgagcagagggacgtggagcgagcgggtggaaaccaggcggccagccagctggagggtaaggcctccgccctacagccgcctgcctcaggcccagggagcggcagccccctcccccagccctggggtgatgcccaggtcatcctcgggagccctgccaggccccccttctctttccagccgcctgctgagcagacccctcggagagctttctgctcccttcccatcagcagcttgctttctgggaaccttttatctgccttactcccctttaaacacctgcggcatcgtcacatggcttgtgattaccgttttatctcccttg

SEQ ID NO: 7464 - DNA, 6000 bp, Homo sapiens
gttgttaatcttaactttagtcaccaaggagagtttccaagacaaaactccaattcaggtgcttacctaggaatagggtccaggctcaagactgctctttaccattttagaaggagaaaaaaaactcagactcaccttccctgctggaagccagatgaaattccagaaaggagttgcctcccctccatcgtcatggaggcaggaaaacgcaccttctttgttgggagtaagtaaaactgcagacaaagaggtgtacagcaaaataaactttagatctcaaccaaattttgggacatcagggattctctggagtggggtgctcccaggcctcagcaaattgtcctgtttgagcaataaaaatagcccaagctggtaccaagcactgatagatttgtcaaaggtcagggccacctccactgagtcacttcctttggctgccagcttgtaaaccaaaaccagctctcaatcaatttggaagtttattttgccaaggttaaggacatgcttgggagggaggtctgtgcctttatctaaagatgattttgagggcttcaatatttaaaagggaggagcgggctggaggggaaagagggagaacatggtcattactgaatccacacattgcacaaatagaaaaaggaacaggcaggggaatagtcaattatgtatttgcctcctgctgtgtaaatcagcacttcagtaagataaggtgaggacagagcagctacctgtggggacatttaaccttttatctgtagctatctgcttagggacatagagaaaggcagtttcttgcatgactcagctttttgcttaattttttccttttggcatagtgaattgagctcccacggtttttgttgttttgtacataagtggagagttcatttgggccagggccccgagttattttcttttcacaaatataccctttagagttcagaggaaaggctgggattagagccttctgtgagcactattcatgggattacatgagggagtggctgtgaaaagagggccccggactaagccctgggcacctgaacaagtgagaggtcaggaaggggagaaaaatccagcaaaggaaccccagaggacccggccagtgagctaaaaagaaaagtgcagaagagtgcagggaaatggtaaagaaaagaaagctttccacaagacaggaccgatcagctgagccaactgctgctgagtacagtgatgagagctgaagtctctcgcccgaaaggcaataaggcgggagggggaaacctgagggcagcgggttctctcttgggagcgggaacacggaaccatgggcagcgaggcaaatgcagcctggggagaagctctgagtaacggacgtgcgaggatgatgcttgtgcaagaaggaaatgaccgctgtcccggctccgcgggagacgaaccccggcttcccgccctcagggactagctctccagggaactgggacggtcagtgccggtcgaggcagctcctcgctgaaggaaggagcaggggacagggaagcggaatggggagcgctaggcctccaactacgtccatctggccatgtttgaagagccacaaaatggaggagggaacccctcagagcgtgccagagcggagactgctctccgtcgcagtcggggcgcttccggcagggcgcccactcccagccgagcgccctccgcctgctcctccaggattcctcttcgccctttctggggccgccccggggcgctctcagcaggatggccaacaccttccctccatccctacaccccgccgccccctggcccgtggccgcgctcggctcccgcactgctcactccaccccctacatcccagcccgctgccagagccggggagagggcgggggccgcgtgggcgaggccgtgaacagcggctgtcacgtgggccgcccaggccaataggggtgaggctttgggtcgagctcagtcctcccccggcgcctccgactggcagtgggactcagcgggcgtggaggtcgcggctgagcgagcgagccctgggcgagtgaattgtggctgtgggttgacggtggagacaccccccggagggaggcggagggaagggaggcgaggcctgcacctgcatgcttcccgcctcccactccccagcgcccccggaccgtgcagttctctgcaggaccaggccatggagctcgaagtccggcgggtccgacaggcgttcctgtccggccggtcgcgacctctgcggtttcggctgcagcagctggaggccctgcggaggatggtgcaggagcgcgagaaggatatcctgacggccatcgccgccgacctgtgcaaggtacgcacgcgtgcggcggggtgtggggaaactggcccccgccgcgcacttgtggactggagcttcggctgggttttgtttttgcttttacatttcggattactccagcactgggagtatgatctccagcgatacagataaagccaaagttcccgcagactttcccggtcctctagcactcagaagggcatatgttacctagcttctgtggttccttttctgccttttctattcttgtccatttttctgttacatttgtggttcttttccttatgatgtgtaggaactctttgtatattctggatttaagtaatttgtcagtttactgtattgtggatactttctttgggtttctttcttttctttttttttaagccaaatttagcagtgggagagttgcataccaacttgaataacagtaatattaataagttctgaataacccattaccatcagaccagcctctgggtctatttcttgtcttttagctttgtttatggtttctttgttagacagagttttgtttttaagttatagttgcagtcaaatttttcttcataactttgtgtattattaggtcagttctcctcaaattttaatgcactaacagtcacctggggatcttgttaaaatgcagattatggttcagtatgtcgggggtgggatctgagattccaagtttctaacaaggtccccagtgatatcatatgcctcttttggaagcacgctttgtgtagcaaagtttttattgttttgatttgtgtgtgtggtttttttgtttgtttgcttgttttgttttgcttttaagacggagtctcactgtgtctcccaggctggagtgcagtggtgcgatctcggctcactgcaacctccatctcttgggttcaagcgattctcttgcctcagcctcctcagtagctgggattacaggcgtgcgccaccacacccggctcatttttgtatttttagtagagatggagtttcaccatgttgaccaagctggtcctgaactcctggcctcaagtgatccgcctgcctgggcctcccaaagtgctgggattacaggtgtgagccacccccccggcctgtggtagcaaagttttaagtagtgttttagggtgtaagtatattcctgtatgtttgctgataatattgttactttttttttttttaaacggacagggtctccctttgttacccaggctgaagtgcagtgactcaatcataactcactgcagcctccaactcctaggctcaagcagtcctcctgccccaacctcccagatactaggactacaggcatgaggctatcatcttgtttttgtttttgtttttgttttttttcttgaggcggagtctcgctctttctcccaggccggactgcagtggtgctcttttggctcactgcaagctccacctcccgggttcacaccattctcctgcctcagcctcccaagtagctgggactacaggcgcccgccaccgtgcccggctaattttttgtatttttagtagagacggggtttcactgtgttagccaggatggtctccatctcctgaccttgtgatccgcccgcctcagcctcccaaagtgctgggattatagacgtgagccaccgtgcctggcctatcatcttgtttttactttttatctgcattacatgtgtagcaaggctttgctctgggtttgtgatttttcccttccccacaatcccctcaatcaaagattattttaataagtcgtaatagtggtagtactagtagcaactatgaaatttcttttagagtacttttggtggaaaggggctgtgatattaaataaacaagatggggtaattaagattccaaaaagtctgtgtcatttaatcatacttgaagaactaaatgtttgtgtgagtatgtgtgtatataggatgactcaagaaatacaataagttccctgtcctcaagagttttaaacttgactgggaaacagaacatacacagatgaaatgtgagtgatagttataaaccagtgtgttaaggatgaatattaagatgcaggtcaaaagcatgattgctgtaatatataaagtgtgttcagagcagacctttattgctcaaggaaatcttcctgaaagaggtaatatttaagcctggcttttaaagggtgtggattactaaagaaggatttactaatggtattcgactagtgttactactccctgaaataatctttgatttttttaaaagaaatatattagagaattagcaagcccttaccaggggcgtgaagggtgcaaaaggagtctgaatggcaaacagctagtctgataatgccagttgttgtcactacaggtgtacctggtgtgagtgttctgacattcagggccaagtgtatcatacttactctgcaagattaactgtgattctcttataacagagtgaattcaatgtgtacagtcaggaagtcattactgtccttggggaaattgattttatgcttgagaatcttcctgaatgggttactgctaaaccagttaagaagaacgtgctcaccatgctggatgaggcctatattcagccacagcctctgggagtggtgctgataatcggagcttggaattaccccttcgttctcaccattcagccactgataggagccatcgctgcaggtctggtgccaccttatgtctatatacctttttagggaggcttattttctcatattaattggaaattaaggatagtggctaattaaatacatttacttggtgatttgcctttgtttacaccaccagtgtactgagaattcatacataccatacatatttttaaatgggctgctgaggagatttgtgtggctatgttttgaagcacctggggaatgaacctgtgggagtgtaaagatgtgtgagtcagcaggcccaggagtttggagtcaggcatccatgttctaatatggtttcagttgctggctctggcttcggatgaaccatttgattctgtctgaccagtttcttcattcaaataaagactatgagagtaatgctagcttgggtatatagcaaatgccaggagattaatttctcactttgcaggatccagatagagagatgtatgttgaaatggctcacttgcccaataattccagggcagagaggacaatctaagggcagaagtgggagaaaagcgatagaaagctggaggagtgggaaaggctgctggaacccattgtcagtgacctgaagatgaggacagctaaggagttagccttagaagagaaagtgagatgagctcttatgctaattatgaggatatgcagcattgagagctgcagaaataattgggagtacctagcctgttcttcccactgaacatcattttggtagctattaaagttaaatattagatgatactgttctactttttactttatttaggaaatgctgtgattataaagccttctgaactgagtgaaaatacagccaagatcttggcaaagcttctccctcagtatttagaccaggtaagaatttcttgactcatctccaacatatgtgtttactgtggaaaacacacattttattttcttgctattgcatgttattgctggccggggacccaattgcagtctctttaagccttcaacagttggcttagcaaaagaagttcggttccaaaatacacggagtgta

SEQ ID NO: 7465 - DNA, 6000 bp, Homo sapiens
ttcaggctatgacaatatcagagttctcttttatttccagctctgtgagcctgaatattgaatgaatagcaaacaaggtcagagtcagtggggagggaagagaagaagcaggccatacagagtttgatacttgtttgtgtgtggtttttgttttgtttgtttgtttggttggttttggtcatgcctcaagctagtgcctctaccatgtctggcattatgacaacataaatttatattttaaacattttttcaggttcacaagggagttcatggatttgttaaagataagactggaaagccaatctctaaagcagtcattgtacttaatgaaggaataaaggtacaaacaaaagagggaggttatttccatgtactcttagcgccaggtgtccataacattattgccatcgctgatgggtaccagcaacaacattcacaggtaagaaactcaaattgagtagcatcatgtaaatttttattcttaataatacttctgttttattttgaaactcttgttagaaatcttgaagggaataaagaaattaaaagtgtgactgcctcttgattatgatatcttgttatccttgtaccccttgctaacaaaagggaaaattttctagcattttgtatactttagatggcaatgcatcatctccttagtttgctatatggggcctaataatatagcagggatacagtacaccttaagcagaatttgtcatgattcttacactttctccttctaggtctttgtgcatcatgatgcagctagttctgtggtgatagtctttgacacagataaccggatatttggtttgccaagggagcttgtggtaactgtatcaggtaaagacattttgatttttagtagtaaaagttaaaaacaatcttgacatttcaatatgagagtgggtcacctctctcatattgatcctgaaactaatcacttgtcttctaatgtctccttatctaaatgtgattttcctggacctctgttctcgcatatgttctcctggcttgcctttctctgccgagaccagctccatcaaggagaccctaacccagcggtgctagagaaattaaagacacacacagaaatatagaggtgtcaagtgggaaatcaggggtctcatagccttcagcgctgagaacctccaacagagatttacccaggtgtttattaacagcaagccagtcattagcattgtttctatagatattatattagctgaaagtatcctttatgggaaacgaagggatgggccaaaataaagggatgggttgggctagttatctgcagcaggagcatgtccttaaggcacagatcactcatgctattgtttgtggtttaagaacgcctttaagcagttttccgccctgggcgggccaggtgttccttgccttcattccggtaaacccacaaccttctagtgtggatgtcatggccatcatgaacatgtcacagtgctgcagagattttgtttatggccagttttggggccagtttatggccatattttggggggcctgttcccaacacttctctttcttcaggtctatactcaaacgtcacctccacggagaggctttccctgatcaccctagctacccctgtcactatctctatcctgctttttttcattatagcactttcataacattatatatttgttcatgtatttgtctatattcaatctctcccactaaaacataagttctgagagagggaggaatctacctgtatcctccaagcctagaacgatggttagcacgcagtgggtcttaatgaagagttgttgaatgaatgaatgatttgctttatattaaagtcataagttcctaggactttgacttatattagttccgctttttcaagatccaggaaagaggaaatgtttgtttacgctggaactaattcatgtcattgcttggattactgaaaggttaggaaggaaaaaaatgtggtaaaatgaatactctgctatactttatctatttgatacaaacagccttagtttatttctaagtgcagcttggatgaggcagaataaccaagttttatcacagggttcctgtgggagagacccttagttgagagaaagtagtatattggaaacatggcccaatcatagatcctgtgtggtgtgtttaaagggttcttagcttgtctcagataaagtgtaaataacttagtggttaaaaacacaggaggtagaattcagccatggtttaaatctggctctgtcacccattagctattgtgaacttagtttttattacttttagtttctaacacttttattttgataaccttgtacaaatttaaaataaacaaggagatttggatgaaatgaaagtttactggaaaggaaaagtataatagaagtcataaaaagcaggttgcagaacagtagacacagtataatttcattatggtaaaagaaaaaaaatacatgtacgtgcatatgcataaagaaagatctggagccaggcatggtggctcacgcctgtaataccagcactttgggaggccgaggcaggtggatcacttgaagtcaggagttctagactagcctgggcaacatggcaaaaccctatctctagcaaaaataaaaaaaaattagccaggtgtggtggcatgcacctgtggtactacttgggaggctgaggtgggaggattacacacacacacaaaagatcttataactaaaaatgatctctgggtaatggaaatgtaaatataggaggttttttggttttggcttttgttagtttgcttatctgtatttttaaactttgtatattgtacatatactgcttctataataataaaggttgttcttaagtgcatgaaatagaaataaaataaatgaggggtatattattaaaagttccattgtaagcggctgcttattaatatccttaaagtataatatcacccacatgatggtttttgtttgtcaggtgctactatgtcggcattgatcctaacagcttgcattatttggtgcatctgctcaatcaagtctaatagacacaaggatggctttcatcggctcaggcagcatcatgatgagtatgaagatgaaattcgcatgatgtctaccggctccaagaagtccctcctaagccatgagttccaggatgaaacagacactgaagaggaaacattatattctagcaaacattgaaaaacacattttgcatatctcccagcataagtaccaagcaaaattacagttcctcttgggagaacactgcattaagaagagagactctcttgcttcttcaaagagctttgggaaattaaattgctaaatttgtattctctgtgaatttcactggcagttttgaacttcccttccttaaagtactctaaacctttaaaaaaaaatctgatttatgcagcagagatgggacagccactttttctttttaatttaagatgagctatttggagcttatgtaataatggcataaagccaactagaggatgttgtattttgcacatcagatgtttactagtggctttagtatttttctttgttttaaatggccaaaagaatccagaaacattaaggcagggacagcagtcagaatcgacataaagctttaaaaactcaaggttttttcaacctactgaggagtacttttctctagttgttaaatagctggagtttttcttattcaggtttaatggaggttgaattgatttttaaacacatataacagtaggaaatgaataaatgggcttctgcatttggctttctacctgttccaaggctagatcggaactggtagactacgctgtaagcaggatttcactacctctcttaaggtttagcaaacttctaaatagcccattttaagggagaacttactaactttattgtgaaaggtctaaatgcccacttgaatgaagctgagagagagatctagcaaaagctaaaactcatgttgtctatctttgaacttggtaaaaacccacaggtgctgctgcttatatctgtgaagcactagcttattctaggaatgcctgattctttaatattgcctaaatcggaacctttttctatgttgcacacatggttttcagatgacccagccatctacaagatctgaattctactgaaaatatctagaaatgtggaagagacctacttgcacattcttaacctgtatttgaacacaaaatatctatacttcatgctccagcccaagcctataccctgtaatagcatactattattgaaatcgcttgaccggtcttgttcacataggcctctgggagtgatttggttctttgccctaatgtttcatttgacggtctctttttgatcaaccaatttttctaaaagttcagtcgaaagcttttaagtatagcttcctcccttgaaaaaaaatgtaaactatgactgctgagtgataaaacactgtggtgtgaaagtgtcatcttcactgccaatcaggcaaagaccggaaagatttgcattttattatgtctgtcttatcatgcaatggaaatgatgctttttgtaagtatgcatcttaccaatgatgtaacggtttaatacctttgaatgttttaataaccaagttgctgctgaacttatactaaatcaggggaccaaaaaacttgctcttatcttctcaaattgtattctatatccattaatgtatcagttatcccaaagccttcaggtggaggggtttaccaccttcctaggtcgttcaaccaggttttgtgaggaatgcattcaaagtggctttataaaagaagattttctttagcaagaataatgaggtcatgtcatttgttaataagtatctgtgataaatccgtggttcaaggttaagccattctggtattctggtattagcaactgtaaattctgccacctcatacatggaacagagcttgtgggatgctaatagttagtgaagtatacatgatttaatttctaataatctttatgttttctttaaggatggtggtgtattgctctttttcagctttatttttaagagtacagtcaggaaaccaacaaggggcctaagagtggctgcccctgcttgggacattacagcaagtgaaacaaagttaatgtgacaagctttgctttgttatcattggtcttcactagaggataccttttacatgtacttctctcttggatcaaatatgtctttaactgtacatctcagtggctggaggccatgccttttaagcatgtgtaaaatttttaaagaaatgaacatacacatagttattttagtaatatttcctgaaagaaaaaccaaattctgctataagtcttgatcttcaatgaacttttaaataatgcatttagctggaaaacaagactttcccagcttgtattacctagaagcgtgaatgtataggatacctgactactaagactatattctcagccctgccctgtcttttatttgcgggtctaatctaatattagaatatattaaccgcttaaggcattgaagccatatgggatggggaatgcatttcttcagtgtttctccgagagactttccatttccttggagttatggcggcaagtaagtatcatagtattaagaaatttgcctaaatctgagttgtgcctttctttactcacaaggcatgggctttgtcctggtgatcagtttgtaagccttcttccttcccagctccttaataaaagcaaagtgattgagtaggtaatgttcaaagtgtctgcctgtgtacatgtacttgtattgattatgtagttcagtaagatgtgcccaagtcatttcagaaagaaagacccttcagttttgatgcattttgctgaacacttgggtagtgagtgggatcctatccagttgaggaatgcttgcaatgctcattgaagggatttgctttgggactttgtcatcttccagaaaggaaacatattgtatatttggcccagtgtgattgattgctttatctttggtaacttttacttgaatgggatt

SEQ ID NO: 7466 - DNA, 6000 bp, Homo sapiens; identical to SEQ ID NO: 763

SEQ ID NO: 7467 - DNA, 6000 bp, Homo sapiens
cagggtttcgccatgttgtccaggctggtctcaaactcctgagctcagataatcctcctgcctcagcttcccaaagtgctaggattataggcgtgagccaccgcatccggcctatttatttttttgagacaagagtctcactcttgtcacccaggctggagtgcagtggcatgattttggctcactgcaacctcagcttcccgggttcaagcgattcttctgccttggcctcccgagtagctgggattacagatgtacactaccatgcccggctaattttgtatttttagtagagatggagtttcgccatgttggccaggctggtcttgaactcctgacctcaggtgatccacccaccttggcctcccaaaatgctgggattacaagcgtgagccaccgtgaccggccagattgctagctttttagtgagtagttacttgttttgtttttatttgtatattccagaacatctgtcatattgctttgaaaattacttatggtgccagacgtggtggctcatgcctgcaatcccagcactttgggaggccgaggtgggtggatcacctgaggtcaggagtttgagaccatcctggccaacatggtgaaaccctgtctctactaaaaatgcaagaaaattagctgggcatggtggtgcgcacctgtaatcccagctactcaagaggctgaggcgggagaattgcttgaacctgggaggcagaggttgcagtgagccaagatcacgccactgcactccagcctggtgacagagcaagactctgtctcaaaaagaaaaaaagcaattacttgtggtgtatgaatgaataaactaaagcctgtcactgagaaggtgaaggccttgggacagaaaaacaagagaagttcctcttgtgcttggaaagaaagaaggaaaaccagagagagcttctgtgatattcattgcccaaattttaggtggtgggaaggaagctcactgagacttttgcctaggaagaacatttttgtaccgttgtgttttacctaatttgcctccattccagtaatgttgcagcaacgagggaggaagtttttatccttagctggtgtgactggccataaagcagtttttttggatcagtagacagttttgattagtgttgcatcatgcattgacagaaaattagtttttcgctttgcagaatgtgttgcttgagaaacagaagaaatagatacaatatttcaatgtttggtattgtgtttttatttttcagttaaatccagatgtgaatgttttccaacggaaatttgtgaatgaagttagaagatgtgaagaaatggatcgaaagcttcgtatgtgcactttggtcttgtgtaatgttcctttaatgaatcatttgtcttagattagtgacattagtcctcttaatagaggaagaaaatgttataagagaaaagggaaaaatcttgcagttaagatgccaaggtgtatttctcgtatacgagtagattttgtggtctttgggctaagtagtgcttaatggaaacctcgtttgaaataacatgctgcaaactgaaaactggttgtttttttgtgagattttaataacaaaactacatgatagaattttgagaaataggacccagcacaccatcagtttttgtcagcagagccaccttttaatttgagctatttaagagggaagaaactggctgggcccggtggctcacacctgtaatcccagcactttgggaggctgaggcgggtggatcacgaggtcaggagatcgagaccatcctggctaacatggtaaaaccccgtctctactaaaaatacaaaaaattagctgggcgtggtggcaggcgcctgtaatcccagctactggggaggctgaggctggagaatggcatggacccgggaggcagagcttgcagtgagctgagatcgcaccactgcactccagcctgggcgacagagcgagactccgtctcaaaaaaaaaaaaagggaggaaactaacatttatctaagttctcttgagggctaggttgctcatatacattactttattcattctccacaacattccttcaagatgggtattatcttatttaataattgaggaaactaaagattagagaggcttaatgacttgccctagatcataaacagttatgatggaatcagtatttgaagccaggttgctctctctggctcaaaagtccatgatcttgccactctactaagccagcttatggttagctgataagtgaatttggtccccactataaaaaacagttgtagttgttacctgaaacactcttctcttctggtattttgtgtccttattacctgttctgctttttcatttttgttttttatgcttaaaactgacctgattgttttcaaatttaatgaacccctttagatctagagttgtctcactagtgtgttaagtgtcaaatattctattgcattatactcttcttcataactctgctttgccaataatatctataagcagaactgtcatactttggagtggcattcgcgtatggaggagaggtgtggccttgaaggccagtgttaagacctgaagaaggaaagaaggcagttgtgggatgaccaccctttggagtaactttagagaatgtgaggaaggagaaagagggatggggagaaaaaaggtgcttctttcatattaaaagatattatatcttttatatatatatataaagtatcttttttgaataaaactttttgtaaccaggtcttagatgttaattcttttccttaaataatggcaattacgagcatgtgcagttagacatgaatgttttgattctgtcattttaggatttgttgagaaagagataagaaaagctaacattccgattatggacaccggtgaaaacccagaggttcccttcccccgggacatgattgacttagaggtaaacacttctgggaaaaccagaaaagtttctttctacttgaacgcagaaattactttcctgagcagatagagagtaaagtaattcttgctaactttgtcagcattatctactgattgtaagtttcttgtaggtgggattttgatagataatatttgtacacatttatggtgtacatgtgatattttggtatatacatagaatgtgtatataccaagtcagggtatttggagtatccatcaccttgagtatttaccatttctatgtgttgggaacatttcaattcttctcttctagctattttgaaatatatacagtacattgctgttaactataggcaccctactctgctattgagcattagaacttatgccttctatctaactgtatgtttgtccacattaaccaacctctcttcatccccccacaaacccacacacccttcatagcctctggtatctatcattccactccctacctctatgagatcaacttttttagctcccacatatgagtgaaaacttgtattatttgtctgtgccctgcttatttcgcttaacataatgacctccagttctatccatgttgctgcaaatgacatgattttattctttttttatggccagaccatatgaatcccctcttttatggtgacaaacagcactcaaacagtattatatgccactaagtaaatgtttattggtttatcgaaaccttattggagtaagttatctactattttattttattttattttatttttgagacatagctatcacctaggctggactacagtgaccccatcttggctcactgcaacccctgcctcccaggctcaagcagttctagtacctcagcctccagagtagctgagacgatagctgtgtgccaacatgcctggctaatttttttgtattttttgtagagatgggattttcccatgttggccagcttgatctcgaactcctaacctcaagcaatctgcctgcctcagcctcccaaagtactgggattacaggtgtgagctaccacacctggcctatctactagttggttaatcttgcaatcttgcagactaaatgggcagccagtagacttctcagtaattattttatccatctgaaatcgcctgagaaagttaccaagtatacaatagaatgtgtaaacaaagaaagactatttttttgacttctacaatgacttagaaaggaaagacttttttttttttttttttttttttccagacagagtcttgctctctcacccagcctggagtgcagtggtgcgatcttggctcactgcaacctccgcctcccgggttcaagccattctcctgcctcagcctcccaggtagctgggattacaggcatgcaccactgcacccagctaatttttttttgtatttttagtagagacggggtttcgccatgtttggccaggctggtcttgaactcctgacctcagatgagccacccacctcagactccctaagtgctgggattacaggagtgagtcaccatgcccggccaggaaagactatttatttatttatgagatggagttttgctcttgttgcccaggctgaagtacagtggtgtgatcttggcttactgcaacctccacctcccgggttcaagtgattctcctgcttcagcctcccaagtagctgggactacagtcatgcgccagcacgcccagctaattttgtatttttagtagagacgtggtttcaccattttggtcaggctggtctcgaactcctgacctcaagtgatccacccgcctcggcccaggagagattattttaagcaaaaaaatttccataaagaaaattgctctagtaaaatcacagtatttgctaggcaagtccaagttctctttgaactatcggcttggcaacagttctgtgggatgaattcatttaatgtctttcagagcaaacatattgagcttagcttaatatattttcttatttcatctaggccaattttgagaagattgaaaatgaactgaaggaaatcaacacaaaccaggaagctctgaagagaaacttcctggaactgaccgaattaaaatttatacttcgcaaaactcagcaattttttgatgaggtcagactattgtttcttttagtatttgagcagctgatattatactcacacaagtgggccatatttttattccagtaattattttaatttgctagtttggaagcaatgccatttttgcaccctgttttagttacagaaatgtgagattatgttccatttttcatgcagtacacaaccagccatggttttgcattttttcacattttcttcaatttttcatctcaatatgaggaaaagaaccctgaagtagttgtataaacatagttagtataaatttttacattatatttatacttataaggtaagtatatgcttaaggttaaagctgaggaagcaaacatttggttatagacaaaattataacaaaggtttaatcaccaaaccttttgtcatcaaatttttatttcattgtctatgtttgcttataaaccttcgagcacatttttcagtacttcagatagcacacatcacactaatttttcaagagtttttcattgtatttattgtatggaaaatattggtaggatgcttgtttgaaacttctggattatcacataaacttagacgcattacctcagagggaaaaatgttagtaaagttcttgggttaaatatgtaggtgaggccaggcatggtggctcatgcgtgtagtccctgcactttgggaggccgaggcaggtggatcacctgaggtcaggagttcgagatcagcctggccaacatggtgaaacccggtctctactaaaaatacaaaaactagccgggtgaggtggtggttgcctgtaatcccagctactcgagaggctgaggcaggaaaatcatttgaacctgggaggtggacgttgcattgagctgagattgctccactgcactccagcctgggcgacagagtgagactctatctcaaaaaaaaaaaatgtaggctgggcgcggtggctcatgcctgtaatcccagcactttggg

SEQ ID NO: 7468 - DNA, 6000 bp, Homo sapiens
ttttttttgaagacagagtctcactctgttgcccaggctggagcacggtggtgcaatctcagttcaccgcaacctccacctcccaggttcaagcgattcttgtgtctcggcctccagagtagcacaccaccacacctggctaatttttttaaattatttatttatttaagtagagatggggtttcaccatgttggccaggctcatcttgaactcccggtctcaagtgatccactcgcctcggcttcccaaagtgctgtgagctaccatgcccggccttttttttttttttttttttttttttaagaggcagtgtttcattccgttaccccagctggtgtccagcacctgggttcaagggatctgcatcaccctgccaccagcctcctgagttgcaagctgccacacccggctcaggagtcagtttttcagctagcttctccaagacaaatatcattatccctttcatagttaaaagaatgtcactagtcagctgcaagtgcttttctgtttattgggcacagccatagaacagctttaattatgcccagtgtagggattcagaaagtgaatcagagaagcaaattggtccagggactgtttggtagtccagtgctaatagaactttctgtagtgatagaaatattccgtatttgagctgtggctctaaacaatagtcactagccatgtgtggcaactgggcacttcaagtgtggctagtgtgacagaggaactgaatatatatatatatatatatacatatatatatatatatatattttagacagagtcttgctctgttgcccaggctagagtgcagtggtgtgacctcagctcattgcagccacaacctactgggctcaagcaatcctcctaccccagcttcccaagtaactgggaccacaggcatgtaccaccatgcctggctgatttttttattgtttgtagagtcagggtttcaccacgttgcacaggctggtctcaaactcctgggctcacatgatccacccgcctcagcctcccaaagtgctgggattgcaggtgtgagccacctcagctggccctaagttttaattttcatagccacgtgtggctagtggttaccctatcggatagggcaagttggaagaagataggagcttgctcttgcccagacctcctggctcccagcacagtgtgctctgatgctctctctgccttttgtcacaccagtgcagtggacatcatggggaagacagggacctggcccagagaccttacctggtgtggaactcatctcctttccctccccctggcagggctgaaaaactgggtggtagctgaagacgtggtgtttaaacctgtggctgccccctggaacccggagcactggctacagcgcccacagctgactcggcaggtcctgggaaaggaggacctgacagctttttccttgggaagccccctaccccgctacctctacctggctagcaaccagactaatgcgtggggtcaccagcgcgggtaccgaatccagatccacagcccccttggcatacacatacccctggagagtgacatggagagggccctcagctgggggaggtgaggagggccctggcctgggtggaaggaaaggacagcccctcccctgccccagtccttggagacaaactcccttcccacggctaccattcatccctgtacctcccctcaaacccaagttagatacacggtgggaaatggtctcacacagaatcggatctaagggactcctgggccagtaaaggcacttgacatttcccaaaaccaccttcttatgattcctggccagataccagcttgtggtgacccagagaaaggaggaggagtcacagagcagtagcatctatcaccagaatgacatctggacacccacagttacctttgctgacttcatcaacaatgaaaccctcttaggagaggttggttgccctagggacataggaaagggacacctgtgggcatggcatcttggctgcccagcctctggccaaaggttagagggaatggctgatttccagttcgcagattcagaggccatggagttttctgatgaccaacacaggtcatccctcctggggtgagattagctctgggacactggctcccccctctccccgcacagctgcttacatggattgctccacgtgttgtatgggcatgaggctggggagagtggaagccaggctgagactggaggctgggattgtgactgaagggtggttctttgggtcacgcttccatagtcctccagctcctccttcttcttgcaggatctggtggcttgggtcacagccagcttcctgcacattccccatgccgaggacatcccaaacacagtgactctggggaacagagttggcttcttgctccgaccctataacttctttgatgaggacccctccatcttctcccctggcagtgtctactttgagaagggccaggatgctgggctctgcagcatcaatcctgtggcctgcctccccgacctggcagcctgtgtcccggacttaccccctttctcttaccacggcttctagtcctgagggtgtggcgggcggcgtggttaggcacatgtacttttccctgtttctactttctattctccgtgtttttatcacacctgctccccagattcccaccccctcaatgttcctctcacacgaaacccccatcagtccctttggttaattcttacttcctgttcatctctaaagtgttaaattataaaaatgatttttaaatattcaaagaaaaatatcacaaatcctactactcagaaataggtggtcacattacatcagacatctctttatgcatgtgcattcaaaaggaagagtagatagaattttgtaaaacagatgttgtatgtaatttataataaaaagtattagaggaattttacttgaatttattgtttgacctgttaagtatctagagtcctctggagaatactaaggagtctggccagggaaattagcgctgggggccagagggcaagggggatagacctggccaaggaatgtcatttggaaagctaaaggggcagggggtgggggtctttggaaggaaaacgatagtttgaagttacaggaaaatatctggccctgactaagtgggggactggggaagaagctgggctgaggtcaggagaggctgctctgcacagatcctgctccttcccagtgctgcattatcttgaaattttccttccccttccccctagccccaactctccccaactccaaccctgacccagaaagtagagtgatttggaggctggaagacaaaaccatgtaaggtctgtggaaatcacagctgttcagacccgcctccaaccccggccaccccgcccccttgccctagccttcctgtgtccttcccacccttagtcccaggcatctgactaccgggaacctcagccagagtccgggagccccccaccccgtccaggagccaacagagcccccgtcttgctggcgtgagaatacattgctctcctttggttgaatcagctgtccctcttcgtgggaaaatgaaccagaagacaatcctcgtgctcctcattctggccgtcatcaccatctttgccttggtttgtgtcctgctggtgggcaggggtggagatgggggtgaacccagccagcttccccattgcccctctgtatctcccagtgcccagccttggacacaccctggccagagccagctgtttgcagacctgagccgagaggagctgacggctgtgatgcgctttctgacccagcggctggggccagggctggtggatgcagcccaggcccggccctcggacaactgtgtcttctcagtggagttgcagctgcctcccaaggctgcagccctggctcacttggacagggggagccccccacctgcccgggaggcactggccatcgtcttctttggcaggcaaccccagcccaacgtgagtgagctggtggtggggccactgcctcacccctcctacatgcgggacgtgactgtggagcgtcatggaggccccctgccctatcaccgacgccccgtgctgttccaagagtacctggacatagaccagatgatcttcaacagagagctgccccaggcttctgggcttctccaccactgttgcttctacaagcaccggggacggaacctggtgacaatgaccacggctccccgtggtctgcaatcaggggaccgggccacctggtttggcctctactacaacatctcgggcgctgggttcttcctgcaccacgtgggcttggagctgctagtgaaccacaaggcccttgaccctgcccgctggactatccagaaggtgttctatcaaggccgctactacgacagcctggcccagctggaggcccagtttgaggccggcctggtgaatgtggtgctgatcccagacaatggcacaggtgggtcctggtccctgaagtcccctgtgcccccgggtccagctccccctctacagttctatccccaaggcccccgcttcagtgtccagggaagtcgagtggcctcctcactgtggactttctcctttggcctcggagcattcagtggcccaaggatctttgacgttcgcttccaaggagaaagactagtttatgagataagcctccaagaggccttggccatctatggtggaaattccccagcagcaatgacgacccgctatgtggatggaggctttggcatgggcaagtacaccacgcccctgacccgtggggtggactgcccctacttggccacctacgtggactggcacttccttttggagtcccaggcccccaagacaatacgtgatgccttttgtgtgtttgaacagaaccagggcctccccctgcggcgacaccactcagatctctactcgcactactttgggggtcttgcggaaacggtgctggtcgtcagatctatgtccaccttgctcaactatgactatgtgtgggatacggtcttccaccccagtggggccatagaaatacgattctatgccacgggctacatcagctcggcattcctctttggtgctactgggaagtacgggaaccaagtgtcagagcacaccctgggcacggtccacacccacagcgcccacttcaaggtggatctggatgtagcaggtaagacattttggtggggagaaggcttctggaagaagggctgaaaagttgtttccattagctttgggttttatgtagattatcccagaaaggaagacgtggatttttgtacttccccttttgctggatgggagagagttggctgctgagttttatttggatcttagctcactggctgggtgcaaagctgcagccttcctctacgtgacctcatccaaagatcttgggaaatggccgagctcagggaggaggcaggatttgggctaacagtgtccccattgccctcttctctcccttgtacttatatgggctctgctgctgggagcagccttctgtttgtcagctcagttctgtgtctggcctgtggtggtggtgttttggaggatctctttgcattctaccacgtccctggcatgtgcaggtcagtcattccaggttgtacatttcctttggagatggaccctcctccctgattttccttctttctctgggcacaattcacctaagtgtgaggggtcacatggatcccgtggagcattctggatagatcctggagtctggtcacagagagagccaaggctacatgatggcttggagtcttcatctttgtcttttcactgtctttccccacattgagtcagtcaccaggtgtttttttttggttttgttttattttgttttgtttctgttttgcacctgcagtatctcggcaggtcagactgtcatgccgtgcaggtgccagccctctctctgctgtttttgctcttgttgctctcagagccaagagccactctgcacccagagggcctcccatccacaccagcctgccctttactcagctctcac

SEQ ID NO: 7469 - DNA, 6000 bp, Homo sapiens
aagccaagttggagaaccggttgtgaaagaaattaaaaatctctcctcccaaaaggaggaagtaagactctttatctgtaggtaagaaatcccaaggaaatctactaaatggttagaattagtgagttcagcaagtttgcaggatacaagatcagtgtgtagaaacttcccctctcctacaactgaatggcttgttgtgtgtccttcccagtttttccatgggattatgtgaacatagacattccatacacatggtggtctgtacctttttgttttacgtatccaggtgattttttccatgtcggcacatgagatcaacttctttcggtaacatcggtatgtcagtggattccataatctacctagcagtgattcccctgaaatgtttgttaatcccaattttgtttcaaatgatgcctcagcctgtgcagaggtacgtgggttaaaaacattttgaaaaaaaattttttaagggactagtctcactgtgttgcccaggctggtggcaactcctggacttcagcgatcctcctgtctctgcctctttaagtagctgggatcacaggtgcttggctttgtggatttttctttgttgtggttttgtttttgtttttttaatttaaagatgccaagtgtgggatttcagagttgtaggatgtggttatgagcttttaagagctatcataaggctctccggaaaggtagtacagacttccccttttcttggctcatatagcgcctcttccccacagttctagaataatgggttccagatttaatgtgggagagaatttaggtacccatcccttggctgtatgccttgagcttttttttttttttgagtctcgctctgtcacccagactggagtgcagtggcactatcttggctcactgcaacctctgcctcccgggttcaagtgattctcccgctcagcctcccgagtagctgggagtacaggctcccgccacaactcccggctctctctcttttttttttgtatttttagtagaaacagggtttaacatgttaaccaggatggtctcaatctcctgacctcgtgatccacccgcctcagcctctgaaagtgctaggattataggtgtgagccaccgcacccagcctccttgagctattttaaccttcaagatagtaattcatttggctgggcaccgtggcctgtcatcccagcactttgggaggccggctggcggatcacctgaggtctcgagttccagtctagccaacatggcgaaaccccgtctctaccaaaaatacaaaaattagccaagtgtggtggtgggcgcctgtagacccagctactctggaggctgagacaggagaactgcatgaacctggaggcagaggttgtaatgagccgagatcacaccactgcactccagcctggacgacagcgagataaaaggaaaacaatctagcaaggttctgtgtttgaatgtgaagcaaaacggtagcactaaatttcttccctgaggaattgatgtaaagccttagccctggccactgcctagccctgcattgtgcttcaaatgctatcattgctgctgcttcaaatatcagcaagaaagtttatctttaaagatatagggactttcaaatggaggtgaccttctcactaccactgcccccacttcatcacttcaggggcagaacacacctcttagcattccttcacaaactgtaaggtccttctcaatcccctagggatcttgttaaaatgcaagtctgaggtgagactgggatactgcatttctagcaaggtcctaggcaatattcaggacttctggtacatggatcgcactttcagaagcagagtcctagagtagtggttcccagccttggctggaaagtagaacctctcagggaacttttaaaagtactgatgttctggttctgccagaaaacaatataagtcaaaccaatatgagttgttaaaacatgtgcatttgttatctctaaaagaaaacaaacccaaataaggtgtaattcagcttgtcagttgaaggatttttggttttaaaaagacattactttggcagagagatttaaagtttgctggcataggaagcattgaatgtaagtgttctagaataagcccatcatatacctttagtgagtgttaactgctttgcaaagaactttctatatctcagctaatccttataccaaccatccattaagagatgtgtccccatcttacagatgaggaaaaattgagttttctatcccctttacatgtctgttgccttcttctaggcccttactattcctccttgcttagacctaactgacttaggtttctaggttccttctgctcgatatacttcacttttcttttttgagatggagtcttgatctcggctcactgcaacctccacccccctggattcaagcaattctcctgcctcagcctcctgagtagctgggattacaggcgcctgccaccatgcccagctaatttttgtatttttagtagagacagggtttcaccgtgttgcccaggctagtctcaaacttctgaccttaggtgatctgccgagctctgcttcccaaagtgctgggatttcaggcttcaggcatgagccactgcgcccagcctcgattcacttttcatcctgttcccagaattgccttctagaaacaatttgatgtgtgtgccttgcagacctatgctggttctctgttgtctgcaggataaagtccagactacgcagtggggccctaggacaccctcactgaccccacgatggtacagatgctcctcagcttacaatggagttacatcctggtagacccattgtaagctgaaaatagcataaatcgaaaataaatacatctaatgcacctaacctactgaacaccatagtttagcctaggctactttacatgagctgagaagactcacagtcgtctacagtggggcaaaatcacctagcaacacgatccactctggagtgcccgttgttcacccttgtgatagagtggatgactgggagctagcattgcgagagagtagcgcatcacctattggtagtccagggaaagatcagaatccaaaattggaagtatagtttccactgaatgggtattgtttcccaccattgtaaagttgaaaaattctcagttgagccttggaagatcagggagcgcctgtatttgaatcttccaagtctgacctggaccttcatgctgcagtttgctgtgttggtccctcaccctggagcatctccttagccattgggaattttattcctccttcattctcactgtctctaattgctgagtaacaaagttccatttcattgactcatgattttatgggtagatgtgagggaaccatgcacatgtggattccatgggggtttgaaatgctctgatgccacttgatagaaaaaaatgttctgtgagtttagagaactgagccacactgagcagagctagcccctttttggggaacatagagagaatttggcatcatgaagtgatgaagggagggatttgggttaaagaatagaatgctcggtttgtttcaagagggtgcgtgagttggggagcatggaggggaagatgcctcttcctggccactgacccccagtggatcacacagagggtggactggtacgagctgagaggtgtgctcctcttggagggcagggaaggcggaggagatggctccagctctaccctgttgactgtcttgcatgtgcggttgccagtatcctcctacctggctctgtaacatccctcctccccgctctcctgctctccccaggtgtaattacttcaagcctccaggatggcaatccagttccgttcgctcttccccttggcattgcctgggatgctggcgctcctcggctggtggtggtttttctctcgtaaaaaaggccatgtcagcagccatgatgagcagcaggtggaggctggtgctgtgcagctgagggctgaccctgccatcaaggaacctctccccgtggaagacgtctgtcccaaagtagtgtccacaccccccagtgtcacagagcctccagaaaaggaactgtccaccgtgagcaagctgcctgcagagcccccagcattgctccagacacacccaccttgccgaagatcagagtcctcgggcattcttcctaacaccacagacatgagattgcgaccaggaacacgcagagatgacagtacaaagctggagctagccctgacaggtggtgaagccaaatcgattcctctagagtgccccctttcatccccaaagggtgtactattctccagcaaatcagctgaggtgtgtaagcaagattcccccttcagcagggtgccaaggaaggtccagccaggctaccccgtagtccccgcagagaagcgtagctctggggagagggcaagagagacaggtggggccgaagggactggtgatgccgtgttgggggaaaaggtgcttgaagaagctctgttgtctcgggagcatgtcttggaattggagaacagcaagggccccagcctggcctctttagagggggaagaagataaggggaagagcagctcatcccaggtggtggggccagtgcaggaggaagagtatgtagcagagaagttgccaagtaggttcatcgagtcggctcacacagagctggcaaaggacgatgcggcgccagcacccccagtcgcagacgccaaagcccaggatagaggtgtcgagggagaactgggcaatgaggagagcttggatagaaatgaggagggcttggatagaaatgaggagggcttggatagaaatgaggagagcttggatagaaatgaggagggcttggatagaaatgaggagattaagcgggctgccttccagataatctcccaagtgatctcagaagcaaccgaacaggtgctggccaccacggttggcaaggttgcaggtcgtgtgtgtcaggccagtcagctccaagggcagaaggaagagagctgtgtcccagttcaccagaaaactgtcttgggcccagacactgcggagcctgccacagcagaggcagctgttgccccgccggatgctggcctccccttgccaggcctaccagcagagggctcaccaccaccaaagacctacgtgagctgcctgaagagccttctgtccagccccaccaaggacagtaagccaaatatctctgcacaccacatctccctggcctcctgcctggcactgaccacccccagtgaagagttgccggaccgggcaggcatcctggtggaagatgccacctgtgtcacctgcatgtcagacagcagccaaagtgtccctttggtggcttctccaggacactgctcagattctttcagcacttcagggcttgaagactcttgcacagagaccagctcgagccccagggacaaggccatcaccccgccactgccagaaagtactgtgcccttcagcaatggggtgctgaagggggagttgtcagacttgggggctgaggatggatggaccatggatgcggaagcagatcattcaggaggtaggagggtctcgggttcgtttagaggatggggcgctcccagtatttcttggagaaaggctgccagtctgcctctcccttctgctacttgtgcagcaaagtcatagtgctcttcagctctttatcgcaacctgcagaggtctggacacggcgtagagctggtgggtaactgaggagttagattgccctgaaaccccaagtcatgggagctgtaacttggttcctcaaccggtgaccttccccagtgagcccttcccaaggaactagcgccaagttgggctcgctgattaacattagtgtgcctctttttctttgtttaaaaaaattattattattttggtgcagatggagtcttcctttgttgcccaggctggtctcgcactcctgggctcaagtgatccttccgccctcggcctcccagagtgctgggtttataggtgtgagtcactatgcccagcccatttttttttc

SEQ ID NO: 7470 - DNA, 6000 bp, Homo sapiens
agatggacttggagtggattgcctgagtggagccccggggatttgagatgcaggagccagggagaagagagggtgagacccacttgggccagccccacatttggccagtcctcttccctggcttggagaaggtgcagggtggggcaggtcatacagaaccctttggggtcactgcctcttttctagttgcctcaggcaaggactggccaagtcttttttttttttttttttttttttgagacagagtctcactctgtcacccaggctagaatacagtggcgcaatctcagctcactgcaacctctgcctcccaggttcaagtgattcttctgcctcagcctcctgagtagttgggactacaggcgcccgccaccacacccggctaatttttgtatttttagtagagaaggggtttcaccatattggccaggctggtctcaaactcctgaccttgtgatccgcccgtctcagcctcccaaagtgctgggatgacaggcgtgagccaccgcacccggcccaagtctttctttatagcctcctaccctaccaagccatccagttgcattttccctccctgtcttgagttcttctttcctaagcttctgttgtagacctggcctgctggagtgctctgctcccctgggaaccctctggctggagaggctcctgagccacagaaccagagaagaggagagtaatgccagaggatccctaagcacagtgagtaatgacaccaaaacttacacctcacagggcacctgagactcagggaagggaaatgacttgctcgaggacatgtggctagtgaatggcagagccggaactccactcacctccactccccaggcctggactcaccccactgccccatgccgagctgtttatggacacacatttattagccaaagtgagcatgcttcttattagattactttacactttagggtaccatttttgtacacaattaaatatggagatgttcagaaaatgcagggatgttgtattgttttcccaggcaaagtaaaactcaatgttacaatccgataaaactgatatgtgcagatttcatgggcagggtagggtgggagggtaggggagagacaggcagggtgaagggtaaggaccctgatgtccaaatggcaaaggaagatgggagatggaggagaccacattccctgaacatccccattcatccagcggccatgccattgctttacacttaacatttaactcccaaggtaggaaacatctcaagttgccccatttacaagtaagaattattgtgagctcagagttaaagcattaataacttgctgcaggttacaaagctgggaaatggcgaagtcaggatttgaactcaggtttctctggatccaaagtctgtactccttccactaaactgtttgattgattgattgattaaagacaggatctcgctctgttgctcaggctggagtccagtggtgattatagattcactccagtctcaaatcccggggctcaagtacttcccctgtcttagcctcccaagtagctaggactacaggtgcataccaccatgaccacgcccagctaattttaaaaatttttgtagaagtgtggtcttgctatgttgcccaggctgattgttaactcctggcctcaagtgatcctcccaccttggcttcccaaagagctgggattacaagacctgaaccgccacacctggcgtaaactggttttgatgaaattagcagacccacagggggtgatgctaatacaggattagaccattctctcattgctataaagaaatacctgagaccaggccgggtgtggtggctcacacctgtaatcccagcactttaggaggctgaagcaggtggatcacctgaggtcaggagtttgagaccagcctggctaacatggtgaaacccctctctactaattagctgggcatggtggcacgtgcctgtaatcccagctactcaggaggctgaggcaggagaatcgcttggacctaggaggtggaggttgcagtgagccaagattgcaccactgcactccagcctgggcaatggagtgagacttgatctcaaaaaaaaaaaaaaagaaaagaaatatctgaggctgggtaattataaagaaaagaggtttaatttgctcatggttccacaggttgtacaggaagcatgatgctggcatctgctcagcttctagggaggcctcaggaaacttaaaatcatggcggaagggatgcagcagttcacatggctggagcaggagcgagacagagagtggagaggtgctgcacacttttaaatgaccagttctcgtgagaactcactgtcatgagaacagcatcaagaggatggtgctaaaccattcatgagaaatccacccccgtgatccaatcacctcccaccagggcccacctccaacactggggattacaatttgacatgagatttgggcggggacacagatcccaaaccatatcaccctcagtacctgttgctggctgacagttggtcagtgtctaggggagaaccattctcagcttcagttccacgatagcgaataccatcttggcaaaaatcccctggacaagtcagagacctcactaagtctccagcatctagcctgatgcctgacacatactgaccctcaataaacggctgttcaactgtgggcacaggaatggtgaggaggctgtgggcacagaggacgctggcccttctttggaagcagatgaaggtctgggtgttgatgaggggttcctcgaaagtcccatgctgctcacaacacccaacactcctacagactgtgaccatgttctgttgacaactgagcctgcacaggatctttatgcagtagggaaccggcccggattctccacagggagaatctcccagatgtttccccgctttctgccccaaagtcaagatcaaaagcagttggcagctgcagacatcagcagaagtcagtggaacacagtgtggaaccatgtcgcgctggaggaggaagtctcgcgctggaggaggaagtctcacccttgacagagactagaactgggccttagaagcttgaaccaacctctgtccctgcgagagcagcacacttttgtgctcctcagcccttgcgtcttctttgcctggaatatggcaaaacgtttattttcccccactaaatgaggctcctctagggctgcaactgtgtttgcccatctctctttctctagcagctagcacagggctagcagtcggtgcttgttgagccggtgggtgaagagacgagagcacacctcctgtgtgcccggcatggcgggacctggtgccggcaagtggtgggctctctggcctcatgctctgcgctggtgatgtcaaggggtgggcttctgtcctgccactgatagtaggagggaaggccagcaggaaacgccgaaacctactcaagctgctggagaagggggaatccagccctgtttcaggggaaggagtatcctgtgttctgagagcgagagagcagcttagccggcaaatccttaaatccttcagagattacaggattgtgcaagagggaaggccaagagggggacctctgaggcagctccagcatggcctgttgtgtgcagaggactgagatcccagaacatgccacaccaagaagacatgtcccaaggggcagtggagccacagccaccagaagggacctggccctgtcggacctgctgaagctagccgtggagtgcaggggctttgttggtctggctgctaaccaaagggtggctaatgggaccctttccaggggcctctaggggatttcagtgggggcttgcttcgaggctctattaccactggactgtttaccaagagcctcagcctgacagagatgggaagagacgagtgagcatttctgacccaacacccccactgcagagttggggaaacatttacccaagataggaggaataaaaaggaaaaaaattgaatttatttccaaaaaacataccaaggtggacaagataggaaacaatacaatttatattacagttttattattatttaaaaattttatattaacaaaatgagatgggatctgcctatgttgcccaggctggtcttcaactcctgggctcaatctcctcggcctccgaaagtgtgattacaggcgtgagccaccgcacccggcccatattacagtttcatagtgtttttgattactcgtggtaggagaaatgtgtcttctttgcacttggggtctcaacgtctcagtcctgccctatgccccgagaccccaagaggctttcccaaggtcaggcagggaatccgcagagaggcagggctggactccagcatcctgactccccagttcgtgctctgtgctgcagagacctgttgcgtaacactgagtaactgtggattgtctaaccttttatgaaatttccagctggtcttttgctaccggccagcagtccagttggtgggagtgatgatgccggtcttctgagacgtccagtggacagattttccccaggtttctggatgcagccccaacaagcaaaagtgctacactcctgcaccgggaacactgacacaggggtcacgaaaatgctaaaacaagacgtgcaagaattgttgcgctccgcacacgtaacaagggctctgcctccccctcccccaatcttcgccctggtggccaggccctgggctccgccccttccccaccagaccgggggaggggtcctcctcggcatggaggtaggggatgctaggctgctggagacgcccgcagaaagaggcgggatggcggggcggatgctggcggcccgggtctggccacctgggtcagctgcacgcccccgccccgggctggccggacctcgtagcccaggtcccaccacgccgtgaagtttgcggaaagttttgcagttgcttccccgcccgcgccagcgggggagttgtgacgcagcgtctggggatcctggccgggacagaagagagggaaggcgaggcggggagagactgggaaacagagcagcaagagaaagggcgcacgctggggtcctcctggacccggcgtgtcctcctctccgccacccctttctctccctcccgacgctctagccccagacccgcgcctcctccccttcccctcccacgctgcccacttcccttcccctctacccctcgaaccctcctccccggttctgcgctcctccctccgccctccctccgcccgggctgcctcctccctcctcctccccgggaggcatcacttcgtcccgacccggaggaggacgcgagccccttgcgggcggtcatcacagcccagcctcggggctgccacagcgcgttgcgcctgtgcgccctcggtccccgcgtccactgagcgccgcgctcggggatggggcccggccggccggcccccgcgccctggcctcgtcacctgctgcgctgcgtcctgctcctcgggtgcctgcacctcggccgtcccggcgcccctggggacgccgccctcccgggtaaggcgctgccaacttggccaacttcagggcccgggcggggggagcgccgaggcgcgggccgctctcgacttttccctccttttcccccctcttttctccagaagcgtgtgtgcgtgtgtgtgtgactgggtttttaaaactcgtctccgcttttctgaaagcgggggaggagaggggaggaggagcgcgcctagaggtgggggaggacctgagtggaaccagatgtggcgggcggcgggggaggggagcccgggggactccagcagcctaggaggaagcgggtgggctcttgaggacccccgcgcaccgcgctcccggaccacccggcgccggcccgtcctcggcaggggacctgcagggcgcgcccggggagccagggctctctgtccgggagttcccgggcccagtctcctcgctctgccccaggactgatgcgttaggacggctttccaactatccgcgagggttcgtttcccccaccttccccccgcccc

SEQ ID NO: 7471 - DNA, 6000 bp, Homo sapiens
attcatccctctgaagttcagaattattttaccttttttattctttcactctttggatatgtttttattgaaaagccacagtatgctggcttgtggtcacttaaaaagaaaaacattttttaaagagaagggaaaaaaagaaacgccacagtactatttgtaaaaggggatagtgggtggctgccaagaaaagatttccaagcaaactccttttcagtgtttattcatttgaagagcctccttggggcagctgcaaactgtggtgtccttggtgctgttctcagtctgcgcctggtcattgcagggccccgtgaagcacgtgtacagagtcctgcagtgtcaggaagaagagctcacgcagatggtgtccacgatgtccgacggctggaaattcgaacaggtacatctcttaacagagcagcaatcccaggccccgttcaaggggtctgcagctcttcaaacaatcagtgtggatggccaattaataaccacgggagacggctacggccaggtgggatcctattccaaaacatgggcaaagagccatttggtgggcactgctggcctagtggtgcgtgaggagttggggaaacagaggagcatcatgtcttagcttcacacgcagactttccaggggagccaacgagcagtttaggcttgaagtgcctcaaagcctttggtttttgttccctcacagggatcgtagaatgagtccctaaaggagactgggattcgacaacaatccttccatttcttttcccagggtcagaactttttggttctgaatgtcttatgtaatccaccgtgaagagcttggtgaacagctgtgctaggaaggatcaggcgccatgggaagtgtggtgcggccgtttcccctacttctctccgcctcgtgcttacgactgagctatcaaaacaaagctatgacagttggagcttcactgttctcctccattagatggcagacttgttaaattctgttgccttcaaaacataggaaggccagagcgaatagagtaaatacaattttttttttttttggaaagtcaaatccctttcttcattccatcccttttagacatggcatttaaaacagacattgctacatcactaacttcccacaagctgtggtgtccactggaaaaatgtagtccttgatatttctatttcacattcaagtgatcctctgccacttattaactggttcacttcaatttcaaaaagccaaaaaagtcctctaacataagccttccaaggtgatactttcagaaaccagggttggaactaaccagacaacagcgcgacagccaagaccagctgctcttgatgcccttttcacttctgtgttgtcctggttgaagttggcaaagagcagctggccggcgccggcctccccgctctggctcgccaggttcatggctgggcgcgtggcgagtgggcccggccagggagggcgcgcgtgcgagggcgggtcaggctgcactcagggtctcggtcgccgccactcgccaccctgggatcaaccgcctgagtaaatatgattttatacggattatgcctacttatgtgtagagttttaacaggtcaacagctgtctcaccagatgcttaccttctaaaagaaaactcacactttgcattaatgctgttatctcacagatcaagtgcaaagctgtctctgccttcagagccagcggtgattatttctcacacttagcttccaccacggaatccactctgcctgtgtctgtcatcctggttcttactgggcatgggttgtaaaacgtcgccaagagtttaatgccctccactccagaagtatttttcctaatatgagctcttaagcaaaggatttttttaatgtattctttgtgaaactaaaatgaataatttcttgttaatttctcatcttattactgtcccgtgggaagacggagggtgttcctattgcctcccttctggatgaggaagtttgtttcagacaggcggaggcgcccccagccccatcctaccacagtcagccatgccgcccatgtgaggcctcgcctgctcactgggatgccctcaccctctgcctgagctgctcccctgcgtgtgtatttcctctttagaattaaattctgaattctattatccaaaaaggttaaaagtaccagcatgctgggcacggtggttcacacctgtaatctcggcactttgggaggccacggtgggaggattgcttgagtcctggagttcggagaccagcctgggcaacatagcgagaccccccttctctatcaaaaataaaagaattagccaggcatggtggctgtagtccctgtagtcccagctactcaggaggctgacgtgggaggatcacttgagaccaggaggtggaggctacagtgagctgtgattgcaccactgcactccagcttgggtgacagagctagaccctgtctggaaataaaaagtaccagcagcatatgacttccagtagctgatcagtgattggctcggtgctttccagagcctcctgtccccagtctagggcttctgctgatagaggagccagctgtgtgtgtgactgaggcaaatgtccattttgttggcagatgcgttctgtcttcccttgctgtgctcgacggggcgtgggcatgttaatcctgccgctgacggggggggacttcagagcttgggtgaggggacagtggagctcatactcttcctcctggggaggcctcaccaatgatgccctgatgaagaacaggcccatttctccccgggggctttggtagtcacagagaactcatataaagagttaaacctttgataacttaaaagttcagtcggaagaggggtgatttgtgtagcactttcgaaagtatgttaagattgccacatgaatgttcactgtattcttggttcatcagctcatcagcatcggatcttcctataactacggcaatgaggatcaggcagaattcctctgtgttgtctccagagaactaaataattctaccaatggcatcgtcatagagccgagcgaaaaggcgaaggtaaggagccccttccctgggcagttgcctctggcttgcttgttcgcaccccctccgtgggcttttcctgaactcttgctcctcacttcttccctggccttctagagccagcgttgcattttcccctcgttttgttatttttgactgttgtaatttaattgggatttacggagcactgacaggtgtttttagttagaaaatatgaacctaaaaagggtagactttctccatcctctgccaaatcaatgaaaaagaaaagctggttgccactaattactacagggtaggatttctgaactcagacttggaaggtattttgatttattctttaaaactgtgcttttttcactgcctcaggagaaaagggtgttttcttaccttggtgacctttacctcccttaagttcctggaaaactgtttcttttccctccactgtgcacccccctcacccccaacacacacacacacacacacacacacacacacacacacacacacagcttctaaatcgtggataccaggtaagctggaaccacttcctttcagttggcaaagctttggtccaacagcatataagctttagacccagctgtgcccagcaagagagtgtttcgcaccagaagcactgcgggtgaggctgcggctgcacccctgcttgcttcctgggatgacaggaccatcatgccactcatcgggtccagtggaaagcatcccccgacatctctgtctttccctcagcagcctcagcctctcccccatctccaactttcagattcttcaggagagaggatcgcggatgtaaactaagaccccgaaaactccagaccttcaggagagcagtcagcagagcccctctgtgaagtgaaacctcactcctgtccagtgaccgagccactgcaaagcacagctgatcctggccccctgtgaagaagtgttctggtcaaaactaaaggaactccctccccacctgcaggactccgaagacagtgcgacttctggctgcagaataccttttcagaaacctgctttcatttgcttagccagtattagaacagatctttacaacagcagctgggctgggttcccagtcggagcctttcggggatctgggggatgagggcggaaggcctagctccttggaaatggcctgtactttaaggacgctggagccaagaggattgttcccgtgccgtgccatggtttcaccctatgtgtgccacaatggacgttagcagctgcttcggaacaccgtccctcctatgcaccctccaagacgtgcagcagatgcaaagggttctagctgcagtttgtcgaattgaggttttaggtaaagcatagagttgccagagtaccccgcattcccatgaatagagcctccaaggaaagggaggatggggtgtcctttgttgtggttggaggttggtgatcattgctctggatttggggctcccggctgccaccacatgcagctttgcctcacctttctccagcagccgggaccctctggagagcttgttttccctccaagaagaggtttgagacaggcggcatcctgcactgagtcagacaagtgggagctgtaggaactgcacctgcagcctcttcttactccccattgaccctgtcttccttccctggctttttcaactggaccaaagatgaaggcacttatggaccctttgatggcttggagtggggaaggctgtttctttgaaagttgccaaatgtgttatgttgtgtctcagagagagttatttctgtgactctcttggaaatgccttgactgaatgtgcaatatttgtgtctcttggtttctaaccttggcggacctgctcccctctgtactgtccccagtggtatgtatgtatgtgctaggcagtctggggaccccctgtgtctctgaccacccccctgacccccgccattactttcttttctggagtgccatgctggcgaggatccggatgcggcagcaccctctttcgggctgcatccacagagtttgtgtccacactttctctccgagcatgtgggtctcgctgagcagtcatggaatgcggtagagccaggggaccctgtctgccccgaataactttcagtagtatggcagatggcacagagaaagggaaggggctctggggacttctccttctatgaaagcctcctcgagccaggtgctcctgggcaccttcagaagtgatgtcctgtgtgctccacagctcacctgcttgccaaggtacgtctgggtagtagtttctggaaatgactgcagactgtgccaaatgtcttttgagcttctgacctgaccatgcccagatggcataacttttccctaggaccctcagtctccttgtttctctgtatctgtagcatagcatagaacccggtatacaggggtttctgctgacacatcaacgtctacacacctatgcgccacattttacagctgtaaagtgttagatgaactgccgtcctcagtaaaagcagccaccccttcaagagtcacaggcatccatccagtcgtatctttcagagaaaaaaaaagttagatgtagccaaggaaagtagtgatcacgggaaggactgctctgagccgggtaggatggaggactttggaagaggcgctccttggccaggtccaatgagtaacatcagactgacagaggaaaagcagcttggtttgcggccttgtgcccagtctcgttgaggcgcttgtccctgtctgctttcctggggcatgcctgatcagcgtgggctggagctcctagaccaaccccagctttctcaccaggttcagcaaggaggcctgggggtcagacaccaatgttgagcacctcctgagggcgccgtttccttcattcctcttagattccatagttgccgccatgaaaagactgctcttgagccccaaggcacaggcacgtgctctgggaaatagacaggagtggtatttccgccct

SEQ ID NO: 7472 - DNA, 6000 bp, Homo sapiens
ctttgaggcctggccaggaatcgtttgcttctctgagggggatcaaggtagcttgaggctttccttctcccttggaaatgcggtgggaacatccacaggcaacgatgggagggtccccagacttcatccggaagcttcccggccagcttactggctttttggcagaggctctggaacatcttcctccaccctgctgttcttttttttgaaacagggtctcaccctgtcgcccaggctggagtgcagtggcacgatctcaactcactgaagcctctgcctcctgggttcaagcgattctcccacctcagcctccccagtagctgggattacaggcacatgccaccacacctcaactggcttattttttattttttggtagagatggggtttcggcatgttggccaggctggtttcgaactcctgacctcaggtgatccacctgccttggcctcccaaagtgctggaattacaggtgtgagccaccacgcctggccccctgtgctgttctttattctcgctaaaagtctagtcccacaggccctgtcccagtggactctgggctaactgatggctcctaaccccagcgaatgtctgtacttagatgaattgtccaggaagagtggcctctgataggaccctctcgttcccactctcccacttgctgccggcaggatgacgagcacatcgtcctggagccgggagacctcttcccccccttctcccctccaccctcaccccggggagaagtggagagagggccacagagcccccagcagcaccggcttttccgtgtccttgagacccctgtgattgacaacatcaggtaggggtgctgccccgcctcctcctgtccctggtgtcttctgtgaagaggggaatgggactgacaaggaaggggccccgttcatctcgaggttctcttgagggcaggcatctccttaggctcctgtccttaacatcttgtgagaattcttagactgagtggtgccctctcccagtctctactctgaggggacagctctggaggtgaacacgggctagggccagggcagagcgtggaactgcaggactcacggtgcttgaagaagcggtatctggcagagaggcccagaatcctcccaaggtgtaggtttctagcctctctgccaagtgagactgacagtcacttctttctgcagatggtgcctggacatggccctgtcccgaccagtcactgccctggacaatgagcggttcacagtgcagtcggtgatgctacactatgctgtgcccgtggtcctggtgcgtgtggcggggctgtgcggggctgcatggggcagaggagagggctggacacgggggggtctcagggccactcacatgagcgggagtgaatgcagagggtcccagagtgagccagcctgtggagtagcaaaggaaggggaacggcagtgcctgggtccctctagaggggcggggtcaaggctgtgcctctgctgttcccaacaggccggcttcctcatcaccaatgccctgcgcttcatcttcagtgccccgggggtcacttcctggcagtacaccctcctccagctccaggcaaggaccaccctgtcctctctgtcatgcttccctccgacccgcagggctggctcttctcctagtaccctggctgtccctccctctctgcagcccagaggtcccctcacgcttcagcttaagaacacctctttccagctgggcgtggggactcaggcctgtaatccaagcactttgggaggccacggcaggcagatcatgaggtcaagagatcgagaccatcctggccaatatggtgaaaccccgtctctactaagaatataaaaattagctgggcgtggtggcacgtgcctgtggtcccagccattcaggtggctgaggtgggagaatcccttgaacctgggaggtggaggttgcagtgagccgagatcacgccactgccctccagcctggcgacggagcaagactccgtctcaaaaaaaaaaaaaaagaacacctctttcccttcctgcccctgagagagctggcccttcctgcccagggaatggccgtggggccagggcagcccttcccttccctcctccccaggcccggagctcaggagccatctgtgtggtccgctccttcccaggtgaatggcgtcctgcccatcctccccctgctctttccagtcctctgggttctggcaactgcctgtggagaggcccgtgtcctggcccagatgagcaaggcctcacccagctccctggtaggtttttccaaggtgtctgggggaagtcacaggaacaaaaagagggagctggctgtgccagaggacgggggcagaagtccagccccaccttgggctcggcatgttggtcagcctgggcagctctccaggcctcgggccctctccattccagaagggcctccaggccaggccctgggtgtgagtgagcgtctgccctggcttccaccaggtggggagtcagaacggcctgggccctttaccaaaggggttgggagccccgctggtgtgggccccccctctgccagcttggagaggcctgtgtgaaggcggcgttttcctcactgaggacctcaccctctctccgtgcagctggctaagttctcagaggatactctcagcagctatacggaggctgtctcctctcaggtacaacactgacccgggatggcttctctcgcaggtccctagagccataaccctgggactcccctatttatggccttaaagcctccaaccaggctcttagagccccatgtccacccgttacatgtggacataacctggacctgttcccataacgtgtccacaccctgtcccagagaagtgcctctccaccccaacttcgtggtgctcccctggattttcccctagaggccgtctccagggaaatgaggctgagccctaaatggccttgcagacttcctctctcccaccaggaaatgctgcgctgcatttggggccacttcctgagggtgctcggggggacatcgccaacgctgagccacagttccagcctgctgcacagcctgggctctgtcacggtgagggtgggccttgcggggaggaggcaactgtcatgcccgccctgctctctggctgggcctgggctgcccacctgccgcttgagtggcccctgggcaggataggctaatgccaggcccctttcctatctcaaatgctttccatgcaggtcctgtgctgtgtggacaaacaggggatcctgtcatggccaaatcccagcccagagactgtactgttcttcagcgggaaggtggagccccctcacagcagccatgaggacctcaccgatggcctatccacccgctccttctgccatcccgaggtagaggaggaggtacggccggctcccatgggcccgactctgggccaggctgtttagccttggagcctggccagggagggtgaggtttcggagggcgaaggagggtttgggcaccattaggatctgcttctgggcaggtgaggtgaagacaaggcagccaggggacctagaagcatcctgcctccccaggccatgggagccactggtcctagcctgtgctcctcattctcttcagccccatgaacgagacgccctcctggctggctccctgaacaacaccctgcacctttccaatgagcaggagcgtggcgactggcctggcgaggctcccaagccccccgagccctattcacaccacaaagcgcatggccgcagcaaacacccatctggctccaacgtgagcttcagcagggacaccgagggtggtgaagaagagcccagcaaggtgacgggagggggtggcacggggcagccacaccctcggccacaggctgtcctggcctccctggccagcctggcctcacaaggtctgaaagagcaggcgtctctgccctctgtcccagcacctccaggctaggccagtggtccctgaggccctccccaagtctgctgcgaagtaggtggagcctccccctacccttccattcttgtaatcgcaatcactggtgtccctactggaaccttccaaatatacacagcccggagctccctcttagagatgttccctggccacagaagatccctcaactgtgtcctctttggtctggccacccctctttttagctcctgccagtgtcatgagatatattaatagtccatagaagcagacaggagcccaagaaggacaggaagcggatttcaggagggagcgggtggaagagggtgagcagcagctctctcctgggaagggtgcctttcaggggcaggagccctccccagccttgggaggtgggcagagccagtgctggcttccccacaccctatcccgggctgaggctctcctccacatttcccccagacccagcctgggatggagagcgacccctacgaagcagaggactttgtgtgtgactaccacctggagatgctgagcctgtcccaggaccagcagaacccctcctgcatccagtttgatgactccaactggcagctgcacctcacctccctcaaacccctgggcctcaatgtgctgctgaacctgtgtgatgccagcgtcaccgagcgcctgtgccgattctccgaccacctgtgcaacatcgccctgcaagagagccacagcgccgtgctgcccgtccatgtgccctggggcctctgcgagcttgcccgcctcattggtacaggtccccatggcaggggatggctggctggacccgcctcctagaagaggcccagtaccaactcctcacgggacttaatggacctggcagggtattgccagggcatggccctaagttcctgttccccgccctgcaggcttcactcctggggccaaggagcttttcaagcaggagaaccatctggcgctgtaccgcctccccagtgccgagacaatgaaggagacatcgctggggcggctctcctgtgtcaccaagcggcggcctcccctcagccacatgatcagcctcttcattaaagacaccaccaccagtgagccctggctacgttggccagcaccaggcgagatcttccagagcttggcaggggggctctgcccagccccacccattgctagggaggcctgggcagatgaaaagtagactgcttccaagtgttccactctggcagggctggaattggggaccagggctgggatggtgttggctgcagaggccgggattgtccaaaggatgggaatatggtgtctgcattccaagcccagtggcattgcagagccttgctgtccgtgagtcccagggagtctcctcctctggcaggggctcctcagcgcccttctccaggaggacagtgcgttgcctgtcaggtcagcgtgagggggctggttagcgacactcagggtttgaactctctcccccaggcacagagcagatgctgtcccatggcaccgctgatgtggtcttagaggcctgcacagacttctgggacggagctgacatctaccctctctcgggatctgacaggtgggtgaggaagcacatgccagcagcaagagcagtcgcgctgccggggcacctgcccttcacaggcaggaacactcacctcacctccgcctgcttccctggcagaaagaaagtgctggacttctaccagcgagcctgcctgtctgggtattgctctgccttcgcctacaagcccatgaactgcgccctgtcctctcagctcaatggcaagtgcatcgagctggtacaggtgcccggccaaagcagcatcttcaccatgtgcgagctgcccagcaccatccccatcaagcagaacgcccgccgcagcagctggagctctgacggtacctcatgggtctgtccagcggggctggtgctggggctcccctgggctgccgaagcccaggagcagggagggcgtctggagggccccggcaccccccacagcaaagggggcagtggccacagccccaggctgggacgccagtgtggcactctatccggggacatgggga

SEQ ID NO: 7473 - DNA, 6000 bp, Homo sapiens
cggagcatccttccctccccctcccccgggtgggccccgcccagcctcgaccacccgcgccgacccccgcccgcagagccgggaagccggaacccgcaggcgccctccagccgtccctccggcccgggcggggattgcgccgaggaggggcctctcctggcgagggtggagttttgggttccccccttcgccccgcacctcccgccttcctgcctcctcccggtcttcaccttcccccccgggtccccacgacgcccgctgggcggcggtggggtagggggcgcctcctgacccgactccccttccagccttggccttcaggcactggctttagggtggaggggcggccttgcggggtccaggaggcctcggaggtgggggacggcggctctggaccagctccggcccccaccacctcccggccccagggcggtgacagccttgcggagaaggggtcttcaaagctctgagaccccgcagtgccagctcaggattgaagcctgcggcggcacatgcagccttcctttcccaaaggggacttgcgcccagccccacttggggcaccagtgggggctcctggccctggccctgggtgggagtggccaatccgcaaatgaggcctgtgtgtctgccccgccggcccctgccgtcgtgatgtaagcggacacagagcggcagggcacgggctgcgcgaggggtctgcgggggtcagaggtggggcgcagggcccaggcctggggcagccccttgcgcagcgtccaccccctgcaagctcggccccgacacctttgcaggcgcctggggcggggctgccgggagttgctcactgctccttccttgtttgcacaacaggggctgcgggggaagaagggaactgagggaggcccctcccccggtgcagcgccctcccgccctcggcacccctcggcagccaggcgctggccacagaggccgcttccttggtcctcaggcagctcatgggatccaggaaggaaacgaattacccttttcctgccccgcctcctgcctgggccacaaaggcagggccaaagcccatccttcaagggctggagtcagttaggtaacaggccacgggccccgggctcaggccactgcacggacccagggaacgggctgacagtccagcagaggcctcagcgaggcggcggcgctgcgcacaaacctgaggacctaggcgggtgaggggtctgcaggtccagacgcctgaggggaagcatgccagggtgcccagtgccccccaaggtggtgggcgaggtttctggagaggtcccggaggagcgggcttgggcagcaggggtcaggttcaggaccctctgtgcatgagtccaggttgactctgcaggacggcatttcgagccacctggcatggcgttccaggcctgtgacggggcagtgcaggggtccgaactggcaggcacccaggtcctgaggacttcatggtcgaatcctggtctaaagccaggggtccttgcagagccctgcgccctgcaccctcgagggaactgcctgcaggagcccctggcttgggagggcgcatggctgtgggacgcagggtctcctgcaagggactttcccacccacccctgccccaggcctcccgctcagcttccagcagcctggggtcgtagagcctttgggggacctgctctccgggcagcccccacctgggagatcagctttctcatcccagaggccaggttatttctgggtgggttggcatgcttcctggggggcggcggggggggggttggtaaatgtcaggggaaggccagcctgtggcgtgtgcccacggagaggccaatgcttggtggctgtggcgtgtgctccaggcaggacagccccagggttgtccctggaacaccgggcagtctgtaccttggcccatcacggtgccggggttatcctggaagatggggagtgtgggccattattttgtgccccttccccgtactctacctcctgtggaatcccttgccccaagccatgtgggcagacagctggctccaagtcagcccctggacaccaggctggagtgggaactcctggagccatttcagcatggctggcaccacaggctgggtgaggacagacgatggtgccaggttgtggtctgggggcttgtccaaatgcctcatcttgacacagaagatggccctccccacatgagcgtcacgtggaagccacaagcacctcaggtctcagaacatgctgtgctctcctggtcagtgagtcctggcactgccccaaccctctgccagccctccttgacactaattcaggggcgccgcgtctcctgagggtggccactgtcccctgcctccccacacgccctcgtctgtctcctgaggaccctggcgggcttcaaaccctgggtctgcctgcgtctcccacccccgctggtgcagccagggagactcagaggccttggtacctctttgtgttttgcagggggaacctggggtatgcaaaatgtgtctattcctgtttgttgtatacacatttccttccttggccttgcatggcctgtttatttttaaaagtgcaaacttgcaaccccaaacaagctggggccctgaggccgtcaacccctccagtctcccctgtgacccgcagtctgcgtcctgttcccagtttcattcctcaagtgcatatatttttatttttttattttttttttgagacagagtctcgctctgtggcccaggttggagcgcagtcgcgcgatctcggctcactgcaagctctgcctcctgggttcacgccattctcctgcctcagcctcccgagtagctgggactacaggcgcctgccactgcgcccagctaattttttttatttttagtagagacggggtttcaccgtgttagccaggatggtctcgatctcctgacctcgtgatccgcccgccttggccccccaaagtgctgggattacaggcgtgagccaccgcgcccggcctcagtgcatatatttttaatatcttgtagttaccctgctgtatactgtcatcttagggaccttttaaacaataccagtatgagcgggacctaccctgctgctcagtgaccccaggcagtgtgtcctaaggtggtgtgtcctgaggcgtgcgacactctgtcctgtcccaggcactgtggtgggggcatccggtgtccaggtgcagaggcaaaagctgctcccgggtttcccagaaatggttccgaggcctgggtcccagagagccagtgcaggttggggggtggacctctggctctgtgggggggtctgttctgctccagtgggccgtgtctgccttgtcatcatccagacagccacagctggctcctgggtcccctcgtcaagcagcatttcccagtaacagtgacttcgtggaacacttaggaagcccttaaaaaccatcctcggacctctgaggcagggactccagggggcacagcacctgtggtggggacaggcaggcaggctggatgcggggagggcccgggaggaggagtgaggagccacgcacggaactgctcagactctcccagcaaaggtcctggcccttgtgcatgcctttagttacatgtctgccttagaggcaaagacgagccgtcacgggggacccaccgggtcaggggtctgcggacacgcttgcaggaggaacccaaggaaagggggtgggggtggagccccacagattgcgtcgtgggtgggcgtggagcttgcacagcaggcctgctgctgcctcccagggcgctggttcacagcacggtcccagcagggagaggctgagccggttggactagaccacccaaggtctcaggttgcagctccctggtgaggagaggacaaggtgacttctgggtggggtggggcatgaagatggaagtctgacctcgggttccaacttgactcaaacgagctgagctcctggagtttagaaagggacaccagcttcagacatcgtgggggctggcatggtttgctctcgtgggctggatgggagcctccctagcccctcctgatttcaggctgcagcctatgggtcactccaggcacaggtggggtgagtcaagatctcactggaggagtcactgagcaagagggccggtgggaggcaagggggcatccagggacaaggggccagctctgcccccacttccccaccccacccactctaatactgcagcccctgtgcttccaactgccccctccagcctggggcccagcccctcaccgccagagactgcccgcctcctcttgggcaagctcctggtgggctccactgaagccaaagtgggcccttgggggcaggagagccagagcaaggcacgctccacctagatttagaccgggagagacctggaggatgccaaccccagaggtcctggggcgagctcagtgctggggaccggaggtgccgtctgctgccagaatcatggtgtgcgtggtccctgcccagcacgggtcagccagagcgagccagggcagaaatgacggccaggtcgatgttcctgtcgggggctgcttgtcccaggaggtaatctgagtcctggccgagcccaaaaaagccactgccctttagagccagctgtgagggtgcaggaggcagtgcagagggagtgggacccacagctgctagcctccctccaaaccctcctgcctccaccagacaccaggtcagggggccacaagtgtgggtgccgggcagctgcccctcagctgagctgccgggccacccagctcgtgtccctcccctgccaggctgcagctgggatggtcacccgggcagcctgagtcagcctgctttctctctcaggtgaggcggaaccaaccctcctggccatgggaggggccgtggtggacgagggccccacaggcgtcaaggcccctgacggcggctggggctgggccgtgctcttcggctgtttcgtcatcactggcttctcctacgccttccccaaggccgtcagtgtcttcttcaaggagctcatacaggagtttgggatcggctacagcgacacagcctggatctcctccatcctgctggccatgctctacgggacaggtgagggtggcctcacaccgggccccctgtccggggctctgctggcggatcctgctgggcgcgtgtagctgggctcagcaacagggccttccgcctgctccccagggaaccctggagggaagcccttggggccaggatcctgctgggcagcaacatgctctccacggggccaacccaggcagggcgcgaagtccatcctggcccctgtccaaacgggtcggctgtatttatagaccgtctcagaggacaggctcctgagagccgttcctgaaaaggtggctgttcctgagctgcagggacccaaggggcccagcaggcggcgctcacgtgtcatcatggcctgcgctcggggagcctgcccacggggtgcccctggtgccccgcggggggaggggtggtgtgggaaggggaggccggctccaggctgtgagctcagtcggctggcgggggtagagctggctgcaggcccggcccctctcagctgctgccctctccaggtccgctctgcagtgtgtgcgtgaaccgctttggctgccggcccgtcatgcttgtggggggtctctttgcgtcgctgggcatggtggctgcgtccttttgccggagcatcatccaggtctacctcaccactggggtcatcacgggtgagtggggccggccggtgggccgcacgtgccaggaggggcaggggccgtgcacttctgctcctgggtccaggcctctggaggacagcagggcgggtggctgcggggtgtcccggccccacctcgttgtccccctctcgagtgggtgggtggcaggggctctgcaccctgggagcctgagcctgtgggaacctgggggcagagatgagggtctcgggctttggggcagccttggggggctctcaccacattccctttcctccagggttgggtttggcactcaacttc

SEQ ID NO: 7474 - DNA, 6000 bp, Homo sapiens
ttctctgaataagggaaggacttttgagcgtgttgggaaggtcactgtgaacagtctcttttcaaagcactctgccttgtgcatttcccacaccccacaaccttctagaaatgccaaagctccaggcaggccacccttcctgtgtgtcctggccacttacctgcacacctgtcctcttgagactgactcagatcctccagaaccttcaaaatggcctgctgctccagcccctatcagctctccttcccctgtgacccttttgtggaaaggagtgcttccctcctgatttcatatttgtgaatctttactcttccctgctgaggtgacagaaagaatcagaatgtctcgagtgcctgtgctgtgtcatcacccacagtggggagagacaggcaggaaaacaagctccgacatccccggtagccatgggatggcgatgcacaggacctgcccagggggcacagctggtctgtggtggagtcgggttgaaggacagcatttgtgacatctggtctactgcaccttccctctgccgtgcacttggcctttgaaaagctcagcaccggtgcccatcacagggccggcagcacacacatcccattactcagaaggaactgacggactcacgtgctgctccgtccccatgagctcagtggacctgtctatgtagagcagtcagacagtgcctgggatagagtgagagttcagccagtaaatccaagtgattgtcattcctgtctgcattagtaactcccaaactagatgtgaaaacttagttctttctcataggttgctctgcccatggtcccactgcagacccaggcactctccggaagcctggaaatcacccgtgtcttctgcctgctcccgctcacatcccacacttgtgttcagtcactgagttacagattttgcctcctcaatttctcttgtcttagtcccatcctctgttcccctggccagtttgtctagctgtgtggtctctgttctctccctaccgtgccttccatcccagccatccctgactacgtgtttcccccacagacatcacactggttcacctcgttgaccaccgtttccttctccccaagtctcccgggcaagggctgattctccagtctcctctgggaagctggccctgaaccacttagaacctatcgctccttcgtcacctatgtcatgtggcagcgctgcctcacttacgggtctgtgttcctgctgcctccaagccctggggcttgcgtggcgccgtcgcggtttgacgggaccgggcctcccccctgtgttgcagatatgctgtccaaggagcctccgtggtgtgacggctcctactgctatgagtgcactgccaggttcggagtcaccactcgcaaacaccactggtaagaccccagcgtcactggcaaggagcgaggggactgccgctgatgtcattgcttccccccttctccaggacaggccgtgaacttgcctgggtcctgcacattgatgggcaaaccttgaccaaatggagggatgagatgagcacacccaaggatcctactgaggaacagagatgtagggaaggcagggagcctgcagacgggtggctttcctgctggaggctgaaggtgcacagtttccaggcagcctgccaggcctgtgccatccttcctgacttcctgcctgcaccaaagctgagatgagctactgccctcatggtgtgcctcagtatgggccgctttgccgagaactaaggggctgttcccattaaaatgagatagataggtcgggtgcggtggctcatgcctgtaatcccagcactttgggaggcagaggcaggcggatcgcttgaggtcaggagttcgagaccagcctggccaacatggcgaaaccccgtctctactaaaaatacaaaaattagctgggggtcgtcaaaaccctgtctttactaaaaatacaaaaattagctgggggtcgtggtgggcacctgtaatcccagctacttgggaggctgagacaagaggttgcagtgagctgagatcacgccactgcactccagcgtggcccacagagcgagacttcatctcaaaaaagaaaaaaggaaaaaaaaagatagtgctgagctgctctctttttgtttgtttttgagacatagtcttgctctattacccaggctgagtacagtgacacgagctcggcttactgcaatctccacttcgcgggttcaagcgattcttattcctcagcctcctgagcagctgggattcaggcatacgccaccacgcccagctaatttttgtatttttagtagagacggggtttcaccatgttggccaggctgatcttgaaacccgtgccctcaagtgatgcgcctgcctcagccttccaaagtgctgggattacaggcgtgagccaccatgcctggcctgagctgctcttgatcttccaaaaaaaaaaaaaaaagccttcttcagtattgctttaacttgatgattgactagagttttgttttcatagactaaaaattctacatgaattgtggtaaccgggctggcagttggcagagttgccagagtagcattgcgggcgccttggctgccaggccctgctgcggttgtcctcacgtgccaggaagcagagtctgtcgttggcgctcctctcatacttcctttctttgcttccacagtcgtcactgcggacgtcttctttgccataaatgctcgaccaaggagattcctattataaagtttgatctgaacaagcctgtgcgggtttgcaacatttgttttgatgtactgactctgggtggggtttcttagtgagccccccggagggtccaggccacgtccttggtcacctccccagcagctgctctgctcaccagcctgaccccacccagagcaggagctggcgggtgtcttcctgcggcaatagactggaacgattaaggaccatggtgtgatagatcccatttcaaatgattccatatgattgtcagtgtgtgtgtcagactgtgatcgatttcactagatgtctcactcatcagaccaggccattgggcctaagtggtaaatgtgattaggaattagacctctccccattctgctagcaacatacagggacacttggaaaaccatttccccttccagtagcttggtgtccatcccagagcattcatgaagtcttcccgcctgggctgactgatgaggcagagcctctcagcgtaggaagctggctgcttaatgagctggctttactctagggtaagtggctgtggacttttctgcacagtgttttcataaagataataggatcctcttgccctgaagtctttttttctttttacgctaagctgtatttttagtgagctaccccttttaaaaaggtgaaatctttcttaacagggttcaaagatgagagctgaaaaatcgtggccttaacaactgaaagctttacagtgttcatgctactgaggtgtcaggagtgcagctgggccgcttgacacctcgtagcagccgtctcattctctcgtcttgctgcgtcctgtctgtggagtcctcagtcactctgctgttggagagtgctggaggaaatgcacttttactgtgctgcactttttatagagctgcattgtcggtgattccaatttaaaaatccatattcaaaaataccctcacacatccctgcatcagtgattctaatgatcagctttgactggacctcagctcacacgaatctccaaggaaaaactctacagagcatcttttagagcaagagattcatacaggccaagtgatgagagggggagtcaccaaggcttcagccccaagggcatctccagcctcaggccggcaggtcctatgtccttgacacaaatgcttcttgctgaaatcctccctagtgatgctgcgagtgctgttggtcccagttctgtgtagcttgccctgccccatgaagggccaccagccaagggccctggccacgtgtgcgccaccttactttggaagtctctggcttgtgtgctggatgaggctgccagaacttgttgggcgttcatcgctgttagtacatatattaaccgtgaggtgttaaacttttcttttgaaggtttggccagtttctaaaaaatgcacatttaaagagaagcatctaccacggctttaaaacaaaacaactctgagatgaacaatatgtgttatactcagagattaacaatctcaatcatacatactgattctttcagacatttaataaccactacatttttttgcattaatgaagtttgactatatgtgtaaagggactaaatatttttgcaacagcctgttctttgttcattcttttctggatagtgtgtcctctgtattgcggtagatttatacattctgttgcctaaatatgtgtgtaaaatgagctgataaactggagtactacttaaaaaaaagtctgtgatttataagatgtatatgctttctatgtgaatataagcttgtgcacaatgtttaaaagaaaaacaatgaattagaagagatcccccgtcccccagtctgacatatttcatacagaatgtttaaaagaaaaactctgctagtcttggcaaacatttggccatgtgaggcatgtggtcagtttccattttctattacctggaaagggccataaggaagcaggcagggcttaggtagcttggttacctaagttagaaagtaagagaatcatgattcggatatgaattgaagtggttggtacatggatacctgttctttaaaaggaatgtgggagatgagtcaagggtgaggccgattgttctgcccatgccctaccataccaatttcaataacaatcttgcctgtcattgcactcagaatcttaagatcatgtttcaaatatgttgattcaaacttgcttctaagcctgagtccagggatagcaatggtactgaccagctatggactgggagaacattgagtcctgttttccattggcttcagggcgcatccatgtggatataggaaaagcctctttccacagacttaggaagccccccgaccacgcggacgctcgctgggctgcactcagcaggctgcttgagtgggagctgactccaacatgccctgccctggctgggactaggcatgcttccagcccttcccgtgctctccctgctgtcaacacttgcgtacaaacctgcctagctgttgtaagttttcatcagtagcttaagtactagtagcaaaaacttaaattcattcagaaagttgccacttctgaatgagtagagcaggaaaagtaaactttactgaaacataatttgctgcaacagtcaacattgttatgctgaatgtgctctcaactgccctttgctcatcgccagatttattatccagtgtattcctaacagtcttttgttgtcgttgtttttaaaacaaaggtacggaccatgtgctatatataaatcgaatggcttaaactaatttgctatgatcctctaacaccgaaatttcccataaacttaagtgcctacacttaggacttttgaactttcagtcatctttttcgtggtgtctcactgaacgatgtgttagaacatgtgttccatttggagttttgggcctgtgcacggtcaaccccaattaccaatttagttgaggctggattcgattgctcagttcacctgccacgttctctccaaggagtggggtctacgtgacctttagtcctctacctcagagccccgagtcatttctgaccaccccgttctgtgtcctcactcttgtccctgaatgggtccctgtgtggatctcagtgtgtgtgtggtttctccactcctccccgctcatgtcccacacctgccatattgaaccgtttctgcactaatcttctccacgggcacggagtggagggaacgtcttgggaaaggggagagcttgacctccatctaggtttcttttatctggagaaaaagaacacttttgaactatgtaatgcttcaccctgaaaggcaagctaacgctaacttcc

SEQ ID NO: 7475 - DNA, 6000 bp, Homo sapiens
gactgtctcaaaaaaaaagaaaaaagaaaagaaaaaagacagtattcaggtctcatccctggagactctcatttaatagttgtgggatggatccactgcctaggtgactctgatgtgcatttagggttgggaaccactgacatagccattaaactgtccctaatcccactgtaaggttttctaggatattttcccagaaataactaaaccaccttcttagagaaggaacatcctgatcctgcgtctggactttggagtcattcttattttcagaacctatagccatctattccttgacaagatctgttgggttgggttgcactagactggaaaacatcaagaaattaatctagacacagacctaaaaggaagatttgcacgttttgatttattttactgcttacacccagcatcaagctccatgtggggcacatagaggagcctgaataaaactattattggttggatgattagataattgtgtttcctcggcagaatcaaactcaagtcaaatgtgtggttaccgggattaagaacagaaagaatagaggggactcctgagtgagtttcactttctctctctttttgttattgttgttcatttgttttgttaatagaaagatcaatatagctatagagcatttaaaataaaaggatttgggccaggtgtggtggcgaatgcctgtaatcccaacactttgaaagactgaggtgagaggattgcttaaagccaggagttcaagaccagcctgggcaacaaagcgagatgccatctctacaaaaaatgatttaaaaattagtggggtgccttggagcacgcctgtggtcccagctattcaggaggctgaggcaggaggattgcttgaggctgagaggtcaagactacagtgaactatgatcaggcccctgcacttgctccagcctggtgacagagtgagaccctgcctctctaggaaaaaaaaaaaaagaatttggtggggggggattaataaaagttcagtgccatcctgttcagagtgattcaaaggtggcttaagtcaaataccacatttagaaatttttgttagggacggatgattatggatgtctcactggccatgcccaaatcagagtcaatgctatgggtggctttctaggcagcaatggtcatttggatactgaaaatgtaaaaggagtgggcttcaatcacagaaacacagagaagtctcttgctttcagaggaacaggcctcacagccccttcctgccctcccttgttgccctgaggatgaagtgggagggagaaaaaggcacccactcatcaacccaacatcatagctgcaccttccagtgaccaccctggtggtctcactgacatccctttccagccaacttctctctgacttctgccccaggctctcaaatgaaagtgcttttgcgaggttaccaaagtacactttgaagtctttaatttgttggatcactctgctcctttcaatactgttagctacttactctttgaagctctattcccctggcttctgagacatcgctgtgttcccacttgcctgagtgaacacaccaggcggtcatgctggcctctcctctctccctcaccccacagccagccttctactgaatcctgcatttgggtagcatcctccgtaggcattacgcccatttctttgtcttgactcactaaccccagtgcagctatgcaaaggcctcctcatgcaccttccagctacctgccttgtccctgcccctgaatccattttctgcaccatggccagagtgatcattctaaaacgtgcgtctgatcatgtttctcctctgctgaagtttcctcagaggcttctcatcacagcttccttaacatgtcatgtaaggccctctctttcctgacccttagtgagctaatcagcctattatatgagagtccgtgtggcttctccagttctccagtttggactcagcgcccgtctatgctcttggggcatctggtgcatttccttccctctctcgaaattccatcgaactatattgaaattatatgcaaatgtctgtcttctagacacacagtccttaaggtaggagccatgtctcacttatcttggtacatctagagcagcagctagaacagggcccgcatgcaataggcactcattaaatgttcactgaaccaaagggaatggagatgataaggatgtactgggaattccctcagctacttcctttgaccttggccccttgggtgcttccttccagaggctctgggctctaatcactctcatggggttgcagtcactgttaaaggagcttaagactttctcttcaaaagggctttaggcagaacttgcaggaagttgttgcagacctacccatcctgagacagggagaaactcttgtaagttgaatgctcagcacatttgtattgtctggacagggtcagtgtccttctgcttaaagatgacctatgctcccagactcaggcccctaccagggagtcccggtcattgccaaagagcagaacatctgcctgtgcctcagggcctcacttacccttgccacagggacctggtgatacatctccacctactggttgctgagaaagtgagtcacagtccacttactaggggtatttggcttttggagatgactactggatgacattaactgtcttgggttgcagacagagggaacccagccaaagaatcatccttttctctatttcagggtacatctattgctttacatgcagacaatcttgtaataatatattccctaaaacatcagtctcatgacaacaatcatataaagtgtgtatcctctctttggctttgtagatatctaagtttactgcttatcacggttaagcttagagtcattcacttctgagattctactaagatgaaagtcatacacattaagctgtgtagttagtcgctgcacttctctatactgcctctttctatccctcttgttcaaggatggaatctggtatctcctcttagtcagtgaaatcggggagtagctggtccactcagctcctgaggcatttctcatgccagatctggttagacagcccatttgggagccctgcctgcatgatgataagtgttgtcctgccctgctagcactctgttaacacctttctctctgccaaggtcatgtttccttttttatagccctgccttcattagataagtcagacagagcccaagagacaacttcagtatttcttaaagacaagagttagcactttggagatgcaagccgtggaagagtggggcaagataattaaggatcctggacctcaaggcaaataaagtgtgtccccagcagatcaaaactgctgttttctgcaatcaacaattaacccgcaatgatttcgctcctgacatggccatctttgctgtcttctgaacttcctgtaggtggcaggtcctggatgctgtcccattttggttccaagactattgtgtggctctcttgacaggggccagtcaagtggcagttttctcctctgagttgcaggaggacaggcttaacagggtggttcatgtggcgtattcccacttctgcactgtcttcaaacaaagttgcagtgtccagtaaaacagcagcccaaatagcagtgaggttagatgtaggtggccgggcggtgggggggcgcgggtgcattgggaactctggaactgcatgaatcccacacggcatactggatttataatagagtcactcagagcttctcaaagaccctgttttcagggaggaaacagaccaggctttgtgcagctccaggctggggtgctgacatcactggacccctccttgtggggggacgctgtctgtcacgtgagctggggccatcagtttgagcgtggctgctccacagggcccaagatggaggcttttcttctctttccaacaccgaagggctgcattggtgggccagggagggtggcctgacccacctgcatatccagtgccctttagccttctttgggcttcaaatgcaaccttggggcacccagggaaatggagcttgcctttgatcatcttccccctctgcagcgtggcttcccagtcatactgtcggctgcatccttattcctcactttctttttccctctccacacatttctttgtctgtttggcagtgcccataggcattgcttgcttcacctggtatgtggcaactctgttagggggaccataggcccctgtggtctgcatggagcttaatccttttaccatggcgtgactccaataatggtaaaatgtcacttcacttccattggctttaggtaatgccaccactcacttgtagagtggcatatagatttccaggggtttccatacccaaccacccttggaaagagacaggtaggtttttcttgcagcctgaatgcctgctggccatgtagtgtggcctgggaattggtgacagtgaaagaaagagaaatagggcagaaaatgtaaagaaaaccctcaggtattaaggcctaggtggccaagattggaaatagagagcaagttgttttccttgttcccatatttttgtgctacctcctttcaattctggacctggaagcagatttccttccagaggtagaaatgttcttcctacccagcaattgtcagcatccggggtggcggagagggggccgctctgccatggactctccgtcacccagcttgtccctctccttccccaggtctgtgcgtgatgagtgctgcggccatctacacggtgaggcacccggagtggcatctcaactcggattactcctacggtttcgcctacatcctggcctgggtggccttccccctggcccttctcagcggtgtcatctatgtgatcttgcggaaacgcgaatgaggcgcccagacggtctgtctgaggctctgagcgtacatagggaagggaggaagggaaaacagaaagcagacaaagaaaaaagagctagcccaaaatcccaaactcaaaccaaaccaaacagaaagcagtggaggtgggggttgctgttgattgaagatgtatataatatctccggtttataaaacctatttataacactttttacatatatgtacatagtattgtttgctttttatgttgaccatcagcctcgtgttgagccttaaagaagtagctaaggaactttacatcctaacagtataatccagctcagtatttttgttttgttttttgtttgtttgttttgttttacccagaaataagataactccatctcgccccttccctttcatctgaaagaagatacctccctcccagtccacctcatttagaaaaccaaagtgtgggtagaaaccccaaatgtccaaaagcccttttctggtgggtgacccagtgcatccaacagaaacagccgctgcccgaacctctgtgtgaagctttacgcgcacacggacaaaatgcccaaactggagcccttgcaaaaacacggcttgtggcattggcatacttgcccttacaggtggagtatcttcgtcacacatctaaatgagaaatcagtgacaacaagtctttgaaatggtgctatggatttaccattccttattatcactaatcatctaaacaactcactggaaatccaattaacaattttacaacataagatagaatggagacctgaataattctgtgtaatataaatggtttataactgcttttgtacctagctaggctgctattattactataatgagtaaatcataaagccttcatcactcccacatttttcttacggtcggagcatcagaacaagcgtctagactccttgggaccgtgagttcctagagcttggctgggtctaggctgttctgtgcctccaaggactgtctggcaatgacttgtattggccaccaactgtagatgtatatatggtgcccttctgatgctaagactccagaccttttgtttttgctttgcattttctgattttataccaactgtgtggactaagatgcattaaaataaacatcagagtaactc

SEQ ID NO: 7476 - DNA, 6000 bp, Homo sapiens
caactcaagggggaagggtttgcttagagacccaaaagcagcatcccgacctaagagggtttggagggagagggtggtcttctctacattctctgcacccgctttgggacaggaccaggaggaagcagggaggagggcccgttgtccctctgccacagcgtctgccctattcagcacccctgcctattgtgggcatcttagacttttcaggaagacagtgggagccctagattgtcaaaattgtcagtttttctttcaggcctcagtttcccccatctatcgaagaggctcacacggactggggtaaagggatgggaaaccctgcagttgaaagtccattatgacttgatgacttgtgacctggggggtccacaaaccaggagagtttctacttgagaagccaggaagactggggctgccaccccatcctgttctgccaactgctctaggaaattcccctcctgcagtagcttccctgcctgggtacctgtcagtaggcaatgttgggtctccactcggtgccagctgcctgccaagcaaagcctcgggcagccgtaccaaaaggggtttagtcttttctgttgtacagatgaggaaactggggccagtgagaggaggctgttggtccaggctccacttcaagctggtggtgggcagggctgggagctcaggctggggatcctgagagcactggaggcccccatgggtcctgtagagcattctgacccagtgggtgccaccacgagtgggttagagggccctgggctgagccagataggctgctagtcaccagctgggggagagggcccttggccaggtggggctgaggtgggagtgtgtcccagtctgtatgaggaggaaggagtcaggacagacagcacttgcttttacagagatgaaatcaaagccctgagtggccaggcctgggtcttgaggctacttggctgcaggcaaagcctggacttgagcccagaactctacacagagacacactggttggccatgtggccagcagctggcttggccctaagccttggtctgttccactgagtaatgggttggtgatggcagcctggctcttggcttcttagtggggcaagaaaaggcagagagacaatagatttgggattttgtagacctgggtttgaaccccactgcatgctcttgggctgcttgtggtcctccctgagcctcagtgtcttttcttgtctccaagatgaggtgagctaatcttttgaggtagtctagggtagtggccagtggttggggcattggagtcaaaatagggtctggactcagttgagtctctgactctataagaacttaggccagtaagtcacctctctacagctcagtttcttcacgtgtagaatggggccaatgatcacatcaccctctcagctgtgggtgaggattaggggtctagcctggccccatcaatgtgggtagccccacagcgggcctggcttttggaccagacccacccttctgacatgggcccccacccttagagtccttctagtgtggatgaggaccctgctctgatctggggtcctcttgggggacttccctgtctgccattctctttggggatcctgcgctgccctaggaagagtgggcccaggctgcacagttggtccttggtcacagaggatcccaccacttcttcagggcctcaaggcaatcctgcctctctctgcacccctcttccccctgtaaactgaggggaggggaaaatcacccactcctcagcagtttctaagttgctttgtcaaattcagtgcccagaggatcctgctgggggtgcgttttaggatgagaccaggagtggccaatggtggggtgtggggcccatcgctcctatatgaagaccccctctgccctagactgctcctccctccccatccccatctccatcccaaagactggagctgctggatctgtggatggaggcgtgccccccgtttcacacattgagaaacaggccccaagtggagccagggaaggctgcacctgggcctctggattccttttgttctgtgtggggttgggggtgatggactgtggagagggcaggagagctgtctggaagggttggtcacctcatgggcaaatgcttggaagctggtctgagtccacggtgcagtgtgtatgtgtgtgtgtgtgtgtgtgtgtatgtgtgtggactcagaggtggatgtcttgtagaatgcatgccccatgaagacaggagtaaaagtttaccaccatccacatcaagctacaggacactcccagctccccagaaagttgcttagttctaggcagggatttcccttattcacagccgggagcagtgcctggcatagtgtgggcactcagcactcagcacatgctcactggatgagtgaatgaatgtgagcctgctgtttgctgtggactaaggatgtttctagatgtttgggcaaataccggatggtgggaagagctcaggctctgaagtctgcagtcttgggcccgaccctgggctcagccccagcctagctgtggggcaagattgtgagccttgtggtgcccaccttgtccaggtattgtgatgcactcgcagcagcaggcattgctttagacagcacaggtgctcgcaaaatggctgtatgtccgggaacaccagctcctgtgggtggctttctgtcctggtggcattgcccacacatacagctgtgtgccaacaagggttgtgcaaataaggttgtgtttggatgtgtgtgatgccctgtttgggggtcagtctctgcctcactcacgcaccctcttctccttttcacagacatgcttcagcttatcaacaaccaagacagtgacttccctggcctatttgacccaccctatgctgggagtggggcagggggcacagaccctgccagccccgataccagctccccaggcagcttgtctccacctcctgccacattgagctcctctcttgaagccttcctgagcgggccgcaggcagcgccctcacccctgtcccctccccagcctgcacccactccattgaagatgtacccgtccatgcccgctttctcccctgggcctggtatcaaggaagagtcagtgccactgagcatcctgcagacccccaccccacagcccctgccaggggccctcctgccacagagcttcccagccccagccccaccgcagttcagctccacccctgtgttaggctaccccagccctccgggaggcttctctacaggtaagggggatgtgtggcgggaggggacacccggggtggggcttccaggagcacaggaagaagcttctgctgtgatgtgagtagaggtctgtgcaggctttagaaactggggctccactcggctgcttgagatgccctgttactagcagtcctggtgtgcttgttgccggggtaggcgcaacctcgcactggaggcctggcttgaagccagtgcatttgcatcagagcccaggcagggactgtccataggaagccacatggggcaatgactcatccaaggccagtcggtgatagagacctgaagagcaggttgaaagtgggagagggaggtctgtgtctgcagccccatgctttatttctgcaggaagccctcccgggaacacccagcagccgctgcctggcctgccactggcttccccgccaggggtcccgcccgtctccttgcacacccaggtccagagtgtggtcccccagcagctactgacagtcacagctgcccccacggcagcccctgtaacgaccactgtgacctcgcagatccagcaggtcccggtgagggggtctggccaggggttggggagggggcagccccagcccagacacacagcttacagccaagcctctcccaccctcaggtcctgctgcagccccacttcatcaaggcagactcgctgcttctgacagccatgaagacagacggagccactgtgaaggcggcaggtctcagtcccctggtctctggcaccactgtgcagacagggcctttgccggtgggtgacgtgggcagggcataagggagtggggtctacacacacacacacatgcccacctggtaacatgtgcctggccctgcagaccctggtgagtggcggaaccatcttggcaacagtcccactggtcgtagatgcggagaagctgcctatcaaccggctcgcagctggcagcaaggccccggcctctgcccagagccgtggagagaagcgcacagcccacaacgccattgagaagcgctaccgctcctccatcaatgacaaaatcattgagctcaaggatctggtggtgggcactgaggcaaaggtgtggagaggcctgcaggggcacagaccggggtgtccctaggaaggaacagatcaggggcaactggaaggaagagagggagtgagactgagcctggacaagcagggaattggaattcagcctccccaggcctggccagcctcgtttatttagttaaactggtttgcaggcctcttcaataaaggtggggctgtgctaggcattggggatgcagcaatgaacaagacagacaaaaattgtccctcaaagaagagccgaccttctggtgggggagatggacagtaggcaggatgaataagtgctcgagaccaccacgtttggctcgttgcagagaaagcaggaagaggatggtgagggtcccctggtggtagccagggaaggcctccctgagatggcggcaggcacagcagcagctagccagaccctgctgtctgcatcttacattctaaccctatgcccggcctgggaggtgggtgctactaggcgaggaacggttcaggtagaaggaacaagtgcaaaggtcctgaggcagtaatgttgcaaagcagctccgcacccccttgctagggctctccaaccccacaacccccgacctgacaggccacctgtgcgctccccctccctcccacaccgtgcagctgaataaatctgctgtcttgcgcaaggccatcgactacattcgctttctgcaacacagcaaccagaaactcaagcaggagaacctaagtctgcgcactgctgtccacaaaagcagtgagtcctggctttattgagctccagtctggcctcttctctagccttgctccacctcccggccccaccccatccctagccccaccccacccttggttctggcccaccctctgccctgcccacctcacccttggctgtagccctgcattcagctctagtcccttggttacctctggtcctgaaagagacctggtgcctccctttggccctaacccagccccatcaaagcgtcctgggctagctttaggagctacagtagtccctaggcctccaagggcctaggctctgatttggggtcacatatccagcctttactcctggctctgttcctttcggcccacagaatctctgaaggatctggtgtcggcctgtggcagtggagggaacacagacgtgctcatggagggcgtgaagactgaggtggaggacacactgaccccacccccctcggatgctggctcacctttccagagcagccccttgtcccttggcagcaggggcagtggcagcggtggcagtggcagtgactcggagcctgacagcccagtctttgaggacagcaaggttgggccctgccacggtgcccccttccccactcccagccatatcctctgagcctcatgacagggccgggaagaccctaacagatcctacctcccatttcatagacagaataactgaggcctggagccacgtggggtcccacagtaaggtgggcagaatcctgaccccccccttcccagccccatgctctctggggtccctccgattctgccctcaccaccctgcccaaccccaccaggcaaagccagagcagcggccgtctctgcacagccggggcatgctggaccgctcccgcctggccctgtgcacgctcgtcttcctctgcctgtcctgcaaccccttggcctccttgctgggggcccgggggc

SEQ ID NO: 7477 - DNA, 6000 bp, Homo sapiens
atcctacaatgatgtataagtcttaaatgatatgcactccagtagcaggcagggtaagggtgattgtaggagccccaaagtgaatgactggaaatcagagggaatgcaaagagaagttgagactctcctacactcagaacaaggaaaacacccttcaatgcctcagtgaatgataagaggcagagggataaacaaaatgccctaggattgcccatgatctgcactaagccgtctatggcaggtagagactacaagtcccagcatgccctgtgcccaggtcaccttgcctgctgggaggtgtagttgggtaacagagagctggaggtggcttggtgcccagcagagctgatgcccagatgagagaagaggtggagccagcattccctctttgtccctgctaatgctattgacaagaagggaaggaagttgggagagggtgttcctagttttcagtgtaaaccaggaaactctggggggatgttgatgggagggaagaggaaagaggttgggggctggggaaggaatttctgtagcaggtggtgcagagataccgagcagcctatgtataggggtgtgtgtgtgtggtgtcagtgagaggactcagtttatgttgccttaatttcttaggggacaggatttttcttataattctgggaaatggtcttcagaaaaccctttagaaaagcgactatctctcgttccttcatttgaagtcactaaagggagtctgggccaaagagatcctattgatgatcttggtctgccctttccctttctgtgctcagcctcccctgctctctgatgagggtggaggtgggggagggagtgatccagagattctgaaatgttggccagagtcaagatcttggaaaatcttcccggaatggaaagcagttctggtgctaagtcctccaaggagaagacagaaaagcaaagaactggttctgagctccagggtcatggggaatctgagaccacccatcctactcctagacccctgagctcaggctttgtgctgggggcagggggtagggaaagcaagaattgaaaagtaatctctcttctatcccaaagtagggaagtcacaaccagaagaaatgtccagactggggagaaaacatgtccgtggctcccagccagcttcttcctctttccaatatcaatttctaaatgtgggggagggggagaatgaccactggtggagccaaacagtatgaaggagtcaaagaaggtggaggtgggggagggtggaccacagttctccatctctaaggctggttctgaaatagcttgaggccaggagcagtggcttatgcctgtaatcccagcactttgggaggccaaggcgggtggatcatttgaggtcaggggttcgagaccaatctgaccaacatggtgaaaccccgagtctactaaaaatacaaaaaaattagccaggtgtggtggcgcatgcctgcagtcccagctactcaggaggctgaggcaggagaattgcttgaacctgggaggcagaggttgcagtcagcagagatcgtgtcactgcactgcagcctgggcgacaaagcgagactccatctcaaaaaaaaaaaaaaaaagaaatagcttgagtctaggaaatgcacttcctttactttacctgcttgggtgggtaggtgcagctgtgggctcaaacccctacccgctttcaacttagacactcccaccacttgcttttcggcctggctcgggcagtgtgcgatttgcggcaccagagggcgctccgcccatttccaaagtggagctgtgtctcccgagggccgtagtggtttaatatcatctacgggtggaaagggatcaggacagggttggacgaccacagagattttagcccaagtgcaattattacgcaaccccatctccgacccgaagtttggtcccctgctcccgcggtctgtttagtcaccattcgttcaacacacatgttttttagagaatggcggcgcgaggccgggcgcagtggctcacgcctgtaatcccagaactttgggaggccgaggcgggcggatcacctgaggtcgggagttcgagaccagcctgaccaatatggagaaacaccgtctctattaaagatacaaaatttagccggcgtggtggcgggcgcctgtaatcccagctattcgggaggctgaggcaggagaattgcttgaacccgggtggcggaggttgcggtgagccaagatcgcgcccactgcactccagcctcggcaacagatcgagactccgtttaaaaaaaaaaaaaaaaaaaaaaacaaggagagagagagagaaagaatggcgacgcggggttggggggccggagatgggtgatatgttgcccaggctggtctcgaactcctggactcaagccatcctcctgcctcggtctcccacagcgctaatattacaggcgtgagcctacacacatttattgagcgcccgccagtttcctggggaccacgagcgtcccatgctcccctctctccaggatcgtcaccaccctgactcaggctcgcccacatccgcctcctccgacgcctctcatgtcccttctcctcttcccttaggatgaagtgaagctgccggccaaactgagcatcagcaaatcgctgaaagagtcggaggcgctgccagagaaggagggcgaggagctgggcgagggcgagcggcccgaggaggacgcagcggcgctggagctttcgtcggacgaggcggtggaggttgaggaggttattgaggagtcccgcgcagagcgtatcaagcgcagcggcctgcggcgcgtggacgacttcaagaaggccttctccaaggagaagatggagaagaccaaggtgcgtacccgcgagaacctggagaagacgcgcctcaagaccaaggaaaacctggagaagacgcggcacaccctggagaagcgcatgaacaagctgggcacgcgcctggtgcccgccgagcggcgcgagaaactgaagacgtcgcgggacaagttgcgcaaatccttcacgcccgaccacgtggtgtacgcgcgctccaagaccgcggtctacaaggtgccacccttcaccttccacgtcaagaagatccgcgagggccaggtggaagtgctcaaggccaccgagatggtggaggtgggcgccgacgacgacgagggcggcgcggagcgcggggaggccggcgacctgcggcgcgggagcagccccgacgtgcacgcgctgctggagatcaccgaggagtcggacgccgtgctggtggacaagagcgacagcgactgagccgcccccgctgccacccaccccattcctcgctccttccgaacttcctctttcgcattctctctcggctcgagctggctgagatttttctaaattgaaaacacgcccccctccccacacctccaggaactccactcccagtcttagagctgttaggacccgatggggaggcagcccccgcagtggacaacccccgcttggacacagtccgagtggaatgggaagggaatggtcaatccctgtcctggttgtccaagtcgggatctcagaggaaattgcagtgattccacggttaggcccccctgggggggctgccttcccctcagcctctccccacaccacccacccagctgctgtcattccgctcactgagctcttcttcattctcaccctgatccctgggggactcaaagccaaaactgcccaaagaggaaagattgaatcctaaaggggatccctgcccccatgggaggccccctactagaaggacgtgaaagcagcttttgggggaaactgaggcagtggggaagacagagcagaatgagccctcaccctggctgggggtccagcacaggctgtatctgcagagggtcccagaggaacgctggagccaagagaagccctgggaaggaggggtggggaacgacatgcatgtgagggatggcacactgatgtgtttatgcacctgtacacaggagcgcatggccatggctttggaaaggagaatggaaaaatagaagaaggtcggccgggcttggtggcttatgcctgtaaccccagcactttgggaggccgaggtgggcggatcacctgaagtcaggagttcgggaccagcctggcaaacaccccatctctactaagcgaaaacccatctctactaaaattacaaaaattagctgggcatggttgcgcatgcctgtaatcccagctactttggaggctgaggtggggagaattgcttgaacctgggaggtggaggttgcagtgagccaaggtcgcgacactgcactccagcctgggtgacagagtgagactccatctcaacagaaggaaaaaaaaggaaaataggagaaggtggaaatgggtgaagagagaagtcccctcactagctgcatgagaaatctatcttactgtggttctccatgggcagcaggaccatttttcagaatcaagagggaggacagtgtgagaaggcgatgatccaaagaagacagagaggtcagccccacccgatccctcaaatgggctcttggaggcacccccaggggcagcccatttctcaaagtccagaaaattagggtcccagaagggggcagcagcaggctgggagttaggagggagagcagggtgccggccctgccaccaagttgagagctggaggggaggtggggagagaacatcacagagcagccagccctggttcactcctggcagtttcttctcaagctccttccctaggagcatggtggcacgtgcctgtggtctcagctacttgggaggctgaggcgggaggatcgccagagcccaggagtttgaggctgcagtgagctatgagggtgcctctgtgctccatcctaggcaacagagtgatacgctgtttaaaaaggaaaaaatccttccctagagctagtatcctaaagctgcagagctagcccagacctcattggtttccttgtccttggggtgcttttcctgaatctttgcgggtgaagggagtgttgctcccagtccagaggcctgattctgtttggactgggttctcaagacacgaccaggttctcaagacacgagtccccttgttcctccccattaaagggggtttgtcagaagcaagaacagcccctctccccagtcacagcctgaagggaggccccgagagcttcctccttccccccacctgctccttaccttctctgccctgctttttagaactgcagttcattgttttaagggattgggggagggagcctggggacacaaaccttttatacaatacaaagctttgctttttttttttttttcttccttttccctttctcggttctcttctctcctctgaatggctgaagacccctctgccgagggaggttggggattgtgggacaaggtcccttggtgctgatggcctgaaggggcctgagctgtgggcagatgcagttttctgtgggcttggggaacctctcacgttgctgtgtcctggtgagcagcccgaccaataaacctgcttttctaaaaggatctgtgtttgattgtattctctgaaggcagttacatagggttacagagggcaggtgggaaggagagagaaagagagggagggagaactgttggtataaacttgtctcacgtgcctggggtgggggaaggccagggagataacaataattgccaatttattgagcccttattctctaccaggaactgttctaagcactttggtatggaattgcttatttaatctcataacagcccctctaggcagagcctatcattatcattcccagtctagatatgaggaaacagtgacttgtctaaggtgccatagctgggaagcagtggagctgggattcaaaggcacctggatcctcaatctgtttcatggttataaccctgtgtctgtaccgggttgtatagtctgtttcatggttataaccctgtgtctatacagggtctgtaaccctgtgccccctggatccacttccctgcagtcagggca

SEQ ID NO: 7478 - DNA, 6000 bp, Homo sapiens
ttacatggtttctcctgccacctgtatggggaggagaagactggtattcaaactcaagcctgtttctatcttattctcattgatttttatgatacatagaaaactttgtttctttctgaaaatggcattttagtgattcattgttttctgtgggagaaagcttatgacctgctcttttctttttcccttccagagggaatctggaaaaattgcaatcaaaacatcatttctctaagaaaattttgggtaaccgaagttctggacaacaggtaaagtgtgtttaaactttggtggtgctgacaaatcatctgtaatctgcagaagtaaactgggagagggaggaggacaagttaaaaattaagtctactttgtgtcggggctttattggggatttcccatatattacctcatttaggtggtttttacctggatcctggatgtagatctgggaatctcagaaagaatctgtcctttaaaatgctgttttaaatggatttgctgttgattggatttaatgtcctcacagttcagtttagcaatcattttttaatgtctaccataaataaggtacagaagtataatttgtagattctgttatatagtaaaggggtacaatatttattgcaagaccatttactgggcttctaagtaaaaccaaaatctggtatgcgatgcagcctagctagggaagatcttcctagttcccttctgtcttttgttttagttcttaatgattgccagcagtttgtagctgtaccatcttcttaatcccttttagcacttgtctaaaatttaagtttcctaataaatcaccccttcacagtggagtccaaccgaggtgtcccctttatgttctcagtggtggtttttctgtgattggaccgaataactatacctgtgtgttttttaaatttctatctcacaaaattctgaaggtctcatgaaataatagtatgtgtaaagaacctaggtctggccaggcatggtggttcacgcctgtaatcccagcactttgagaggccaaggcaggcggatcacctgaggtcaggagttcgagaccagcctggccaacatggtgaaaccccatctctactaaaaatacaaaaatgatggtgcatgactgtaatcccagatactcgggaggctgaggcacaagaatcacttgaacctgggaggcggaggttgcagtgagccaagatcacgccactgcactgcagcctgagcgaaagagggaaactgtctcaaaaaaaaaaaaaaaaaacaaacagaagaaccaaggtctgagaaatatctcagtaaatagtagctacaagtttaccttttaaaccagaggagatatgaaagcaatccatactttctgggaccttgtggggccaacaggtgttgactgaggtgaattgaccttcttgaagatagtagagagtgagatgctgtttattctttttttttgagatggagtcttgctctgttcaagcaattctcctgtctcagcctcctgagctgctgggattacaggtgcacaccaccgtgcccgggtaatttttgtatttttgtagagacggagtttcaccatgttgaccaggctggtctttaactcctgacctcaactaatctgcccgccttggcctcccaaagtgctgggattacaggcgtgagccaccctacccaactgagatgctgtttattctaacatttgttccactgtgaaccttgaggttagatttcaagtattcaaagcagtagttcctagagatatcataattagtaattaaattaagatttaatatttgttgattttattttggtatttttccacttttatcagggcataccaattcaatcaccatgagttggagcttcctgactcgcctgctagaggagattcacaaccattccacatttgtggggaagatctggctcactgttctgattgtcttccggatcgtccttacagctgtaggaggagaatccatctattacgatgagcaaagcaaatttgtgtgcaacacagaacagccgggctgtgagaatgtctgttatgatgcgtttgcacctctctcccatgtacgcttctgggtgttccagatcatcctggtggcaactccctctgtgatgtacctgggctatgctatccacaagattgccaaaatggagcacggtgaagcagacaagaaggcagctcggagcaagccctatgcaatgcgctggaaacaacaccgggctctggaagaaacggaggaggacaacgaagaggatcctatgatgtatccagagatggagttagaaagtgataaggaaaataaagagcagagccaacccaaacctaagcatgatggccgacgacggattcgggaagatgggctcatgaaaatctatgtgctgcagttgctggcaaggaccgtgtttgaggtgggttttctgatagggcagtattttctgtatggcttccaagtccacccgttttatgtgtgcagcagacttccttgtcctcataagatagactgctttatttctagacccactgaaaagaccatcttccttctgataatgtatggtgttacaggcctttgcctcttgcttaacatttgggagatgcttcatttagggtttgggaccattcgagactcactaaacagtaaaaggagggaacttgaggatccgggtgcttataattatcctttcacttggaatacaccatctgctccccctggctataacattgctgtcaaaccagatcaaatccagtacaccgaactgtccaatgctaagatcgcctacaagcaaaacaaggccaacacagcccaggaacagcagtatggcagccatgaggagaacctcccagctgacctggaggctctgcagcgggagatcaggatggctcaggaacgcttggatctggcagttcaggcctacagtcaccaaaacaaccctcatggtccccgggagaagaaggccaaagtggggtccaaagctgggtccaacaaaagcactgccagtagcaaatcaggggatgggaagacctccgtctggatttaatcctggcgggcttaaaacctgtgcttttcatagtttatggtaagcagcagctcactgaataatgacttccattgagtaaacatttggctctggttatcttcagggatgctgttggctcatgatccaagctcaggggactctggaggcggggctgggctgagggagagaaagggaaacacagtgttcccaggcacatgttcttagcaataatacagttgcagaactttacatttgtgtcttccagatctggagaagaacagacatatttaaatcattcttgttgaacagtttttgtatgtacagtattatggtacttttttttttttagtatgagaactttttttgtatttgtacattgaactgctgtagttatacttttatattaaaggggaaaaagtccttataaataatgcctattaggctagtgctattactttgttcagcaaattctaccctggctttagagtttttaatagatgctacacctaataaaagtgcctctcatattgcaggaacgatttcagatgtgtaaggagactgaagaggagataccagtttttagtcttggaaagcaagttcacagtagaaggaggttgagatctttcttttatgtgagaaatctttgaatctcattcatgcgatcagagttgtagccaatttttgaaaaccttattttcaaaggaaataaatgattcactgtaggattcctttaaatatcaagcatcaccagtatatgctttgatggtatatgtatataacttaaagttctttcaaaagcctgatacagaaacgtgtccccagtttggtagcaatgtggaaaacctggctagagatgatatggagctgtccctcagaaagcaaagccatgcctggaatccctaataggctgcttagttgtgaacctgtttgatttgccttaagcctctatccagaaacctgcccgcttccgtctggttaagaagccagtggtggatattttctttgttaacattagaaatgcaaacattcccttgtcaaccaagaatactcaaagctacttgtattggaaatggcagaaggcctaaatccaaatttcttattttttataatttaccatagaagttttgtgattaaattcttacttctgccagtggaggtttatgcctgaaaggtcatggggtcctgtctgtaaatagacctaaagagaagtgcagtatttattctttgtaggcataatgtgtttgtcactgacaagcattcatgttcatcccactagtcttttattgcagtcttttattgtcattttcagccttatgttggagagctttgctttctcatcatgttcacattgtcttaagttttgtgagcttctgagaaagagcttggtaaaggtttaaaggggactttgttccaccagggagcattttatttgggcgtctcacccttttctaatgaaagctgttgtaagccacctctgacttggaaattctgaaagtatgaatattttttatatcttaattgtaaaatgccagttctccattatttagatgaatagtagaacactgcaccctttgtgcagtgtttttgtttctctactgcattcctacccccaccaaaaaaaagaaacttaaggaaatttttttttgagacagggtctccctctttcacccaggctggagtgcagcagcatgatctcagctcactgcagcctctgcctcccaggctcaagcaatcattccacctcagcctcttgattagctgggactacaggcatgtgccaccatactcggctaattctgttttaaaaattttttttgtagagatgaggtctcactatgttacccaggctggtctcgaacttttgggttcaagtgatcctcccgcctcagcctctcaaagtgttagtattataggtgtgagccaccatgcccagcctagaaaatttaaccttatcttttagccattcatttacttttatttgcttttttaaaaaaaaatctttaaattttagcctagagaagcacctcaggaactctaaacatcttaggcaaaaattaaactcaggtgagactgaaggagaaatttcagaaatacacatgtacctcatgggtaattaatagacatgcacagtttccttcaaatcaaatgtttaataaggaaattcatataattccaagaaaacaggcaaaatttggaatacataagcctagctaagataaagaactaccagttaattcttaacatcactggagcttccagcaggttttttaattgaaggacaaaaagtgtccatacatttgtgttatctcttcagagcctgagggagaagagagtggctttgcccagtggaaaggctggggatttgagaatgatacagggggaaggagtcaagcagaaatgccaggaagaaccaggcaaagacatttggcgccagaagcatccacttaatttctgtgaagagtgcccctggtgtttcatcttggcctgttttgatgagaatgttatcttttgtgtctggataacgcgtcagcttcttaaagtacatataaagatattctgtcacctccccacatgcacacacttttaaaatctatttttattctcttgctaaagttgtaattatgtcaagaattttccagctctaactgccttcttagtacatgtctttctgcctttgaagcatatgagtttgccaaagtcattctcccctaatgacatattgtggacttacattaagaaaatgggccaggcgcggtggctcacacctgtaatcccagcactttaggaggcccaggcgggtggattacctgaggtcaggagttcaagaccagactggtcaacatggtgaaactccatctctactaaaaatacagaaattagccaggagtgctgggtggacgcctgcaatcccagctacttgggaggttgaggcaggagaattgcttgaacccaggaggcagaggttgcagtgagctgagatcatac

SEQ ID NO: 7479 - DNA, 6000 bp, Homo sapiens
actctcttagcaaatttcaggcatataatacattattatagtggccatgctgtaaaaaaataaaaataaaaaataaaaacaagccttgacccccaaatgtaaaaagaatacaggctttttaagaaaacttggaaaagatagaagagcccaaagaataaacatttatattacccataaccccactatgtaaagataactggtatatgtcttgcacacatatgcacacacatatacacggtcatctgaatattctattcaaaaaggtatcatactatatattgttctgtaccctgtatgtgacagaatagtgtgacacttttccatgtcaatattcttgcatgtcataattttagtagctgcatacttttccatcatatgaatgtggcatatttatgtaaccaattcccagtattagatttttgtgatttcaatttttttggtattacgattcttatataatgtatctttatgcaatctctgattatttctttaggaaaaatgtctacaagtgtaattactctgttaaaagggcttatacaattttccaaattgaaaaaaatgcttttttcttctaattctcaaagtaatatagacacagtggcaaaaagtctaaacagttaaactttttaatattttggcatatagtttagatttttcttttttttttctttttatcgagactgagactccctgtcacctaagctggagtgcagtggtgtgatctcagctcattgcaacctccaactcctgggttctagcaattctcctggctcagcctcccaagtagctggaactacaggtgtgtgccaccaggcccagctaatttttgtatttttagtagagacacggttttgccatgttagccagcctggtctcaaactcctgggctcaagagatccacttgccttggcctcccaaagtgctgggattacaggtgtgagccatcgcacccagcctaggtttttctttagaaatgcttctctttaagacttttgatagatatttcaagtgtctttgcagatttctgccactttatattcccatgatcagtatatgagtgtttacttccttatatccccaattctggattattccattattaaatttctagacagaaaagggtctcatttcaatttgtactcctttgattattagtgagtttgaattttttttaccactctcatgaattttctatttatgtcctttgatatttttgctgtgttcacatcttccttattattggtatataaatagccttttttataagtaagaaaatcctcagtcctatctgtaatacatatccctttccagattttaatttttcttttaattttatctatgatttgaagcgtttatttatttagagacagagtctcactctgtcacccagggtggagtgcaatggcgcgacctcggttcattgcaacctctgactcctggcttcaagcaattctcctgccccaacctcccaagtagctgggattacaggcacccgacaccactcctacctaatttttgtagttttagtagagatggggtctcaccatgttggccaggctggtcctcaactcctgatctcaggtgatccacctgccttagcctcccaaagtgctgggattacaggcatgagccaccacatctggcctaagcctgtgtggctttttgttttttggtttccgatttggaaagtaggcttagaaaagctttccctatttcattattatataaatatcatctgtaggctgggtgcggttgcacacacctgtaatcccagcacttggggaggccaaggcacctggctaacatggtgaaaccccgtctctactaaaaatacaaaaaattagctgggtgtggcggcaccacctgtaatcccagctacttaggaggctgaggcagtagaatcacttgaaccctggaggcggaggttgcagtgagcagagagtgcaccactgtacctccagcttgggcaacagagcgagactctgtctcaaaaaaataagaataaaataaataaataattaaatattatctgtagtttccttccctccctccctccttttcttcttttcttttcttttttcttttcttttctttccatttaaccatggagttggccaagcatggtggctcacacctataatcccagcactttgggaggccgaggcaggtagatcacccgaggtcagaatcttgagaccagcctggccaacatggtgaaaactcatctccacaaaaaatacaaaaaaaaaaattagctgggcattgtggcatgcacatgtagtcccagctacttgggaggctgaggcagaagaatcgcttgaacctgggaggcggaggctgcagtgagccaagatcatgccactgcactccagcctgggcaacagagcgagactccatctcaaaaaaacaaacaaacaaaaaaaacaccctggagttcactttagaatgccatacgctgcatgatgtaataatttaccttttttttcccaaagagtaaactatgctggcaccattttttgaaataatcatccttataccatcagtactcaataaaaacacgtttgggtcattcttagggttttctcattggttgcattatctttctggtttgttttttccgtgggccagtaccacagtttcaattacagtagttgtacagttagctttataagtgacatttagtaagtgcttattgtatgccaggtactgcggttgaatccacgccttttcttttcttttttttcttgtttgagatagggtctcactctgtcacccaagccagagtacagtggtgcaatcacggctcattgcagcctcaacctcttaggctcaaacaatcttcccgcctcagcctcctgaatagctgggattacaagggtgcaccaccatgcctggctaattaaaaaaattttttttgtatagaggcggggtctcactgtgttgcccaggctggtcttgaattcctgggctcaagcaatcctcccacctcagcctcccaacgtgctgggattacaggtgtgagccaccgtgcccggtcaaatgcacgcattttagagacagacaactaataagtagtaaagccaagaaatgagccaaagttgtctggctccaaaacccacatattcaaccaatccagtagtttgctctttaggacacagtactatttcaatacctaaaagtaaaagctcctcattattactgtttttcgatgttttcttgcttgttcttatctaaatttatttttccagatgatctttggaatcactacctcctcctacttaaaacaaacaaacaaaaccttccgaaatcccctaggatttttattaaaattgatttaaacttaaattattttgggaagaatttatatctttaaaatgtggagtcttaatgggaatatgttatatcatctcttcatttatatagcccttttatatctttcaacaaaactttgtaatttccttcatgtcagttttttgctttttatttattttttgagacagggtctcactctgttgaccaggctggaatgcagtgtggcacaatcatagctcactgcaactttgaactcctgggctcaagcaatcctcctgcatcagcctcccaaatttttcccagtttcttactaccttggttatgtctttggctcgcccctcccttattctttttttttttttttttgagacggagtctcgctctgtcgcccaggctggagtgcagtggcgcgatctcagctcactgcaacctccgcctcccaggttcaagcaattctcctacctcagcctcccaggtagctgggactacaggcgtgcgccaccacgtccaactaatttttgtatttttagtagagacgggatttaacgatgttggccaggatggtcttgatctcttgaccttgtgatccacccgccttggcctcccaaagtgctgggattacaggcgtgagccaccgcacccggccccctccctcattctttaccctccctcagagttagggtttctcatggtcttgtccttgggtctcttctcacaccaggcctgcttcatgaatgattccttcctgcagcctggccttggtaaactgctccctggcctctggtcacctgtgtcttatatcacacatgccattccctctgcccagctcacactgctccgctttgtgcctgtcagtctgttgtacacacaatgaattagagaaatgaaactgtcacagagcatggctttgtggagggcagagatttacacttgcttattatcatccagctgtgcaaccttgttgccctgtcttactttccacaggctttgagaaagcaagtgggtgtgtggggccatggatgaatgaagccacatgggatggtgggaagagagcacatatagcatttagagtctgatccaggttcgggttctggctttgccacttagcagccgtgtgaccctgggcaggttaactgaccctgtaagctccctttccctctctggaaatgaggctgctgataattcaccaagtgggattgtggtgagaattatcttaagagaatgatttaactcttagcacagtccctggcataaatgagagccacagctctagaagaggtgcaagtccttgtcttgctcatggaaagcatcctgtttgacagggaaattgacttttccagggaagttggtaaggacttcctgaaaagagatacttcagctggcagagatgttcagtggggttcccaggcagcagggagtgcatgtgagctttcccggtcgttgttagacagaagtagcttgcatcatctacagtgaagcttgttttgtctgttccctttatttcaggttccagtgggatgggagcttatcacggaaaacatagttttgatactttttctcatcagcgtccctgtttattaaaaagtttaaagagagaaggtgctaacaaactcagatatcctcccaacagccagtcaaaggtggattggggaaaattttttctcttgaaacggttcaacaaagaaaaactcggtctcctgttgctcactttcctgggtattgtagccgctgtgcttgtcaaggtgagtccctataacccatgagtgccattcagtctggtcctggcctgatggctgccagatgcatattctagcaggactctacattaacttgtagagtctaagacagggtcagtgaaccacagcctgctggccagctacccgtttttgtcactgaagttattggaacacagccacacccacttgtttaatcatccacagctgctttcatgggacagtgacagagctgagtagttgcaacagaggctgaatggccctcagagcctaaattattacagaaaagtttgctgatctctggtctaagagattaaaacagcgtagaacttgattgcagaattctgagctgtctgatcaaagggttagccctttgatccttttggtattggactttccttgtcacttacagctttgttcttgaatgtgcatgaaatcagcttaccacagaggtgaaggcaagaactctggtacaacagctttggtgagggatattttattaggcttgagtttttttcctccaaagttcactacctgataaagtttatctttggtgattagtcattatagggatgggcttgcaaagaggccctcatgatagctgccttctcaaagcagtttgcgtattttgagatgaaagaggaaatccgtaattaaagttaagatggaatgaggaaggcaattgtgtctgtggtgccctcagccgttcaactgaggatataacattgaaaatattgaccatatcagtgaagaatgggcttggaaaaggcaatggtaatagttgtgtttatgttttgtttaaaatttgaaagggggccggcgcagtggctcacacctgtaatcctagcacttcgggaggctgaggcaggggaatcacgaggtcaggagttcaagaccagcctgaccaatatggtgaaaccctgtctctactaaaaatacaaaaattagccaggca

SEQ ID NO: 7480 - DNA, 6000 bp, Homo sapiens
catttcaatatgagagtgggtcacctctctcatattgatcctgaaactaatcacttgtcttctaatgtctccttatctaaatgtgattttcctggacctctgttctcgcatatgttctcctggcttgcctttctctgccgagaccagctccatcaaggagaccctaacccagcggtgctagagaaattaaagacacacacagaaatatagaggtgtcaagtgggaaatcaggggtctcatagccttcagcgctgagaacctccaacagagatttacccaggtgtttattaacagcaagccagtcattagcattgtttctatagatattatattagctgaaagtatcctttatgggaaacgaagggatgggccaaaataaagggatgggttgggctagttatctgcagcaggagcatgtccttaaggcacagatcactcatgctattgtttgtggtttaagaacgcctttaagcagttttccgccctgggcgggccaggtgttccttgccttcattccggtaaacccacaaccttctagtgtggatgtcatggccatcatgaacatgtcacagtgctgcagagattttgtttatggccagttttggggccagtttatggccatattttggggggcctgttcccaacacttctctttcttcaggtctatactcaaacgtcacctccacggagaggctttccctgatcaccctagctacccctgtcactatctctatcctgctttttttcattatagcactttcataacattatatatttgttcatgtatttgtctatattcaatctctcccactaaaacataagttctgagagagggaggaatctacctgtatcctccaagcctagaacgatggttagcacgcagtgggtcttaatgaagagttgttgaatgaatgaatgatttgctttatattaaagtcataagttcctaggactttgacttatattagttccgctttttcaagatccaggaaagaggaaatgtttgtttacgctggaactaattcatgtcattgcttggattactgaaaggttaggaaggaaaaaaatgtggtaaaatgaatactctgctatactttatctatttgatacaaacagccttagtttatttctaagtgcagcttggatgaggcagaataaccaagttttatcacagggttcctgtgggagagacccttagttgagagaaagtagtatattggaaacatggcccaatcatagatcctgtgtggtgtgtttaaagggttcttagcttgtctcagataaagtgtaaataacttagtggttaaaaacacaggaggtagaattcagccatggtttaaatctggctctgtcacccattagctattgtgaacttagtttttattacttttagtttctaacacttttattttgataaccttgtacaaatttaaaataaacaaggagatttggatgaaatgaaagtttactggaaaggaaaagtataatagaagtcataaaaagcaggttgcagaacagtagacacagtataatttcattatggtaaaagaaaaaaaatacatgtacgtgcatatgcataaagaaagatctggagccaggcatggtggctcacgcctgtaataccagcactttgggaggccgaggcaggtggatcacttgaagtcaggagttctagactagcctgggcaacatggcaaaaccctatctctagcaaaaataaaaaaaaattagccaggtgtggtggcatgcacctgtggtactacttgggaggctgaggtgggaggattacacacacacacaaaagatcttataactaaaaatgatctctgggtaatggaaatgtaaatataggaggttttttggttttggcttttgttagtttgcttatctgtatttttaaactttgtatattgtacatatactgcttctataataataaaggttgttcttaagtgcatgaaatagaaataaaataaatgaggggtatattattaaaagttccattgtaagcggctgcttattaatatccttaaagtataatatcacccacatgatggtttttgtttgtcaggtgctactatgtcggcattgatcctaacagcttgcattatttggtgcatctgctcaatcaagtctaatagacacaaggatggctttcatcggctcaggcagcatcatgatgagtatgaagatgaaattcgcatgatgtctaccggctccaagaagtccctcctaagccatgagttccaggatgaaacagacactgaagaggaaacattatattctagcaaacattgaaaaacacattttgcatatctcccagcataagtaccaagcaaaattacagttcctcttgggagaacactgcattaagaagagagactctcttgcttcttcaaagagctttgggaaattaaattgctaaatttgtattctctgtgaatttcactggcagttttgaacttcccttccttaaagtactctaaacctttaaaaaaaaatctgatttatgcagcagagatgggacagccactttttctttttaatttaagatgagctatttggagcttatgtaataatggcataaagccaactagaggatgttgtattttgcacatcagatgtttactagtggctttagtatttttctttgttttaaatggccaaaagaatccagaaacattaaggcagggacagcagtcagaatcgacataaagctttaaaaactcaaggttttttcaacctactgaggagtacttttctctagttgttaaatagctggagtttttcttattcaggtttaatggaggttgaattgatttttaaacacatataacagtaggaaatgaataaatgggcttctgcatttggctttctacctgttccaaggctagatcggaactggtagactacgctgtaagcaggatttcactacctctcttaaggtttagcaaacttctaaatagcccattttaagggagaacttactaactttattgtgaaaggtctaaatgcccacttgaatgaagctgagagagagatctagcaaaagctaaaactcatgttgtctatctttgaacttggtaaaaacccacaggtgctgctgcttatatctgtgaagcactagcttattctaggaatgcctgattctttaatattgcctaaatcggaacctttttctatgttgcacacatggttttcagatgacccagccatctacaagatctgaattctactgaaaatatctagaaatgtggaagagacctacttgcacattcttaacctgtatttgaacacaaaatatctatacttcatgctccagcccaagcctataccctgtaatagcatactattattgaaatcgcttgaccggtcttgttcacataggcctctgggagtgatttggttctttgccctaatgtttcatttgacggtctctttttgatcaaccaatttttctaaaagttcagtcgaaagcttttaagtatagcttcctcccttgaaaaaaaatgtaaactatgactgctgagtgataaaacactgtggtgtgaaagtgtcatcttcactgccaatcaggcaaagaccggaaagatttgcattttattatgtctgtcttatcatgcaatggaaatgatgctttttgtaagtatgcatcttaccaatgatgtaacggtttaatacctttgaatgttttaataaccaagttgctgctgaacttatactaaatcaggggaccaaaaaacttgctcttatcttctcaaattgtattctatatccattaatgtatcagttatcccaaagccttcaggtggaggggtttaccaccttcctaggtcgttcaaccaggttttgtgaggaatgcattcaaagtggctttataaaagaagattttctttagcaagaataatgaggtcatgtcatttgttaataagtatctgtgataaatccgtggttcaaggttaagccattctggtattctggtattagcaactgtaaattctgccacctcatacatggaacagagcttgtgggatgctaatagttagtgaagtatacatgatttaatttctaataatctttatgttttctttaaggatggtggtgtattgctctttttcagctttatttttaagagtacagtcaggaaaccaacaaggggcctaagagtggctgcccctgcttgggacattacagcaagtgaaacaaagttaatgtgacaagctttgctttgttatcattggtcttcactagaggataccttttacatgtacttctctcttggatcaaatatgtctttaactgtacatctcagtggctggaggccatgccttttaagcatgtgtaaaatttttaaagaaatgaacatacacatagttattttagtaatatttcctgaaagaaaaaccaaattctgctataagtcttgatcttcaatgaacttttaaataatgcatttagctggaaaacaagactttcccagcttgtattacctagaagcgtgaatgtataggatacctgactactaagactatattctcagccctgccctgtcttttatttgcgggtctaatctaatattagaatatattaaccgcttaaggcattgaagccatatgggatggggaatgcatttcttcagtgtttctccgagagactttccatttccttggagttatggcggcaagtaagtatcatagtattaagaaatttgcctaaatctgagttgtgcctttctttactcacaaggcatgggctttgtcctggtgatcagtttgtaagccttcttccttcccagctccttaataaaagcaaagtgattgagtaggtaatgttcaaagtgtctgcctgtgtacatgtacttgtattgattatgtagttcagtaagatgtgcccaagtcatttcagaaagaaagacccttcagttttgatgcattttgctgaacacttgggtagtgagtgggatcctatccagttgaggaatgcttgcaatgctcattgaagggatttgctttgggactttgtcatcttccagaaaggaaacatattgtatatttggcccagtgtgattgattgctttatctttggtaacttttacttgaatgggatttgctgaattaatgactattgaatttaaaactaattatgagttgacaaataaataaaaggtagtgtttatgtctgagcttattgtgtttgagctaacaccaggttactcagtaaccatgacctgctcctccatttccatttattctcaacattaaatagttttatcttgttgttgccagaaatgcacttgtgccaggtattgtccctgctgtatgaaaagcttcttggcaatgaattctgtaatagtgccctacattatggttttctggtggaattgttttaacagtgacaacccaggatttccaatatatttttgttttattgttattaccaaaaattccactatgattgatgttcagtgattttctatagcaacttttttggtaactctttgggtttctgatttgttttagctaaaattttggggatatgatttgggtctttgattaatgtcagctgaacttggatttctagttcatgaagaaatctctcccaatacccatttatcctatttttagcaataattcgttaatgattccacttgattttcagaatattgtcctggttgattttgatttgacagcatacattatgaaatttgaaagtaggttaccattttgaggcagttggatataaattatgtaaatatgtatgattatgatttttataaatggcataacatgagtgtactaactaccttctatgctggccatgctacagattttctggaggtatgacaatagtatttttttatgctcagattaaaaatcagcttttcacctctccagtttttccaagtgatactcccagttctagagcaatctacagctgtttatgtgaggtgcccaacacccattcatctcaagtgcttcagtctttggtttatttcatgca

SEQ ID NO: 7481 - DNA, 6000 bp, Homo sapiens; identical to SEQ ID NO: 764

SEQ ID NO: 7482 - DNA, 6000 bp, Homo sapiens
agttccacattttctttggtgacatattttaaagttaaatttttttcacattaaggatgtatttcagaggatctaatagaaatcttccattataaatgttataccttttcccagttttcccaaaagctgggaaagataatctagttttatttttaggtttattagttttattgagatataatttacatgaaagaaaatacatacattttatgtgtaccatttgatgagtttcaagaaatgtacacctgtgtaaccactaccacaattaggaggataacctaagtttgataaatgtgctaatgtttttcaggaacacagtggttccactgtaccttccattttgaacaggatgcagacaaaccagactcccccaacctataacaaaaccaacaagtttacctatggctttcagaacatagtagatgcttatggaattggaacttaccgagagataaatccaggtaaaaaaaagcttgttatctttttcctctagagttttttttgtttgtttggttggtttggtttgttttgagacagagtctccctctgtcacccaggctggagtgcagcagcacgactgtagttcactgcagcctcaaactcctggcctcaagagatcctcccaactcagtctcctgtatagctaggaccacaggcgcacagcaccacacctggctaattttttattttatgatttttttttgactgggtctcattctgttgcctaggctgtagtgcaatggtgaaatcacggcttacagcagcctcaacctcgtgggctcaagtgattctcccgcctgaacctctggagtagctgggactacaggcatgtgtcaccatgcctggctaatttttaaaatttttttagagatgggttttgctatgttgcccaggctgataatttttaattttttttagagacggggtcttgttatgttgcccaagctagtcttggactcctgggctcaaggaagcctcctgcttcagcctcccaaagtgctgggattacaggtgtgacccactatgcctggcctttttgttcattgtttcttctaatgcctcactttaaatgctgttgaataactgaattaaaattaaagatgttaatcctagcactgtttttttaatttaattttatttttaattttttttgagacggagtctcgctgtgtcacccatgctggagtgcagtggcgtgatcttggctcaccgcaagctctgcctcccaggttcacgccattcttctgcctcagcctcccgaatagctgggactacaggcacccgccaccatgcccggctaattttttttttattttttttaggtgagacagagatttactctcgttgcccaggctggagtgcaatggcacgatctcagctcaccacatcctctgcctcccaggttcaagcgattctcctgcctcagcctcccgagtagctgggattataggcatgtgccatcacgcccggctaattttgtatttttagtcgagacggggtttcaccatgttgcccaggctgatctctaactcctgacttcaggtgatctgcctgcctctgcctccccaagtgctgggattacagacgtgagccactgcgcccggccatttttttgtatttttagtagagacagggtttcactgtgttagccaggatggtctcgatctcctgacctcatgatccacccgccttggcctcccaaagtgctgggattacaaagtgctgggtggcgtgagccactgcgcccagccaatcctagcacttttagaggccgaggtaggaggattgcttaagcccaggatttcaagatcagcctgggcaacatagtgagaccccatctctattaaaaaataaataaacatgttgacacctcagatcttgtgtactccctgtgaagaggtgctcattctggcagggcatggtggctcacgcctgtaatcccagcactttgggaggctgaggcatgtggatcacatgaggtcaggagtttgagaccagcctggccaacatggtgaaaccctgcctctactaaaaatacaaaaattagccggatttggtggcatgcacctgtagtcccagctactcgggaggctgaggcctgagaatcacttgaacccaggaggcaaaggttgcagtgaaccgacatcatgccactgcactccagcttgggcaacaacaaaaagatgcccatttaatgtaaggggcaggtttactgtcaggtagcgttcctttaagagttcatcggctgggccaggtgtggtggctcacgcctgtaatcccagcactttgggaggccgaggcaggtggatcacctgaggtcaggagttcgagaccagcctgaccaacatggagaaaccccgtctctactaaaaatacaaaatcagccaggcatggtggctcttgcctgtaatctcagcgactcgggaggctgaggcaggagaatcacttgaaccggggagacggaggttgccgtgagccgatattgcattattgcactccagcctgggcaaaaagagtgaaactctgtctcaaaaaaaaaaaaaaaaaaaagttcatcggctgggcgtggtggttcatgcctgtaatcccagcactttgtggggacaaggtggaaggatcacttaaggtcaggagttcgagaccagcctggccaacatggtgaaaccctatctctactaaaaatacaagaaaattagccaggcctggtggtgcatgcctgtaatcccagctactcaggaggcctagacaggagaattgcttgaacccaagagacagaagttatagtgagcctaaattgtgccactgcactccagcctgagtgacagagcaagactctgtctcaaaaaaaaagttcatgagactggattctttcatgtgccctcacagccctaaaacacctggacttctctagcaaatcatttgcaggaactgttttaagcaaaatgtttcttctaagatgtctgatatttttaaatggctttttttttggcttccctgttccaaggttagacagaaaaaatgtagcaagtattggccactttaggtacaacacagatttctcctatatttggagagttaattattaaatcaagagtgtgagtattcattttcagttggagccctatggaagaactgctttgctctgggctctctccatctgtacgttatctgatatttagctttatatcactgggacatggttgctgcacaaagagaagacagctggcctgccctgggagcagggtcccacgagttacaagagagtcagagaacaaaccaatgttgtcaaggttacaccttcatttccactgttctttgtttgaaatgttatcagagctgccaggcacagtgcctcatgcctgtaatctcggatattcaggaggctgaggtgggaggattgctcaaggccacaagttcaggactagcttgggcaaaatagtgagattccatctaaaaaaatattatttatcagtaattttaaaacaaaattaactgggcatggtggcacatacttgtagttccaactgtttgggaggctgaggtgggaggataacttgagtccaggggttgcaggctgcagtgagctgtgatgaaaccactgcactccagcctgggtggcagagaaagaccccatctctcttttaaaaaaagttatcagtagctcaaatttcattagctactttgtgaagatgtgttgattctgccatgaaagattttctctgagagtcctatctgtctggcagctggggagtaagtcaccttatattgatcttaagattatggaagcctgggcacggtggctcacgcctgtaatgccagcactttgggaggccgaggcaggtggatcacttgaggtcagagtcggagaccagcctgggcaacatggtgaaaccctgtctctactaaaaatacaaaacttagctaggcatggtggtgggcacctgtaatcccagctactcaagaggctgaggcaggagaatcacttgaacctgggagatggaggttgcagtgagccaagattgagacattgctggctgacagagcaagactccatctcaaaaaaaaaaaggggggtgggtatggaaaagaatgtaatatttgtggaattgctatggtttaatgtactttgtatttttctttttttggtttcttcatagctccgtatactattatcacgttcccttttctatttgctgtgatgtttggagacttcggtcatggcattttaatgaccctttttgctgtgtggatggtactgagggagagccggatcctttcccagaagaatgagaatgaggtaatgtttaagttacatctgcattgaactgaaattttataatttcccaagcattcattatgaaaattatgatctggaagtcttttatccatgaatttatcaaaaggaagtagagaagttatgttcattttaacaccaaagacgacatgtgcaagctggaagtggtagtgtgtgcctgtagtcccagctacttggaggctgaggcaggagaatcacttgagcccaggaattcgagaccagcataggcaacatagtgagaccccatctctaaaaaaataaaaattatttaggtttggtgcaaaagttattgcggttttggctgccaaaagaaatggccaaaaccgcagtaacttttgtgccaacctaataaaaaaatagaggccacatcctgtgaaagtgactgtctcattagcattgtattttggtttttacttcaagctctctgaatcaggatggggtaaagtagtgctggagaaaggggcaggtatattctgaataacattgtcacaatgtgagctgcagtgagtacattctcattacttctttcttctggttcccagatgtttagcactgtgttcagtggtcgatacattattttattgatgggtgtgttctccatgtacactggcctcatctacaatgattgcttttccaagtctcttaatatctttgggtcatcctggagtgtacggccgatgtttacttataattggacgtaagttgcagaagaagctaaaattcaaagcttattcctttcatgtgcagccctgatttttaagacaagtggtaaactgacacttctttaggaagtggtgacagtgtctcctcattcatgctccacactgtgagttgctttgtgatttgttcagcaagtatccaggaactaagattagaaatgattttttttttttttggaaactaaaaccagattccccagttccctacttgattgtgtgtttgtgtgtttaatttttctttttgtcattttggatccctcagtctcagctgctagtctctcctctttatttttcccctcccattttattgaagagacaagatagctacagtaatttattttggggtcagtttctggacccttgttgtttccctctcttgttcaaaaataatgtgactttttccctgtcatggtagtgaagagacgcttcgggggaaccctgttctacagctgaacccagccctccctggagtgtttggtggaccatacccttttggcattgatccagtaagaggacttccttcctatatgctaacctcaaattttttaacactaaccctgaagcaagagaattaaaatgaagataaatagttatgtgggctttcactgggcatggtcgctcatgcctgtaatcccagcactttgggaggccgaggaggtgggatcacctgaggtcagcatggtgaaaccctatctctactaaaaataaaatattagccgggcgtggtggcgcatgcctgtagtcccagctacccgggagactgaggcaggagaatcgcttgaacctgggaggcagaggttgcagtgagcaagctgcactccagcctgtgtgacagagcaagactccgtctcaaaaaaaaaaaaaaaaaaaagaaagaaagaaagaaacaaacaaaaatagttatgtgggttttcgttgacatatttttgggaaaccttgatgtatgtattcagaggacttctaagc

SEQ ID NO: 7483 - DNA, 6000 bp, Homo sapiens
atctggacacccacagttacctttgctgacttcatcaacaatgaaaccctcttaggagaggttggttgccctagggacataggaaagggacacctgtgggcatggcatcttggctgcccagcctctggccaaaggttagagggaatggctgatttccagttcgcagattcagaggccatggagttttctgatgaccaacacaggtcatccctcctggggtgagattagctctgggacactggctcccccctctccccgcacagctgcttacatggattgctccacgtgttgtatgggcatgaggctggggagagtggaagccaggctgagactggaggctgggattgtgactgaagggtggttctttgggtcacgcttccatagtcctccagctcctccttcttcttgcaggatctggtggcttgggtcacagccagcttcctgcacattccccatgccgaggacatcccaaacacagtgactctggggaacagagttggcttcttgctccgaccctataacttctttgatgaggacccctccatcttctcccctggcagtgtctactttgagaagggccaggatgctgggctctgcagcatcaatcctgtggcctgcctccccgacctggcagcctgtgtcccggacttaccccctttctcttaccacggcttctagtcctgagggtgtggcgggcggcgtggttaggcacatgtacttttccctgtttctactttctattctccgtgtttttatcacacctgctccccagattcccaccccctcaatgttcctctcacacgaaacccccatcagtccctttggttaattcttacttcctgttcatctctaaagtgttaaattataaaaatgatttttaaatattcaaagaaaaatatcacaaatcctactactcagaaataggtggtcacattacatcagacatctctttatgcatgtgcattcaaaaggaagagtagatagaattttgtaaaacagatgttgtatgtaatttataataaaaagtattagaggaattttacttgaatttattgtttgacctgttaagtatctagagtcctctggagaatactaaggagtctggccagggaaattagcgctgggggccagagggcaagggggatagacctggccaaggaatgtcatttggaaagctaaaggggcagggggtgggggtctttggaaggaaaacgatagtttgaagttacaggaaaatatctggccctgactaagtgggggactggggaagaagctgggctgaggtcaggagaggctgctctgcacagatcctgctccttcccagtgctgcattatcttgaaattttccttccccttccccctagccccaactctccccaactccaaccctgacccagaaagtagagtgatttggaggctggaagacaaaaccatgtaaggtctgtggaaatcacagctgttcagacccgcctccaaccccggccaccccgcccccttgccctagccttcctgtgtccttcccacccttagtcccaggcatctgactaccgggaacctcagccagagtccgggagccccccaccccgtccaggagccaacagagcccccgtcttgctggcgtgagaatacattgctctcctttggttgaatcagctgtccctcttcgtgggaaaatgaaccagaagacaatcctcgtgctcctcattctggccgtcatcaccatctttgccttggtttgtgtcctgctggtgggcaggggtggagatgggggtgaacccagccagcttccccattgcccctctgtatctcccagtgcccagccttggacacaccctggccagagccagctgtttgcagacctgagccgagaggagctgacggctgtgatgcgctttctgacccagcggctggggccagggctggtggatgcagcccaggcccggccctcggacaactgtgtcttctcagtggagttgcagctgcctcccaaggctgcagccctggctcacttggacagggggagccccccacctgcccgggaggcactggccatcgtcttctttggcaggcaaccccagcccaacgtgagtgagctggtggtggggccactgcctcacccctcctacatgcgggacgtgactgtggagcgtcatggaggccccctgccctatcaccgacgccccgtgctgttccaagagtacctggacatagaccagatgatcttcaacagagagctgccccaggcttctgggcttctccaccactgttgcttctacaagcaccggggacggaacctggtgacaatgaccacggctccccgtggtctgcaatcaggggaccgggccacctggtttggcctctactacaacatctcgggcgctgggttcttcctgcaccacgtgggcttggagctgctagtgaaccacaaggcccttgaccctgcccgctggactatccagaaggtgttctatcaaggccgctactacgacagcctggcccagctggaggcccagtttgaggccggcctggtgaatgtggtgctgatcccagacaatggcacaggtgggtcctggtccctgaagtcccctgtgcccccgggtccagctccccctctacagttctatccccaaggcccccgcttcagtgtccagggaagtcgagtggcctcctcactgtggactttctcctttggcctcggagcattcagtggcccaaggatctttgacgttcgcttccaaggagaaagactagtttatgagataagcctccaagaggccttggccatctatggtggaaattccccagcagcaatgacgacccgctatgtggatggaggctttggcatgggcaagtacaccacgcccctgacccgtggggtggactgcccctacttggccacctacgtggactggcacttccttttggagtcccaggcccccaagacaatacgtgatgccttttgtgtgtttgaacagaaccagggcctccccctgcggcgacaccactcagatctctactcgcactactttgggggtcttgcggaaacggtgctggtcgtcagatctatgtccaccttgctcaactatgactatgtgtgggatacggtcttccaccccagtggggccatagaaatacgattctatgccacgggctacatcagctcggcattcctctttggtgctactgggaagtacgggaaccaagtgtcagagcacaccctgggcacggtccacacccacagcgcccacttcaaggtggatctggatgtagcaggtaagacattttggtggggagaaggcttctggaagaagggctgaaaagttgtttccattagctttgggttttatgtagattatcccagaaaggaagacgtggatttttgtacttccccttttgctggatgggagagagttggctgctgagttttatttggatcttagctcactggctgggtgcaaagctgcagccttcctctacgtgacctcatccaaagatcttgggaaatggccgagctcagggaggaggcaggatttgggctaacagtgtccccattgccctcttctctcccttgtacttatatgggctctgctgctgggagcagccttctgtttgtcagctcagttctgtgtctggcctgtggtggtggtgttttggaggatctctttgcattctaccacgtccctggcatgtgcaggtcagtcattccaggttgtacatttcctttggagatggaccctcctccctgattttccttctttctctgggcacaattcacctaagtgtgaggggtcacatggatcccgtggagcattctggatagatcctggagtctggtcacagagagagccaaggctacatgatggcttggagtcttcatctttgtcttttcactgtctttccccacattgagtcagtcaccaggtgtttttttttggttttgttttattttgttttgtttctgttttgcacctgcagtatctcggcaggtcagactgtcatgccgtgcaggtgccagccctctctctgctgtttttgctcttgttgctctcagagccaagagccactctgcacccagagggcctcccatccacaccagcctgccctttactcagctctcactttcgtcatcacctgtgggatcctgtctgcagaaccccctcaaaactctttccttcacggtgcagctccaccctgccttgctgtgctctgcacagctacacccaaattctccatgtccctggacacgcacttcacatgttacagtcaggcatcctcctgtttgcttatgctttgtctctgcttagaatgtccttccatatcatcttttctggtaatgtcctttaaggccaggctgaaaagttgcccggaagggcccccttttcctgcctgcaactgtattcctgtgatccggaagttgcctaggccatgctcctctcacaggacaggccagtcagtggtttgtctgtctgcgtggaaagcaagagggtaaggatgatcattcatctctatccccagggacgagtacagtcctctctgctaatgaatgttgaaagaatgaatgagtgaaatggaatgaactccctgatgaagtattttaatttacaggtcaacagctttggctaaaggattggaggtatcctggggagagggaagagaaggaggggcacactcagttctgggctgctctttggcccccactctgaagccagatgggggcagagtccagaggggccagggcagttgcctgacaggccctcccctatcccaccctgagcaggactggagaactgggtctgggccgaggatatggtctttgtccccatggctgtgccctggagccctgagcaccagctgcagaggctgcaggtgacccggaagctgctggagatggaggagcaggccgccttcctcgtgggaagcgccacccctcgctacctgtacctggccagcaaccacagcaacaagtggggtcacccccggggctaccgcatccagatgctcagctttgctggagagccgctgccccaaaacagctccatggcgagaggcttcagctgggagaggtgagtggcgggcagtcagagaggaggggggcagtgagagtgggaaaggagtgttggcggacactcagctcacactgtaggtgaggggagagctctctcaggaaggcttttcttttccttttttttttttttttttgagatggagttttgctctgttgcccaggccggagtgcagtggagcaatctcactgcatcctccgcctcccagtttcaagcgattctcctgcctcagcctccccagtagctgggattacaggtgcacgccaccacacatggctaatttttgtatttttagtagagatagggtttcaccatgttggccaggctggtctcgaactcctgacctcatgatccaccctccttggtctcccaaagtgctgtgattacaggcatgagccacaatgcctggccaaaggtttttctagttatccaaagaaaccatgatgggcacattttccccttggaggctaaagcccaggagtgagaactctcttctgttttggatgggagaggggttgtactgttaaatggctggggataaacaggaggacttgaccccccttagggtgacgtcggggattctgtagcgccgagtcagttgtgtgactgcaattggggaagctgagctctgagcactcagttccctttcatcataatcaggcagcaggatggggtcaatggccatggaggcctgaccagtgcctccctaggtaccagctggctgtgacccagcggaaggaggaggagcccagtagcagcagcgttttcaatcagaatgacccttgggcccccactgtggatttcagtgacttcatcaacaatgagaccattgctggaaaggtcagctggccggggtagagggtacaggatgagccttgctttctcttgggagggtccctgaaaaccacctgcacttctcaggggtggtgctgattcc

SEQ ID NO: 7484 - DNA, 6000 bp, Homo sapiens
agaaaatgagagagggtaggttatgtaatttataatgataaaaatgtcattggtggaccagtgcctttcatcagtccgatcatggcttctctccttagtgagaatgatcagaaggctgctgggtgggtacagagtcagagtgaggggcttgggtcatagaatttaaatgaataatagcattgggttcagatctgactggtttgacttctcagagagcccagcttcttgattaaatgagattggacaccttcttcctttcacagacacttactacttcttctatttttatttttatttttatttttttggtctccttcgaatacttttattttttaccttcttattctgactgacatactcctttctggataaaatgttttgctctattcaccagattctaatttgttgttgttgttgttaaggtcaggattagagtctgatagaaatgatccataactaatctgtaccgaaaaaaatgccgtatttataagatcatgcaaatgatttcagggtgttgtggacaaccttgatgtcccaggttaaattcctatgcatcctaggttaaaattcctgccttaggcagaccttgcccatttttgagctgacaaagctgaagcctaacaaccttatcttattttcctcatggccaagttcttaggatcaccttccaccctcacctctcttctcattcctctactttctaatcttatattagggccaccgtggtgaccttggaactgttcagaccttgtggatacttcctcagccacaggtactgggttgaggtctaatggtgattgtagtcaatcctattttctcacctttccccctttgacttgtatcttgcactttctctagtattccagttaacacactcctcttttcttccctcattccttttttctggcaggctgtgcccatgtccccttgcatcgggtatgactgacatatttctctcattcaccgccggtctttgtccttctttctcataaccatattcatagccccatctcgctgttttactccttccatcttcctgtttttctttcctaccaatgcttccagggcttacatccctggacatcattttctcagtttctttctattcctacctccactactgctaagcattgccttttttttttttcctttttttttttttttttccccgagatggaatcttgctctgtcacccaggctggagtgcagtgatgcgatctcagctcactgcaacctctgacccccaggttcaagtgattctcctgcctcagcctcccgagtagctgggattacaggtgcacaacatgcctggctaacttttgtatttttagtagagacaggatttcaccatgttggccaggctagtcttgaactcctgacctcgtgatccaccggcctcagcctcccaaagtgctgtgattataggtgtgagccaccgtgcccggcctagcattgtctttaatatatctttttaaacatgattttcaaaccatatttgtatttcccattcagaccactcctctgagctccagacttgcatatccaacctaattactatttatactttgatgtcacaaaaacaatgggtcaaaaatgaaaccaacacttctctgccttcagatttctccttctcaggaaattgcaccccagttcacattgtaactcaagccagaagaatcatcattcattgcattcattgttcctttttctttaccaccaacaacatgagtaagtctgctcctctttcaaaatatatcttaagtccaaagcagtgtcttcatccccagagccataatccttagctcaaactagcatcatttcttacctgaaccacgtccagcatcctctttcactactctccctgattcgacactgatctctctctaatctgttcttcccacagcagctacagcttgcttttaaaaacagaaattatgtcactctctacttaaccctctttaatagcttcctattcattcacgaaacacatttttactgaacaccctctatgtaccaggccctcaaaaatccctgccctcatgaaataaatgaagtctagacaggggtaagggttatgaaggaaagatggggtgagggatggggagagagagagagagagagagtgtgtgtgtgtgtgtgtgtgtgtgtgtgtgtgtgtgtttacaatttaaaagagagtccaggccaggcacggtggctcacgtctgtaatcccagcactttgggaggccgaggcggacagatcacctaaggttaggagtatgagaccagcctgaccaacatggtgaaaccctgtctctactaaaaatacaaaaaattttagctgggcatggtgccacgtgcctgtagtgggactactctggcggctgagggaggagaatcgcttgaacctggtaggtggaggttgcagtgagctgagatcgcaccactgcactccagcctgggtgacagagactcctcaaaaaataaaaaataaaataaaacagagagtccagggaagacttcactgagtctgagtaggtgacctttgagcaaaggacttgaaagaggtgaagacagtgagctttgcagaatattccatgtggagggaggccctgaggtagagtcatgactggctttgggactgaacagaatagaataaaatccaagcttcactatttactatggcaaatactaagtatttactaaggcagcccaggcccctattcccccaaaaaacaaagacaagaaacgatcctctttatctcctttcctgacactccctccctcaatacataccatccacactggtcttccagtttaccagaagttgtttcctgctttttcctgtgttgtgcatctgctaggaatactcctccaacccttatgcccgtatacaatttgcaaggctggttccttctcatccaatgggtctcagtttaaatttcattttaggccttttctgaccacaggacctaaaacatttgggctctttttggccgggcgcggtggctcacgcctgtaatcccagcactttgggaggccaaggcgggcggatcacgacgtcaggagatcgaaaccatcctagctaacacggtgaaaccccatctctactaaaaatacaaaaaattagccgggcgtggtggcaggcgcctgtagtcccagctactcgggaggctgaggcaggagaatggcgtgaacctgggaggcggagcttgcagtgagccgagatcgtgccactgcactccagcctgggcgacagagcaagactccgtctcacaaaaaaaaaaaaataaaaaatagggctctttttctttctttcctatgtcagtttcctatttgtttccttcctgacatctaccacaccatgcaattgggattcatatatatatgaatttgacttaaatctcattaggtatagtaaatggcatctgtcatttaaacttgcatttgatcactagtgaagattaagcattttcccaagtaattgttagttcttagcatgatctattttctatattttggccaaacaaatgttcatttaaagtcactttgttttaaggatgacagcagggctggacagccaaaaccctaccctctccatttattttggaggaatttattttcccaaggtcctggcagagatagtgactcaccgtgactatctctgcaaaaatcattccaaaacccacaccaattcagagaaaagtgcttcatttcgataacatcgacttgtgaaaacgagcaagaaagttgcatttgagtggtaccaggtttcaccattatgcagttatcgagcaattattaatggccaacccaattatacgctacaaggaaatgacggtcacagggaagctcaaagccccgaagcgagggaagccctgctcctcaccggcccctccgccttttccagggcgctctccgtcccgaggcaggagatggcctggttgacccttcgagacaaggcggcaaaaccggtgctgggcttgcggggcagggaatcaaggttcctccggttgctgtaccgtcccgcccggcccctctcccgggcaccggagagatgacggctctctcgcgagagcgcgagcaagacccggctccgggcggcggcgggatgttagcccagcgctgtagaccgcgccccctctggcgcagctgggagaggcgcggcggaggcactgccgggagcggccggcggcgcgcacgcgcaggtgagcggggcgggctcgggagcgcgcgggcacaagggcgaggggcggggcctgcgtcgcgctgcgggcacgtcgccgcgcgtcttcagtatttaatgtctctgtgttccacccgcctgggctagcacgtgggggagctgcggaagcgcggcgctgcgggccgggccgcggggcacagccgggggccggcggcggcgcgcggactccgcatcccgcaccccgatggtagccgaggagctggtaggtcgggggcagctgcgccggggaccccctgccggagacccgaaggcggcggggtcggggcgatggggagcctgaggtgcaggtgcagggtgcgacgcgccctccaggtaccccgggggcgggacgctccggacgcagaggtgtcctgggggctctcggccgccgcgcgctgtcaggcaggcccatctttccctccctcgtctgcgccccctctcgtccttccccgccggttgtctgcccgcgggctcctgacagatcgcgtgtgcgcggctctgggcggcgctctgcggccgcgccgtcctccccacgcgcgtcactgtcctcgggggcggggggcgagggcgcgacgcccgggtcgcctctctgcacctcaacttaaccggagcgtgcacacccgcctgcgaggctgacccgagcgcgtcccacccaaggtcgcccagccccgcgggcgtttacttttcaaaggtcgtgtgtacacagtctgagccggagctgccccttcacttctggagcctcgcccaacttctcaccctcggctcgcccgccggcgcagcccctgggagttccgtgcggcgagccaggggaactgggaagatgggccgggacatcggccggttgtgatccaaccgtgtttcgggctgagggaccgttcgaaccgaattggggtctggaggtcggaggctcaggggcgtctcggggggaatttgcattcgtagcccctgcaggcgtgtccggaggggtggaggccgtccagcctggggtgtctgccgacctcacgcccgggggccccgacggtcacgtgtccggccccgcctgcggcccagggcccggggtctgcgatctggagggaccgcgccagttttggggttacgatgtgctaggagaggcagtggctggatgcctcgaacgcgggctttctggcgttcaactcttttgtgccctagctgaaggtcttcctgtttcccttccagggagggataggagaagaaaggtgctgatcgtggtaggcggtgctgtggcgactcggaacggcatgggagccctgggcgtttcgggatcttcctctcctgggggatgtcctgggtggcggcgccttcctgccgccgttaacacaaacccggtggacttcgctccaggtgcgagtcgaggcctctcaagctgggtagggtgtatgcgcagggcaattagtgaggttaacctgggtatctttcccctactgtagtgcgcgttacttcgtgtttagatttgtctccagtgaaatctaggctgctggacctggtgcaacagtatctgttagttactgatcaaggaacaccgttcacaaaaagctattaattctggcaactagtagccttacaagctcttgtaactgctaagtccttcccaaattagtaccttttttttttttaactctttatttagaaagcaaagcttggactcttagcaccacccatccactttgctcttaaaggtacagaacatctttgaaatgaagaaggctgcctgacttgatcatttatataattcctctgatcttggcattgaagtggttcacctgctgattattt

SEQ ID NO: 7485 - DNA, 6000 bp, Homo sapiens
atggtgccattgcactccagcctgggcgacagagcgagactctctcaaaaaaaaaaaaggaaaaaaaaataaaaaattagctgggcgtagtggcacatgcctgtaatcccagctactcgggaggctgaggcaggagaatcgcttgaaccagggaggtggaggttgcagtgagccaagatcaccccactgcactccagactgggcaacagagcgagactccatctcaaaaataataataaggctgggtgcggtggctcatgcctgtaatcccagcactttgggagaccagggcaggtggatcatgaggtcaggagttcaagaccaagcctggccaacatggtgaatccccttctctactaaaaatacaaaaattagccaggcttagcggcaggcgcctgtaatcccagctattcgggaggctgaggcgggagaatcgcttgaaccggggaggcggagttgcagtgagctgagatcgcgccactgtactccagcctgggcgacagagtgagactgtgtcttaaaaaataataataaataggccgggcgcggtggctcatgcctgtaatcccagcactttgggaggccgaggcgggtggatcacgaggtcaggagatcgagaccatcctggctaacacagtgaaaccccgtctctactaaaaaatacaaaaaattagccgggcgtggtggcgggtgcctgtagtcccagctacttgggaggctgaggcaggagaatggcgtgaacctgggaggcagagcctgcagtgagccaagattgcaccattgcactccagcctgggcgacagagcgagactccgtctcaaaaataaataaataaaattataataataataaataataataattttaccttatttttgacttggggaaatggattaaatctaagtttgttggcatagttgctcaagcattcatccctctgaagttcagaattattttaccttttttattctttcactctttggatatgtttttattgaaaagccacagtatgctggcttgtggtcacttaaaaagaaaaacattttttaaagagaagggaaaaaaagaaacgccacagtactatttgtaaaaggggatagtgggtggctgccaagaaaagatttccaagcaaactccttttcagtgtttattcatttgaagagcctccttggggcagctgcaaactgtggtgtccttggtgctgttctcagtctgcgcctggtcattgcagggccccgtgaagcacgtgtacagagtcctgcagtgtcaggaagaagagctcacgcagatggtgtccacgatgtccgacggctggaaattcgaacaggtacatctcttaacagagcagcaatcccaggccccgttcaaggggtctgcagctcttcaaacaatcagtgtggatggccaattaataaccacgggagacggctacggccaggtgggatcctattccaaaacatgggcaaagagccatttggtgggcactgctggcctagtggtgcgtgaggagttggggaaacagaggagcatcatgtcttagcttcacacgcagactttccaggggagccaacgagcagtttaggcttgaagtgcctcaaagcctttggtttttgttccctcacagggatcgtagaatgagtccctaaaggagactgggattcgacaacaatccttccatttcttttcccagggtcagaactttttggttctgaatgtcttatgtaatccaccgtgaagagcttggtgaacagctgtgctaggaaggatcaggcgccatgggaagtgtggtgcggccgtttcccctacttctctccgcctcgtgcttacgactgagctatcaaaacaaagctatgacagttggagcttcactgttctcctccattagatggcagacttgttaaattctgttgccttcaaaacataggaaggccagagcgaatagagtaaatacaattttttttttttttggaaagtcaaatccctttcttcattccatcccttttagacatggcatttaaaacagacattgctacatcactaacttcccacaagctgtggtgtccactggaaaaatgtagtccttgatatttctatttcacattcaagtgatcctctgccacttattaactggttcacttcaatttcaaaaagccaaaaaagtcctctaacataagccttccaaggtgatactttcagaaaccagggttggaactaaccagacaacagcgcgacagccaagaccagctgctcttgatgcccttttcacttctgtgttgtcctggttgaagttggcaaagagcagctggccggcgccggcctccccgctctggctcgccaggttcatggctgggcgcgtggcgagtgggcccggccagggagggcgcgcgtgcgagggcgggtcaggctgcactcagggtctcggtcgccgccactcgccaccctgggatcaaccgcctgagtaaatatgattttatacggattatgcctacttatgtgtagagttttaacaggtcaacagctgtctcaccagatgcttaccttctaaaagaaaactcacactttgcattaatgctgttatctcacagatcaagtgcaaagctgtctctgccttcagagccagcggtgattatttctcacacttagcttccaccacggaatccactctgcctgtgtctgtcatcctggttcttactgggcatgggttgtaaaacgtcgccaagagtttaatgccctccactccagaagtatttttcctaatatgagctcttaagcaaaggatttttttaatgtattctttgtgaaactaaaatgaataatttcttgttaatttctcatcttattactgtcccgtgggaagacggagggtgttcctattgcctcccttctggatgaggaagtttgtttcagacaggcggaggcgcccccagccccatcctaccacagtcagccatgccgcccatgtgaggcctcgcctgctcactgggatgccctcaccctctgcctgagctgctcccctgcgtgtgtatttcctctttagaattaaattctgaattctattatccaaaaaggttaaaagtaccagcatgctgggcacggtggttcacacctgtaatctcggcactttgggaggccacggtgggaggattgcttgagtcctggagttcggagaccagcctgggcaacatagcgagaccccccttctctatcaaaaataaaagaattagccaggcatggtggctgtagtccctgtagtcccagctactcaggaggctgacgtgggaggatcacttgagaccaggaggtggaggctacagtgagctgtgattgcaccactgcactccagcttgggtgacagagctagaccctgtctggaaataaaaagtaccagcagcatatgacttccagtagctgatcagtgattggctcggtgctttccagagcctcctgtccccagtctagggcttctgctgatagaggagccagctgtgtgtgtgactgaggcaaatgtccattttgttggcagatgcgttctgtcttcccttgctgtgctcgacggggcgtgggcatgttaatcctgccgctgacggggggggacttcagagcttgggtgaggggacagtggagctcatactcttcctcctggggaggcctcaccaatgatgccctgatgaagaacaggcccatttctccccgggggctttggtagtcacagagaactcatataaagagttaaacctttgataacttaaaagttcagtcggaagaggggtgatttgtgtagcactttcgaaagtatgttaagattgccacatgaatgttcactgtattcttggttcatcagctcatcagcatcggatcttcctataactacggcaatgaggatcaggcagaattcctctgtgttgtctccagagaactaaataattctaccaatggcatcgtcatagagccgagcgaaaaggcgaaggtaaggagccccttccctgggcagttgcctctggcttgcttgttcgcaccccctccgtgggcttttcctgaactcttgctcctcacttcttccctggccttctagagccagcgttgcattttcccctcgttttgttatttttgactgttgtaatttaattgggatttacggagcactgacaggtgtttttagttagaaaatatgaacctaaaaagggtagactttctccatcctctgccaaatcaatgaaaaagaaaagctggttgccactaattactacagggtaggatttctgaactcagacttggaaggtattttgatttattctttaaaactgtgcttttttcactgcctcaggagaaaagggtgttttcttaccttggtgacctttacctcccttaagttcctggaaaactgtttcttttccctccactgtgcacccccctcacccccaacacacacacacacacacacacacacacacacacacacacacacagcttctaaatcgtggataccaggtaagctggaaccacttcctttcagttggcaaagctttggtccaacagcatataagctttagacccagctgtgcccagcaagagagtgtttcgcaccagaagcactgcgggtgaggctgcggctgcacccctgcttgcttcctgggatgacaggaccatcatgccactcatcgggtccagtggaaagcatcccccgacatctctgtctttccctcagcagcctcagcctctcccccatctccaactttcagattcttcaggagagaggatcgcggatgtaaactaagaccccgaaaactccagaccttcaggagagcagtcagcagagcccctctgtgaagtgaaacctcactcctgtccagtgaccgagccactgcaaagcacagctgatcctggccccctgtgaagaagtgttctggtcaaaactaaaggaactccctccccacctgcaggactccgaagacagtgcgacttctggctgcagaataccttttcagaaacctgctttcatttgcttagccagtattagaacagatctttacaacagcagctgggctgggttcccagtcggagcctttcggggatctgggggatgagggcggaaggcctagctccttggaaatggcctgtactttaaggacgctggagccaagaggattgttcccgtgccgtgccatggtttcaccctatgtgtgccacaatggacgttagcagctgcttcggaacaccgtccctcctatgcaccctccaagacgtgcagcagatgcaaagggttctagctgcagtttgtcgaattgaggttttaggtaaagcatagagttgccagagtaccccgcattcccatgaatagagcctccaaggaaagggaggatggggtgtcctttgttgtggttggaggttggtgatcattgctctggatttggggctcccggctgccaccacatgcagctttgcctcacctttctccagcagccgggaccctctggagagcttgttttccctccaagaagaggtttgagacaggcggcatcctgcactgagtcagacaagtgggagctgtaggaactgcacctgcagcctcttcttactccccattgaccctgtcttccttccctggctttttcaactggaccaaagatgaaggcacttatggaccctttgatggcttggagtggggaaggctgtttctttgaaagttgccaaatgtgttatgttgtgtctcagagagagttatttctgtgactctcttggaaatgccttgactgaatgtgcaatatttgtgtctcttggtttctaaccttggcggacctgctcccctctgtactgtccccagtggtatgtatgtatgtgctaggcagtctggggaccccctgtgtctctgaccacccccctgacccccgccattactttcttttctggagtgccatgctggcgaggatccggatgcggcagcaccctctttcgggctgcatccacagagtttgtgtccacactttctctccgagcatgtgg

SEQ ID NO: 7486 - DNA, 6000 bp, Homo sapiens
gagggacggcggggcggaggggcgaagcgagcctggactccgggggaggcgaggccgggaagacccagtcccgaggagcagagggggcgggccagctccgggccgggggcgccgacggggccggttccggttgggggggtccctgggcccggcggggttgcgggacgcgccgtcggggagctgcggcccgggagcccgtccggaggcggcgcggggtccgggcggggcgcgcaggggcggcgccaggcggtgacgtgcgcgggggacgtgccgcgccagcgacccgagcacttaaagtcgcccccggcgcggagcggaccggcagaggcgggcagaggcggcgagaggcggcgagaggcgggctgaggcggcccagcggcggcaggtaggcgcggccgcgatgctcgcgcgcgggccggggcccaggagctcccccgtgccgggcaagggggcgacctcggggtccgcgctctcacccccaccccgcccactttgtccatcaggtccgggggcgcccggggcatggactagccttctcgaccccgagcgggccccaccgagggctcccgagagccagccgcgcccctccgcgccctcgcatacctggctgcccagtctcgtctcccccggtccggcccggcgcccacccgtcgggctgccctcaggggctgggctcgggccaggagatggctgcgccggcggccaagcccggtccgggtataaatagctcggtccgcggtggcggggggcgcgggctatatttggtggggctgctgcagccctccctgtatgggtggcctccccgagggagtggggagcacttgcgctcgggccgtggcgctttcccctgttcgcaacaccctgaacactccccgacccacacccgcccttgggcaatgactaacagcccgagaccgtgcagggaagtgggggaccctctccagagccaggctgggctccctgggttcgccctacctccacccctggcccccagctcgtgggaaaaccaggcgcagcctttggtagcctcccacttcctaacccacgcctcagtttccctatacgaaaagtgggttggtcaggagcctccctgggtgttgggccagtcaagagacaggagccgcagagtggaagggaagcccttagctctggccggggcctccaggggtggctggagtcggtgagggacgatggggggagccgaggggcggctgtcctcctctctgtcccagaggcatgggctgaaagggtccctctcctggtgatggccagagtcaggcctgctgggcgggaaatggcagttggcccaccccaaggcccaggggcttgtccatgctgagcacaagggtgggaggtcttgtgtctgttggggccggggagtccaaggtcccagcttcactgcacaggcctggaagtcaggtgggtgctggcctgaccctgctgaaggagggtctattccgccagcgtggtgtggaggcggctgggctcgactccctcatggagggaaggaactgaggaggtgctaggaggccgtgggggggtgtctgcccccagagaggctttgagtgcatgggggctctgccgtggcacgtgcagcgtctgtcccccagggccccatggtgtggacagagtctggggtgggcacctggaggcctggtctcaaggcaggcttggtaacgaccccatgtgaccttgggcagggcccgccatccaggccacccagaaagccatgtggcctgcacgatcaggccagaccccactgactggagcggggcactttactttggaggggcagctaccagagggctctatggatcccagcccagccgtcaggccggacgggtcccccctactggcctgcagtgacccttatgccaggctcggctggctcagcggtgggtcctggggtgacctggccacgtgggacagaagggcctgtgccgctccctccagtgaggtgccaaatgtgggccacactctgggccccagcgggggccttccgggcagtggcgcagagccattggaggtgcccgggccctggggcaggggcggggcgggagcagacagagctcagggcgtcctcctagcgtcacctgcccgagtcaggcccatctgtgaaatgggccacgccgggcagccgcacgcaacggaaccgaaccgccgggctcctgctccgagacccgcagttcacgagtcgacgcccccgagtcccgagccgcgcccactggtcccacctctgcagcaagtggagtcggccccgccctgtggcttcgaggccccgacgcctggcgcggctcccgggctccgctgaccccggtggacccgcgcgccggcaattacggtagcgtccagtagggcgcctactgcgggcaatacgggggctcctcccatggcgcggtcacgtcccccacgtcccgcggctggcggggcggggccgggcggagcatccttccctccccctcccccgggtgggccccgcccagcctcgaccacccgcgccgacccccgcccgcagagccgggaagccggaacccgcaggcgccctccagccgtccctccggcccgggcggggattgcgccgaggaggggcctctcctggcgagggtggagttttgggttccccccttcgccccgcacctcccgccttcctgcctcctcccggtcttcaccttcccccccgggtccccacgacgcccgctgggcggcggtggggtagggggcgcctcctgacccgactccccttccagccttggccttcaggcactggctttagggtggaggggcggccttgcggggtccaggaggcctcggaggtgggggacggcggctctggaccagctccggcccccaccacctcccggccccagggcggtgacagccttgcggagaaggggtcttcaaagctctgagaccccgcagtgccagctcaggattgaagcctgcggcggcacatgcagccttcctttcccaaaggggacttgcgcccagccccacttggggcaccagtgggggctcctggccctggccctgggtgggagtggccaatccgcaaatgaggcctgtgtgtctgccccgccggcccctgccgtcgtgatgtaagcggacacagagcggcagggcacgggctgcgcgaggggtctgcgggggtcagaggtggggcgcagggcccaggcctggggcagccccttgcgcagcgtccaccccctgcaagctcggccccgacacctttgcaggcgcctggggcggggctgccgggagttgctcactgctccttccttgtttgcacaacaggggctgcgggggaagaagggaactgagggaggcccctcccccggtgcagcgccctcccgccctcggcacccctcggcagccaggcgctggccacagaggccgcttccttggtcctcaggcagctcatgggatccaggaaggaaacgaattacccttttcctgccccgcctcctgcctgggccacaaaggcagggccaaagcccatccttcaagggctggagtcagttaggtaacaggccacgggccccgggctcaggccactgcacggacccagggaacgggctgacagtccagcagaggcctcagcgaggcggcggcgctgcgcacaaacctgaggacctaggcgggtgaggggtctgcaggtccagacgcctgaggggaagcatgccagggtgcccagtgccccccaaggtggtgggcgaggtttctggagaggtcccggaggagcgggcttgggcagcaggggtcaggttcaggaccctctgtgcatgagtccaggttgactctgcaggacggcatttcgagccacctggcatggcgttccaggcctgtgacggggcagtgcaggggtccgaactggcaggcacccaggtcctgaggacttcatggtcgaatcctggtctaaagccaggggtccttgcagagccctgcgccctgcaccctcgagggaactgcctgcaggagcccctggcttgggagggcgcatggctgtgggacgcagggtctcctgcaagggactttcccacccacccctgccccaggcctcccgctcagcttccagcagcctggggtcgtagagcctttgggggacctgctctccgggcagcccccacctgggagatcagctttctcatcccagaggccaggttatttctgggtgggttggcatgcttcctggggggcggcggggggggggttggtaaatgtcaggggaaggccagcctgtggcgtgtgcccacggagaggccaatgcttggtggctgtggcgtgtgctccaggcaggacagccccagggttgtccctggaacaccgggcagtctgtaccttggcccatcacggtgccggggttatcctggaagatggggagtgtgggccattattttgtgccccttccccgtactctacctcctgtggaatcccttgccccaagccatgtgggcagacagctggctccaagtcagcccctggacaccaggctggagtgggaactcctggagccatttcagcatggctggcaccacaggctgggtgaggacagacgatggtgccaggttgtggtctgggggcttgtccaaatgcctcatcttgacacagaagatggccctccccacatgagcgtcacgtggaagccacaagcacctcaggtctcagaacatgctgtgctctcctggtcagtgagtcctggcactgccccaaccctctgccagccctccttgacactaattcaggggcgccgcgtctcctgagggtggccactgtcccctgcctccccacacgccctcgtctgtctcctgaggaccctggcgggcttcaaaccctgggtctgcctgcgtctcccacccccgctggtgcagccagggagactcagaggccttggtacctctttgtgttttgcagggggaacctggggtatgcaaaatgtgtctattcctgtttgttgtatacacatttccttccttggccttgcatggcctgtttatttttaaaagtgcaaacttgcaaccccaaacaagctggggccctgaggccgtcaacccctccagtctcccctgtgacccgcagtctgcgtcctgttcccagtttcattcctcaagtgcatatatttttatttttttattttttttttgagacagagtctcgctctgtggcccaggttggagcgcagtcgcgcgatctcggctcactgcaagctctgcctcctgggttcacgccattctcctgcctcagcctcccgagtagctgggactacaggcgcctgccactgcgcccagctaattttttttatttttagtagagacggggtttcaccgtgttagccaggatggtctcgatctcctgacctcgtgatccgcccgccttggccccccaaagtgctgggattacaggcgtgagccaccgcgcccggcctcagtgcatatatttttaatatcttgtagttaccctgctgtatactgtcatcttagggaccttttaaacaataccagtatgagcgggacctaccctgctgctcagtgaccccaggcagtgtgtcctaaggtggtgtgtcctgaggcgtgcgacactctgtcctgtcccaggcactgtggtgggggcatccggtgtccaggtgcagaggcaaaagctgctcccgggtttcccagaaatggttccgaggcctgggtcccagagagccagtgcaggttggggggtggacctctggctctgtgggggggtctgttctgctccagtgggccgtgtctgccttgtcatcatccagacagccacagctggctcctgggtcccctcgtcaagcagcatttcccagtaacagtgacttcgtggaacacttaggaagcccttaaaaaccatcctcggacctctgaggcagggactccagggggcacagcacctgtggtggggacaggcaggcaggctggatgcggggagggcccgggaggaggagtgaggagccacgcacggaactgctcagactctcccagcaaaggtcct

SEQ ID NO: 7487 - DNA, 6000 bp, Homo sapiens
tcaagcagttctcctgcctcagcctcccgagtagctgagattacaggcatccaccaccacgcccggctaattttttgtatttttagtagagatggggtttcaccatgttgtccaggctggtctcgaactcctgaccttaggtgatccaccacctcagcctcccaaaatgcttgggattacaggcatgagccaccgtccccagcctgtgtcagatttttctcactgtcatgatttttgcaaaggcagtttcaacagaacaaggccagccccccaaaaacccctcatgctcctttccagtaactatcctgcctgccaagtaaccactatccttccttacttctctctttcttttttttttttttttgagacagagtcttactctgtcacccaggctggagtacagtggcgggagcttggctcactgcaacctctgcctcctgggttcaagcagttctcacagacgcatgccaccacacccagctaatttttgtatttttagtagagacagagtttcaccatattggtcaggctggtctcgaactcctgacctcaggtgatccacctgcctcatcctcccaaaatgctgggattacaggtgtgaggcactgtgcccagcccactatccttctaattttttttttgagaccaagtcttgctctgtccccaggctggagtgcagtggcgcaatctcggctcactgcaacctccaactcagcctcccaagtagcagggattacaggctcacaccaccacgcccagctaattttttgtatttttagtagaaatggggtttcaccatgttagccaggctggtctcaaacttctgacctcaggtgatccacctgcctcaccctcccaaagtgctgggatcataggcgtgagccactgtgcccagcccactggccttacttcttctttttttgagacggagccttgctctatacccaggctggagtgcagtggcacaatctccactcactgtaacctccaactccctggttcaagcaattctcgtctcagcctccggagtagctgggattacaggcatgcgccaccacgcccagctaatttttgtatttttagtagagacggggtttagtgctgggattacaggcgtgagccactgcaccttactacttcttttttttttttttttgagttttgctcttgttgccccaagctgcagtgcaatggcatgatctcagctcactgcaacctctgcctcccaggttcaagcaattctcctgcctcagcctcctgagtagctgggattacaggcatgcgccaccacacccatctaattttttgtatttttagtagaaatgggttttcaccatgttagccaggctggtcttgaactcctgaccttaggtgatctgctcccctcggcctcccagagtgctgggattacaggcgtgagccaccgcgcctggccaactgtccctacttctaacggcatggattagttttgcttgttttttttttttgttgttgttgttttgtttttttttaaacgcggtcttgctctgtaacccaggctggagtgcagtggtgcagtggttcagtggcacaatcacagctcactgcagcctcaacttccccagctcaagtgatcttcccacctcaccacctcagcctctggagtagctgagactccaggcacatgcaaccatgcctggctaatttttgtattttttgtagaggtaaggttttgccatgttgctaaggctggtcttgaactactgagctcaagtgatccgcccaccttggcctccctaagcgctgggataacaggcatgagccacagcacctggccagttttgtctgtttttgaagtttttgtaaatgaaaacttttgtgagatccatcttatgtgtaaatgtagattgttcattttcattgcagcataatgtacgtaacacaatttagccattctacggttgacaggcattttgggtagtttctagttttttgacttattataaatagtgctgctatgaatactctagtacaagtattttggtgaacatttgtacacattttcgtggaattgccatggaattccaaaggcatagtgtattcataggttcagctttagtagtgtagtggcggaaaggtgtgacacctttcctcatccatcataaggatcacagctgacactcctataacaaaacccagattaacaagagaagggcataaccaagttatttaaccaaagttttatgtaacacaagagacttcggaaattaagacctcaaagggccgagtgcggtggctcacacctgtaatcccagcactttgggaggcctaggcgggtggatcacgaggtcaggagttcaagaccagcctcaccaacatagtgaaaaccagtctctactaaaaatacaaaaaaaattagccgggcgtggtggtgtgcgcctgtagtcccagctgcttgggaggctgaggcatgagaatcagttgaacctgggaggcggaggttgcagtgagccgagatcatgccactgcactccagcctgggtgatggagagagacccggtctctctctctctctctctcacacacacacacacacacacacacacacaccctcaataccctagaacaattgtttttatgcttaggttcaatgcagaatggacaagcagaatgtgatcagacaaaaggggtatgatctaatttaacagactgagcggggaacccaacaaggcttgtcggttcaaattcttcttggcttcccagtgtaacattccttcctccagggtattccttcctggttcctctggaatgagggtcttcaagggggaggagagaagggggagagtgacctttctggttttatggcttgctttgggggagaggggttctagtttctatgacccgccttggggaagaggaatttttatttctatgactcgcttcaggggagaaaggggcgggagacaggagggcaggagaaggtcagagagagactttgcttctgaggccttccaatctcctttagttcaaagcactcagcacgccaaagctccatactttgggatattgttttctttctttcttttttaaagagatggggtctcgctctgtcttccaggctggagtgtagtggcataatcatagcccactgcagtttcctgagtagctgggactacagccaccacgccctgggaaatcattttctgagcctcaacagtagatattgccagttttgcaaagtccgctgggcacggtggctcatgtctgtaatcccagctctttgggaggccaaggcgggcagatcacttgaggtcaggatttgagaccagcctggccaacatggtgaaaccccctttctactaaaaatacaaaaattagccaggcatgatggcgggcacctgtattcccagctactccggaggctgaggtagtagaatcttttgaacctgggaggcggacatcgcagtgagccgagatcaccccactgcactccagcgtgggcgacagagtgagactctgttgcaaaaacaacaacaaagtgatttaggccaggcacggtggctcatgcctgtaatcccagcactttgggaggccgaggcaggcggatcacaaggtcaggagatcgagaccatcctggccaacatggtgaaaccctgtctctactaaaaatacaaaaattagttgggcgtggttgcgtgcgcctgtagtcccagctactcgggaggctgaggcaggagaattgcttgaaccggggaggtggagcttgcagtgagcctagatggcgcccactgcactccagcctggcgacagagtgagactctccctcaaaacaaaacaaaacaaaaaagttatttgtactagtttacagttgcaggctgtgagaattttaatattttattcaacaggtacaatgatgttgtttcctgtgttattttagttacatgctatttattatttccaggtattttcagagttttcaccctggtcattttatttttttcacttatttttttgagacagggtctcactctgtcgctcaggctggagtgcagtggcgctatctcagcttactgcagccttgacctcccgggctcaagcgatcctcccacctcatgcttggagtagctaggatcacaggtgcgcgtcaccacacccggctaatttttgtattttttgtagagatgggggttttgccatattgtccaggctggtctggaaccccagggctcaagcaatccgcctgcctaggcctcccaaagtgctggaattacaggcgtgagccaccgcgcccatcccacacttgtcattttaaatacatctgtagagaggcaatgtgataaggcgtggggacagactacagcaatcacagggagaagtacttaaatgctccgaggccaagcaggtcatgaaatgatttaagcagctgagtggggacattgcctacccggacaaggtgactcaagaggagctgccatgtgaaaagagaagctcaaagtaagcagcttttgactttttagggaggccagaaatctggattttaatattttggtaactaattcatatttttggaaaacatactggccacacaaaactggtcagtgcattagatgcctagccttcaagatttccactctggggctaccccttagggcttggctttgggtgggggagtttgacttgcagcaagtaacctcacttgttagcgcttaatttcccctctggtcaaaagggcaaaataataaaagcctgtccatcggcattctgatgctcagatgagatcattccagaggtcgcccatctctttactgagccttcctttattacccaaagtcttactctacttaaagcatttggagaattttcggtttcctactgggcattttaaaactggggattcctatgcatgaaaatttttcccaagtcctctgaatgggatcctgctgggatgcaaagagttaagaggaaatagcctattagggtcttgctaatccgagaagttcaggacctgaaaagtatctagagcactgctaagagccccgactctagctagatccacgcagggcccgccagatcctcgaggaattgtagagcagaacctgggaggagacattagcatcccgtgctacaatggaccaaggcctcggcggagcgcgcagaagacaactctgggcccgctaaaccaacccaggatacccaggtaaggcgagaacccacggcgccgttagcggcccgctcaaactgaggcgcggctggcgggggactctcgcccgaaaatcagcttggaagaatgaactgtccggagcgaagtctgcgcccacccggggtccagactccacgcgggtgactcccacgcgcgccgcgcctccgccgcgtcccggactatccgagagagcggcgaggactcgaccgcggaaagttggcgctcgcgtcgcttcccgcgcgttctggggcgcccccctcccactcgagcgccacgtgccgcgcgccccccgctcccgggccgcggcgggacgcccccgcccccaccgcagcgcgcagtgcgcaggcgccttcccgcgggtcgcggcggcgggagcgggaggcggcggcggcggcggcagcggcgggagcggcttctgcctcggctggagactgaggcgaaggcggcagcggcggaggaggtggaggagaggcgagggtgaaggcgatggcgacgcggggcacatgaggccgcgaccggcgggacgggccgaggcccggcggaggaggcggctccgggggaacccgccgccgggtgaggggcggccgcagggccggctgaggagaagcgggccaggggcggggtcccagggggaggcgggagaactcttggggagcccggggaggggccgaggagaacctccggaggtccggggaggagcgcggccagagcgggagaaggaggggggcgccgccgaggggttcccgccgagtccggaggggcgtcgccggcccgcgtcctgccactgtccccggcgcaccctccctctttgtccccaggcg

SEQ ID NO: 7488 - DNA, 6000 bp, Homo sapiens
tccacctttacaaagccattttccctgactgcagtgctcctgaacccccgctccttttggctgacttacagttttatctttaagatataactaaaaaactgcctccccaagaagcctttatagatcttccctcaactccaaaattgaaattagtggcatagacccataatatctctattattaatatcatttttttctttttttttccaagataggtcttactttgttacccagactggagtgcagtggcgcaatcttggctcactgcagccttgaactcctgagcttaagcaatcctcccacctcaacctcctgagtagctatgatgacaggcatgtgccaccatgcccagctaatttttttgtattttttgtagagatggggttttgctatgttgcctaggctggtctcaaactcctgagctcaagcagtctgcccaggcttccaaaatatttattgagcacctactatatgccaggcactattctaggtactgccctcagcctcccaaagtgttaggattacaggcatgagccacctctcccagcctatttcattttttaaattgtggtaaagtatacataatataaaatttaccattgtaactgtttttaagggtacaattcccttgcattaagtacatttacattgctgtacaacattcaccactgtcctctgctatcatatttaattatttatggatgtagttgtcccctcctctgattggaaacaaaacgcttggcgttatttgtaagtgctgaattaacatggatgaacatgaatataatcagatcatctcctgagatgagatgtcatgtcacaagtatccttgtgatcctgcttgggtaacttcaggattgtgttcagttttcttccttgtacttattcaaaatggcattggttagagttcacggagtcctggatttttaaaggttctttgcctaatttcttctttacaagtttttggtgcgtacacttaacctaacttttttgtcttaccaatatctatcctataaatatgccagtgaaatggagcatattgcgttaggtaaggtgtgcatatttcaagaactagatgtgtttcaaagcacataatgaaacttcagcaaaaatgagattaagagtttaggctccaataatattgctgcgattttatttctgtcaaagttttgttatttttgctgtattgtttgcttttcttcaatgttttgtaagccccggttctttgatgaactcctaataagctgtgcttaaaactatgacattgacctttctccagaaacaggtttcagaattgtctgtttttcatgttctctccctgccttttctcttgtaatcaaatcagcatgtttttgtttttgttttggagacagagtcgcactctgttgcccaggctggagtgcagtggcactatctctgctaactgcaacctctgcctcctgggttcaagcgattcttctgcctcagcctcccgagtagctgggactacaggcacgtgccaccacacccagctaattttttgtatttttagtagagacagggtttcaccatgttgcccagactagtctcaaactcctgagctcaggcaatctgcccgcctccacctcacaaagtgctaggattacaggcatgggccattgcacccagcctaaatcagcatgtatttttaaacatcatagaatgcgagggtttgaagtgtcttttgtgatcatctaacattcactttgcatataaataaataaataaagacccatgttaatgccaaagggagtgagtggcagaagaatctatgacggaagcatatcttttggtgctgtcaatgaaagggaaacaaatgcttggcattatttgtaagtgctgaattaacatggatgaacatgaaaataatcagatcatcagttattctccctcctgatctgaaggatcctgtgtgacatcatctgagatgcactgggggttgaggaaagatgacccttaaaatccacatttgtactttccaagagcaaggtgagatcatagagaagttacacccgctcctttctccactttttagtctttatccactaaaaacaagatgtgagaaaatcaagtgacaagaatgatagggtaataggctgtcaacaaaatgagtgtgtgggcttatataggtataaacatggtgaaggtgatagaccatggatgcttagtcccttttaagttccatcttccgtttaacacattttgaaagaatttattgtgtcttattttcccctgatttgtgtagctgtgccaccctagataacagtttttctttttgctcttgccaccttcttgataaaggcaagtacagttagaatcgtaggtacttaataatgcttcggcatgaatatgcttcacaactttgagatgtgtaccctttattttctttctgttataaatcttaatttctttgtgccctacttttcatatctgtaaaatggatgaaatagtagtatctgcctcatataattgctgtaaagattaaatgctaatacacataaagctcttagaacaggtctggtgtatagtaaacacacaaagctgctattattattgttactggtattaactgatatattcatactttttataactgctcatcctattaattaaatgtattttttcactatatattctttttcaatgtatattccttttaatcttccttcttagcctccactatagttcagatgccttctccaatttcaaacaatttaatgaaaagaaaagaaaatttatacatccagagatggctgatttaatttcttcagtcttttggagggtagaattattttccttctgagagtaaacttattttttctatgttacaggtggtatgcaagattacaattatgtgtgggccaactgttttgagatcacattagaactgtcttgttgcaagtacccacctgcttcacagcttcgacaggaatgggagaacaatcgtgagtctttgatcacattgattgaaaaggtaaaagtagatgactggaatgttggggtatagaaacaggattaaataagggagaaatttggatgcatgtgaatgataatctatacagtattagatgtcatttatctctttttattacttaagattataaattatctttaaagattattagattataatctattaaaacatattctagctctgcttcccctgccccttacccccagctctctgctccatagggcttccttttcctatcttggaacacttacttatacaaactgaaataattagccaaatttgtactctcaggttcttacaatgtcatgtgatcatatttgctagtgagcctttaccactatatgaaccatagacatcagtttaatttaaacatcacccagactaatacagcaattgaatacaccagcagttacaccttgttgagaaaattagaaatctggctttgaggagagggaattttaaaagcaccttactagtgtcgagttcagacatatgacttaagtttaaggatttaatacttctgtctgtattttatttaaacttcaagggattgaaaatgttttgggggagagagaagagtcactttattttttagaaattctagtatcggtgcagagagaaattatgcgctcttgccttccaaattcaccgtctctgagcttggattcttgtcttcttaggttcacattggagtgaaaggatttgttaaagattccataacaggatctgggttagagaatgcaaccatctcagtggctggtattaatcataatatcacaacaggcagatttggtgatttctaccgattacttgttcctggaacttacaaccttacagtagttttaactgggtaagaatttaaactatgtagactcttagttaaaatgtcaagtctctgttttatatctgagacagaaatatagtctagtacatgttgtttattttttgtggcttttatttttccttattttctgatttttctcgttttataataagaaaatactattgtggagttttttgtcacatagtctaatagtacaatgggatgtgaagcatagttgtagcattagaggaaggacaatttttaaaacttgaaaagatattcagctgtgtaaagcattgccttaaagctaaccgaataccagagtagaagaaacccattgctctgtaaatgacattttgaagaactgtcttatcagctttctaatatattaaatgaatggtttcccacctcccctggaaagctttctggaagctcactttgataaggatttaattgataacctttaatcttgagctttcctacttgaaaaagaagttggaatgtcagtttgataagacactgcaaagaattgtgtaatttatcccttctttgagtactgtagcagtggttacaatggagtaacaaccacatctttcaacatgttctttcctttgagtgtaatttttttggtatacattctagtgtgtggtacttgagaagatttggtgagagaaatagttgttcaatctggggttctttgtgagataatgtcctaaaactcttaaatttacacatctctctttatttagtttgagttttgatagatcgctaagtgtaagaggatgaaaaggctactgtgcttttataatattaaagcattgtatgtcttaactataaaccatttactttttcaaatttttttttcaggtatatgccattgactgttactaatgtagtggtgaaagaaggaccagccacagaggtggatttttctcttaggccaactgtaacttcagtaatccctgacacgacagaggctgtatcaactgctagcacagttgctatacctaatattctttctggaacatcatcctcctaccagccaattcagccaaaggactttcaccaccaccatttccctgatatggaaatcttcttgagaaggtttgccaatgaatatcctaacattacccggctttattccttgggaaaatcagtagagtcaagagaactttatgtgatggagatatctgataatccgggtgtccatgaaccaggtaattggtatggtcttacacataatttcagtagtgcccctcaaagccatgttcaatattgctatgtttcattcagaaaggtcgcctacagtttgtataactggcattaagaaaacctaactaaaattaaaagaaagcaaaaaagaaaatgtaaccaatcttttcccagaagagaaggaaatccttttgctaacccatattaggcatggtatttaataagtgcatagattagatttattctgctaatagtgttttatttatttatattatatagcatatatatgctttgagcctgctcagacatatgtattagtaaggaagctgctttataagatgtttctgaaggttttttctgcctcctttgccaaaatacatgtttaaaaaattttttagtataggatttatatatgttgcggaaaaaaactgagtccatgatgattaagaaggaaaaaaagccttccatgtaattattttgttttcaggtgaaccagaatttaagtacattggaaatatgcatggaaatgaagtggttggaagagaactgctgttgaacctcatagaatacctttgtaagaactttggaacagaccctgaagtcacagatttggttcataacactagaattcaccttatgccatccatgaatcctgatgggtatgaaaagtcccaggaaggtaaagaatagcatttaattcttaatcatttgatcatcatatagaatgattattttgatggagaagagaatttgaactggttcttttggaatttcttccaattttttttccttttaatttatgattgattttagctcttgtattcttatatgatgatctggtctgttcaacaattaggtgatcaaatttatatatttagtggtgtcttccacttggtaatggttctaatttactagaaatagagtataagacttttataaattgttttattttagcaatagttctgttgacaaa

SEQ ID NO: 7489 - DNA, 6000 bp, Homo sapiens
ggagggcaatggcgcgatcttggccactgcaaccaccgcctcctgggttcaagtggttctcctgccttagcctcctgagtagctgggattataggcatgcaccaccatccccagctaattttttgtatttttagtagagatgagttttcaccatgttggccaggctggtctcaaactcccgacctcaggtaatccacccgcctcagccttccaaagtgctgggattacaggcgtgagccaccacacctggctttaattgttttttagccattttcacaaatgctagggaatagctcggtttagatactcggaactgtgtcactggccaagcctcatatggaattgctcatgtcttctagggctgtaggtgtggtcaacagcattttaaatttgatcttattggacatatgcctcagttttaccatatcatctgttatatggggataataatagtaactgcctcctaatgttgttgtgaggattaaatgagtttgtatttaccaagcatgtagaaaagtgcctggcacatagtaagtattaatcactgcactcctctctctcttgccatttgggaagtttctttctcactgaaccatgagctctccaaggataagaagcatgtctgtttcattttctatccccagcacctagtacccctctctggcacacagtaggccctcagcaagcatctgctgcctaaaaggcactatcaagcaggcagtatgaaattccatttctgagtcttgaagaaggaagtcaggtggaaaaacagataagagtcctacacataaacgtttaagcttgacaacactcaagaccatcaaggaagacagcatggagggaaaataaatagaacactgaggaaagattgatggcaggagatggaagcaaacagaaaaggagttctgaaacaatattctttcaaagaagccgtgaaaagagttcaagggaattgaagtaagtccacaggaaaggctgtcttaaaagtggagtatgaaaaatttgtggttagcaagcagctgactgaggttaatttttttttaagtctcagaggaaggaaatgatattgtgtaacagttttctctaacttggcaggcttttaaatgtgggtcccgatctgtcttgccagaagggttgagagctagggagcagggagaaggagggtatgggtctctccaagactctgtgtcttaagaaggttgtattgaagtcaggttatatcttcactcacaatatgagacaataaattcaaataaaacgtccatttttgtccccttattttgtttaggctggtaaagcaggtttgatgatgtttttgtcaggttgacaaaattatcagcaacaagtttttatctggaatatctccctcattacacttgaatttcaacagggttccaccacccaggaagacagaataaccggttttctgagtttttcctgatacaattctggttatcacaaacgacttgagatccctactcttctttaaaagggcaagaaaagggaatcaatatcaatatttgataatggcatttaaaaaataatagacatcacttttgcgtttaaaaaatgtttttcaatatttaatttacaagttgagtacaagccataaaaaatgtttttaaaataaatttgaggaattgaaaactcctaagtggtcaattgagcccacatgaatctaccaaacaagactgaaatgtactttcacaacatatggtctgatgaggtttttcctgttaaacagagaaaaatagacccggggaagttgctggaaggcatgaaccatgtaccatttaaagagaggttttccatacttatgcaaatgagaccccgttaaagactctactacaggatctaaagctagccgctccccagtctggggctcaaatgttctcatctgtaaaataagggaaaagagaaagggtggtatatgtgtctgcgtattaattatttgagtgtgtgtgtgaattctttggatatgaaaataaagagagaagacattaattatttgggtgcgtatgtgtgaattaattctttggatatgaaaataaagagagggccgggcgcggtggctcacacctgtaatcccagcactttgggaggccgaggcgggtggaggccaggaccagtctgggcaacatggcgaaaccccatctctacaaaaaatacaaaaatagccgggtggcgtggtgcgtgcctgtaatctcagctactagggaggctgaggcaggagaatcccctgaacccgggaggcggaggctgcagtgagccgagaacgcgccactgcattcccgcctgggaaacagaccatctaaaaaaaaaaaaaaaaaaaaaaaaaaaaggccgggcgtggtggctcacgcttgtaatcccaacactttgggaggccgaggcgggtggatcacgaggtcagaattcgagactcagcctggccaacatagtgaaaccccgtctctacttaaaaaaaaaaaaaatacaaaaattagccgggcatggtggtgcgtgcctgtagtcccagctacttgggaggctgaggcaggagaatcgcttgaacccgggaggtggaggttgcagtgggccgagatcacgccactgcactcctgcttgagcaacagaatgagacttcaaaaaaaaaaaaagaaagagaaaagacaacctaccccagtataaggggtaagaaaaaggattcagggaggctcaggaacttaaggcctcgagcacctgcacctccagccccacccgctaaccctccccagcgtggagatacagcacaggggccaacatggcgtcagcacgctgggtctcgcctgcgacccccgtgactccgcactgctgcagcccgggcgaggctgcgccccattggccaactgcaatgaggtcattgcgggggcgggggccggcggcggcgcaggggcggggctttacggacgcaagcacgtcgaagcgctgctcctggagccgcggagggtgcgggtttggctgcggtggtttctgtggcggttgctgtggcggagtttggaggtgagtgggggctgtaggtttagcgcaacagggagcggccctcgatggacgtaggaaatccttctaagagcccccttgattgtcagaggaattagcggggatctgacgtcttcgagataaaatgggggttcgccccctccttgggcacccctcctctgccctgaggaaccggaggctcactgccctttggaagccccgcatctcttccctgctttaaggggtaggcggaggaaccggaggttattggataggcagaagaatttagggggcttcttaaagggtttctcagtttgggggttttcctctccttttttcccatctcaaggtagatgagcctgagtccagagaattcctgctcattgggtagacaggaaatgaagcaggtgaataccgtgggaggaggcgaggaccggatgacaggagtgagattcttctaggcagggcgcgggggcgctgtagttggactcatcttttgcagaattgctgtttcttcatattttgttttgtgatcgtccagaactactttggcctaattagttttctgttagcctccattgctatagagatattcttgggagacctataatcattaaagagcaggaggacggaggcgactcgttggaggcttatcattatccacagctcctgaactatgctgaccaggcctaattttatgtgtttagaggttgtagaatctctctttgtttaagggtggtgccggtaacagctgatttggatgattcagatgtacagaatcttaaagtcagcctgcatattctcttgagaagtccttgcttatgtctgagcttgtgttactgtcttgaacatcacatgcacaaaggtttgttcgttcagatttctcaaaatgtctcccagccttccagaagagtaaatcttcctttgatgtcagactcatctatcagtactcagtatagatgcccttatgacactaaaaatactgtgcatttttctgagtttggatactggacaggctgtgccttacattagctgatcgagaataaataattgcagtttcaggaccactgatagcgccagttgtctcatacccggcaacagtaagacagcactaaaacgaaacctttattggctcatgagatttgacagatggaagaatgtaattaatcttgaaggtagggttgagaaacagaaagctgcagaggtggaaggcttattctctgtggcttgataaaactgctttgtcattatcagtgtgttcctgtcatgcttgatttgaaattgagcttaatatgcaaactggttgctttttccagatgacggttatttgtttgaattcctaagtggggaaatattgttttctgaggaatctggaagattaaaccctttagtgtagccatagctttaggatagtgccagaactttgggcttttagaaatgcgcattgtcagtagaagggagaaggatagttacaaggcagacatctttatgagagggtattgaaggcctcttctgtttgtttcctgcactagcaaaaacagattgagcagtgtgaaactcactgcctcaatattgtgtcctgggtatttaaagagttgtttgaggttcccagttcctgtctttaatctggatacattcttatcagttgagttgcccaaaataattgtcatttgatcctgatgttgactggaatggaagtgacttttcatctgacactctgtgggacagaattcaggaactgcctttgcaatttctcctttccatctttctagacagggtgtcaaaaacagttgttgacctgtcctcatggggtgttagaaatgtaaatgcaagagccgtagtggggtgtcatttgctcttagccctcgtggtaatttccaaagttatgtcattttctctttgcttcaggttggagagaaatccaggtactcactagactggtaccttctgccaccatgggggagcttttccggagtgaagaaatgacactggcccagctttttctacagtcagaggctgcttattgttgtgtcagtgaattaggagaacttggaaaggttcagtttcgtgacgtaagtagttgtggggctgcgacttgattactgctgaactctattgctatcgtggtcagatgccttatgatgaatgttttgttttttatttgcaaaaataacattatagcactgacttcctattggcagaatgcacattttgagttgtctttctaaaggtgagaatgttttgtgccaatctttacatgcttttgctagctcccactttcagaacagtcctaagcattctccaggtaattgtttgggatgcagggagaggttaccaaactaacctgatcaaggctttcacttgctaaatagcaaggtatttaaaaaaatatattgcagtttttccatatagtaggacattttaaaaaaaataaaatttgaggtatccagctacagatatatagtatataaataagcatatactgaatattcattattttggaatattatactgggcacttggagaagctatctaaagaatatggacaatctagcctgggtacagtggctcacgcctataatcctaacactttgggaggctgaggcgggcggatcgggaggtcaggagtttgagatcagtctggccaacatggtgaaaccccgactctactaaaaatacaaaaaaaattagcatggtggcgcaggcctgtaatcccagccactcgggaggccgaggcaggagaatcgcctgaacctgggaggcggaggttgcagtgagccgagattgtgtgattgcacgcagcctgggcgacagagcaagactccgtctcaaacaacaacaacaacaacaaaaaacttgtcatccttaatttgcagttcttcatctggtcctatgttgtccctctgcttaacatctattggctctattcagccttcttttcttttacttatgctgtacttcagtcatacaaaaaaaagagataggggccaggtgcaatggctc

SEQ ID NO: 7490 - DNA, 6000 bp, Homo sapiens
gggcacagccatagaacagctttaattatgcccagtgtagggattcagaaagtgaatcagagaagcaaattggtccagggactgtttggtagtccagtgctaatagaactttctgtagtgatagaaatattccgtatttgagctgtggctctaaacaatagtcactagccatgtgtggcaactgggcacttcaagtgtggctagtgtgacagaggaactgaatatatatatatatatatatacatatatatatatatatatattttagacagagtcttgctctgttgcccaggctagagtgcagtggtgtgacctcagctcattgcagccacaacctactgggctcaagcaatcctcctaccccagcttcccaagtaactgggaccacaggcatgtaccaccatgcctggctgatttttttattgtttgtagagtcagggtttcaccacgttgcacaggctggtctcaaactcctgggctcacatgatccacccgcctcagcctcccaaagtgctgggattgcaggtgtgagccacctcagctggccctaagttttaattttcatagccacgtgtggctagtggttaccctatcggatagggcaagttggaagaagataggagcttgctcttgcccagacctcctggctcccagcacagtgtgctctgatgctctctctgccttttgtcacaccagtgcagtggacatcatggggaagacagggacctggcccagagaccttacctggtgtggaactcatctcctttccctccccctggcagggctgaaaaactgggtggtagctgaagacgtggtgtttaaacctgtggctgccccctggaacccggagcactggctacagcgcccacagctgactcggcaggtcctgggaaaggaggacctgacagctttttccttgggaagccccctaccccgctacctctacctggctagcaaccagactaatgcgtggggtcaccagcgcgggtaccgaatccagatccacagcccccttggcatacacatacccctggagagtgacatggagagggccctcagctgggggaggtgaggagggccctggcctgggtggaaggaaaggacagcccctcccctgccccagtccttggagacaaactcccttcccacggctaccattcatccctgtacctcccctcaaacccaagttagatacacggtgggaaatggtctcacacagaatcggatctaagggactcctgggccagtaaaggcacttgacatttcccaaaaccaccttcttatgattcctggccagataccagcttgtggtgacccagagaaaggaggaggagtcacagagcagtagcatctatcaccagaatgacatctggacacccacagttacctttgctgacttcatcaacaatgaaaccctcttaggagaggttggttgccctagggacataggaaagggacacctgtgggcatggcatcttggctgcccagcctctggccaaaggttagagggaatggctgatttccagttcgcagattcagaggccatggagttttctgatgaccaacacaggtcatccctcctggggtgagattagctctgggacactggctcccccctctccccgcacagctgcttacatggattgctccacgtgttgtatgggcatgaggctggggagagtggaagccaggctgagactggaggctgggattgtgactgaagggtggttctttgggtcacgcttccatagtcctccagctcctccttcttcttgcaggatctggtggcttgggtcacagccagcttcctgcacattccccatgccgaggacatcccaaacacagtgactctggggaacagagttggcttcttgctccgaccctataacttctttgatgaggacccctccatcttctcccctggcagtgtctactttgagaagggccaggatgctgggctctgcagcatcaatcctgtggcctgcctccccgacctggcagcctgtgtcccggacttaccccctttctcttaccacggcttctagtcctgagggtgtggcgggcggcgtggttaggcacatgtacttttccctgtttctactttctattctccgtgtttttatcacacctgctccccagattcccaccccctcaatgttcctctcacacgaaacccccatcagtccctttggttaattcttacttcctgttcatctctaaagtgttaaattataaaaatgatttttaaatattcaaagaaaaatatcacaaatcctactactcagaaataggtggtcacattacatcagacatctctttatgcatgtgcattcaaaaggaagagtagatagaattttgtaaaacagatgttgtatgtaatttataataaaaagtattagaggaattttacttgaatttattgtttgacctgttaagtatctagagtcctctggagaatactaaggagtctggccagggaaattagcgctgggggccagagggcaagggggatagacctggccaaggaatgtcatttggaaagctaaaggggcagggggtgggggtctttggaaggaaaacgatagtttgaagttacaggaaaatatctggccctgactaagtgggggactggggaagaagctgggctgaggtcaggagaggctgctctgcacagatcctgctccttcccagtgctgcattatcttgaaattttccttccccttccccctagccccaactctccccaactccaaccctgacccagaaagtagagtgatttggaggctggaagacaaaaccatgtaaggtctgtggaaatcacagctgttcagacccgcctccaaccccggccaccccgcccccttgccctagccttcctgtgtccttcccacccttagtcccaggcatctgactaccgggaacctcagccagagtccgggagccccccaccccgtccaggagccaacagagcccccgtcttgctggcgtgagaatacattgctctcctttggttgaatcagctgtccctcttcgtgggaaaatgaaccagaagacaatcctcgtgctcctcattctggccgtcatcaccatctttgccttggtttgtgtcctgctggtgggcaggggtggagatgggggtgaacccagccagcttccccattgcccctctgtatctcccagtgcccagccttggacacaccctggccagagccagctgtttgcagacctgagccgagaggagctgacggctgtgatgcgctttctgacccagcggctggggccagggctggtggatgcagcccaggcccggccctcggacaactgtgtcttctcagtggagttgcagctgcctcccaaggctgcagccctggctcacttggacagggggagccccccacctgcccgggaggcactggccatcgtcttctttggcaggcaaccccagcccaacgtgagtgagctggtggtggggccactgcctcacccctcctacatgcgggacgtgactgtggagcgtcatggaggccccctgccctatcaccgacgccccgtgctgttccaagagtacctggacatagaccagatgatcttcaacagagagctgccccaggcttctgggcttctccaccactgttgcttctacaagcaccggggacggaacctggtgacaatgaccacggctccccgtggtctgcaatcaggggaccgggccacctggtttggcctctactacaacatctcgggcgctgggttcttcctgcaccacgtgggcttggagctgctagtgaaccacaaggcccttgaccctgcccgctggactatccagaaggtgttctatcaaggccgctactacgacagcctggcccagctggaggcccagtttgaggccggcctggtgaatgtggtgctgatcccagacaatggcacaggtgggtcctggtccctgaagtcccctgtgcccccgggtccagctccccctctacagttctatccccaaggcccccgcttcagtgtccagggaagtcgagtggcctcctcactgtggactttctcctttggcctcggagcattcagtggcccaaggatctttgacgttcgcttccaaggagaaagactagtttatgagataagcctccaagaggccttggccatctatggtggaaattccccagcagcaatgacgacccgctatgtggatggaggctttggcatgggcaagtacaccacgcccctgacccgtggggtggactgcccctacttggccacctacgtggactggcacttccttttggagtcccaggcccccaagacaatacgtgatgccttttgtgtgtttgaacagaaccagggcctccccctgcggcgacaccactcagatctctactcgcactactttgggggtcttgcggaaacggtgctggtcgtcagatctatgtccaccttgctcaactatgactatgtgtgggatacggtcttccaccccagtggggccatagaaatacgattctatgccacgggctacatcagctcggcattcctctttggtgctactgggaagtacgggaaccaagtgtcagagcacaccctgggcacggtccacacccacagcgcccacttcaaggtggatctggatgtagcaggtaagacattttggtggggagaaggcttctggaagaagggctgaaaagttgtttccattagctttgggttttatgtagattatcccagaaaggaagacgtggatttttgtacttccccttttgctggatgggagagagttggctgctgagttttatttggatcttagctcactggctgggtgcaaagctgcagccttcctctacgtgacctcatccaaagatcttgggaaatggccgagctcagggaggaggcaggatttgggctaacagtgtccccattgccctcttctctcccttgtacttatatgggctctgctgctgggagcagccttctgtttgtcagctcagttctgtgtctggcctgtggtggtggtgttttggaggatctctttgcattctaccacgtccctggcatgtgcaggtcagtcattccaggttgtacatttcctttggagatggaccctcctccctgattttccttctttctctgggcacaattcacctaagtgtgaggggtcacatggatcccgtggagcattctggatagatcctggagtctggtcacagagagagccaaggctacatgatggcttggagtcttcatctttgtcttttcactgtctttccccacattgagtcagtcaccaggtgtttttttttggttttgttttattttgttttgtttctgttttgcacctgcagtatctcggcaggtcagactgtcatgccgtgcaggtgccagccctctctctgctgtttttgctcttgttgctctcagagccaagagccactctgcacccagagggcctcccatccacaccagcctgccctttactcagctctcactttcgtcatcacctgtgggatcctgtctgcagaaccccctcaaaactctttccttcacggtgcagctccaccctgccttgctgtgctctgcacagctacacccaaattctccatgtccctggacacgcacttcacatgttacagtcaggcatcctcctgtttgcttatgctttgtctctgcttagaatgtccttccatatcatcttttctggtaatgtcctttaaggccaggctgaaaagttgcccggaagggcccccttttcctgcctgcaactgtattcctgtgatccggaagttgcctaggccatgctcctctcacaggacaggccagtcagtggtttgtctgtctgcgtggaaagcaagagggtaaggatgatcattcatctctatccccagggacgagtacagtcctctctgctaatgaatgttgaaagaatgaatgagtgaaatggaatgaactccctgatgaagtattttaatttacaggtcaacagctttggctaaaggattggag

SEQ ID NO: 7491 - DNA, 6000 bp, Homo sapiens
tggcccaccccaaggcccaggggcttgtccatgctgagcacaagggtgggaggtcttgtgtctgttggggccggggagtccaaggtcccagcttcactgcacaggcctggaagtcaggtgggtgctggcctgaccctgctgaaggagggtctattccgccagcgtggtgtggaggcggctgggctcgactccctcatggagggaaggaactgaggaggtgctaggaggccgtgggggggtgtctgcccccagagaggctttgagtgcatgggggctctgccgtggcacgtgcagcgtctgtcccccagggccccatggtgtggacagagtctggggtgggcacctggaggcctggtctcaaggcaggcttggtaacgaccccatgtgaccttgggcagggcccgccatccaggccacccagaaagccatgtggcctgcacgatcaggccagaccccactgactggagcggggcactttactttggaggggcagctaccagagggctctatggatcccagcccagccgtcaggccggacgggtcccccctactggcctgcagtgacccttatgccaggctcggctggctcagcggtgggtcctggggtgacctggccacgtgggacagaagggcctgtgccgctccctccagtgaggtgccaaatgtgggccacactctgggccccagcgggggccttccgggcagtggcgcagagccattggaggtgcccgggccctggggcaggggcggggcgggagcagacagagctcagggcgtcctcctagcgtcacctgcccgagtcaggcccatctgtgaaatgggccacgccgggcagccgcacgcaacggaaccgaaccgccgggctcctgctccgagacccgcagttcacgagtcgacgcccccgagtcccgagccgcgcccactggtcccacctctgcagcaagtggagtcggccccgccctgtggcttcgaggccccgacgcctggcgcggctcccgggctccgctgaccccggtggacccgcgcgccggcaattacggtagcgtccagtagggcgcctactgcgggcaatacgggggctcctcccatggcgcggtcacgtcccccacgtcccgcggctggcggggcggggccgggcggagcatccttccctccccctcccccgggtgggccccgcccagcctcgaccacccgcgccgacccccgcccgcagagccgggaagccggaacccgcaggcgccctccagccgtccctccggcccgggcggggattgcgccgaggaggggcctctcctggcgagggtggagttttgggttccccccttcgccccgcacctcccgccttcctgcctcctcccggtcttcaccttcccccccgggtccccacgacgcccgctgggcggcggtggggtagggggcgcctcctgacccgactccccttccagccttggccttcaggcactggctttagggtggaggggcggccttgcggggtccaggaggcctcggaggtgggggacggcggctctggaccagctccggcccccaccacctcccggccccagggcggtgacagccttgcggagaaggggtcttcaaagctctgagaccccgcagtgccagctcaggattgaagcctgcggcggcacatgcagccttcctttcccaaaggggacttgcgcccagccccacttggggcaccagtgggggctcctggccctggccctgggtgggagtggccaatccgcaaatgaggcctgtgtgtctgccccgccggcccctgccgtcgtgatgtaagcggacacagagcggcagggcacgggctgcgcgaggggtctgcgggggtcagaggtggggcgcagggcccaggcctggggcagccccttgcgcagcgtccaccccctgcaagctcggccccgacacctttgcaggcgcctggggcggggctgccgggagttgctcactgctccttccttgtttgcacaacaggggctgcgggggaagaagggaactgagggaggcccctcccccggtgcagcgccctcccgccctcggcacccctcggcagccaggcgctggccacagaggccgcttccttggtcctcaggcagctcatgggatccaggaaggaaacgaattacccttttcctgccccgcctcctgcctgggccacaaaggcagggccaaagcccatccttcaagggctggagtcagttaggtaacaggccacgggccccgggctcaggccactgcacggacccagggaacgggctgacagtccagcagaggcctcagcgaggcggcggcgctgcgcacaaacctgaggacctaggcgggtgaggggtctgcaggtccagacgcctgaggggaagcatgccagggtgcccagtgccccccaaggtggtgggcgaggtttctggagaggtcccggaggagcgggcttgggcagcaggggtcaggttcaggaccctctgtgcatgagtccaggttgactctgcaggacggcatttcgagccacctggcatggcgttccaggcctgtgacggggcagtgcaggggtccgaactggcaggcacccaggtcctgaggacttcatggtcgaatcctggtctaaagccaggggtccttgcagagccctgcgccctgcaccctcgagggaactgcctgcaggagcccctggcttgggagggcgcatggctgtgggacgcagggtctcctgcaagggactttcccacccacccctgccccaggcctcccgctcagcttccagcagcctggggtcgtagagcctttgggggacctgctctccgggcagcccccacctgggagatcagctttctcatcccagaggccaggttatttctgggtgggttggcatgcttcctggggggcggcggggggggggttggtaaatgtcaggggaaggccagcctgtggcgtgtgcccacggagaggccaatgcttggtggctgtggcgtgtgctccaggcaggacagccccagggttgtccctggaacaccgggcagtctgtaccttggcccatcacggtgccggggttatcctggaagatggggagtgtgggccattattttgtgccccttccccgtactctacctcctgtggaatcccttgccccaagccatgtgggcagacagctggctccaagtcagcccctggacaccaggctggagtgggaactcctggagccatttcagcatggctggcaccacaggctgggtgaggacagacgatggtgccaggttgtggtctgggggcttgtccaaatgcctcatcttgacacagaagatggccctccccacatgagcgtcacgtggaagccacaagcacctcaggtctcagaacatgctgtgctctcctggtcagtgagtcctggcactgccccaaccctctgccagccctccttgacactaattcaggggcgccgcgtctcctgagggtggccactgtcccctgcctccccacacgccctcgtctgtctcctgaggaccctggcgggcttcaaaccctgggtctgcctgcgtctcccacccccgctggtgcagccagggagactcagaggccttggtacctctttgtgttttgcagggggaacctggggtatgcaaaatgtgtctattcctgtttgttgtatacacatttccttccttggccttgcatggcctgtttatttttaaaagtgcaaacttgcaaccccaaacaagctggggccctgaggccgtcaacccctccagtctcccctgtgacccgcagtctgcgtcctgttcccagtttcattcctcaagtgcatatatttttatttttttattttttttttgagacagagtctcgctctgtggcccaggttggagcgcagtcgcgcgatctcggctcactgcaagctctgcctcctgggttcacgccattctcctgcctcagcctcccgagtagctgggactacaggcgcctgccactgcgcccagctaattttttttatttttagtagagacggggtttcaccgtgttagccaggatggtctcgatctcctgacctcgtgatccgcccgccttggccccccaaagtgctgggattacaggcgtgagccaccgcgcccggcctcagtgcatatatttttaatatcttgtagttaccctgctgtatactgtcatcttagggaccttttaaacaataccagtatgagcgggacctaccctgctgctcagtgaccccaggcagtgtgtcctaaggtggtgtgtcctgaggcgtgcgacactctgtcctgtcccaggcactgtggtgggggcatccggtgtccaggtgcagaggcaaaagctgctcccgggtttcccagaaatggttccgaggcctgggtcccagagagccagtgcaggttggggggtggacctctggctctgtgggggggtctgttctgctccagtgggccgtgtctgccttgtcatcatccagacagccacagctggctcctgggtcccctcgtcaagcagcatttcccagtaacagtgacttcgtggaacacttaggaagcccttaaaaaccatcctcggacctctgaggcagggactccagggggcacagcacctgtggtggggacaggcaggcaggctggatgcggggagggcccgggaggaggagtgaggagccacgcacggaactgctcagactctcccagcaaaggtcctggcccttgtgcatgcctttagttacatgtctgccttagaggcaaagacgagccgtcacgggggacccaccgggtcaggggtctgcggacacgcttgcaggaggaacccaaggaaagggggtgggggtggagccccacagattgcgtcgtgggtgggcgtggagcttgcacagcaggcctgctgctgcctcccagggcgctggttcacagcacggtcccagcagggagaggctgagccggttggactagaccacccaaggtctcaggttgcagctccctggtgaggagaggacaaggtgacttctgggtggggtggggcatgaagatggaagtctgacctcgggttccaacttgactcaaacgagctgagctcctggagtttagaaagggacaccagcttcagacatcgtgggggctggcatggtttgctctcgtgggctggatgggagcctccctagcccctcctgatttcaggctgcagcctatgggtcactccaggcacaggtggggtgagtcaagatctcactggaggagtcactgagcaagagggccggtgggaggcaagggggcatccagggacaaggggccagctctgcccccacttccccaccccacccactctaatactgcagcccctgtgcttccaactgccccctccagcctggggcccagcccctcaccgccagagactgcccgcctcctcttgggcaagctcctggtgggctccactgaagccaaagtgggcccttgggggcaggagagccagagcaaggcacgctccacctagatttagaccgggagagacctggaggatgccaaccccagaggtcctggggcgagctcagtgctggggaccggaggtgccgtctgctgccagaatcatggtgtgcgtggtccctgcccagcacgggtcagccagagcgagccagggcagaaatgacggccaggtcgatgttcctgtcgggggctgcttgtcccaggaggtaatctgagtcctggccgagcccaaaaaagccactgccctttagagccagctgtgagggtgcaggaggcagtgcagagggagtgggacccacagctgctagcctccctccaaaccctcctgcctccaccagacaccaggtcagggggccacaagtgtgggtgccgggcagctgcccctcagctgagctgccgggccacccagctcgtgtccctcccctgccaggctgcagctgggatggtcacccgggcagcctgagtcagcctgctttctctctcaggtgaggcggaaccaaccctcctggccatgggaggggccgtg

SEQ ID NO: 7492 - DNA, 6000 bp, Homo sapiens
gaatgcagtggcacaatcttggctcactgcagccttgaccgactaggctcaaacaatctgtctcagcctcccaagtagctgggactacaggtgcctgctgccatgcccagctaattattttttggtatgtttttgtagagatagggtctcactatgttgcccaaactggtctggaactcttgacctcaaacaatcctcctgccttggcctcccaaagtgctgggattacaggagtgagtaatagtaattgtgaaatagtccacaaccagaaggaaagaaagtagctatcttcaagtgatgtgtttcctagcatgacatggctttgcttttaaaaacaaagcaaaacaaaacaaaggaagtcaccttcctctgcccaagacaatttttcagggagtagttactgctttgttctgaactaacttgaagaattgtctatgatggagacttgtgctttgggttgcttgcctaatttcttccagttggaagcaacaggcttagccacacctgctattaaaaacttaaatatgggctggacatgttggctcatgcctgtaatcccaacactttgggaggccgaggtgggtggatcacgatgtcaggagttcgagaccagcctgaccaacatggtgaaaccccgtctctactaaaaatataaaaattagccgtgcatggtggcgcgcgcctgtaatcccagctactcaggaggctgaggcgggagaatcgtttgaacccgggaggtggaggttgtggtgagctgagaccacgccactgcactccagcctgggccacagagcgagactccatctcaaaaaaaaaaaattaaatatttggtattaagccagtggaatgtaaaatgttcctgtaccttcctcccaccttagtcttggcactgtaattcctctgagggaaatctgtactgatttcaaaaggatcaacactgaaccattttttcctctgatgagaagcctgacataaaggtaacaccttagctgccctcatgatggcagtggtatgtggcagtccaagccccctgtaaagatcacaggtgctcctgatcccatggcgtctcctggcccatgttcccagtgtaggctggtggtggtattcagcactgcctctttccaccctctcctgatgctggcccatgtgcaaaggattctgtgtggatttgttaatttgtcagctcctgggcttgtgatgcctactgagttacattccccacatagaaagtcgttgctctttaataagccaagttaaaggcagtgacctacatttgttgtgccttggattggtggtaagattgaacatatatagaaaagctaaactattttctcaggtttctttttaggttgaagctaaataaaagtgaatgttagtaactagaactctaatttcttgtaatttggaaaaaagaaaccattctagccagaggaagaaaaagacaattccctggcaactcttttcagaaagctatgcctctttgccattcataccctgagatctaaaactggtgttaaaaggatccctcgcttgttccttttctccccaaaggttctgaatcaaacggaggatcaccgccagagggttctgcaggcagctgctaagaacatccgtgtctggttcatcaaagtgcggaagatgaaggccatctatcacaccctgaacctgtgcaacatagatgtgactcagaaatgcttgattgcagaggtctggtgccctgtcaccgaccttgactccatccagtttgcactcagaaggggcacggtgagtccccaaagctaacaatgcagctcgtggcccggaagagaggttcccatcaatagtaacattaatgtcatttttggccgggcgcggtggctcatgcctgtaatcccagaactttgggaggccgaggcgggcagatcatgaggtcaagagatcgagaccatcctggctaacacggtgaaaccccgtctctactaaaaaatacaaaaaattagccgggcgtgttggcaggcgcctgtagtcccagctactctggagactgaggcagaagaatcaagtgaacctgggaggcggagcttgcagtgagctgagattgcgccactgcattccagcctgggcaacagagcgagactctgtctcaaaaaaaaaaaataataataaaaaataaataaatagtaacattaatgtcatttttatggcatttcaccttcagagttcttcaatatatttatttgtcttttaacttgacagcacatttcatacatagcctggcatataatatgtatatcatagcgtagcatagcatatctttattttgcatatgtggagactgcagttcagagagctgaaataatttggtcatatgcccatgattcttcagggttgttcatggccagggcatcagtttcctgatgccctctctgtatatgactgtttctgtttagtagttaattagaacaactactctgtccacagaagtgctgtaagtgcctggaggagtacagagatgtataaaacatgccctcgagtatcttacagtttattaggagagttccaactatggagttggaaaaagctttaagcaggtggcatttgatcaggtctttgaagaatgataagttgttggtaagactgctgaatgaagagaagaaaacaaaggcaggaagtatggttagaccatgtatgtttggacaagaacaggatttacagtgggttagctgaagagaagtacctgtctgcatcaggtagtttggaacttaattgtgaaaggttcttaaataatagcttagaagatttaaattttattccagaggaagttgagagacattggaagttctttaggggtaaaggaacatgatcaaagcagtttgggtggttttttacatttttaattttgtgtttgagacaagatcttgctctgttacccaggctggagtgcagtggtgccatctcagctcacttcagcttccaactcctgggcttaagcaatcctcccacttcagactcccggtagctgggactacaggtgcccaccatcatgcgtggctaattttttgtagagacagggttttgccatgttgcccaggctgatctcaaattcctgggctcgagtgatctgccttccttggccttccaaagtgttggggccaggcgtggtgactcactcttgtaatccagcactttgggaggttgaggcgggtcatcacttgaggtcaggagtttgagaccagcctggccaacatgacaaaaccccgtctctactaaaaatacaaaaaagttagccaggtatggtggtgggtgcctgtgatcccagctactcaggaggctgaggcaggagaaccacttgaacccaggaggcagaggttgcagtgagctgagatcatgccactgcactccagcctggacagcagagtgagactctgtctcaaaaaaaaaaaaaaagtgggtcaccacgcctggtggatcaaagcagtttttttgttttttggtttttttttttttgagatggagttttgctcttgttgcccaggctggagtgcagtggcatgatctcggctcactgcaacctccaccctccacctccctgcttcaagtgattctcctgcctcagcctcctgagtagctgggattacaggtgtgcgccaccacacccagctaattttttgtatttttagtggagacggggtttcatcacgttgaccaagctggtgtcgaactcctgacctcaggtgatccacccgcctcagcctcccaaagtgcagggattacaggcatgagccacttctcctggctcaaagcagttttaaaagagtaatctgctgatagtatctaggttggattgaggagtgaagagattctgtaggtaggggttcagttaggaggttattgtagacatagagtagtaaatgataaggatccccaggtaggacttgacaatgggaaaaaaaatgatgaattgtgagatgttctgcaggaaaaatcaatagggctacctggttcctagcaaggtgcaggagaaatacaaggagaaagatttaaacatctttttgaggcatcaaagctgactggccaggagaattagggttccaatgagggaagtaaatgttcagccagagaagcttattgattggggagagatggtaagttcagttccgggcacattgaggtctatgtggaaatgtcaagcagacaagggaacaaagctaaggaaatgggagtcatgagaatggaagggaatgagacctccaagagggaggtcatagagagaaaaaaaaggttggggtcttgcaatgctatgagataggcagagcagaaataaccagcaaagatagaaaagcaatggtcagcgagcaggaggagaactcctaaggaagaaggattttcaccaaagatctccaatgtcaggggcgtgcatgggggagagaagctctttggtcaggagccagtcactttgcctaagcatgctcagccagactgcaagggatcaggaagttaagagaaggtagtgaagaaggagagccagagaacatactttgctttctccatgaaagggggagaacaactttcataaaaaggcagatatggaggcagttccacattttctttggtgacatattttaaagttaaatttttttcacattaaggatgtatttcagaggatctaatagaaatcttccattataaatgttataccttttcccagttttcccaaaagctgggaaagataatctagttttatttttaggtttattagttttattgagatataatttacatgaaagaaaatacatacattttatgtgtaccatttgatgagtttcaagaaatgtacacctgtgtaaccactaccacaattaggaggataacctaagtttgataaatgtgctaatgtttttcaggaacacagtggttccactgtaccttccattttgaacaggatgcagacaaaccagactcccccaacctataacaaaaccaacaagtttacctatggctttcagaacatagtagatgcttatggaattggaacttaccgagagataaatccaggtaaaaaaaagcttgttatctttttcctctagagttttttttgtttgtttggttggtttggtttgttttgagacagagtctccctctgtcacccaggctggagtgcagcagcacgactgtagttcactgcagcctcaaactcctggcctcaagagatcctcccaactcagtctcctgtatagctaggaccacaggcgcacagcaccacacctggctaattttttattttatgatttttttttgactgggtctcattctgttgcctaggctgtagtgcaatggtgaaatcacggcttacagcagcctcaacctcgtgggctcaagtgattctcccgcctgaacctctggagtagctgggactacaggcatgtgtcaccatgcctggctaatttttaaaatttttttagagatgggttttgctatgttgcccaggctgataatttttaattttttttagagacggggtcttgttatgttgcccaagctagtcttggactcctgggctcaaggaagcctcctgcttcagcctcccaaagtgctgggattacaggtgtgacccactatgcctggcctttttgttcattgtttcttctaatgcctcactttaaatgctgttgaataactgaattaaaattaaagatgttaatcctagcactgtttttttaatttaattttatttttaattttttttgagacggagtctcgctgtgtcacccatgctggagtgcagtggcgtgatcttggctcaccgcaagctctgcctcccaggttcacgccattcttctgcctcagcctcccgaatagctgggactacaggcacccgccaccatgcccggctaattttttttttattttttttaggtgagacagagatttactctcgttgcccaggctggagtgcaatggcacgatctcagctcaccacatcctctgcctcccaggttcaagcgattctcctgcctcagc

SEQ ID NO: 7493 - DNA, 6000 bp, Homo sapiens
taatctgctgatagtatctaggttggattgaggagtgaagagattctgtaggtaggggttcagttaggaggttattgtagacatagagtagtaaatgataaggatccccaggtaggacttgacaatgggaaaaaaaatgatgaattgtgagatgttctgcaggaaaaatcaatagggctacctggttcctagcaaggtgcaggagaaatacaaggagaaagatttaaacatctttttgaggcatcaaagctgactggccaggagaattagggttccaatgagggaagtaaatgttcagccagagaagcttattgattggggagagatggtaagttcagttccgggcacattgaggtctatgtggaaatgtcaagcagacaagggaacaaagctaaggaaatgggagtcatgagaatggaagggaatgagacctccaagagggaggtcatagagagaaaaaaaaggttggggtcttgcaatgctatgagataggcagagcagaaataaccagcaaagatagaaaagcaatggtcagcgagcaggaggagaactcctaaggaagaaggattttcaccaaagatctccaatgtcaggggcgtgcatgggggagagaagctctttggtcaggagccagtcactttgcctaagcatgctcagccagactgcaagggatcaggaagttaagagaaggtagtgaagaaggagagccagagaacatactttgctttctccatgaaagggggagaacaactttcataaaaaggcagatatggaggcagttccacattttctttggtgacatattttaaagttaaatttttttcacattaaggatgtatttcagaggatctaatagaaatcttccattataaatgttataccttttcccagttttcccaaaagctgggaaagataatctagttttatttttaggtttattagttttattgagatataatttacatgaaagaaaatacatacattttatgtgtaccatttgatgagtttcaagaaatgtacacctgtgtaaccactaccacaattaggaggataacctaagtttgataaatgtgctaatgtttttcaggaacacagtggttccactgtaccttccattttgaacaggatgcagacaaaccagactcccccaacctataacaaaaccaacaagtttacctatggctttcagaacatagtagatgcttatggaattggaacttaccgagagataaatccaggtaaaaaaaagcttgttatctttttcctctagagttttttttgtttgtttggttggtttggtttgttttgagacagagtctccctctgtcacccaggctggagtgcagcagcacgactgtagttcactgcagcctcaaactcctggcctcaagagatcctcccaactcagtctcctgtatagctaggaccacaggcgcacagcaccacacctggctaattttttattttatgatttttttttgactgggtctcattctgttgcctaggctgtagtgcaatggtgaaatcacggcttacagcagcctcaacctcgtgggctcaagtgattctcccgcctgaacctctggagtagctgggactacaggcatgtgtcaccatgcctggctaatttttaaaatttttttagagatgggttttgctatgttgcccaggctgataatttttaattttttttagagacggggtcttgttatgttgcccaagctagtcttggactcctgggctcaaggaagcctcctgcttcagcctcccaaagtgctgggattacaggtgtgacccactatgcctggcctttttgttcattgtttcttctaatgcctcactttaaatgctgttgaataactgaattaaaattaaagatgttaatcctagcactgtttttttaatttaattttatttttaattttttttgagacggagtctcgctgtgtcacccatgctggagtgcagtggcgtgatcttggctcaccgcaagctctgcctcccaggttcacgccattcttctgcctcagcctcccgaatagctgggactacaggcacccgccaccatgcccggctaattttttttttattttttttaggtgagacagagatttactctcgttgcccaggctggagtgcaatggcacgatctcagctcaccacatcctctgcctcccaggttcaagcgattctcctgcctcagcctcccgagtagctgggattataggcatgtgccatcacgcccggctaattttgtatttttagtcgagacggggtttcaccatgttgcccaggctgatctctaactcctgacttcaggtgatctgcctgcctctgcctccccaagtgctgggattacagacgtgagccactgcgcccggccatttttttgtatttttagtagagacagggtttcactgtgttagccaggatggtctcgatctcctgacctcatgatccacccgccttggcctcccaaagtgctgggattacaaagtgctgggtggcgtgagccactgcgcccagccaatcctagcacttttagaggccgaggtaggaggattgcttaagcccaggatttcaagatcagcctgggcaacatagtgagaccccatctctattaaaaaataaataaacatgttgacacctcagatcttgtgtactccctgtgaagaggtgctcattctggcagggcatggtggctcacgcctgtaatcccagcactttgggaggctgaggcatgtggatcacatgaggtcaggagtttgagaccagcctggccaacatggtgaaaccctgcctctactaaaaatacaaaaattagccggatttggtggcatgcacctgtagtcccagctactcgggaggctgaggcctgagaatcacttgaacccaggaggcaaaggttgcagtgaaccgacatcatgccactgcactccagcttgggcaacaacaaaaagatgcccatttaatgtaaggggcaggtttactgtcaggtagcgttcctttaagagttcatcggctgggccaggtgtggtggctcacgcctgtaatcccagcactttgggaggccgaggcaggtggatcacctgaggtcaggagttcgagaccagcctgaccaacatggagaaaccccgtctctactaaaaatacaaaatcagccaggcatggtggctcttgcctgtaatctcagcgactcgggaggctgaggcaggagaatcacttgaaccggggagacggaggttgccgtgagccgatattgcattattgcactccagcctgggcaaaaagagtgaaactctgtctcaaaaaaaaaaaaaaaaaaaagttcatcggctgggcgtggtggttcatgcctgtaatcccagcactttgtggggacaaggtggaaggatcacttaaggtcaggagttcgagaccagcctggccaacatggtgaaaccctatctctactaaaaatacaagaaaattagccaggcctggtggtgcatgcctgtaatcccagctactcaggaggcctagacaggagaattgcttgaacccaagagacagaagttatagtgagcctaaattgtgccactgcactccagcctgagtgacagagcaagactctgtctcaaaaaaaaagttcatgagactggattctttcatgtgccctcacagccctaaaacacctggacttctctagcaaatcatttgcaggaactgttttaagcaaaatgtttcttctaagatgtctgatatttttaaatggctttttttttggcttccctgttccaaggttagacagaaaaaatgtagcaagtattggccactttaggtacaacacagatttctcctatatttggagagttaattattaaatcaagagtgtgagtattcattttcagttggagccctatggaagaactgctttgctctgggctctctccatctgtacgttatctgatatttagctttatatcactgggacatggttgctgcacaaagagaagacagctggcctgccctgggagcagggtcccacgagttacaagagagtcagagaacaaaccaatgttgtcaaggttacaccttcatttccactgttctttgtttgaaatgttatcagagctgccaggcacagtgcctcatgcctgtaatctcggatattcaggaggctgaggtgggaggattgctcaaggccacaagttcaggactagcttgggcaaaatagtgagattccatctaaaaaaatattatttatcagtaattttaaaacaaaattaactgggcatggtggcacatacttgtagttccaactgtttgggaggctgaggtgggaggataacttgagtccaggggttgcaggctgcagtgagctgtgatgaaaccactgcactccagcctgggtggcagagaaagaccccatctctcttttaaaaaaagttatcagtagctcaaatttcattagctactttgtgaagatgtgttgattctgccatgaaagattttctctgagagtcctatctgtctggcagctggggagtaagtcaccttatattgatcttaagattatggaagcctgggcacggtggctcacgcctgtaatgccagcactttgggaggccgaggcaggtggatcacttgaggtcagagtcggagaccagcctgggcaacatggtgaaaccctgtctctactaaaaatacaaaacttagctaggcatggtggtgggcacctgtaatcccagctactcaagaggctgaggcaggagaatcacttgaacctgggagatggaggttgcagtgagccaagattgagacattgctggctgacagagcaagactccatctcaaaaaaaaaaaggggggtgggtatggaaaagaatgtaatatttgtggaattgctatggtttaatgtactttgtatttttctttttttggtttcttcatagctccgtatactattatcacgttcccttttctatttgctgtgatgtttggagacttcggtcatggcattttaatgaccctttttgctgtgtggatggtactgagggagagccggatcctttcccagaagaatgagaatgaggtaatgtttaagttacatctgcattgaactgaaattttataatttcccaagcattcattatgaaaattatgatctggaagtcttttatccatgaatttatcaaaaggaagtagagaagttatgttcattttaacaccaaagacgacatgtgcaagctggaagtggtagtgtgtgcctgtagtcccagctacttggaggctgaggcaggagaatcacttgagcccaggaattcgagaccagcataggcaacatagtgagaccccatctctaaaaaaataaaaattatttaggtttggtgcaaaagttattgcggttttggctgccaaaagaaatggccaaaaccgcagtaacttttgtgccaacctaataaaaaaatagaggccacatcctgtgaaagtgactgtctcattagcattgtattttggtttttacttcaagctctctgaatcaggatggggtaaagtagtgctggagaaaggggcaggtatattctgaataacattgtcacaatgtgagctgcagtgagtacattctcattacttctttcttctggttcccagatgtttagcactgtgttcagtggtcgatacattattttattgatgggtgtgttctccatgtacactggcctcatctacaatgattgcttttccaagtctcttaatatctttgggtcatcctggagtgtacggccgatgtttacttataattggacgtaagttgcagaagaagctaaaattcaaagcttattcctttcatgtgcagccctgatttttaagacaagtggtaaactgacacttctttaggaagtggtgacagtgtctcctcattcatgctccacactgtgagttgctttgtgatttgttcagcaagtatccaggaactaagattagaaatgattttttttttttttggaaactaaaacc

SEQ ID NO: 7494 - DNA, 6000 bp, Homo sapiens
ctctactaaaaatacaaaacttagctaggcatggtggtgggcacctgtaatcccagctactcaagaggctgaggcaggagaatcacttgaacctgggagatggaggttgcagtgagccaagattgagacattgctggctgacagagcaagactccatctcaaaaaaaaaaaggggggtgggtatggaaaagaatgtaatatttgtggaattgctatggtttaatgtactttgtatttttctttttttggtttcttcatagctccgtatactattatcacgttcccttttctatttgctgtgatgtttggagacttcggtcatggcattttaatgaccctttttgctgtgtggatggtactgagggagagccggatcctttcccagaagaatgagaatgaggtaatgtttaagttacatctgcattgaactgaaattttataatttcccaagcattcattatgaaaattatgatctggaagtcttttatccatgaatttatcaaaaggaagtagagaagttatgttcattttaacaccaaagacgacatgtgcaagctggaagtggtagtgtgtgcctgtagtcccagctacttggaggctgaggcaggagaatcacttgagcccaggaattcgagaccagcataggcaacatagtgagaccccatctctaaaaaaataaaaattatttaggtttggtgcaaaagttattgcggttttggctgccaaaagaaatggccaaaaccgcagtaacttttgtgccaacctaataaaaaaatagaggccacatcctgtgaaagtgactgtctcattagcattgtattttggtttttacttcaagctctctgaatcaggatggggtaaagtagtgctggagaaaggggcaggtatattctgaataacattgtcacaatgtgagctgcagtgagtacattctcattacttctttcttctggttcccagatgtttagcactgtgttcagtggtcgatacattattttattgatgggtgtgttctccatgtacactggcctcatctacaatgattgcttttccaagtctcttaatatctttgggtcatcctggagtgtacggccgatgtttacttataattggacgtaagttgcagaagaagctaaaattcaaagcttattcctttcatgtgcagccctgatttttaagacaagtggtaaactgacacttctttaggaagtggtgacagtgtctcctcattcatgctccacactgtgagttgctttgtgatttgttcagcaagtatccaggaactaagattagaaatgattttttttttttttggaaactaaaaccagattccccagttccctacttgattgtgtgtttgtgtgtttaatttttctttttgtcattttggatccctcagtctcagctgctagtctctcctctttatttttcccctcccattttattgaagagacaagatagctacagtaatttattttggggtcagtttctggacccttgttgtttccctctcttgttcaaaaataatgtgactttttccctgtcatggtagtgaagagacgcttcgggggaaccctgttctacagctgaacccagccctccctggagtgtttggtggaccatacccttttggcattgatccagtaagaggacttccttcctatatgctaacctcaaattttttaacactaaccctgaagcaagagaattaaaatgaagataaatagttatgtgggctttcactgggcatggtcgctcatgcctgtaatcccagcactttgggaggccgaggaggtgggatcacctgaggtcagcatggtgaaaccctatctctactaaaaataaaatattagccgggcgtggtggcgcatgcctgtagtcccagctacccgggagactgaggcaggagaatcgcttgaacctgggaggcagaggttgcagtgagcaagctgcactccagcctgtgtgacagagcaagactccgtctcaaaaaaaaaaaaaaaaaaaagaaagaaagaaagaaacaaacaaaaatagttatgtgggttttcgttgacatatttttgggaaaccttgatgtatgtattcagaggacttctaagccataagagacccaagtgccttgaggagccacatacttttccctgcgctgcttatttctgaggtggttaataatatcgactctgggaagattgatttttcaagactccttcccatttcttaatttatttctgcttacttagtttggttttttatttttagcagacattttagcaaagcagaaatatatttttcctgtggattttagacttgcattcttatatttacgaacttacaaaaacttatccgagaattaatttttttttcaaatgcttaggcaaattaagtatgatcaagtcttctttattgtgtgctgtaaaaatggagtggcggcaagaatgtaatacagggcatctgactgctgaggaaaaaaaaaaataatacaggctgggcgaggtggctcatgcctgtaatcccagcactttgggacacagagtcaggtggatcacttgaggtcaggagttcgagaccagcctggtcaacatggtgaaaccccatctctactaaaaatacagaaattagctgggcacggtggcatatgcctgtagtcccagctacaggaggctgtggaagaattgcttgcgcccgggaggaggaggttgcagtgagcccagatcgtgccactgcactccagcctgggggacatagcaagactccatctcaaaaaaatagatggaatgacagcaccacagggctacaatcagcgaaacatagactgtgggaaaatatataagataaacaacccaatttcttcaaaagaaattttgtaatgaatgaaaaaggaaagatggaaggagaacctgtagtttagagactcaagagatatatctacaatcataatgtataagccaggcacggtggctcacgcctgtaatcccagcactttgggaggccgaggcagacagatgacttgcggtcaggaaattccagaccagccagggcaacatagtgaaaccccatctctaccagaagtataaaaattggccgggtgtggtggtgcacgcctgtagtcctaaggcaggaggctaaggcaggagaacagcttgaacctgggaggcagaggttgcagtgagccaagatcacgtaactgcactccggcctgggtgacagagtgaagaccctgtctcaaaaaaaaaaaaaaaaaaaaatggtttggacacagatcagagaaatttgaatattgactatatattttatgatattaaagaatcattgttagctgggcacggtggctcacacctgtaatcccagcactttgggaggccgaggctggtggatcacgaggtcaggagttcaagacctgcctggccaagatggtgaaatcccatctctactaaaaatacaaaaaaaattagccaggcgtggtggcgagcacctgtaattccagctactcgggaagttgaggcagagaattgcttgaacccaggaggcagaggttgtagcgagccgagatcatgccactgcactccagcctgggcgacagagtaagactccatctaaaagaaaaaaaaaaaaaagaaatcattgttaatgcatttacgtgtgatgacaatattgtggtcatgttttaaaaataagtcctggccgggcgcggtggctcacgcctgtaatcccagcaatttgggaggccaaggcgggcggatcatgaggtcaagagatcgagaccttcctggctaacatggtgaaaaccccaccttgcaataggccgagatttcaccactgcactccagcctgggtgacagagcgagagttcatctcaaaaaaaaaagaaaaaaaaaaaaagccttactggccgggcgcagtgactcaagcctgtaatccaagcagtttgggaggccgaggcaagcctcaggccagacctgaggtcaggagtttgagaccagcctggccaacatggtgaaaccccatctctactaaaaatacaaaattagctgggcatcgtggcctgtgcctgtaatcccagctacctgggaggctgaggcaaggcaggaggtggaagttgcagtcagcgagatcatgaacactgcactccatcctgggcaaaaagagcgaaattccatctcaataaataaataaataaataaataagtcttttccttttagacatccacactgaaatatttacaggtaaaatgacatgatatctggactttttagtaatgtggagatgagtgagtggcagtaatcttttttcatgactataaggtgatgttaatttttgaagcattctcctcaaaagcaagattaaaaaaaaaaattttgtcgaagcagagtgataggtgcctgggagtttgttgtaccatcctgtctgcttaagtatctgtttagaattttccataataaataatattgattaataaataaaaattgtcgaccgggcgcggtggctcacgcctgtaatcccagcactttgggaggctgaggcgggcgaatcacgaggtcatgaatcgagaccatcctggctaacacggtgaaaccctgtctctactaaaaatacaaaaaaatagctgggcgtggtggcaggcacctgtagtcccagctacttgggaggctgaggcaggagaatggcgtgaacccggaaggcagagcttgcagtgagctgagatcacgccactgcactccagcctgggtgacagagcgagactcgtctctaaataaataaataaataaaaattgttttttaaacagaggaatatttttccctttgagaattctttataatacctatttgttttctcgggttatgacagatttggaacattgctaccaataaactgacgttcttgaactcctttaagatgaagatgtctgttatccttggtatcatccatatgctgtttggagtcagcctgagtctgttcaaccatatgtgagttgttccatttctgtcataagaatgtgcatagtttagagaatgcttttgtgtaaagaaatcatgacatctttggggagggattaataactcagaacctcattctacattatagaagtgcttttctaaaaatttaatggtgtggccaggcgcggtggatcatgcctgtaatcccagtactttgggaggccaaggccggtggatcacctgaggtcaggagttcgaaaccagcctggccaacacgatgaaaccccgtctctactaaaaatacaaaaatcagccaggtgtagtggcacgcgcctatattcccagctattcgggaggctgaggcaggagaattgcttgaacctgggaggcagaggtcgcagtgagacaagatggcaccactgcactccagcctgagcgacagagtgagactctgcctcaaaaaaaataaataaataaataaatttcatggtctggccgggtgcagtggcttacacttgtaatccagcactttgggaagatgaggcgggcagatcacttgaggtcaggagttcaagaccagcctggcccacatggtgaaactccgtctctactaaaaatacaaaaaattagccgggtgtggtggcgtgcacctgtaatcccagctactctggtggctgaggcaggagaattgcttgaacccaggaggcagaggttgcagtaaaccaagataacaccactgcactccagtcggggtgacagagcaagactccatctcaaaaaaaaaaaaaatgttgatggtcttaaattagacttaatattagtcctttaacaatttactgttccagtaaagatccttgaaaaaaacttgagcaattttcatcaaaataagtgaggtctctttttttccttgatgtgcaactcacataaaattattagctgtggactgggtgtgggggctcacacctgtaatgccagcactttgggaggccaaggcaggcggatcacttgagcccaagagttcaagacaagcctgggtaacacggcaaaagaccccatctcta

SEQ ID NO: 7495 - DNA, 6000 bp, Homo sapiens
aagactccttcccatttcttaatttatttctgcttacttagtttggttttttatttttagcagacattttagcaaagcagaaatatatttttcctgtggattttagacttgcattcttatatttacgaacttacaaaaacttatccgagaattaatttttttttcaaatgcttaggcaaattaagtatgatcaagtcttctttattgtgtgctgtaaaaatggagtggcggcaagaatgtaatacagggcatctgactgctgaggaaaaaaaaaaataatacaggctgggcgaggtggctcatgcctgtaatcccagcactttgggacacagagtcaggtggatcacttgaggtcaggagttcgagaccagcctggtcaacatggtgaaaccccatctctactaaaaatacagaaattagctgggcacggtggcatatgcctgtagtcccagctacaggaggctgtggaagaattgcttgcgcccgggaggaggaggttgcagtgagcccagatcgtgccactgcactccagcctgggggacatagcaagactccatctcaaaaaaatagatggaatgacagcaccacagggctacaatcagcgaaacatagactgtgggaaaatatataagataaacaacccaatttcttcaaaagaaattttgtaatgaatgaaaaaggaaagatggaaggagaacctgtagtttagagactcaagagatatatctacaatcataatgtataagccaggcacggtggctcacgcctgtaatcccagcactttgggaggccgaggcagacagatgacttgcggtcaggaaattccagaccagccagggcaacatagtgaaaccccatctctaccagaagtataaaaattggccgggtgtggtggtgcacgcctgtagtcctaaggcaggaggctaaggcaggagaacagcttgaacctgggaggcagaggttgcagtgagccaagatcacgtaactgcactccggcctgggtgacagagtgaagaccctgtctcaaaaaaaaaaaaaaaaaaaaatggtttggacacagatcagagaaatttgaatattgactatatattttatgatattaaagaatcattgttagctgggcacggtggctcacacctgtaatcccagcactttgggaggccgaggctggtggatcacgaggtcaggagttcaagacctgcctggccaagatggtgaaatcccatctctactaaaaatacaaaaaaaattagccaggcgtggtggcgagcacctgtaattccagctactcgggaagttgaggcagagaattgcttgaacccaggaggcagaggttgtagcgagccgagatcatgccactgcactccagcctgggcgacagagtaagactccatctaaaagaaaaaaaaaaaaaagaaatcattgttaatgcatttacgtgtgatgacaatattgtggtcatgttttaaaaataagtcctggccgggcgcggtggctcacgcctgtaatcccagcaatttgggaggccaaggcgggcggatcatgaggtcaagagatcgagaccttcctggctaacatggtgaaaaccccaccttgcaataggccgagatttcaccactgcactccagcctgggtgacagagcgagagttcatctcaaaaaaaaaagaaaaaaaaaaaaagccttactggccgggcgcagtgactcaagcctgtaatccaagcagtttgggaggccgaggcaagcctcaggccagacctgaggtcaggagtttgagaccagcctggccaacatggtgaaaccccatctctactaaaaatacaaaattagctgggcatcgtggcctgtgcctgtaatcccagctacctgggaggctgaggcaaggcaggaggtggaagttgcagtcagcgagatcatgaacactgcactccatcctgggcaaaaagagcgaaattccatctcaataaataaataaataaataaataagtcttttccttttagacatccacactgaaatatttacaggtaaaatgacatgatatctggactttttagtaatgtggagatgagtgagtggcagtaatcttttttcatgactataaggtgatgttaatttttgaagcattctcctcaaaagcaagattaaaaaaaaaaattttgtcgaagcagagtgataggtgcctgggagtttgttgtaccatcctgtctgcttaagtatctgtttagaattttccataataaataatattgattaataaataaaaattgtcgaccgggcgcggtggctcacgcctgtaatcccagcactttgggaggctgaggcgggcgaatcacgaggtcatgaatcgagaccatcctggctaacacggtgaaaccctgtctctactaaaaatacaaaaaaatagctgggcgtggtggcaggcacctgtagtcccagctacttgggaggctgaggcaggagaatggcgtgaacccggaaggcagagcttgcagtgagctgagatcacgccactgcactccagcctgggtgacagagcgagactcgtctctaaataaataaataaataaaaattgttttttaaacagaggaatatttttccctttgagaattctttataatacctatttgttttctcgggttatgacagatttggaacattgctaccaataaactgacgttcttgaactcctttaagatgaagatgtctgttatccttggtatcatccatatgctgtttggagtcagcctgagtctgttcaaccatatgtgagttgttccatttctgtcataagaatgtgcatagtttagagaatgcttttgtgtaaagaaatcatgacatctttggggagggattaataactcagaacctcattctacattatagaagtgcttttctaaaaatttaatggtgtggccaggcgcggtggatcatgcctgtaatcccagtactttgggaggccaaggccggtggatcacctgaggtcaggagttcgaaaccagcctggccaacacgatgaaaccccgtctctactaaaaatacaaaaatcagccaggtgtagtggcacgcgcctatattcccagctattcgggaggctgaggcaggagaattgcttgaacctgggaggcagaggtcgcagtgagacaagatggcaccactgcactccagcctgagcgacagagtgagactctgcctcaaaaaaaataaataaataaataaatttcatggtctggccgggtgcagtggcttacacttgtaatccagcactttgggaagatgaggcgggcagatcacttgaggtcaggagttcaagaccagcctggcccacatggtgaaactccgtctctactaaaaatacaaaaaattagccgggtgtggtggcgtgcacctgtaatcccagctactctggtggctgaggcaggagaattgcttgaacccaggaggcagaggttgcagtaaaccaagataacaccactgcactccagtcggggtgacagagcaagactccatctcaaaaaaaaaaaaaatgttgatggtcttaaattagacttaatattagtcctttaacaatttactgttccagtaaagatccttgaaaaaaacttgagcaattttcatcaaaataagtgaggtctctttttttccttgatgtgcaactcacataaaattattagctgtggactgggtgtgggggctcacacctgtaatgccagcactttgggaggccaaggcaggcggatcacttgagcccaagagttcaagacaagcctgggtaacacggcaaaagaccccatctctacaaaaaaaaaaaaaaaaaaaagttatgaactgtggtctcaaaatgtactagatttttccattctctttctcatggagagaatggtggggatggtattggagccgttcaaggttcaaaagtttaaggcctggcacaatggctcacatctgtcatcctgcactttgggaggccaaggcgggcagatcacctgatgtcaggagttcaagaccagtctgggcaacatggcaaaaccccatctctacaaaaaaatgtaaaaattagctgggtgtggtggcgcatgcctgtagtcccagctactcgagaggctgaggtaagaggattgcctaagcccagggaggttaagactgcggtgagccaatattgcaccactgtactccaggctgggtagcagagtgagaccctgtctcaaaaaagaaaaagcaacagcaaaacaaaaccaaggttcaaaagtttgaccgtgatagttaatcctgcattgtctctgttgtctccagcttctggttgctgctgcttaaagtgataaagacagaattgagggggtattaagtagaaaaatctagtgaatactccattcagtgtaggagtggccctaggcccatttacccttaacatttttttctctctcctttttagctatttcaagaagcccctgaatatctactttggatttattcctgaaataatcttcatgacctctttgtttggctatttggttatccttattttttacaagtggacggcctatgatgctcatacctctgagaatgcaccaagccttctgatccatttcataaacatgttcctcttttcctacccagagtctggttattcaatgttgtattctggacaggtacgtcagcccagaggcagactgtctgagatgattatacttgatcaggaagccagatgtttctctgaccctaaaaaatttataactgcccttctatgggacaattctagggctttgccacaaaatgtgataattattttgagaaattggatagtgttattcatagattagtaagaaagtactgttgggggaaatttgtgccatatttggaaactgcgtatgtgatcggtagacttttatatgatgtaccttgtccttcttcttactctgcagaaaggaattcagtgtttcctggtagtggttgcactactgtgtgtaccttggatgctgctgtttaaaccattggtccttcgccgtcagtatttgaggagaaagcatttggtaggtgtatttctattgctaaaagttactagacttttgttttgttcaagatcaaggcaattccccagtggatataattaattgtgcacaaatctatatattctttttctttttctttttctttttttgagacggagtctcgctctgtcccccaggctggggtgcagtggtacgatcttggctcactgcaacctccacctcccaggttcaagcaattcttttgcctcagcctcctgtgtcactgggattataggtgtacgccaccacacctggctaattcttgtatttttagtagagacggggtttcaccatgttagccaggctggtttcgaactcctaacctcatgatccgtccaccttggcctcccaaagtgctgggattacaagcgtgagccaccatgcccggccacaaatctgtatactattaaaacgcatttgtggccgggcgcagtgcctcactgctgtaatcccagcactttagcactttgggaggccgaggtgggtggatcacttgaggtcaggagtttgagaccagcctggccaacatggtgaaaccccatctttactaaaaatacaaaaattagccaagcgtgttggcgcgtgcctgtagtcccagctacttgggaggctgaggtggaaggatcgcttgaatctgagaggcggaggttgcagtcagccaagattgtgccactgtactccagcatggggacagagtgagactctgtctcaaaaacaaaaaaccaaacaaacaaaacgcatttgtgttatgtcccagcacgagcactgggcctgccaagtcagagaaacatgtctgctgctcaagatatctggattcagctttgagtagctagaggagagaaaagtcacaaatttttacctttcctggtcatgcttttgctcacgctgcgctcaggaaaatgtaggcctatgcctgtctagatgtagcatcagccaaagccaagcaaagctgc

SEQ ID NO: 7496 - DNA, 6000 bp, Homo sapiens
atccagcactttgggaggctgaggcaagaggatcacttgaggtcaggagttggagaccagcatggctaacacggtgaaaccctgtctctactaaaaatataaaaattagcttggtggtggtgcacgcctgtagtcccagctactcgggtggctgaggcagaagaattgcttgaacccgggaggtggaggttgcagtgagccgagattgtgccattgcactccagcttgggtgacagagcgagacaccgtctcaaacaaaacaaagcaaaatacaaaaattagccggacgtggtggcgggcgtctgtaatcctagctactcgggaggctgagacaggagaatcctttgaacctgggaggcggaggttgcagtgagttgagatcgggtcactgtactccagcctgggcgacagagagagactccgactcaaaaaaaaacaaaaacaaaaacaaaaaaccctggaattgctcttcatttcctcaaacctccttccaccctcaggctttttagcccctcagccatttttgtcccattccctttgggcaaaggagattctagcaaggtgaagaaggtgggctcaaggggaggagggcagaggcaaaaactggaaggggaaatggaggaggacaggacgtcccagatagggacagccctttgcactgcagggattccacttctcctcgtcttcccattccctctgagatgctgactctgaccacagctcttggactttaagccaccccacagcatcccctttacttctagtgtccttccaatttgaatcccactcctcccaaatataccagattcctaaaggggctgcttgtttgtctttgtgtaatgatttttgttgttgttgttattgttggagtctcgctctaccgcccaggctggagagcagtagtggcgcgatctcggctcactgcaacctccgcttcccgggttcaagcgattgtcctgccccagcctctcgagtagctgggactataagcgcgcaccaccacgccctgctaatttttttgtatttttagtagagatggggtttcaccatgttggccaggatggtctcgatctcctgacctcgtgatccgcccgcctcggcctcccaaagtgctgggattacaggcgcgagccaccgcgcccggccaggattttaaaaaaaatactgtattaggatttttataaggctgtagtaaatgctattgaaaaatgcttacctcttatttcagccttctcctctgtctgttcctcaaactggcttttggtttgagagaaggggaggagcgaccctggggttggaaaagcccaggagacaagatggagatccagtctgttcatctgtacatccctggacctggggcggtcctggggacagtccttttctcaagccagtcagtggacatttgggggagagtctaggcacggatatagaggacccaatattcctttttttttgagacagagtctcgctctgttgcccaggctggagtgcagtggcgcgatctcggctcactgcaagctccgcctccagggttcacgccattctcctgcctcagcctcccgagtagctgggactacaggcgcccgccaccacacccggctaatttttgtatttttagtagagacggggtttcactgtgttagccaggaggtctcgatgtcctgaccttgtgatccacccgcctcggcctcccaaagtgctgggattacaggcgtgagccaccgctctcggcccaagattccttaatctagttggttttccgaaagcgtggctatgaaggaagaactcaggagttctagccattcccattgtattttgtgtttttttcagtaggtatcccgacgcaaccctcagattaaaactttaagggaaaatgaagaccacacccctattccatagaaattaactctaatgacaacgtagtggcgtggcgggggtatagctcagtggtagagcatttgactgcagatcaagaggtccccggttcaaatccgggtgccccctctgtgctccggagttacctcgttttgttggtctccggaggtcctctaaagagttcccgcacagatggaatgggagggagtctcgagccctgccaccctttttgctttcgcaggcgagtgaggatggagtcctggcccctgccagtggctcagcctgtgtgtgtacccagggtagaatgcaatgcgagtgagggcgaggagctccgggctgacccttggaacacggtacgggtggctcaacctcgcaatggcagggcggaggcgagcgcacccccaggtcagcctggctctttcttggcgggaaggaggctgagtttctaagggctgggctggggaagacaggtcgggagaagccgcgtgagcatgtgggagggagaaagaagctccgagacgtggcaaggggtcttctgcagggcaggagagtgggacgcccccgaagtgaaatatttcgagagacttctccttccacaccccaggaatatattttcttatactgccagtggggatcttcagctcagagcttcagggaacaacccctgcttccaagtgagtaattcttctgggagttgtattttttccatctcttgtaaacgtcttaccccacttccacttcccttcgggaacgccacacagcgcctgcgcagcaataccactaaacgactacgtgcggtcggtttgccggcagagggggtatagctcagtggtagagcatttgactgcagatcaagaggtccccggttcaaatccgggtgccccctctttggccttttcgagatactgtttttgtcctgggtgtcgatttttcctaagctgtttgcttttactcctactggcagacgaggagcagtgagggactgaaaggaactggggattcaacagcagtggctctcaaaatgtggtcctgggaccagcagcattacctgggtacgctcgggcctcatcccagacctaatgaattagaaacttgagggtggagtccagaaatctgtgttttcatatacgctccccatcgcttgagtccaggagttggaagctgcagtgagctatgatcgcagcactgcactccagcctaggcaacgtgcgagaacctgtctcaaaaaacaaacaaaatacacacacacacacacacacacacacacacacacacacacacacaccctgcaggtgattacgatctcaagttctagaggcttacgttaaaatttacacatttgcttctactatttacaagtttatgtttcagcctgagctcttcttgtaagacagaccacgaggtaccccagatggaggaatgtgcaaagacgccggggctggagctggaatccgtcccgagacttctcaccttgacctcgaggaaggcaggaggtcggagacagggggtgggcaggctggggaaagaggaaacccgcaggacaagagggttgtggctcgtcacgtggccacttgagggcagcaagtagctgcagctggaggtagctgcctatctgattctgtttgagagtccgccaagttgggatttaaattagacatcaagaagaatttacagaccggccttgccttgttccacggtaaggggacattgggtttagggctggaggaggtagtctctgggactctgggcccggcggaaggaggaaccggcgttctaagagattagagagcctttagttgtttcctttcttaggtgtttttttttcttttcttttcttttttttttttttaacctcagtgccacggaatccgtctcttccagcccacagtgtaccttctcctgtccccgcccatatccctcctcctggaaaatttctccaatggcgctcagcgttcgcacccttcctctccgcggttttctagtccctaggccccagcccactagaagccaggatgccccctcaccccgtctcccactctccagcgccccagctccttgccgtcacaagaacgaagtaggtcaggggagggaagaggcatcttcgtgtcctgacctgattccttgccgtctattaaatatcctacattgcgggtatttttattctgtcctggaagaaaaaataaaaagattatctatccccagagcctgtcagaaggtggtgacaggtggggtgagccatttcctcgtctggggctggctctgaagattgattgggtctggccctgagtaggcctggaggccccagagaggcaggaggcctgggttacctactcgtggggaggggtccagactgttgcagagtaaggggtagccaggccccctccaccctcacgtctgctaggcttggggggcaaatcggtgctggaaatggggggtggagggataaggtggagtcatggaaggggggtgggattcaggcccctcttggggagaaaagctgggggtctttgctgcagggggagatttctgggggtgggggctggaggacaaagcatcagagacgcacagaattccgaagaacagctcaggaagtcgcagagcttggaggagctgggggcggggaacagtcaggggcccgtgacccagggatggggcgcctgtcccttccaggggtccagtcctcgggccttctctctgcagctttcccggcggaacggaggagggaaagggagccaggagctcagtgaggagcgcggggcggctgatgcttctaggggttctctcagcccgaggggctcccgccctgtcccctactctgcaccccttgccttgggagcggctgcagagctctaggggagcgctccgttagggctgagggcaggcgccgggagagcccccaacgacgccgcgccccccgccccgccccctgccccagctcccccccacccccaccgacccagcggcccccccagctccccgcctgctcccggaggccgcagcctccagctccgctcgcgctctcgccgctcctgccggctcgcccggccccgcgctccgccgtctcctcgccgcccgcccctccgccagccccggggaccgcgcggccgcagcctgagccagggccccctccctcgtcaggaccggggcagcaagcaggccgggggcaggtccgggcacccaccatgcgaggcgagctctggctcctggtgctggtgctcagggaggctgcccgggcgctgagcccccagcccggagcaggtaggactggcgggagccggcccgggtgggccgggggcggggagggacgggcagtcaggtgtgggcatgggcaggtgtggacggcctggcgatgtccgcgaggggggcattgtccgcaggaggccaggagagctgtgggctgtgggcaggtggatagggaccccactttcccaaacacatagggtgtgtgagtgacggtggagacaccgatgcccggacctctccttctctcctggaaggatactggagggaccttaggagagggggctctatgtggccatgggctctgaaaggggacagcgggagagtcatcaggacccctgatcaccccaggcaaggctgaattctgatgagatgggagcctggggaggcccctgccccagccatgccttcttttcctcttctctgccacacccccgaccccaaagctgatccaggctagggataggtgggagcagccagggggatggtggggacacagcgtctctgcctgggaaggcagcagccattcggtcaccttcccttgcctatttggtgtcagtagagaggcagtgggcccaggaagaagcaacttgctgcttctgcacccccagcctcaagagtccccctcctcacacctgctcccatttgccctggcagcctttggctttcagctactctggctctagatggggcactggggtagggggtggagggaggcgtcccattctgcacactcctcttcccccctaccagttctccaaactcatctctcccacctggaagtcctttctgagatctacctggaatccctcatggtataattttcatagtctctgttctcccctaagcacctagactttctctggggttggggagatgggtaat

SEQ ID NO: 7497 - DNA, 6000 bp, Homo sapiens
tactggcctccatttaatggtttcactgcagctgtgtctctgagggctcagtcttttttttttttttttttttttgagatggcgtctcgctctatcacccaggctggagggcagtggcgggatctcggctcgctccaagctccgcctcccaggttcacgccattctcctgcctcagcctcccaagtagctgggactacaggcacccaccaacaggcccagctaattttttgtatttttagtagagacggggtttcactgtgttagtcaggatggtctcgatctcctgacctcgtgatccgcccgcctcggcctcccaaagtgctgggattacaggcatgagccaccgcgcccagccttattttaaaaaaatttttttaaaactttttattttttatttttttttgagacggagtttcactctggtcacccaggctggagtgcaatggtgcgatcttggctcactgcaacctccgcctcccaggttcaaatcattctcttgactcagctgcctgagtagctgggattacaggcacgtgccaccacatccagctgatttttgtatttttagtagagacggagtttcaccacgctggccaggctggtctcaaactcctcacctcaggtgatccactggccttggcctcctgaagtgcctttgttctcctttttgccctttgaagcatgtgatctctgtgacctactccctgttcttgcaccccctcccctttcaaaatccttaataaaaacctgctggttttgcggctcaggcgggcatcagggtcccaccgatatgtgatgtcgccctgggaggcccagctgtaaaagtcctctctttgtactctttctcttcatttctcagccagccaacacttatggaaaatagaaagaacctacattgaaatactgggggctggttcccccgatatctggcgcgccaacgtggcttttctttttcctgagtgcatgtggggacccgcttccctttggtagttgtgtagaaacgttcatcggtccggttcacagaaatgcttgttcgactcaaaaaaaaaaaccaaaactgactcatatggtttagtaatagactgggtaccaaagggctatttaaaaaacaattgctcctgtggcgggagggaatgcctggaggctacttgttttatttcttattggaagaacgaggatcatcattttactttgtataggaggttcagctctttctttcccttaaaatgggaaaataaggacattgtcccccgagggctcgtgtgatactccccattctgagctcagaacacccagaactttgaaaattggctcttgccacatccagactgcgagtatgggaaggggaaacttttctgtctgttgtccctgctaccgcccctcgcgtccgtgattctgaaccccatgataaatctcctttgaacccttttcctctttttgatgccagtcctcttttatgggactccaattggcattacgataatttttctcaacccaggtatgccactctacctcttcagcatccccgggcacctcaaattgcttttttttttttttttttttttgagacggagtctcgctctgtcgcccaggctggagtgcagtggtgcgatctcggctcactgcaagctccgcctcccgggttcacgccattctcctgccccagcctcccgagtagctgggactacaggcgcccgccaccacgcccggctaattttttgtacctttagtagagacggggtttcaccgtgttagtcaggatggtctcgatctcctgacctcgtgatccacccgcctcagcctcccaaagtgctgggattacaggggtgagctaccgcgcccggcccttcaaattgctttttgacagcggataacatcgggtgtggccaccactgctcctctccctcagtatcagtgtagattcagacattctgctttgttcacctccaatgtgactattcctatagagttgtgttaagcttcgttatatgctgttagtggggaatatcaaaatttggacgaacaatcaaactatccaatgtattaattgtcatttatatacttgtgttaactcccgttttgactctaggaaaagtgtaatgttggttcgagctcgagaaggaatctggatactggtaactttacccagaccttgggaatcttccaaagctgggcaagagggcagagggctaggggccaggatcgggccctccaggcagtggttgggagggcacagggcacagggtgggggtaggggatgccgagggtgcttctgaccagccagcaggactcacagggagcagggcttgagccacggataacaggaccagtgaggcctggtccactctcctgggggcacgtgcaggccgctggaggggtctaagcagatgggccttccaggaaggacaggttgaggggtgtccttcccttggctgctggcaggcagaaagcaggctccaagggtaggggcagaaagcagagtttacagggcggccaagggggggttggactggccgcagtgccaggtctgatatggaccatgcacttggctgtcctccagaacaaaccaggaccttgcctcctgctgtgcctggccacccttgcctccggcctgtccacctctgtgggcccaaagccccagatgatccaaaggccctacagtcaccaattccatactcctggccacagaaggtcactcctggccacagaagggcagtagttctagactttcctaccatgacccacagaacaaagtagcttttacatggaggcccagtgtgtgggtgcacacacacacgcatctgtaactgaccccaaagcctcgggaagcaatgctggtctttgctggaccaccatgtacttccatgaccccaatcccttcctatcctattcaacttctaaaaggtgcccctggccggatgctggctgtccaaggtgacctggggttcaagtccctttcagatgaatgtagggtacagccctatggggcttagcaggtcttctccccgtgtgcggagacacgagattgtgagaaataaagacacaagacaaagagataaagagagaacagctgggcccgggggaccactaccatcaagacacggagaccagtagtggccccgaatggctgggcgcactgatatttattgcatacaagacaaggagggcagggtaaggagggtgaatcttccaagtgattgacaaggtgaagcaagtcacgtgatcataggacagggggcgcttcccttttaggtagctgaaacagaaagagaagaccatacatcagcgctttcttctatgtacttataagaaagatcaaagactttaagactttcactatttcttctactgctatctactacgaacttcaaagaggaaccaggagtacgggaggaacatggaagtggacaagaaatgtgaccattaaatcatagcaccacagggagggggttaggcctccggatgactgcgggcaggcctggataacatccagcctcccacaagaagctggtggagcagagtgttccctgacgcctccaaggaaaggagactccccttcgcagtcttctaagtaacgggtggcttcccagacaacggcattactgcttgaccaaggagccctcaagcagcccttatgcgggagtgacagagggctcacctcttgccttctaggtcacttctcacaatgtccctaggttatattagtaatgcaacaaagagtaatattaaaagctaatgattaataatgtttatactaatgattgataattatccatgatcatgatcatttttatatctaatttgtattatgactatttttattttaactgttttttttttaaagatggagtcttgctctgtcgcccaggctggagtgcagtggcgcaatctcggctcactgcaagctccgcctcctgggttcgcgccattctcctgcctcagcctcctgagtagctgggactacaggtgcccgccaccgcgcccggctaattttttgtatttttagtagagatggggtttcaccgtgttagccaggatggtctcgatctcctgacctcgtgatccacccgcctcggcctcccaaagtgctgggattacaggcgtgagccaccgctcccggcctattttctttgttatactgaaacagtttgtgtcttcagtctcttgccttggcatctaggtaatccttcgcccacagatgaaagcggagctctgctgacattggtgtcttctccagacgtagttggttgtccaaattctttcccttggctttaaagtgagccggcggtgtcctgctcccaagcctgagagatgatgggcacaggcgacactttttaggacatgccgatgttttcagaaacaaaacaagaaatgttagccctgaaattctccatttcacgtgttcttcctgatattaaccacacattctttccgatattaaccaccacatcgtctttttgcaataatcttggcagggaaaaatatgctagccagggtccactacgtcgatttcaagcacggaagatgggtcacaccaggcacttcaaaagacccgtccctgaggcagcggagaccccgccccgccccggcgcgcccactcctttcggccaatcactgcagcggggagcagctatttgaatgtccccaccgcctatctgaaggccgccctgccattggccccgccgcgccccgcccatcgtggccagagcttcaagttccgcagccccagtgcggagggcggagactgcgccgacatggagctgttcctcgcgggccgccgggtgctggtcaccggggcaggcaaaggtgggcggcggggaaaggtgggcaaaggccggcggcgggcagaggcgggcaggggacgccttcactgagcccgctcccggcaggtatagggcgcggcacggtccaggcgctgcacgcgacgggcgcgcgggtggtggctgtgagccggactcaggcggatcttgacagccttgtccgcgaggtaggtcccgccgggtcccagcgctgcgaggcggcgagccaggagggggcggcagcgagcgggggcggtacctctgtgcgcgactccgcctcccctcgcgggcgctgcgcttctcaccgcggcctgggcgcccgcgcaccctctctcggggctggtggcctgcgtgggcggccgggtggtcggcagagccgccggggcccccgggctcagaaagaggccgaaatggctgcgaagcaggccccgggcaggagtcgctcgggcgcagggaggaagtgaaccggccggaggtagcgcccggctgctggccccacagtcccgacaccttcggaactcctaactcctttacttgtccggctgaaaggtcaccagccccagtccccagctgtgccgcttgctgggcacagagcctctggtaactgccccctgatacacacagtgcccggggatagaacccgtgtgcgtggacctgggtgactgggaggccaccgagcgggcgctgggcagcgtgggccccgtggacctgctggtgaacaacgccgctgtcgccctgctgcagcccttcctggaggtcaccaaggaggcctttgacaggtgagcctgtgagggcggaggaacctcagggaggggctgtcctggaggacgcagcagccctaatctctgaccagggtctgtccctcggcctctagatcctttgaggtgaacctgcgtgcggtcatccaggtgtcgcaggtgagctgccctgtgggctggacgggaattctcgtgagtgatgccagctctgcctcacggtctcgctgcgattccagattgtggccaggggcttaatagcccggggagtcccaggggccatcgtgaatgtctccagccagtgctcccagcgggcagtaactaaccatagcgtctactgtgagtgccccagctgtgccctcagccccaccccagccccagcctcgccctcatcaccgaccccagccccagccagcttgggttcctcttcgtaggctccaccaag

SEQ ID NO: 7498 - DNA, 6000 bp, Homo sapiens; identical to SEQ ID NO: 3296

SEQ ID NO: 7499 - DNA, 6000 bp, Homo sapiens
agtggagttgtcagctgctgggatcctgcacacaggtgctacaccgaggtggaggtgtgctgccatgagggtgcatgcaacggggcgtgggctcctctggggaggcagaggaggcttcgacgaggaaaaatcttctacctccaactccaaaagatgcccaggagttttccaggagagaagtgggagaagaaaggcatttttccagcagggaacagcagggccagaggcacagagacagaataacagtagctacactttgggggctcttactgtgtgctaggcactgggttaagcaccagacaggagtgatcttgttgggtctttaccccactaggaggtgtaggtgctgtggggggaaagggaggctgagtgaggtgagtgctctgccagagtcatgtagctagggaggggtgactcggggccccactctccccacctgcggcgctgctctcgggccagcagtgtgatgggcaggtgcagaggggcataaggtgcagaggctgcctgacagctgtgccttaccacattctttctcacaaggtctccagggagtaaacaggcctttggccccctgcctttgggctctcctttcctgcagggagggagtgagggaaggagaagcagaagatggctgagcagccctaccccactggagaggggcctagaggaacaggggtgttaagcgcagtagccgacccccattcatgcttcccgcaggccaggcattctttcaaagactgtgtgcacggactcatcctatctgtatctgttcaggaacactatgaaggaagtgttattagcttgactttatggaggacatggaggcagaggggttagaggctacagtggttttcagtcttgggcagtctgctctagaacccacgcgtcggcccgtgccacactgtttctagtgacacagacagccttttcctgccccagtctgtggagctctcactccagccagactgcagtgaacagagctggggctggaggtccgggaggacagagcccaatgcagattcttggctgcagccctccaggctgcaaggctgaaatcctttctggtccaggcagggcagcgggaggtttctgggcacctgagcagccagatgacagccctttattatccagcacctgctctgtggtggctggaccccctcagaggggctctgtctccgcccccacatgccctttgagctgctctgagaagccacaggagcaacagctgtggagagagactctgcggggaagcagccaacaccccagtctccctaccctggcctgcgtccttgtgcctggagaactgccgggcacgtccctctcagaacagcaggtggcagcattgcatctgttttcaccaccaaagggctgtgaccccctgagacctgagaccctctgcagatacctcagtaactagtggtttccaggaggagaatgtaagggagacgcagaaggggatgtaacttttctccataactgataaaaaaaaaaatttaggagcaaggatccctttgcttgtaaaataactcttcagctgaactttttgttagcagcgtatatctttataggaaacctatctttttccttatgttttttctatattttcataggaaacctcccaacaaataatgaatgtgcttcccagggacaaagagaaagtgtcagaatgaagatgctggagaaaatccttctgtcattttccagcacctatgctatttcttgcagggaaaagaggtgttctggggtcagactgtcctgggttcaaattctgtctcacttgcacacttgcagtgtgaccattgtgtgatttcttttctttctttttttttttttttgaaacggagtcttgttctgtcatccaggctggaatgcagtggtgcaatctcagctcactgcaacctccatctcagcctcccaaagtgctgggattacaggcatgagccactgtgcctttttttttttgaaatggagtctcccctctgttacccagtctggagtgcagtggcgcgatctcagctcactgcaacctccatctcagcctcccaaagtgctgggattacaggcatgagccactgtgcctttttttttttttgaaatggagtctcccctctgttacccagtctggagtgcagtggcgcgatctcggctcactacaacctccgcctcctaggttcaagtgattctcctgcctcagcctcctgagtagctgggactacagtcttgtgccaccactcccggttaattttttttttttttgagatggagttttgctcttgttgcccaggctggagtacaatggcacaatcttggctcactgcaacctccgcctcctgggttcaagcgattctcctgcctcagcctcccaagtagctgggattacaggcgcctgccaccatgcccagcttatttttgtatttttagtagagacggggtttcaccttgttggccaggctggtctcaaactcctgacctcaggtgatccacctgcctcggcctcccaaagtgctgggattacaggcgtgagccatgccgcccggccgtgtgatttcttttctatcgatctcaggtcccttgactgcaaactcaaatcaacggcagtgcgcattttcatgatgtctggatgggataagctatacagccctcacgtgatgcacaggacggagctgggctcagtcaatgatggttccctttctctgcttttggaaaggtgtgctgtcaacaccaatttaaagagctggcaaaaacagtcattctcagggcctttctctcatcggcctctcaaaagcacaggcctccacagagatgaacagtttctttcttttttttcttctttcttttttggagacgggtcttgctctgtcacccaggctgcagtgcagtggctggattttggctcatcacagccccaacctcctgggctcaagcgattcttctgcctcagcctccgggtagctgggactacaggcgccaaccaccacgcctggctaatttttgtatttttagtacagacagggtctcactgtgtcgcccaggctggtctggaactcctggcctcaagggatctgcctgcctcagcctcccaaagtgctgagattacaggcgtgagccaccgcacccggcctgacatgaacaaacttttatctttcttcccgcttttctcttatttttcagaagcttcactgtatgaagatagaataataacaagagagaaggacatgaggagagtgagagatgagcccgagaaggtggtgaagcagtgggaccatagtgaggatgagaaagagacagatgaggacgatgaggcttttggggaagctctgcagagcccagcaagcggaaagcagagtgtggaagcaggaaaagccagaagcgatttgggagcagttgccaagggcctgtcaggagaattaggcacaagatcaggagaaacaggcaggaagctactagaagctggcagaagagagtcaagagaaatttataggaggccttcgggagaattagagcaaagactctcaggagaattcagcagacaggaaccagaagaactaaagaaactttcagaagtgggcagaagagagccagaagaactgggaaaaacacaatttggagaaataggagaaacgaaaaaaacaggaaatgagatggaaaaggaatatgaatgaagccatcggtagagatgaggatcaggaagctggtgttcagagggatcatgggattttattaaactggattttcaagcgatttgtctgttataggaaaaatgagggttttacttctgctgctttccatcactattttgccattaaataggtgtctttcactcttgcaaaccctgagtctgtcactttgcctcttcacccctgcccattcttggaagagcatcgtggaagaaatgagaaaggtgccaagaagaaagggtttcaggagggtgaagatacgggcgctacagggaacaagaagtcacagggaggagaggggaaggcctgggaggagaggtgcttcccacacaccggtgactgactgagtccctccagtgcgcaggacagcggggaggctttatggatggaacagtggtggggcggccccagctgtcacaggtaggagaatgccgcaagccagaaccaagcgaatgctgggagtgaggccaaagataggggagtggcctgggagtcgggagggcagacagactccgcctctgacacctctgggtggcataatcaggtaaatcaggctctccaagctggcttctcctctgaacaatgggatacctgcctcaggggttgctgcgaggactgagtgcttagcacagcacttggacaggaaactcaaaaatccaacggagctctcagtggtttcacagaggaggtggcagctgaggatctggcctcagaggatgttaggatttcactccgttactcatctgtccctttggccattgccatcctggtctgtctccacagctcctagaaggaaaggtcggggctgagactgactttcggctggcacagggcctggacgaatgaggccagtgaggcatttcagatgcagagtttaccggaatgccagcaaattgcatgataatattttaatccaatgtggtaaaaaaaaaagtttttaattaatgcaaaagtccatgatgaataaaatatcaaaaattaaagacaggatccgactttgcacgaccctgcctcactcacttcctgctaatccacgggaccggggagggtgactgagttacccctcaacacgcagaaaaagctagtggccgctcagctcgcaggcgcagtgggtgggtgcgcgtggggagcaggcgcgcgcagggggcgggaccgggccgaggttcccgcgcgcggcgagagtttcgggttttggttcgcagcgcctgcgcgcagaggagacggcccgcccccagcccgcccgggtgcccgctccgccccccgggctatgtaaagcggccgggctcgggtcgtgccaccgctggactcccgtgtccctccgcgcaggcgggcggccccggagcgctggtgccggcagaggcggcgacggtggcgcccctcctcatcatggtgagaggccgggcggggccgggcacggggtagcaccagggcgggaaacgagtgtcggggcccctcgggaggaagcgtcttgcaaacgaggacccggggctccgggttcgacttccagttttcttggtactcagggcggccctgaggtctgggagaagcggaggggttttggggtgccggagaggccgctgtaaagggaaacggtggtgtttctcaggagggaactcgggaccgcagaagctgctgcgcctctgggagcctgggtgggcctgggccgggagcccgggagctgctcccgaccccacgcaggcccgcgctggggcagccgcttcggcgccccctccccgggcccagtctcatcacgcggaaccgctgccccgcgcccgggtgcgggcgggaggtggagccagttcagaggaggggaccctttacggtaaaagctgccgtcccttgtggcttctagaagataggaaaacaagtggctccgagaggcgcttctgacacacagcacagcggcgggtagagctggatcctaattgcaggtgccctgtgctgccctgttctggacaggcacaaagaccacgactttgtgggggccgggagagggtagaggaggaggtggcaggcttggtgaaagagggcctttgtccagtgctctcctgccctgccccccaccagcccttctgtgggaccattgtacccgcatgccagacaagagagtattatctgttgcggccattgttgggggaagggaggcagtcttggggtaacccttctccactcccccccttctctgtgcactcagccgtggcagctgtggcttggcccagacacagagacccccacctccaaagaggacgtccttagtaggtgccaagcatataagagtgaggccagtcccagaaccgcaggctcctggcgcgccccgcatgcc

SEQ ID NO: 7500 - DNA, 6000 bp, Homo sapiens; identical to SEQ ID NO: 1959

SEQ ID NO: 7501 - DNA, 6000 bp, Homo sapiens
gtctgctcagccacaccactagctggagggaggccacagcaagccccgccagagtctgaagggcctcgaaaggtgattcccagcctgggccaggagcactctcccagtgcagggctctggtctttgaagtgtatgggcccaacaccctgctcacacagagtggctgcccacaaggcccagccatcagcagggctctgccgacccatctctgtaaggcttctcttccacgtggctggtctgctccagaagccactgatgctcggactcactcactgtcagtctgagggtcacctcctgaaaaacactgctcgtagccacctacgtgagccagagagaacaaagcctgctaagttacagtattaccaccaccaggcccaccacccaggtctaagccccactctgccccaggacatccttacctgctcaaagtgaagtttctggaacatccggatgcttggttcatttccttgcccaattttagcctcaaacttggtcagacctagcgtggtcactcctcgcagaggagatgagacaggggcaagtaaggaggcgcctgcccccaccctcctgtcccaagctgcagaggaggaaccttcacctgcccccaaccctcacacctgaacaaagttcacctggggcctgcccacttcccgcattgtctgctcacactttcttaccgtaagacagcatcgcgagaacggcctcagtgccaaggcccttacccctgcagctgggctctaggagagacaacaggagcggcgctgacgccgtgtgccaggctccagtgcgggcacttggcagacaccatctcatttaattctcaacaactctgaagttgctactatcattaccattctgcagacgaggaaacaggcacaaagaagtgtgaaaggcctcacagcttgcaacccagcaacctgacttcaaagctgacctctttacctcatggagtcagtatgctgcctcatggggatagtcagtagccacttgggggaaactgaggaccatgaaggagcagaaacaggagggcctcctcctgtaatatgacaacatgctccagagacctttttctgagggtccccagcccaccccaactatgggactaaccatacttgaatctaccccaaaccaagggttaagttcacgcctaagcataaggactaaagtgatgaggctgagggtgtaccaccaggctgagggggctaggtgggcaggctgcccagccaggccctggactcaccacatggagcctcccagtgaaccctgtgagtgcccaccctttgcagcctcggcaggctcagtcagcagatctgagagccgggagtcagcggaaggcagggctaggtgaaacaaacctgcaatcatgacctcgatctcccccaaggtgaggtcttctagatctgtgaggaagaggttcacatctcccaccatgcagctctcttcggtggcgcctggctgggcctgccacttctcggcatccagcacaatgaaggtacactctgaggaggaggtgacagggctatcacacacactccccagaggagagaagagaggatggtactcctacccaagccagagcactgcagaacaccagcatctctgagtctgccaggagaagagggggtcccagagcttccttcagctcattacaaaattccaaatctgcctcatacagaaaaagcctctccaaccagcaaccaaattctcagagagcagggaacacagaggagggcagtcaccacactaggctgtggtgagggacatgaggggcagggcctcaatttacagccagagccccaaatgctctactttctccaaatccttccaagcccgatgcagtgggtggggaagaggacagaagggtcagccacagggactggcttcagggccatgagaatacaggagttccagcaccttccaggcttttcacaaagcttctatggccggggctgggaaagggaaggaacctggagactgactgtggagtcagccctcccagtaccagggctaggggaagtgggggggcactcctcactgtctgcatcttcctgccagctgcactgcatggcatactcctgctccagggtcagcggctccgaggctgtcaaacgctgcagctcctctgatttcatccactcgtggtacctgctgggacagaggggtggctttagacatggaggactcattcagaggcatacgtctgacaccttatgagggtccagaaccagacagggctaacatagggctcaaagaagacccaaagggttatgattgctcctaaggcaggggccacagacacaagacccagaagcaagctagtcttacacaagaacagcaggacgagtcagttctatctgtccaatttcctatcctgtctcgggtcagtgcggaggagcagtctgaaaccaaacattcttcaaattccagaaggggatgtatatggcaagccaacctcaacaaaggcggctggacagatcccacgaagttagggcaccaggaaccctcaaacggaaaactacaagtagagaatacccatctacagcaccactatcccaatctaccagacatgtgccaactgcccccacaggaatcccatcatgactcagtcctggccttttgaatggtagatatcacaactcatcagctcagagttcaaggacaagctaacattaagtctccaagaactgaacatactcactggcaccagggaaacatcactaatttacaattaggtgagaagacaatttctttttcttccacgtttagtttacataaagcaattccttgctgaaaggccaaaaagctgagagaatgaaagggaagaggatgggcagctcctcccaaggaagtcacagtccccaggttctgctattttttttttttttttttttgagacagagttttactcttgttgcccaggctggaattacaggcatgtgccaccatgcccagctattttttttgtatttttattagagacggggtttctccacgttgatcaggctggtctctttttttttttttttttgagacggagtctcgatctgtcacccaggctggagtgcagtggcgcgatctcggctcactgtaagctccgcctcccgggttcacacattctcctgcctcagcctcccgagtagctgggactacaggcgcccgccaccacatccggctaatttttttgtatttttagtagagacggggtttcaccatgttagccaggatggtctcgctctcctgagcttgtgatccgcctgcctcggtctcccaaagtgctgggattacaggcgtgagccactgcgcccagcctttattttattttattttatttttgagacaaagtctcactctgttgcccaggctggagtacagtggtgtgatctcggctcaccacaacctccacctccctggttcaagtgattctcctgcctcagcctcccaagtagctggaattacaggtgccgggcaacaagcccagctaattttttgtgtttttagtagagatggcgttttatcatgttggccaggctggtcttgaactactgacctcatgatccacccgcctcagcctcccaaagtgctgggattacaggcgtgagccaccgcacccggccgtttttttgtttttgtttgtttttgtttttttgttttttttgtttttttttgagacaggttcttgctctgtcacccaggctggagtacagtggtacaatcacagctcacagcagtcttcatctcctgggctcaggcaatcctcccacctcagcctccctagtagctgggactgcagctgtgcaccaccatgcctggctaatttttgtatttttttgtagagacaaggtctcgctacgttacccaagctggtctcgaactgctgggctcaagcaatcctcctgccacagcctcccaaagtcctggaattacaggcgtgagccacggcacccagccttttttcccccctcatatataattatttctcacaaccaatgtttcttcttaggggaaatagccctgagactggggctgtaccttacacagctctgggtgctgatacgcaccccatgtcaagcgggaaagatacctgggcacatgctccgaggtgtagggtacaaggaccaccttcttccccagcagcaaggtgttctgattcaacctcatggtagcagcctgcatgcagatggggagagcaaagacttcaggaccctgaatttcctccaactttgggtaggcgctccagctttcctgctggggctaagttgacttccgtcattagttccgtctagacacttcaaagaatacagactccaaaattcttgcaagaaagagaaccaggctggttaaggataattaaacaatccttgactcccactccaagaggccaagcctgggctccgtttctgccggttccttccgtccactccccagaacttcgattcctcaaacccaagcaccaagtaccaagtaccaaagtatccccagagctcccattacttgccccagtccagggattccaacccagaatcaactttcagccctgccttaaacctacttccaacctcttaccccggcgaccaccccacggggctctagccactccctccccgcccccgaccacttcagggcaaggcgggcttagtcttaggccctcccctttgagtggcgttctagaccactctcttcgaccctccaaccacgcggacccgggtactgccaagctcacacccacctaccaccgacgaaatcgtcccccgcagaaagggtgatctacctcctccaaccagccacgttcccaggcccggccggctaccgccccttccgcatgcgcgtgagaacgcgccccgcccacttccgccatgctgacggcagccgccaggccccaatcccggtcccgcccccgcgaggcgcccaatcagcgcgcgcgaaaaaggtgggctgtggggccggcgcatgcgcgctgcggaagctggtgctggacagctggcgccggcagcagcggaccggcgggagacggcggcttgggagctggctgtgctgcaggtgttgggtcgggtcgggtcgggacgggcgggagaggacgagacgggtcgggataggttggggcggggcggggcggcactagactcgggactcctccaggagggagagagagggagaggctgggagtggggttcttgagaaaagagggagctttgagggtggggaaccctaagagagtaggtggggccagggagtggaggccccattaaaaaaaggaggccttagtgccaagagtggagttggaagggcaatgtaggaaagcccccagctccctgccctaggcagaggcggcagacagttccttgggctcccatgtgtggtagtgagctcctggttcctggaactaaacgaggataaccaccccagagcgtggaaagggggctcttgtggtgggtgagacttagtggttttagaggccccttaaatcacttgcaccccgagcagcattgaaaacatccgtgctgggcacagagcagtgccctgcacagcaagggaaatgttagaagaaaccgtccagatttctgtcatccagggtgacccctccctcgggggtgagtcttgtgacagatactgaggccctaagtgtctgtgataaaagaaccagaggtggcaggggaagtctgcaagcctcctcccacccctgtctcagtccatcagataggtgaagcctgctcttttgttttaaggagctgcggcagccgccgtccttgcacctaaggaacctctgctgccagcccttcctcacttttggaaatggcgggtgaaattacagagaccggggaactctactcttcctacgtgagtgtgacttatagaaccttttgctcacttaagtgttcctggcttctagaaaagcacattgcttgctggagatgggactagtgagtgctgctgcttgagcagaccatagtggaagcaggatgggggagttccatggggcagcgactacagtgctgctgtggt

SEQ ID NO: 7502 - DNA, 6000 bp, Homo sapiens
ggtggagctggaccctgtaaacgtttctcctcttctggccagctcagcctgaggctttgacgggagagggagctggaggttgcagcgaggcctggcagagaatggggcctccctgtctgaccccttccttgctgcagctgccagtggctccgtgtgcgggtgactcctccgtgagtctctgccacccatgggctgcttctcgcagacaccccccgtctgtcgtgctccccagcaagattctcaagcacctggcaggagttcctgttagaaaagctctggcccagatgcacccctcagtgagtttctcggccaactggcaggctccccacggacggctaggctctcaccctgcagtaacttcctccaccacgggcagggacagcctgcagggtccagcagagcccagggcaacttcctccaccgcgggcaggggaagcctgcagggtccagcagagcccagggcaacttcctccactgcgggcaggggcagcctgcagggtccagcagagccaggcccagccttgagttgggatgttcttccaggttcttggtttctcctcgtgtgctccctgtctgtcctagaaacacacgctgcttctggcactgctattcctgtattcctcagagttctcttgtaaccttttaatagtgaaacctccttttctagtttataattctttatattaaatgttcctgttcaaattactggtgtggtttctgtctcctgcctggaacctaatggtacagagttagcacaaggagaggtcccaggagggcatttggggactgtttgcatcgtccctagggtgtgaatgcctggctgagtttcctgccaatgggaaacggggtgctgggccccactttgcagtggatttgctgtggcctctggttgggtaaaaaaaagggctgggtgagactggtgccggggtgcccaagcggctgctgcccttcagagcagaacagcaaggacaccccaggactgtggactgggggttcctgctccacacactgggcgttcacagcaatcagatggctggcaggagcagctcctcccaggcctcgggtcagctgagaggcagagaatgttcgtggcagccctcacaggagctgctgtttgtggtccctacggggctgacattgctggaaatcaaacacaatgttcagtcccgcgtgtcacctgatcacagggtcagctgagcgcacagccttgcccgtgtcctcacttgagaggcagaatgctgacaggacagcacccctgacccagagtggaggcagcgcccggaaccccgtggagctcacagtcggctcctgccagggtgccccgaggctcccttgccagtgggagtggtggtggctgaggttgctggtgctcctgagtttgaaaaccctcaagagcccaccgttaagacccttgtgagaggttgccgtcctccccaagccagcacagccacctcctgttgcctacaattagcatcagatcttagggatccgggacagcgtgacacagaagacaacagctcatgctgggacttgggaattttttctgtaagagaacaaacagcacccaggcacggtggctcacgcttgtaatcccagcactttgggaggccgaggtgggtggattacctgaggtcaggagtttgtgatcagcctggtcaacttggtgaaactccttctctaccaaaaatacaaaaaaaaattagctgggcgcggtggcagctgcctgtagtaccagctactcaggaggctgaggcaggagaatcgcttgaacctgggaggcagaggctgcagtgagctgagatcacaccactgcattccagcctgggtgacaaagtgagactctgtctcaaaaaaaaataaaaataaaaaatcaaacagtaaatatcaggctccgtgagccacatacggcctctggccaccttgctcttgctcttctccttctccctcctccattcctcctccttttcggtgtgtgtgtgtgtgtgtgtgtgtgtgtgtgtgtgtgtgtgttttacaatccttaagaaatgtaaaatccactcttaactcaaaggctgtacaaaaaaatagattccaggccggatgtggcccgcaggctgtagtttggcaaaccctggcttacatgctacaagaattcagagatatttcagatagatatcgcggggaacctggggagaacctgcgggagtggattcgggggggttggaccgggaacaccgaatcggaacactagagggggctgaagtccctgatatgggggccttgatcgctctgccgggtctgcagctgcagccacagctaagcgctccctcgcgcgacggctgaagctcagacccagaggcccgcaggtcacgaacccaagaccccagaccctccatggcctgctgtggaggagagaatccgaaggtccacggacaggcagtccgtgagtgtgacctgcacgcccacacccagccacgccctgcaggctcagaagcaccaccttcccggacgtgaggaacacccgggcgaggggagcccctgcaccctgaaaagtcctgctactgctctccttcgtaggccaagtgtgaccgcggggagaggggtgccccggcagagatgcgctccttgatctccatggggtgacacatcccagagcagcagcaggacagggggcaaccgccgccgtcaagtcccacgcgggctgtgtgtgccagcggcggcagaaggaactggcgctcgggatgccgtggcctgcagggtcctccggcgaatcacagtgcccagggtgaaacaaagggttggcagaccagagtgctgtttgtcttacacaacagaaacaaaactctgggtctggtggccaaacctgacttgagtcaccacagtggacagccacggcctctcacctgtttccaggctgagccaattcacagacctggagcccttgagttgggggccaggttccttgagggagacccctgaagcattgctgcaaggaatacagcagcaaagccacgggaagagtcccccaaagggacctgtacctgtttaccaaagtaactgtgtaacagagggagggaaatactcaagcgtctcaggaatgacaagacactggcatcaaatggattccaattccttttctttttctttttctttttttggagacagagtatcacactgtcgcccaggctggagtacagtggtgtgatctcagctcactgcaacctccacctcccaagttcaagcgattctcctgcctcagcctcccaagtagctgcgattacaggtgcatgccaccatgccccactaacttttgtagttttgtagagacacggtccactatgtgaggccaggctgatgtcgaactcctgacctcaggtgatccacccacctcagcctcccaaagtgctggtattacaggcgtgagccaccacacctggccagatggagtctgctagagtctcggggattttatagggacaggatgggggcgtggcaggccagggtggtctttggaaatgcaacatttgggcaggaaaacaaaaatccctgtcctcacctaggtttgtgggcacaggcggtggggggatccctagccaaggatcacgccttcctctacccagctcttccttcccccttcatgaggagcagggagtagcaagtcttttttttttttttcctcaacgtccccatggacaccaaggaaaaaagtacttcagatgtcttggtgagacaaatcagagggtgggagatgaaccccacaaaaattcaggggccccctcacctcagtgaaggttctggagtccagaggtttggaacaggtgataattattctccttttgatgttatttgttatattttttgtagagacgggggtcttgctatgttgccaggctggtcttgaactcctggcctcaagccatcctcagctgagtgcttttctttgacacttagtgaatgctcaggaaccacagtcaggatactcaggcgggaaccggggtggcttctcccttttaccctttatccccattcatgtgtttcttagccccccagggaagaatgcttctgtgggggacgcagccacgattccttggaaggagaagctgagcccagccatgctggtctcctcctggcactgatctacagacagggagcagcgcagtggaagagggaagatcccagggctgaaaggctgggtggagggcgctgctggtcgcatttcagggaacattttaaagtgcaaagcgggccgggtgcggcggctcacgcctgtcatcccagcactttgggagcccgaggtgggtggatcagaaggtcaggagctcaaggccagcctggccaatatggtgaaaccccgtctctactaacaaacattagccgggtgtggcagcaggcacctgtagtcccagctactcaggaggctgaagcaggaaaatcacttgaacccgggaggcagagtttgtagtgagccgagatagcgcccctgcactccaccctgggcgacagagcaggactccatctaaaaaaaaaaaaaaaaaaaaaagtgcaaaacgttggatatcacatcattaatgcggcattttgtgttcagagccagtgggacagtgattcctgcacaagattcctgaaagcctggggagactgaattatgttaatctaaaaggatcccacctaattaggagataagaaatttttgccttcacctgcacaggaagggtgcacggaaacacgtcatttagaacatcccgggcccgaacatcgcgggccctaacatccaggtatccgtgccacttctccgtaccggtccaaggaggccgcggtgttcgcggcggtcgccgagaccggcgggctgtggtttcgaacccgcggcaacggcgcgcggccggaggcggcgctcggccttcgcgttccgcggcgcctggcccggcgcggccgccgtagcgggaggacccgagctacggtggccgcggggcggcggtggcgattggacttggtgggtcccgggccaggggcgggcgccgccatgggtaacctgttcggccgcaagaagcagagccgcgtcacggagcaggacaaggccatcctggtgagggcccgggcccggggtcagggctggggccgggacaggcgacggggccggggcgggcggcggggccggaagagccccgcgccctcggccccccgcgttcggatggggaaactgaggcgcagcgcgcagccgggcccctcggtctctccgccctgcgtccctcctcgcccgcggggcctcgggccggggtctcctgcgcggcgccgtggctgccgtcttccccggggcccgcgcgtccgcctctgcgagccccgccggggtgggcgcggctggtgactgcgggattcgacgccggcgttcggggctcggccacagcctggcggcccgtccgtggggtccgcgcggcgctgggctttccctggctctgggcccgcgggagcaggtcccggctctcccggagtcgctgcccccgcccccgtcccgcggctcatttgcctcctggtgccctgggccggagccccggcggtgctgccggcttcgcgaggcagcgcggggcatcccctctccctcaccccatccaggccaggactggaaggaagtctgccctggtccgaggagcggccgacaggtgcgccgaacgcctgccggggtcctgccggggtcctgccgggcttccgcagcgcctgggtacgggaccaccgtgtttggcgcgtttgtttgcggcgactccagactgaccccccggggcacagccgggccggtggtggtgccttttcccatgtgaaagttagcttctgtaggaggaggaatcgcctggcatgtcagggacagggcgggttaagaatagtccatttttgtaacgagataaacgtgtcacgaaagagaccccgaaatgaaagcagggctagctttttcggatgctttcttttctaaattttgtgcaacagaaataggttaattttatactaaaagagaagcgaatgtaaatgaaa

SEQ ID NO: 7503 - DNA, 6000 bp, Homo sapiens
agccaccacgcccggttaatttttttttttgtatttttagtagagacggtgtttcatggtgttagccaggatggtctcgatctcctgacctcatgatccgcccgcctcggcctcccaaagtgctgggattacaggcgtgagccactgtgcccggccacttttttctttttttttttttgagtggagtttcactcttgttgcccaggctggagtgcaatagcatgatctcagctcactgcaacctccgtctcccgggttcaagggattctcctgcctcagcctcccaagtagctgagattacaggcatgcgccaacatgcccagttgatttttgtatttctagtagagacgggctttctccatgttggtcaggctggtctcgaattcccgacctcaggtgatccacccgcctccgcctccctaagtgctgggattaaaggcgtgagccactgcgcctggcccaatcagcattttctaagtaccccccatgttccctgtgcggtgccagaccaaggctgaggatgatacagagatgaccaagactccacccatgcgccggagttgcttacaatctaatgggggaacttgcgtagggaacctctttctggcacagatcaccgtgaagaatccttgcccagagacacagctaaggggcccagcaaggtgagtctccaggctccttcctcagagaagccctccctgactctcaggcatccagaggcctctgtatatttcctttatcacagtatgtaattacagaattatgtgtctgaccatttatttagtatccatctcttctactagacagtaagcctcaggggcatgtctgcattttcaccagtaactccagagccttgcacagtacctgatgcacagcagatactcaagccagttcatctctgttaattgaattattggatgtaactttggttcctgcacccagtccgatctgggcaagggctggagacttgaaggccatcattctcttgggttaggctgacccctcctgttccttcctccctgcaggctgcctgccagacttcagtggatggaatctcaggccgctgctaactgatgttccagtctgaggtcaaccagaaactttggggttttgcatggtcaacatgggtggaaaatcaagtggctatttattacttttctatggttctctagtgggagcagtggctgctatggacagtgagattgacaccattctcccaacccgttgctgagaagctggactgcataccttggattcctgcagacagcacagcagaagaagctgctcctcactccatggccgcaggcatccttcttggagacgtcagggaaatgttggatatgttgcagatttagtgagtggaactctctccctctcctcagccctcagtctctccgtaggaataatgtgtgtgtgtgttgggggggcagattaagagacccctgaggctgggcgcggtggtttacgcctataatccagcactttgggaggctgaggcaagaggatcacttgaggtcaggagttggagaccagcatggctaacacggtgaaaccctgtctctactaaaaatataaaaattagcttggtggtggtgcacgcctgtagtcccagctactcgggtggctgaggcagaagaattgcttgaacccgggaggtggaggttgcagtgagccgagattgtgccattgcactccagcttgggtgacagagcgagacaccgtctcaaacaaaacaaagcaaaatacaaaaattagccggacgtggtggcgggcgtctgtaatcctagctactcgggaggctgagacaggagaatcctttgaacctgggaggcggaggttgcagtgagttgagatcgggtcactgtactccagcctgggcgacagagagagactccgactcaaaaaaaaacaaaaacaaaaacaaaaaaccctggaattgctcttcatttcctcaaacctccttccaccctcaggctttttagcccctcagccatttttgtcccattccctttgggcaaaggagattctagcaaggtgaagaaggtgggctcaaggggaggagggcagaggcaaaaactggaaggggaaatggaggaggacaggacgtcccagatagggacagccctttgcactgcagggattccacttctcctcgtcttcccattccctctgagatgctgactctgaccacagctcttggactttaagccaccccacagcatcccctttacttctagtgtccttccaatttgaatcccactcctcccaaatataccagattcctaaaggggctgcttgtttgtctttgtgtaatgatttttgttgttgttgttattgttggagtctcgctctaccgcccaggctggagagcagtagtggcgcgatctcggctcactgcaacctccgcttcccgggttcaagcgattgtcctgccccagcctctcgagtagctgggactataagcgcgcaccaccacgccctgctaatttttttgtatttttagtagagatggggtttcaccatgttggccaggatggtctcgatctcctgacctcgtgatccgcccgcctcggcctcccaaagtgctgggattacaggcgcgagccaccgcgcccggccaggattttaaaaaaaatactgtattaggatttttataaggctgtagtaaatgctattgaaaaatgcttacctcttatttcagccttctcctctgtctgttcctcaaactggcttttggtttgagagaaggggaggagcgaccctggggttggaaaagcccaggagacaagatggagatccagtctgttcatctgtacatccctggacctggggcggtcctggggacagtccttttctcaagccagtcagtggacatttgggggagagtctaggcacggatatagaggacccaatattcctttttttttgagacagagtctcgctctgttgcccaggctggagtgcagtggcgcgatctcggctcactgcaagctccgcctccagggttcacgccattctcctgcctcagcctcccgagtagctgggactacaggcgcccgccaccacacccggctaatttttgtatttttagtagagacggggtttcactgtgttagccaggaggtctcgatgtcctgaccttgtgatccacccgcctcggcctcccaaagtgctgggattacaggcgtgagccaccgctctcggcccaagattccttaatctagttggttttccgaaagcgtggctatgaaggaagaactcaggagttctagccattcccattgtattttgtgtttttttcagtaggtatcccgacgcaaccctcagattaaaactttaagggaaaatgaagaccacacccctattccatagaaattaactctaatgacaacgtagtggcgtggcgggggtatagctcagtggtagagcatttgactgcagatcaagaggtccccggttcaaatccgggtgccccctctgtgctccggagttacctcgttttgttggtctccggaggtcctctaaagagttcccgcacagatggaatgggagggagtctcgagccctgccaccctttttgctttcgcaggcgagtgaggatggagtcctggcccctgccagtggctcagcctgtgtgtgtacccagggtagaatgcaatgcgagtgagggcgaggagctccgggctgacccttggaacacggtacgggtggctcaacctcgcaatggcagggcggaggcgagcgcacccccaggtcagcctggctctttcttggcgggaaggaggctgagtttctaagggctgggctggggaagacaggtcgggagaagccgcgtgagcatgtgggagggagaaagaagctccgagacgtggcaaggggtcttctgcagggcaggagagtgggacgcccccgaagtgaaatatttcgagagacttctccttccacaccccaggaatatattttcttatactgccagtggggatcttcagctcagagcttcagggaacaacccctgcttccaagtgagtaattcttctgggagttgtattttttccatctcttgtaaacgtcttaccccacttccacttcccttcgggaacgccacacagcgcctgcgcagcaataccactaaacgactacgtgcggtcggtttgccggcagagggggtatagctcagtggtagagcatttgactgcagatcaagaggtccccggttcaaatccgggtgccccctctttggccttttcgagatactgtttttgtcctgggtgtcgatttttcctaagctgtttgcttttactcctactggcagacgaggagcagtgagggactgaaaggaactggggattcaacagcagtggctctcaaaatgtggtcctgggaccagcagcattacctgggtacgctcgggcctcatcccagacctaatgaattagaaacttgagggtggagtccagaaatctgtgttttcatatacgctccccatcgcttgagtccaggagttggaagctgcagtgagctatgatcgcagcactgcactccagcctaggcaacgtgcgagaacctgtctcaaaaaacaaacaaaatacacacacacacacacacacacacacacacacacacacacacacaccctgcaggtgattacgatctcaagttctagaggcttacgttaaaatttacacatttgcttctactatttacaagtttatgtttcagcctgagctcttcttgtaagacagaccacgaggtaccccagatggaggaatgtgcaaagacgccggggctggagctggaatccgtcccgagacttctcaccttgacctcgaggaaggcaggaggtcggagacagggggtgggcaggctggggaaagaggaaacccgcaggacaagagggttgtggctcgtcacgtggccacttgagggcagcaagtagctgcagctggaggtagctgcctatctgattctgtttgagagtccgccaagttgggatttaaattagacatcaagaagaatttacagaccggccttgccttgttccacggtaaggggacattgggtttagggctggaggaggtagtctctgggactctgggcccggcggaaggaggaaccggcgttctaagagattagagagcctttagttgtttcctttcttaggtgtttttttttcttttcttttcttttttttttttttaacctcagtgccacggaatccgtctcttccagcccacagtgtaccttctcctgtccccgcccatatccctcctcctggaaaatttctccaatggcgctcagcgttcgcacccttcctctccgcggttttctagtccctaggccccagcccactagaagccaggatgccccctcaccccgtctcccactctccagcgccccagctccttgccgtcacaagaacgaagtaggtcaggggagggaagaggcatcttcgtgtcctgacctgattccttgccgtctattaaatatcctacattgcgggtatttttattctgtcctggaagaaaaaataaaaagattatctatccccagagcctgtcagaaggtggtgacaggtggggtgagccatttcctcgtctggggctggctctgaagattgattgggtctggccctgagtaggcctggaggccccagagaggcaggaggcctgggttacctactcgtggggaggggtccagactgttgcagagtaaggggtagccaggccccctccaccctcacgtctgctaggcttggggggcaaatcggtgctggaaatggggggtggagggataaggtggagtcatggaaggggggtgggattcaggcccctcttggggagaaaagctgggggtctttgctgcagggggagatttctgggggtgggggctggaggacaaagcatcagagacgcacagaattccgaagaacagctcaggaagtcgcagagcttggaggagctgggggcggggaacagtcaggggcccgtgacccagggatgg

SEQ ID NO: 7504 - DNA, 6000 bp, Homo sapiens; identical to SEQ ID NO: 3295

SEQ ID NO: 7505 - DNA, 6000 bp, Homo sapiens
agagctggggctggaggtccgggaggacagagcccaatgcagattcttggctgcagccctccaggctgcaaggctgaaatcctttctggtccaggcagggcagcgggaggtttctgggcacctgagcagccagatgacagccctttattatccagcacctgctctgtggtggctggaccccctcagaggggctctgtctccgcccccacatgccctttgagctgctctgagaagccacaggagcaacagctgtggagagagactctgcggggaagcagccaacaccccagtctccctaccctggcctgcgtccttgtgcctggagaactgccgggcacgtccctctcagaacagcaggtggcagcattgcatctgttttcaccaccaaagggctgtgaccccctgagacctgagaccctctgcagatacctcagtaactagtggtttccaggaggagaatgtaagggagacgcagaaggggatgtaacttttctccataactgataaaaaaaaaaatttaggagcaaggatccctttgcttgtaaaataactcttcagctgaactttttgttagcagcgtatatctttataggaaacctatctttttccttatgttttttctatattttcataggaaacctcccaacaaataatgaatgtgcttcccagggacaaagagaaagtgtcagaatgaagatgctggagaaaatccttctgtcattttccagcacctatgctatttcttgcagggaaaagaggtgttctggggtcagactgtcctgggttcaaattctgtctcacttgcacacttgcagtgtgaccattgtgtgatttcttttctttctttttttttttttttgaaacggagtcttgttctgtcatccaggctggaatgcagtggtgcaatctcagctcactgcaacctccatctcagcctcccaaagtgctgggattacaggcatgagccactgtgcctttttttttttgaaatggagtctcccctctgttacccagtctggagtgcagtggcgcgatctcagctcactgcaacctccatctcagcctcccaaagtgctgggattacaggcatgagccactgtgcctttttttttttttgaaatggagtctcccctctgttacccagtctggagtgcagtggcgcgatctcggctcactacaacctccgcctcctaggttcaagtgattctcctgcctcagcctcctgagtagctgggactacagtcttgtgccaccactcccggttaattttttttttttttgagatggagttttgctcttgttgcccaggctggagtacaatggcacaatcttggctcactgcaacctccgcctcctgggttcaagcgattctcctgcctcagcctcccaagtagctgggattacaggcgcctgccaccatgcccagcttatttttgtatttttagtagagacggggtttcaccttgttggccaggctggtctcaaactcctgacctcaggtgatccacctgcctcggcctcccaaagtgctgggattacaggcgtgagccatgccgcccggccgtgtgatttcttttctatcgatctcaggtcccttgactgcaaactcaaatcaacggcagtgcgcattttcatgatgtctggatgggataagctatacagccctcacgtgatgcacaggacggagctgggctcagtcaatgatggttccctttctctgcttttggaaaggtgtgctgtcaacaccaatttaaagagctggcaaaaacagtcattctcagggcctttctctcatcggcctctcaaaagcacaggcctccacagagatgaacagtttctttcttttttttcttctttcttttttggagacgggtcttgctctgtcacccaggctgcagtgcagtggctggattttggctcatcacagccccaacctcctgggctcaagcgattcttctgcctcagcctccgggtagctgggactacaggcgccaaccaccacgcctggctaatttttgtatttttagtacagacagggtctcactgtgtcgcccaggctggtctggaactcctggcctcaagggatctgcctgcctcagcctcccaaagtgctgagattacaggcgtgagccaccgcacccggcctgacatgaacaaacttttatctttcttcccgcttttctcttatttttcagaagcttcactgtatgaagatagaataataacaagagagaaggacatgaggagagtgagagatgagcccgagaaggtggtgaagcagtgggaccatagtgaggatgagaaagagacagatgaggacgatgaggcttttggggaagctctgcagagcccagcaagcggaaagcagagtgtggaagcaggaaaagccagaagcgatttgggagcagttgccaagggcctgtcaggagaattaggcacaagatcaggagaaacaggcaggaagctactagaagctggcagaagagagtcaagagaaatttataggaggccttcgggagaattagagcaaagactctcaggagaattcagcagacaggaaccagaagaactaaagaaactttcagaagtgggcagaagagagccagaagaactgggaaaaacacaatttggagaaataggagaaacgaaaaaaacaggaaatgagatggaaaaggaatatgaatgaagccatcggtagagatgaggatcaggaagctggtgttcagagggatcatgggattttattaaactggattttcaagcgatttgtctgttataggaaaaatgagggttttacttctgctgctttccatcactattttgccattaaataggtgtctttcactcttgcaaaccctgagtctgtcactttgcctcttcacccctgcccattcttggaagagcatcgtggaagaaatgagaaaggtgccaagaagaaagggtttcaggagggtgaagatacgggcgctacagggaacaagaagtcacagggaggagaggggaaggcctgggaggagaggtgcttcccacacaccggtgactgactgagtccctccagtgcgcaggacagcggggaggctttatggatggaacagtggtggggcggccccagctgtcacaggtaggagaatgccgcaagccagaaccaagcgaatgctgggagtgaggccaaagataggggagtggcctgggagtcgggagggcagacagactccgcctctgacacctctgggtggcataatcaggtaaatcaggctctccaagctggcttctcctctgaacaatgggatacctgcctcaggggttgctgcgaggactgagtgcttagcacagcacttggacaggaaactcaaaaatccaacggagctctcagtggtttcacagaggaggtggcagctgaggatctggcctcagaggatgttaggatttcactccgttactcatctgtccctttggccattgccatcctggtctgtctccacagctcctagaaggaaaggtcggggctgagactgactttcggctggcacagggcctggacgaatgaggccagtgaggcatttcagatgcagagtttaccggaatgccagcaaattgcatgataatattttaatccaatgtggtaaaaaaaaaagtttttaattaatgcaaaagtccatgatgaataaaatatcaaaaattaaagacaggatccgactttgcacgaccctgcctcactcacttcctgctaatccacgggaccggggagggtgactgagttacccctcaacacgcagaaaaagctagtggccgctcagctcgcaggcgcagtgggtgggtgcgcgtggggagcaggcgcgcgcagggggcgggaccgggccgaggttcccgcgcgcggcgagagtttcgggttttggttcgcagcgcctgcgcgcagaggagacggcccgcccccagcccgcccgggtgcccgctccgccccccgggctatgtaaagcggccgggctcgggtcgtgccaccgctggactcccgtgtccctccgcgcaggcgggcggccccggagcgctggtgccggcagaggcggcgacggtggcgcccctcctcatcatggtgagaggccgggcggggccgggcacggggtagcaccagggcgggaaacgagtgtcggggcccctcgggaggaagcgtcttgcaaacgaggacccggggctccgggttcgacttccagttttcttggtactcagggcggccctgaggtctgggagaagcggaggggttttggggtgccggagaggccgctgtaaagggaaacggtggtgtttctcaggagggaactcgggaccgcagaagctgctgcgcctctgggagcctgggtgggcctgggccgggagcccgggagctgctcccgaccccacgcaggcccgcgctggggcagccgcttcggcgccccctccccgggcccagtctcatcacgcggaaccgctgccccgcgcccgggtgcgggcgggaggtggagccagttcagaggaggggaccctttacggtaaaagctgccgtcccttgtggcttctagaagataggaaaacaagtggctccgagaggcgcttctgacacacagcacagcggcgggtagagctggatcctaattgcaggtgccctgtgctgccctgttctggacaggcacaaagaccacgactttgtgggggccgggagagggtagaggaggaggtggcaggcttggtgaaagagggcctttgtccagtgctctcctgccctgccccccaccagcccttctgtgggaccattgtacccgcatgccagacaagagagtattatctgttgcggccattgttgggggaagggaggcagtcttggggtaacccttctccactcccccccttctctgtgcactcagccgtggcagctgtggcttggcccagacacagagacccccacctccaaagaggacgtccttagtaggtgccaagcatataagagtgaggccagtcccagaaccgcaggctcctggcgcgccccgcatgcctccagcacgtttacctttccgaagtggcaggaatggggaaagcgcacgcttaggagagcttcagacaagcttccctcttcctcctccacgaccagaagcggaaaggtgctcccggaccgaaagggaaagaaggtccagcactgccccgcttgggaaggcacccacaaccagtctagggactaggggtaaggccggcggggagcccgcgaatgacctgggctgacatctcttcccctccttacacagaacagaggcttctcccgaaaaagccacacattcctgcccaagatcttcttccgcaagatgtcatcctcaggggccaaggacaagcctgagctgcagtttcccttccttcaggatgaggacacagtggccacgctgctagagtgcaagacgctcttcatcttgcgcggcctgccaggaagcggcaagtccacgctggcacgggtcatcgtggacaagtaccgtgatggcaccaagatggtgtcggctgacgcttacaagatcacccccggcgctcgaggagccttctccgaggagtacaagcggctcgatgaggacctggctgcctactgccgccgccgggacatcagaattcttgtgcttgatgacaccaaccacgaacgggaacggctggagcagctctttgaaatggccgaccagtaccagtaccaggtggtgctggtggagcccaagacggcgtggcggctggactgtgcccagctcaaggagaagaaccagtggcagctgtcggctgatgacctgaagaagctgaagcctgggctggagaaggacttcctgccgctctacttcggctggttcctgaccaagaagagctctgagaccctccgcaaagccggccaggtcttcctggaagagctggggaaccacaaggccttcaagaaggagctgcgacaatgtaggtggcaggttggggccttataagcccaccttgctgggcacagggtgctgcggg

SEQ ID NO: 7506 - DNA, 6000 bp, Homo sapiens; identical to SEQ ID NO: 1962

SEQ ID NO: 7507 - DNA, 6000 bp, Homo sapiens
cccaggaggggccacccatccttgctcggtgccacctttcatcttcctcactctctccttcccgtctctctctgcatctagctggctgctggagaggaaagggctgagcagcctgcaggaaaggtgacagcgcctgaaattttatgtttccaatctccaggaaggagattagtcagccagcagccagaggccctgccttcccaatgattgcacactgagcttgctctgacaacttaagaatgaaaaattgagaccctgccctcccaggcgccacctgccaggctccgagggtgtggggaagtggaaggatgaaaggccagagcccgtgatttctgacggaaggcttgattgctccagaggctcagacacttgcccttcaccaggctgctgccacctcctgccaccctggggagagggggactctgctctcagtcctttgggctaaataatttagccacaggatagaacctcgtcctataaagctgcttgtttcagcactctcctcttctcccggggtgaggagtgaacgaagctagaatcctccagaaagcacagaagctggcccacatgggaagatcagttggctttagattccctcctttcagcagaaacccaagtgcatggtgggtgagttgctaggcaaagctggcatatgctggatgccctacaggtctggaatgaaaaccagacccagggccaagatgcttttggtgcctggcacatccctgtgggggcctcctgtagtccccaaagggagctcctcccaggcagagccctcacccacaccacagcccaagtgtaggcaggtgccaccccaggaaggatgggccagctcaggctccaaagaccctgtctcctttagcccctcccagagagggcacacacctggaggccccagaggtggggtagtggggattgcctggccttgaggggccttaaaagatgctggcggtggtgggggtaggcgggggcgtaagaggaggaactgagggtcactctggttggcagagcaggggtgagcagcctgttggggtcctacttgccctcctccccatccctgacccccagagccccaaaggtttgctgaggccagtgataaggtgttcctgggaactgttctgacagcagcttgacctggccaggaaggcaggatcactagtatcatccagtccccctcgttggagcacaaggggagctagatgagaactcagcactgacacagttttttctgcttgcctgggaactgggctttcagcaggggcaatgggtttctgcaatgatagaaggcatgtgcagcttcctgagcgattgctgtgagccaggttttaccagcacggcactgccctgtctcactccaacccttcagcgtccctacagtcatctccttttttttttttttttagacagagtctcgctctgtcgcccacactggagtgcagcagcacaatctcggctcactccaacctccacctcctaggctcaagtgattctcctgcctcagctttccaagtagctgggattacaagcatgggccaccacgcccagctaatttttgtatttttagtagagatgggttttctccatgttggccaggctggtctcgaactcctgacctcaagtgatccacccacctcggcctcccaaagtggtgggattacaggcatgaaccaccgtgcccggccgcatctgcatttttaaaggtgataaaacagtttgccccaagattacacagttaagtggcagattcaggagctgtgcccagtgtaacttggccgtttccaagccaggactgtgtcctagtgtcgctcacacctctaggctgcaggatccttgggctcttcttccacctccagcctgcaaatgtgggtctccttctgccgaggtcagtcccattatttaaggaacaaatgcccaatcacctccccctgttttagggccaagaggctggtctccagtggttctctgctcaggctggtattacgcacccaccccttccgaggcccagctaaagccaagagagccctgcagcccggcaccttccaagggctaagtggtggtgaaggagggagctggcgccaagtcctcccctagtcctgttccccgcctggagtgccggtgcctgagctggtgatgggcacactgccggccatttgttatcattagccctggcatgttgattctctgcttggaaaagagagtgccgctcccagacagccaccgtgacggatggcctccacctcacagtgtcagagccagagccacacatggggagcagggaatggcacggggcttggggcgccctgacctcagggacatctggagccaggttcagaggtcagagagttgtgggagcagctctccaggaagcagccctgccaaggcacagctcagcactggcgtgtggaaaaggcctgggggcccatgcctggaggaagacccttcacccttggccctcagggtcatggctctgagtgtgtgtgcacaactcggacacccaaagggattagggaggaggagtgtgccgcgtgcggtctggccctagtggatgcatgtcctcatactcctcatcccttccaggccctgtagaaggggatgagcgggctgggggagggggcttctgggcagggaccgttgggcagggccctctatggctcccaagagcctctgttccagctcacatccttatggagatgtccctctgatggtggcccaggaccacaggccagttccatagcaccccagacccagccagtgcctccctcaccagatcaggctgccctgggggtcacagcccgggggtactcagagcccatttgtccttgggcttttcgagaaggattggtgcagcgtctcagctccaccctaggtcttcagcgtccccatgcaaatcagggcagatgacagggttagagtgaggagtcctggaccaaggttggtggcaggagggggaaatctttcaaatccttagcatctcaggtgcttcccaggtacgcacacatccacacagcccatagacccccagcacaggaaaccccactgagacacccatagaaatacaatgccagccacctggggaagtttttaatttttagtagtgacatcttgaaattcagttcattttgataaaatacttaacatatcaaaaatatctttcaacatgtaatgaaaaaaatgacaagtgggatactttacgttccttttccacgctaagtcttttttttcttttttgagacagagtctcgctctgtcacccaggctggagtgcagtggcgcgatctcagctcactgcaacttctgcctcctgggttcaagcaattctcctgcctcagcctccctagtagctgggactacaggcgcccgccaccatgtccggctaatttttgtatttttagtaaggacggggttttgccattttggccaggctggtctcaaactcctgggctcaagtaatccgcccacctcagtgctgggccacacaccaagtctttgaaatccagtgtgttttacacctgagcacacttcagtttgagccagccatgttccagtgctcaggagcctcggcctcgtgtggccctggtggtcagcacggctctagatgcttctcggtgcttctctgtcagagcccaatgggtttgttgccaccttcagggagagcgtgggcggcattcaggctgcccagaagtagcccttgcttaattccagagccagtcatggggatgaggaaaacaggaaagccaccaagacggactcagtgcctcagcatcgcatgctcatggggaaagcttcatgtgtgcccccagagcggaggtaggggctcctgggatggctctttctgctccacccctccccgcccaggcctggagagctctggcccctgtgccccaactccagtggtgcctgggaaggtcacccaactctctccagccccacacagaccccagcattctgtaaggaaggcggagtcctgcccaggcctcacatggctcagagaccaaggcagcactgcctgggaggacctggaaggagctcgtccctctccgtacctgcagctcagccagcccttatgttgatgcccaagggtgtgtgttcagcgctggaaggaaggggctcgctactgaccactctgatctttctgtccctgcccacagagaccgaagagaggtgagctgggggtgctggtaggactccccgaacatgagcatcagggccctgggccccaactccagacacctactcatccccatctggccccaagaacaagtcaccttcagctgctacaagggcttggcccagtcacggcttcatccctccaataaggcccccttctttccccaggcccccagggtgaggttccaggagggcagggatattctggaagggagggagagatgttgactttcatccccttataaaccagcgccacctttgccgtttggcaggtgttcagagtgggtgggctcacctgtcctcctccctgccaaggagagaggccgtgaggacagatgtggaggcagtgcctgcagggacttcttatctggctgttgccaggctgaggctgtctggggaaaggctgcttctcttcgcttctcttctgactgctttaggagcctgaggactcggatgttataagaacatatcttgatgtgaaattgctccctgaccgccacgcttgaggttgcggtaaagccgatattaacaagaaccttggcttgtccagatgcccgtacactggatgtgcctcctggcagctcagtccttgtgtaaattttacttctagcctcctcagaaagggaaggcaggcaccttctctgactggcctctggcagctcaggactcgtgcctgttttatctcagctccaagacaatgacttcctgtgccttcgctctgtcttcctcactccctccccaggtgtcagtgtgcgagggaggggagtggctgtggcccaggtgaatcagtgtggcgaggcctgcgtgtggagctgagatccactatcaggatgagcctgtgagcagccagcagccttggcaggcgacctcgcggggcctcagtgaggctctgcctatgggtgtcctcgggggcccccctcctcgtctctaccccgcattgagctgctcctaaagcatgaggagtcacagcagccacagacctatagggtcggaacggctccgaaaggtcctccacgtcccgtctgacacctgcttcccctctgggacccccaccacgtgcctccttccctcaggcttggccgcctcccgcgacggggatctcatcatgtaccccacagctagtgtgcctgataaccagcccgttctttggttataatttgtcccctgtaccttccacctggactctggtaccctggactctgggctccagaaggacaggacccctgtctcagtgtgctgtccccagatggccagcatagtgcccagcacccaggggaaactcagtccattgttgttgaatgaaggaatgaacagtccagttgggcccatgggtgacacaagacaaatgcggtggcttttgcgttggcttttactcagatattaagagagaagtcttctgcctccccttgtcattttgtagctgagccttccgaggcccagcagccgctcgtgtgacctgtgtcagcctcctcctctgtcctcccctctgcctcctcccagcttctcactgctgctctccaccactcagagcgggactcccagtgtgcaattgtgggtggatgtggatgcggatgttctgggcactgcctgtgataggctcttggggaactgcaggccctgctgggggccgacccccctgcacatctgactgtgaagtcctgggtgtctggtccttagcatgtctggggagcactttctgctctgtcccgcctccacacccgtctggcttcccacgcagcctccacgaggtgggcgcaggctgtcttggcggctgtggctgagccccgggcgtcggtgtggctcttggagccctgctccccatcgcgcatcctg

SEQ ID NO: 7508 - DNA, 6000 bp, Homo sapiens
aatcaagagacttacatttgtcagttctggaaagcgtttttgctttatttctttcagatttctcctttctacaattcctcatggttagatgtccatttctggaagtgatccttcaattttttcttctctcttctgctgtgcgtctcttttgcattttttgttgtttatttgttagtgtgcttgttgttcttctttctggaggattttctcaatcttattttcataatgtcactgatttttttctctactatcgtattgttaatttctaagagctcttttttattttcagatttatttttctttaacaaaaaagcatcctgttctttttttgtggatgtaatatcttctctctctgaggatattagaacaattttgagatttttttcccctctgctctctgcattgtttctgttactgtttttttccttgtatctcaggctctgaaatggtttggaaccatgactaaacctgtatttctttaaaactttgggccgggcacggtggctcacgcctgtaatcccagcactttgggaggctcgaggtgggaggatcccttgaggccaggagttggagaccagcctgggcaacataacgagaacttgcctctataaaaaacataataaacttttgatattctgttcatcaaaatattatttttttgtattcattttgattttttaaaatattgcattgaagtattctctatcttgattcctgagttttggtgccatcttagatgttgtaccccaggtaggtgcctccttacctcaccctagtttgggctcctagtttgaggtggaacttcaggggacatggcatcactcccttcccaatctgccctgtcttcttgatcctgcagagcaaggagcaggactgccatggtgagatggtggagtggaaggacagagtaggagaggcccctgattaaggagacacctggcagttcatccctgaccccacagctttattgggccattggttgaataactgataacctgctcaggaccagacacacaggtcagaaggattatgtcccagtctgcacaaagaggacctttcagaaaagagccatggagacttagatttctggaagcaattgttcgtgggtgttcagaaaggacagtggggttcattaagagccagtatggattcaataacgccagagcttaaaaaacaccacaaattctcaggctccaccctggatggactggttcagaaacactggggcaatggattttgggaatttgttgttgttgttgttgtttcaagttccccatgtgttcctggcgaagttgcagagatttaaaaatgtgattctgatggtcatgtaggtgtgggaacttttttttttttttttttttagacggagtgttgctcagttgcccaggctggaatgagtggtgtaatctctcggtttactgaagcctctggctccgaggttcaagtgtttctcctgcctcagcctcccaagtagctgggattacaggcatgcgccaccacgcccagctaatttttgtatttttagtagagatggggtttcaccatgttggccaggctggtctcagaatcctgacctcaggtgatctacccgcctcagcctcccaaagtgctgggattacaggcgggagccaccatgcctggccaggaacttccgatctataagatttcaaaccaattttataattggtgacccgctcgattgtcagaacatgaggcttccaccatctcaggggctttgtgatcccctctgcagctacacatcgagggtccacacaggagcaaggccacctggaaggaggtccctctgacagccatagggcttgtccccggctctgcctaaagacaggaggaccaggctttaagggataacttatctggagagtgcagatgtcaggtcaggaacccgaaggcctcatgggcaggctggaatgacatctgcctcggaacagatgaaactactgggataaatataaatcctggcatttaagtttagaatgagttgggagagatgtggtttagcagcagctcacgaggaaaagatttggggatccccacttcttgtgggctaggatgagtcaggcgcataaagtggctgccaaggctggaggtgggaaagccagctgcatgatggaaacctggggactggggctggggctctgggggtcctgcgggctatttcttgggcctgactaccattgaggggcttgtgctcccctttcaagtggtttcccagacacaagcagagtccaggggagggcagctggggtggtgaagaggcttgcactcttgtccctggaggaatggtagaaggcgtttggggtatttagcctggtacagagaaggttctagatgtggttgttttctttctttcttttcttttctttgttttttctttttctttttttttttttagagacaaagtcttgctctgtggcctaggctggagtgtgatggcatgatcttagctcactgcaacctctgcctcccgggttctagcaattctcgtgcttcagcctcctgaatagctgggactacaggcacatgctaccaagcccggctaattttttgtatttcagtagagacgggctttcactgtgttgcccaggctggtcttgaactcctgagctcaggcaatccacccgcttcggcctcccaaagtgctaggattacagacgtgagccaccacaccccgccaatgtggtggttttccagcagctgcagggctgtgactggggcacagggaatagactttatttttttttcttttcttttctttttttttttgagacggagtcttgctctgtcgcccaggctgtagtgcagtggcacgatctcggttcaccgcaagctccgcctcccaggttcacaccattctcctgcctcagcctcccaagtagctgggactacaggcgcctgccaccacgcccggctattttgtatttttagtagagatggggtttcaccgtgttagccaggatggtcttgatctcctgacctcgtgatccacccaccttgacctcccaaagtgctgggattacaggcgtgagccactgcacctggcctatttttctccgtattacttatcacctcctgcatcaaattatgtgtatcagccagtcacagtggctcacgcctgtaatcccagcacttcgggatgctgaggtgggaggattgcttgaggccaggagtttaagaccagcctgggcaacacagtgacacccccatctccacaaaaaatccatttttaaaaagttagctaggtatggtggtgcacgcctgtagtcttagctacttgggatgctgaggctgtaggatcgcgtgagcccaggtgttggaggctgcagtgagccatggtcgcgccacagcactccagcctgggtgacagagcaagacccagcctcaaaaaaatagaaaagaatgatccatgtattggtgtctgttgcctatcttccccctggaatgtaagcacaggagagccgggactgtgcctggtccatgacaagcactcctttgaatgaacaaaggaagtagggttttcgacatcctagtctccaaaaacagggttgtagaagggaagagttctgcctggtgtgattgtccctggtgtgagtcactggacacaggagcctctaaggaccccaactctgctaacttggattcccacacacatgagagaatgtcagtgcttacacacaccagggtgtctgcacacgcccgagactcaggtggctccatacccaaactctaccctgccctcgtcctgttaggccttgttctgggtggtgttcacctgagaatgctggtgatacccccagcagccagaccgcaaacgccctttcccactatctgcccacccccaacctggagaatgggtggccctggctgggagtccggcacaggtgtccagagtcacctgtttctcccatgcctctgacagctcagcatcactgtggcctaaggaagtctcatctagatgatgggttggcggcagagggtgggcaagataagaggagagtggcgggaaggggctgtttcagcaagtttgatttggtctgtctcacagagttttcttgggtttcaacaggaacacttcctctgttcatctggtatcacagctgggtttggccaacagcaaccaggctctgggaccctctgctctggggccatatcaagggactgagggctggcgggtgggctgccatgccttttgcctccccctacacaaaccccagtgccccatcaccttcctccatcgttcctcagtaaccctcctggctgcggacctcccctctggctcagcccccttgactcagctcctccatccagaccctctgcccagctgcctccattcagccctctctgcccagtgcctctgccaggcaccccccgccaggccatctcaccacaatgctccttccaattcagaacctcttgctttggaggcctcgaggcgtctagcctgccctcccagtcccagggtgagctggcagctccgaggaccctggtcagaaccatctcctccctaaaatgcattcccacacccaatctaccaccacatcacagtggaaacaggactcttgtccagactcaagatttccggagattttccaccaagaccaattctgaggccctggggacactgggcgtttcggggacgggagcaggagaactggggaagccatagtgctgagtcaagagatcctgggatgtgctgagtcagagatcctgggatgtgctgagtcagagaccctgggatgtgccacaatttattctcaaagaggctggaaaggggaggtcttggcaaaggttctcttcctttgaggatttcaaaattctactccaatgtttacttggttccatggttcaggtttagagccagagtttgggggaaatcaagcataagaacatttagatttgaggaggtgcccctccctttcaccccccttacctcccaatctcccccatggcccagcatccctgaattcctctctcttctctggctcaagcaaaacctcctggcttgtacatcaccatagcaggccccaggaatgcgagggaccctgtgtcagggcagggaccccatcatccaagacagttggcagggagagtgcaagacctgcctggtttctacaaccttccaaaggaggcagctcccgaaagaaggttttcagaacgcagggccttgggagacaggaagccagtcagactcctcgcacaaaccacagggggcaagcagtgctcctccaagaacctggccccaccagggtgctcaagggaacgaggtaaggaggccaatcccggaagattctgggagcagagttggggggtgggtggagggaggggaaagttaggagccaagttttgaagagagagaagataaaggttgtctgggcatggtggctcaggcctgtaatcccagcactttgggaggccaaggagggcatatcacttgaggtcaggagttcaagaccagcctggctaacatggtgaaaccccgtctctactaaaaatacataaattagctgggcatggtggtgcacgcctataatcttagttactcgggaagctgaggcaggagaatcgcttgaacctggaggtggaggttgcagtgagccaagatcatgccactgcactccagcctgggcgacagagcgagattctgtcgcctaaaaaaaaaagaaaagaaaaagagagaagagattctgtgagaagaaagcatgtccagggaggcaggaggtggagtgcagatgtcgtctccagtgctgtggaggagcccggcagtcctggccctcgatcttggtcctgacacagaccagctgcatagccttgggctggatacttaacccctcagttaacaaacctgacatttagagcccctccaagcccttgctagcttcacatttcccaaatgggtggtaaataccaatctcacagagttgatttaagagcagaatatgaggcccatgatggttcttggtcctggtggtctcccctccgctt

SEQ ID NO: 7509 - DNA, 6000 bp, Homo sapiens
cactgtgcctttttttttttgaaatggagtctcccctctgttacccagtctggagtgcagtggcgcgatctcagctcactgcaacctccatctcagcctcccaaagtgctgggattacaggcatgagccactgtgcctttttttttttttgaaatggagtctcccctctgttacccagtctggagtgcagtggcgcgatctcggctcactacaacctccgcctcctaggttcaagtgattctcctgcctcagcctcctgagtagctgggactacagtcttgtgccaccactcccggttaattttttttttttttgagatggagttttgctcttgttgcccaggctggagtacaatggcacaatcttggctcactgcaacctccgcctcctgggttcaagcgattctcctgcctcagcctcccaagtagctgggattacaggcgcctgccaccatgcccagcttatttttgtatttttagtagagacggggtttcaccttgttggccaggctggtctcaaactcctgacctcaggtgatccacctgcctcggcctcccaaagtgctgggattacaggcgtgagccatgccgcccggccgtgtgatttcttttctatcgatctcaggtcccttgactgcaaactcaaatcaacggcagtgcgcattttcatgatgtctggatgggataagctatacagccctcacgtgatgcacaggacggagctgggctcagtcaatgatggttccctttctctgcttttggaaaggtgtgctgtcaacaccaatttaaagagctggcaaaaacagtcattctcagggcctttctctcatcggcctctcaaaagcacaggcctccacagagatgaacagtttctttcttttttttcttctttcttttttggagacgggtcttgctctgtcacccaggctgcagtgcagtggctggattttggctcatcacagccccaacctcctgggctcaagcgattcttctgcctcagcctccgggtagctgggactacaggcgccaaccaccacgcctggctaatttttgtatttttagtacagacagggtctcactgtgtcgcccaggctggtctggaactcctggcctcaagggatctgcctgcctcagcctcccaaagtgctgagattacaggcgtgagccaccgcacccggcctgacatgaacaaacttttatctttcttcccgcttttctcttatttttcagaagcttcactgtatgaagatagaataataacaagagagaaggacatgaggagagtgagagatgagcccgagaaggtggtgaagcagtgggaccatagtgaggatgagaaagagacagatgaggacgatgaggcttttggggaagctctgcagagcccagcaagcggaaagcagagtgtggaagcaggaaaagccagaagcgatttgggagcagttgccaagggcctgtcaggagaattaggcacaagatcaggagaaacaggcaggaagctactagaagctggcagaagagagtcaagagaaatttataggaggccttcgggagaattagagcaaagactctcaggagaattcagcagacaggaaccagaagaactaaagaaactttcagaagtgggcagaagagagccagaagaactgggaaaaacacaatttggagaaataggagaaacgaaaaaaacaggaaatgagatggaaaaggaatatgaatgaagccatcggtagagatgaggatcaggaagctggtgttcagagggatcatgggattttattaaactggattttcaagcgatttgtctgttataggaaaaatgagggttttacttctgctgctttccatcactattttgccattaaataggtgtctttcactcttgcaaaccctgagtctgtcactttgcctcttcacccctgcccattcttggaagagcatcgtggaagaaatgagaaaggtgccaagaagaaagggtttcaggagggtgaagatacgggcgctacagggaacaagaagtcacagggaggagaggggaaggcctgggaggagaggtgcttcccacacaccggtgactgactgagtccctccagtgcgcaggacagcggggaggctttatggatggaacagtggtggggcggccccagctgtcacaggtaggagaatgccgcaagccagaaccaagcgaatgctgggagtgaggccaaagataggggagtggcctgggagtcgggagggcagacagactccgcctctgacacctctgggtggcataatcaggtaaatcaggctctccaagctggcttctcctctgaacaatgggatacctgcctcaggggttgctgcgaggactgagtgcttagcacagcacttggacaggaaactcaaaaatccaacggagctctcagtggtttcacagaggaggtggcagctgaggatctggcctcagaggatgttaggatttcactccgttactcatctgtccctttggccattgccatcctggtctgtctccacagctcctagaaggaaaggtcggggctgagactgactttcggctggcacagggcctggacgaatgaggccagtgaggcatttcagatgcagagtttaccggaatgccagcaaattgcatgataatattttaatccaatgtggtaaaaaaaaaagtttttaattaatgcaaaagtccatgatgaataaaatatcaaaaattaaagacaggatccgactttgcacgaccctgcctcactcacttcctgctaatccacgggaccggggagggtgactgagttacccctcaacacgcagaaaaagctagtggccgctcagctcgcaggcgcagtgggtgggtgcgcgtggggagcaggcgcgcgcagggggcgggaccgggccgaggttcccgcgcgcggcgagagtttcgggttttggttcgcagcgcctgcgcgcagaggagacggcccgcccccagcccgcccgggtgcccgctccgccccccgggctatgtaaagcggccgggctcgggtcgtgccaccgctggactcccgtgtccctccgcgcaggcgggcggccccggagcgctggtgccggcagaggcggcgacggtggcgcccctcctcatcatggtgagaggccgggcggggccgggcacggggtagcaccagggcgggaaacgagtgtcggggcccctcgggaggaagcgtcttgcaaacgaggacccggggctccgggttcgacttccagttttcttggtactcagggcggccctgaggtctgggagaagcggaggggttttggggtgccggagaggccgctgtaaagggaaacggtggtgtttctcaggagggaactcgggaccgcagaagctgctgcgcctctgggagcctgggtgggcctgggccgggagcccgggagctgctcccgaccccacgcaggcccgcgctggggcagccgcttcggcgccccctccccgggcccagtctcatcacgcggaaccgctgccccgcgcccgggtgcgggcgggaggtggagccagttcagaggaggggaccctttacggtaaaagctgccgtcccttgtggcttctagaagataggaaaacaagtggctccgagaggcgcttctgacacacagcacagcggcgggtagagctggatcctaattgcaggtgccctgtgctgccctgttctggacaggcacaaagaccacgactttgtgggggccgggagagggtagaggaggaggtggcaggcttggtgaaagagggcctttgtccagtgctctcctgccctgccccccaccagcccttctgtgggaccattgtacccgcatgccagacaagagagtattatctgttgcggccattgttgggggaagggaggcagtcttggggtaacccttctccactcccccccttctctgtgcactcagccgtggcagctgtggcttggcccagacacagagacccccacctccaaagaggacgtccttagtaggtgccaagcatataagagtgaggccagtcccagaaccgcaggctcctggcgcgccccgcatgcctccagcacgtttacctttccgaagtggcaggaatggggaaagcgcacgcttaggagagcttcagacaagcttccctcttcctcctccacgaccagaagcggaaaggtgctcccggaccgaaagggaaagaaggtccagcactgccccgcttgggaaggcacccacaaccagtctagggactaggggtaaggccggcggggagcccgcgaatgacctgggctgacatctcttcccctccttacacagaacagaggcttctcccgaaaaagccacacattcctgcccaagatcttcttccgcaagatgtcatcctcaggggccaaggacaagcctgagctgcagtttcccttccttcaggatgaggacacagtggccacgctgctagagtgcaagacgctcttcatcttgcgcggcctgccaggaagcggcaagtccacgctggcacgggtcatcgtggacaagtaccgtgatggcaccaagatggtgtcggctgacgcttacaagatcacccccggcgctcgaggagccttctccgaggagtacaagcggctcgatgaggacctggctgcctactgccgccgccgggacatcagaattcttgtgcttgatgacaccaaccacgaacgggaacggctggagcagctctttgaaatggccgaccagtaccagtaccaggtggtgctggtggagcccaagacggcgtggcggctggactgtgcccagctcaaggagaagaaccagtggcagctgtcggctgatgacctgaagaagctgaagcctgggctggagaaggacttcctgccgctctacttcggctggttcctgaccaagaagagctctgagaccctccgcaaagccggccaggtcttcctggaagagctggggaaccacaaggccttcaagaaggagctgcgacaatgtaggtggcaggttggggccttataagcccaccttgctgggcacagggtgctgcgggcaaaggaccatcattgtactcaaaggatggagcacgaagcagcaggaggcagagagaggctcacctcagcgggggcaggggcaagcggtgcgtcccagtggtagccttggggagttggcagcacattgggaacacgggggcttcccagagcgcctttcctcccaccacacctatccttctagccctcttctctccgacacccttttcccagcctgaatgtagaccactgtcccttgtcttggaggtgggaaaaacaaattactgtagtaacaggaaacatgtcctcttctaatgtaaccttagagggggaatcaagcccagtgttttccaacgcatttttagcagcagaatcatgttccaaaaaataataataataatcacatgaaattgtaagctgcaaaaaaattaaaactaggactattgtggcttcactggggatggttctcaggcctcggactgctcaatttactcatgggtttgtggcatctgcagctccagaggacacaagtctcacacttaggccaaaacccgttttcagatggaaaaacatggacccaggagggatgtggggtttacgggctggaaccctggactctggccactctagcagggttctctcttggcatgggctttttgctccaatgataggtttgagataaagaagggtcctggtggctctcctggagtgacctgttggagaagtgccacccactaatccatctatatgcctttaggccatttctggttgcctccaattttatttatttatttattgtgacacggagtctccctctgttgcccaggctggagtgcagtggcgctatctcagctcagtgcaacctctgcctcccagattcaagcaattctcctgcctcagcctctcgagtagctaggactacaggtgtgcaccaccacgtccagctaatttttgtatttttagtagagacggagtttcacaatgttggc

SEQ ID NO: 7510 - DNA, 6000 bp, Homo sapiens; identical to SEQ ID NO: 1961

SEQ ID NO: 7511 - DNA, 6000 bp, Homo sapiens
gccctctgttttctttccaccccacttcccatgacttgcttcccctttgagacgtggtgctagtaaatcttagattcccttggcctgtactgcctgcctctgttacaaatgccttagagtttggagaagagatggaaagatctatacaatgtaaagccagagaattttaacttttttttttttttttttggagacggagtcttgctctgttgcctaggctggagtgcagtggcactatctcggctcgctgtatcctctgcctcctgggttcaagcaattctctacctcagcctcccaagtagctgggattacaggcgcccgccaccacgcctggctaatttctttgtatttttagtagagacggggtttcaccatcttggccaggctggtcttgaattcctgaccttgtgatccacccacctcggcctcccagagtgctgggattacaggtgtgaaccaccgcacctggcctgagaattttaactttttattgctctaaagttgccattagtttgaccaactaaccaatgaatgagctgtagtgggttgctggagaggtgatgcttagtgtccgagtgttttgcgctgggcctcggtggtcctggtggcggatgttggtatgcccctgctcccctgccctgactgcacccgttttctcccggcagtcgtccctggggatgagcccagggagaagatggacttggtcacctactttggaaagagacccccaggcgtgctgcattgcacaaccaagttttgtgactacgggaaggctcccggggcagaggagtacgctcaacaagatgtgagtcttccccagggacacatgggggaggtgggaggttgggggagaaggggctgcagcatcttctgaagataggtaccggtgccaggcagggaccaaaaaccagatggcagctcaagaaaaatggcatctcctcctcctagctcccctgtccccaggcgtagctgcatagacctcagccgcaggttctaaggagcctgccctggcagtactgccagcctgtgcattcacctgcccccaagcaccttcgccttctgcagattcatggagaatgctggtccacagtgggctcctgctctggtctctctgagcctgttttaccttccaaagactaggagtccttcgcccccagggagcctggtgcactgaggtccccatccctgtccccaggtctgaggtctggcctggccccagagtgagggagtttcatacgataatgaagcttattggctaatgggtacgagacctttctgcaccacacagctggcaccttacacccacagccactgacagtgatccctgaatgccaggcatgtcacccatatccacagtctccaacttccaagtgtccacccccaagcccactctcccacttctctgcctaggttagcacaatcgtttgtttgttcactagagtgtcctcccaaatggaagctcccctgagggcgagtttttaagtttcgttgactcctgtggttccagcaccctagcatagtggaatgaatatgtaacacctgagctaccatccctaaccatgccttcatttagcatttattaactacccatttcatgccagacactgttgggacaagggatcgtgagcaaaaatagaaaagcgtttatgctgagatgggatgggctgtctcaaagaatcagatagaagcagacatatcatcagatgggaaccaaagtgtaagagcaggtttccatcaagggcgagtctgacctcagtctgacctcaccctgtcctccagggcgctgtctgggtcccaggggaagctgagcggtgccaacagtagcagctgttgtgtgcgcggacacccctgtgggctgtttacctagtcactctcataaccacattaactctgaggtaggctctggttctccctgttttacgggtgatgaagccaaggcaccgagaggtcagccagcccgctgaggccggaagccagtgtgcagggagctgggctccctcaggaagtccggctgtccccgtgtggccctgtctgagcgccttcgtgtttctcacttgagcctggagcgcctatggaaggtgcgtgccgcagttgttagtggatgctgggcctataccgacccctgctcagctgtgctcacttctgttagacttccccttctctcctccaggagggaccctccctgggtcagctgttcctcaagagcctgccatctctagcttgggcccctctttctcactctccccaggtgttaaagaaatcttactccaaggccttcacgctgaccatctctgccctctttgtgacacccaagacgactggggcccgggtggagttaagcgagcagcaactgcagttgtggccgagtgatgtggacaagctgtcacccactgacaacctgccgcgggggagccgcgcccacatcaccctcggctgtgcagctgacgtagaggccgtgcagacgggccttgacctcttagagattctgcggcaggagaaggggggcagccgaggcgaggaggtgggcgagctaagccggggcaagctctattccttgggcaatgggcgctggatgctgaccctggccaagaacatggaggtcagggccatcttcacggggtactacgggaaaggcaaacctgtgcccacgcaaggtagccggaaggggggcgccttgcagtcctgcaccatcatatgagtgttctcaccaccacttatgcccctagaagggaaggggagagggaaacgtgccctctgtttgatccttgttttgtgacattttttttttttttttttttactcaaagttaacctacctgtaactttttaaaaacttgtaaaataactgaccctcccttcctgtccgccctcttcccctctaatgctcacgctcccaacacaaggtgggcagggaggcaccattcaggaacctggaccaaagctgacgaggctgggccaagccagggatggggccacagccagaaccccgagccctacttccaggttctggttagctcagccccagcccagcccagctgctctgcccagagctgggtgagtggggagacacctcagagccccgcaaaacccactgaccggaggcaaaaggcagtggggctgggggtagttttccatggtcacagagaactagtggtggctctgagaaggggaggacctctgggctttgattccatctccttgtcttttttctttgtttttagagacagggtcctgctatttcccaagctggagtgcagtggtgcgatcatggctcactgcagcctcgaactcctgggctcaagcaatcctcctgagtgatcccatttcttaatcagtgtagccccaagaaggctggggctatttaccagggtagaaaaaggagcttacctcccacctttggtcctaagtccctgccccctccccttcacaccataactaggtaacagtttgataactagggaagaaagcagaacagttaagcagccgccacatccccgctggctgggggcctcactccaggaaggggctggactggctgtcctttccagtggcctggctccgctgtgtggatggggagatcggggccagaggcagaaccctggtgaggaagctccagtcctgctctctacccagcccatcttgcctccatggtgcctctggaggcctctgggcctcctctaacaggggctggtgggcaccaagagccaatggagtagacccctggctggtaagggccaagtcccaccggttgcttctgggaaggggtttctaacactagtctgtgtgctgtggttcctggggtgccctccactgccctctgttcagtaacagggccttgctaatcgggttgtcactcaacaaaagtgctttggatttaagttactatcctggctttgcccaacctcagcaacctgtaagactgataatgaaataaatcatgttaatcctagctgtgtgcagtctctcttacccttctgtgcccagctcagtcttccctagggctgggtgtattaggactggctttgtcccacagcttggggccatcggtcctgtctcccctctgctggccgggcacagctgtggtgaggttgggcagctgaacagtgttggctttcatgaggaggcagaaagcagaggctggcctcagactcatacagaaggtgggggttggctgggtacgagggatgtggagcacaaaagcctctcatcccccattaaccagggcaccaagcccacaggtgtccccagcccactggatcagaaagagttcagtaagaccggaagctcctggtatgggtttctcccagttctctagggaaggccacctgcaggtcactgaaacttcaagcaccagggaagatctaacatttgagtcccttccaggccatcagaggcctagtcagccacatgggaaacttccaagacctgactcaggcatcattccaccatggctaaggcaccagccggggaagacttgaaagaaaggggcaggagctcagatgaagagaaatcctaagttacctttctaggtcaaggcctgtccctggccatctctgaacttcagctagagcttcaagtctgtgcctggagctcctgggaaggctactcaccttgaacaccacgcttgacaggacagcatggtgcatgccgctgcatccgtgagcagtgtgtctcctgcatgcagaaagggagcagagaaggccaggggcttttgctaaaaatagtggccagaccagagctctggagccacctgtcccacctcaaatgggtctgggggtcaggaggcagggttttatctctgtctaccatctccctcgaacccacactgcaacaggaactgtgagagtctttgtaagtaaactgccctgtctaggtcagtacccacctgagctttggacgcacacagcttttagtacccacctgagctttggacacacacagcttctagtgatttctggggccccaccgtaaagtgagcatgctttctgaactcgcttctctgtgactgatgttaggctgggcccagaggcacagccggggcctgcctagcactcacatgctggacaggtctgggagaggcagagtgccccacctgccactaggctgggtgcccacagcccgcatgcagcagcttgctgcaccccaagtccaggtcgggctcagctctggctcacagactggagacaatgcagatgccagagcaaagggccaggaagggtcaaaacattttattctcttttttttttcttttttaataaagttaaacagtaaaacaaaaattcacaagctgcctccctgtccacccccgcctccctcccctgccctcggtcttcggcattggttccctttgctccaccccactcacagagacacagggcatccaactgagaaaacgaaactgctctaagcacacggagacgtgatgaagggaggaggtgaactgtttccacattcaagattaaactgagtgaatctgcattttctgggttctgggtggttgcccttcattagccaaattgaaaaaagaaattccctggaccagatgctgaaagagaaaagaggggttggtagttggctatggattttctaaggaagatcactttgctctgattatggaaaagtcttcaagggctgcttcaaactcaaacacagagagaaactctatgggtatcaaacagctcaggctgtttttgggtgcaagagggagcacgtgactgtattatacatgggtagcttctgacctcagcattatctatatagtacctttgctcttgcagagaagccttggtactaggcagttagagatgcctccctgaccctgcagagatgcggtggctaaaggtcccaaggcaaggggtgcctgggaaccttcctgtcttcatccttagcaacagccgagtggatagatgccctgctagatgagaattcagctgcccccgctcatgggcccctctgactcccaaagagctgcctaagaggcaatgagtgtgttggcttgtga

SEQ ID NO: 7512 - DNA, 6000 bp, Homo sapiens; identical to SEQ ID NO: 1960

SEQ ID NO: 7513 - DNA, 6000 bp, Homo sapiens
gccaccatgcccggctaatttttttttatttttgtatttttagtagagacagggtttcaccatcttgaccaggctggtcggtagcacaaaagaaaggaggggcccttggcccaagatgggacgaatcaagcttgacaggatgattgccagatcttttttttttttttttttgagacgggggtcttgctctgtcgcccaggctggagtgcagtggggcaattcggcttactgcaacctccatctcccgggttcaagcaattctcctgcctcagccacccaagtagctgggattacaggcacccgccaccatacctggctaatttataaatttttagtagagacagggtttcaccatgttggccaggctggtctcaaacgccccgcctcaatttcccaaattgccgggattacaggtgcgagccactatgcccagcctattttatttgtaaaggaaaactggatttttctgcccaggattagagcaggagaaatgtaatgggccagcaaggctgctctcaggagaggccttcctcccctgtggagggcgagacatcctcatggggactcaattcagaacataacaggaaaaagcgagtgactccaaagacagccacaggtgtggagtctggaaatcaaaatcacagatactccactcctctttgtgtcttccagccccataatgtcaccccattatagtccaagacccttcctgtaccaggaggcccccccataggcctgcaaggtgtgtattaaactgatggtgacgttgtgactgcttgtccagatgggcccctgagtgaaatggggcactactgatagttccctggtggtcctgggaacactggggtatatggtcaccctaactgttgtgctggattgatagatagggttggtcacttgcccgaggccgatggctggtacatggcagagctgagatattcactgtgttctggctgtttccaccgtaccatgttgttcccagccctctgttttctttccaccccacttcccatgacttgcttcccctttgagacgtggtgctagtaaatcttagattcccttggcctgtactgcctgcctctgttacaaatgccttagagtttggagaagagatggaaagatctatacaatgtaaagccagagaattttaacttttttttttttttttttggagacggagtcttgctctgttgcctaggctggagtgcagtggcactatctcggctcgctgtatcctctgcctcctgggttcaagcaattctctacctcagcctcccaagtagctgggattacaggcgcccgccaccacgcctggctaatttctttgtatttttagtagagacggggtttcaccatcttggccaggctggtcttgaattcctgaccttgtgatccacccacctcggcctcccagagtgctgggattacaggtgtgaaccaccgcacctggcctgagaattttaactttttattgctctaaagttgccattagtttgaccaactaaccaatgaatgagctgtagtgggttgctggagaggtgatgcttagtgtccgagtgttttgcgctgggcctcggtggtcctggtggcggatgttggtatgcccctgctcccctgccctgactgcacccgttttctcccggcagtcgtccctggggatgagcccagggagaagatggacttggtcacctactttggaaagagacccccaggcgtgctgcattgcacaaccaagttttgtgactacgggaaggctcccggggcagaggagtacgctcaacaagatgtgagtcttccccagggacacatgggggaggtgggaggttgggggagaaggggctgcagcatcttctgaagataggtaccggtgccaggcagggaccaaaaaccagatggcagctcaagaaaaatggcatctcctcctcctagctcccctgtccccaggcgtagctgcatagacctcagccgcaggttctaaggagcctgccctggcagtactgccagcctgtgcattcacctgcccccaagcaccttcgccttctgcagattcatggagaatgctggtccacagtgggctcctgctctggtctctctgagcctgttttaccttccaaagactaggagtccttcgcccccagggagcctggtgcactgaggtccccatccctgtccccaggtctgaggtctggcctggccccagagtgagggagtttcatacgataatgaagcttattggctaatgggtacgagacctttctgcaccacacagctggcaccttacacccacagccactgacagtgatccctgaatgccaggcatgtcacccatatccacagtctccaacttccaagtgtccacccccaagcccactctcccacttctctgcctaggttagcacaatcgtttgtttgttcactagagtgtcctcccaaatggaagctcccctgagggcgagtttttaagtttcgttgactcctgtggttccagcaccctagcatagtggaatgaatatgtaacacctgagctaccatccctaaccatgccttcatttagcatttattaactacccatttcatgccagacactgttgggacaagggatcgtgagcaaaaatagaaaagcgtttatgctgagatgggatgggctgtctcaaagaatcagatagaagcagacatatcatcagatgggaaccaaagtgtaagagcaggtttccatcaagggcgagtctgacctcagtctgacctcaccctgtcctccagggcgctgtctgggtcccaggggaagctgagcggtgccaacagtagcagctgttgtgtgcgcggacacccctgtgggctgtttacctagtcactctcataaccacattaactctgaggtaggctctggttctccctgttttacgggtgatgaagccaaggcaccgagaggtcagccagcccgctgaggccggaagccagtgtgcagggagctgggctccctcaggaagtccggctgtccccgtgtggccctgtctgagcgccttcgtgtttctcacttgagcctggagcgcctatggaaggtgcgtgccgcagttgttagtggatgctgggcctataccgacccctgctcagctgtgctcacttctgttagacttccccttctctcctccaggagggaccctccctgggtcagctgttcctcaagagcctgccatctctagcttgggcccctctttctcactctccccaggtgttaaagaaatcttactccaaggccttcacgctgaccatctctgccctctttgtgacacccaagacgactggggcccgggtggagttaagcgagcagcaactgcagttgtggccgagtgatgtggacaagctgtcacccactgacaacctgccgcgggggagccgcgcccacatcaccctcggctgtgcagctgacgtagaggccgtgcagacgggccttgacctcttagagattctgcggcaggagaaggggggcagccgaggcgaggaggtgggcgagctaagccggggcaagctctattccttgggcaatgggcgctggatgctgaccctggccaagaacatggaggtcagggccatcttcacggggtactacgggaaaggcaaacctgtgcccacgcaaggtagccggaaggggggcgccttgcagtcctgcaccatcatatgagtgttctcaccaccacttatgcccctagaagggaaggggagagggaaacgtgccctctgtttgatccttgttttgtgacattttttttttttttttttttactcaaagttaacctacctgtaactttttaaaaacttgtaaaataactgaccctcccttcctgtccgccctcttcccctctaatgctcacgctcccaacacaaggtgggcagggaggcaccattcaggaacctggaccaaagctgacgaggctgggccaagccagggatggggccacagccagaaccccgagccctacttccaggttctggttagctcagccccagcccagcccagctgctctgcccagagctgggtgagtggggagacacctcagagccccgcaaaacccactgaccggaggcaaaaggcagtggggctgggggtagttttccatggtcacagagaactagtggtggctctgagaaggggaggacctctgggctttgattccatctccttgtcttttttctttgtttttagagacagggtcctgctatttcccaagctggagtgcagtggtgcgatcatggctcactgcagcctcgaactcctgggctcaagcaatcctcctgagtgatcccatttcttaatcagtgtagccccaagaaggctggggctatttaccagggtagaaaaaggagcttacctcccacctttggtcctaagtccctgccccctccccttcacaccataactaggtaacagtttgataactagggaagaaagcagaacagttaagcagccgccacatccccgctggctgggggcctcactccaggaaggggctggactggctgtcctttccagtggcctggctccgctgtgtggatggggagatcggggccagaggcagaaccctggtgaggaagctccagtcctgctctctacccagcccatcttgcctccatggtgcctctggaggcctctgggcctcctctaacaggggctggtgggcaccaagagccaatggagtagacccctggctggtaagggccaagtcccaccggttgcttctgggaaggggtttctaacactagtctgtgtgctgtggttcctggggtgccctccactgccctctgttcagtaacagggccttgctaatcgggttgtcactcaacaaaagtgctttggatttaagttactatcctggctttgcccaacctcagcaacctgtaagactgataatgaaataaatcatgttaatcctagctgtgtgcagtctctcttacccttctgtgcccagctcagtcttccctagggctgggtgtattaggactggctttgtcccacagcttggggccatcggtcctgtctcccctctgctggccgggcacagctgtggtgaggttgggcagctgaacagtgttggctttcatgaggaggcagaaagcagaggctggcctcagactcatacagaaggtgggggttggctgggtacgagggatgtggagcacaaaagcctctcatcccccattaaccagggcaccaagcccacaggtgtccccagcccactggatcagaaagagttcagtaagaccggaagctcctggtatgggtttctcccagttctctagggaaggccacctgcaggtcactgaaacttcaagcaccagggaagatctaacatttgagtcccttccaggccatcagaggcctagtcagccacatgggaaacttccaagacctgactcaggcatcattccaccatggctaaggcaccagccggggaagacttgaaagaaaggggcaggagctcagatgaagagaaatcctaagttacctttctaggtcaaggcctgtccctggccatctctgaacttcagctagagcttcaagtctgtgcctggagctcctgggaaggctactcaccttgaacaccacgcttgacaggacagcatggtgcatgccgctgcatccgtgagcagtgtgtctcctgcatgcagaaagggagcagagaaggccaggggcttttgctaaaaatagtggccagaccagagctctggagccacctgtcccacctcaaatgggtctgggggtcaggaggcagggttttatctctgtctaccatctccctcgaacccacactgcaacaggaactgtgagagtctttgtaagtaaactgccctgtctaggtcagtacccacctgagctttggacgcacacagcttttagtacccacctgagctttggacacacacagcttctagtgatttctggggccccaccgtaaagtgagcatgctttctgaactcgcttctctgtgactgatgttaggctgg

SEQ ID NO: 7514 - DNA, 6000 bp, Homo sapiens; identical to SEQ ID NO: 754

SEQ ID NO: 7515 - DNA, 6000 bp, Homo sapiens
gaaaagccgagctgtgctagcttgggacagggacaattgcagataaagtgaaatggctcttcttactgatttcaatgcactgttcttggcttgatcttgccttggggtactgcaacttcctcactggtttctagagttctcataaaggtattttggtctatatattgttgttaatttggtgtcactgtgaaggaaacaagggtgggggcttcctattctgccatcttgctgatgtcaccccaattcctctattctttactccaaaagatcatatcaggtcaaaagatgtacagaactgggtgtcaaaaaggtgttcaacacaaatatatttaatgaaaggttgaacaagtgaggcagaggtttagtgttactctaacagaatactggagactgggtagtttatgaagaaaagaggtttatttagcttgcaattctggtggctggaaagttcaagattgggcctctggtgagggtctcaggctgcttcagctcaaggtggaatgtgaaaggggaatcggcatgtgcaaagagatcacacatgctgaagaggaagcaaagcagggaggaggtcccaggctggtttgtttgtttctttgttttttgagacgtggtcttattctgtcacccaggctggacactgtaaccttgaactcctgggctcaagctatcttcccacgtcagcctcttgagtaactaggcccataggtgcatgccaccatggctggctaattttttcctttttggtaaagacagggatgttgcaatgtctgtgttgcccaggctggtcttgaatacttggcctcaagcaatcctcctgtcttggcatcaagcaatcctcctgtcttggcatcctaaagtgttgggattagagatgcgaaccatcacactggcccaggctccttttaacaaccagctctcttgtgaactaatgggaggacattaattcattcatgagggatccacccccatgactgaaacccctcccaccagggcctatctcccaaaattgccgcattggggatctaaatttcaatacgaggtttgaaggggaccttttttctgatctgctgttgtaaaaccacagcagctgtggggacaagggtaactctatttcagatgctaatccaccatgtgactcctgactaacctcgagtctgggaatgcctccaagatgtctagttgatgtattattctttatgtagaaatctctgtttactgtaagttttgccttccctcctaatcaacccttgatgttgttgcacacatcataggccatgacaccctcagcattctttcagctatctacacattccttccggagcatgtagacttccctcccgatacataagccatgggtctcaggggttgcagtacacagatctgcctgtctcgtggccatagaagactacacttctgtgtgtaagttccctaataaatcaccctttactgacaaactggatttgtctgccttgttctttggtttcttatctccttctgtgtttgtgggtcactttgcatttacagggcttttaggaaagaacaacagaccagacaaagattatacctccttgaactagtgagaaaactaaagatcaggaaggctattggatatacccaatgtcaaagtccttaatagcaaagcagcaatcagagagccagaaaatctgtaagcaagagatagatctgtagtggattgagtagtgttcctccaggtactgtctaccagatcctcagaatgtgacttcgtttggaaatgaaacgtctttgcagatgtaactaagctaaggatctcaaatgatgtcatactggacttaaggtgggccataagtcccctaactggcatccttgtgaaagaaaggagaaggagatttgagacgagacacagagggagatgccttgtgaagatggaggcagagattggagagatgtgtctgcatgacaaggaacgccaaatattgctggcacccaccagaaactaggagagaggcacagaacagaccctccctcacagcctctagaaaaaatacccccaccgacaccttgatcttggactgcaggcctccagaattgtgagagaataagcttctgtttgtttgaagccacacagtttgtgggattttgttacagcagccttaggaagcttctgttgggtttaaatttcagagccataacttctattcccagtgacaccacaggccttgagaaggggatggagtctcaggcactctcacaccatgctgactggacagcaaatctgtaaagtcattctgtagggcaatctgactatatacatcaaatgtacgttttattttatcagtagcaacaatcgtaggagcctcactcagatgcaacagtaaaggaccaaggtctgcaggaatatttaagacaccatattctgaacctaagaccactgcccagccttagtggacttgtgatttctcttccccctagttttacatttggggggcctgctctgcaacgtggtcattctgaaatcgagaccaaatcttgttcagatgcgagagaaacaaaacaaaactaggttccacccttggctaacactcaccccactcaccacaaaggatggtagtgaaactacagaagaaaacagaggccaggcacggtggctcacgcctgtaaccccagcactttggggggccgaagtgggcagatcacaaggacagaggttcgagattagtctggccaatatagtgaaaccccgtctctactaaaaatacaaaaattagccgggcatggtggcaggcgtgggaggctgaggcaggagaatcgcttgaacctgggaggcagaggttgcagtgagccgagattgcgccactgcacgcgccactgcactccagcctgggcgacagagtgagaccccatctccaaaaaaaaaagaaaaaagaaaaagaaaacagatttggctgggtgaggtggctcacacctgtaatcccagcactttgggaggccaaagcgggcggatcacctaaggtcaggagtttgagaccagcctggccaacatggtgaaaccctgtctctactaataatacaaaaattagtcgggttttgttggtgcatgcctgtaatcccagctactcaggaggctgaggcaggaggattgctggaacccgggaggtagaggttgcagtgagccaagatcacaccattgcactctagcctgggtgacagagcaaaactccgtctccaaaaaaaaaaaaaaaagaaaaaaagaaaacagatccaactgagaggggaataacaggcaaattggcatcagaaaaatcaatcccgtgcttgtgtgcggttataaatacctctgaaaattgaggacttgcccgttgttagtggattgtttcatcactgtattaaacgtaaaggggacaagatagaagatgtggtcttctaggcactggctccatggaacactatctgggggaactttctttaacacagataatgcaaatgcctatttttctaataacaattaatttaaaaaatttctatcttcaatagtgagaaaaacaaacaaataaaaacagaacaataacaacaacaacaaaacaatgaatgaacagaccgggtgcagtagctcatgcctgtaatcccagcactttgggaggctgagatggaaggattgcttgagctcaggagtatcacgcccagcctgggcaagataatgagaccctgtttctactactactactactactactaataataataataataaatagccaggaatggtgatgtacacctatagttccagctactcaggaggctgaggcaggaggatcacttatgccctggagaccaaggctgccatgagccattaacacaccactgcactctagcctgggtgacagagaatctgtctcaaaaaaataagtaaacaaacaattaatggacagatgtttggaagacaaagtttacctcccagaattctatagacctttccagagatgtggaatgttagcatttttatttattttttatatttatttatttatttatttatttatttatttatttatttagagacggagtcttgctctgtcatccaggctggagtgcaatggcacgatctctgctcactgcaagctccgcctcctgggttcatgccattctcctgcctcagcctcccgagtagctgggactacaggcgcccaccaacatgcccggctaatttttctgtatttttagtagagacggggtttcaccgtgtcagccgggactgtctcgatctcctgacattgtgatccgcccgcctcgccctcccaaagtgctgggattacaggcgagtcaccgcgcctggcgcaattttgtttatatgattctgatatcgtcccatttaacacatcaaaaaatgcacaaatacatactttaaaaacattctacagttctttgacttttaaaaaatatctttcaaaaatctttttaagaatgcttgacattgtatctaccctcttaacatgcagacatgcacacgcagggtcatgcacacacacactggctgggactggcagaaggggccactgtggtgtgcctgcaagcctaggggtgggcccaggtggcaccatggcaggggcagatcttggtggtagtagtaaatattcaaatgagcgttttgaaggccaaagtggagaaggattccatgtgaaaagcagttgaacatgggtcagtcggtcctgagacaggcgagcatcatcccaaaggagtaggcattggcctcaatcgctgtcagtgatagaaagggagttgggtttggattcccaaatccagagtggcggagataggaaacaccaagttgccttctccagtgctgtatcctggaggagccggcaggagcccagggagagatctctttttcttgtgaagtgcagggcgtgctagaataaattcacagttctggagacttctagtggcacttgagaatccggggaagggggtgcaaatctccgtggcccatataccagcaggtctcccaggtgaacagcctctggacaaagtaggtaagggaagtcatccagccaatcacttacttgggaataaaaatgggctctaagggctcgtcaggtactcttgactggtgaatatggtttggatgtctgtcccctccaaatcacgtgttgcagtgtgatctccagtgcttaaggtaggatctggtgggaggtttttgcgtcatgggggtagatctctcatgagtggcttggtgcccttcctgaactgatgagtgagttctcactctattagttcacatgagagctggtggtttaagacagcctgtcatctcttgctctctctctcacatgtgacacagtggctcccctttgcctttggccatgattggaagctccctgaggcctcaccagaagcaggtgctagtgccatgcttcttgtacatcctgcagaactgtgagccaaataaccctcttctatataaattcccccagcctcaggtatttctttatagtgaagcaatatggactaacacactagataaggtgattaactttcccatcctcacccaggatcccctggaccttagatatctccagcctcctgcccccaaggaagggtggatgtagggccctagtgggagaaagggtcctgcagtgtcatggggtcgctgggttcagggactgtggctgtggacaggagctgggcctttcccatggatagccccagctgctgtgggcctcgtggctgcccagggagccccagtctccagcaaaacctcagccaagggaatgtgcttggaaggatcttggggaaagaccccagagactgagcgtggtctggcctggtgaggagacagaggagtctgctactcctgtggttttctccaatgaccagcaagagcatcctgacctccaggaattttcaccaccagctctggggaggtccactggtgtcccaaagcaggccagggttgacagaacttcccctggaacaaaagggggaaagtgcacttgattttcactttcaggatgaacgggaatg

SEQ ID NO: 7516 - DNA, 6000 bp, Homo sapiens
accagtccttggagcagctctctgaaaagctggacagccagccaaacagcccactcttctacctccctgccaagggaagacctatgagttgagcacctcccagttaccctgagtcatgccatcctctgtgtgccgcacttcaggccttctggtggcacagtaagccaccccattctcccttgctttcagcatcctccaggcatccaaactattctggttccattagtgccctgagtcaagtaagacagaaactagttttctgggcagccttctgagaagctggaacgctgggcactcttctctcccctccctctaacctaagggagaagccatgagaaaagccgagctgtgctagcttgggacagggacaattgcagataaagtgaaatggctcttcttactgatttcaatgcactgttcttggcttgatcttgccttggggtactgcaacttcctcactggtttctagagttctcataaaggtattttggtctatatattgttgttaatttggtgtcactgtgaaggaaacaagggtgggggcttcctattctgccatcttgctgatgtcaccccaattcctctattctttactccaaaagatcatatcaggtcaaaagatgtacagaactgggtgtcaaaaaggtgttcaacacaaatatatttaatgaaaggttgaacaagtgaggcagaggtttagtgttactctaacagaatactggagactgggtagtttatgaagaaaagaggtttatttagcttgcaattctggtggctggaaagttcaagattgggcctctggtgagggtctcaggctgcttcagctcaaggtggaatgtgaaaggggaatcggcatgtgcaaagagatcacacatgctgaagaggaagcaaagcagggaggaggtcccaggctggtttgtttgtttctttgttttttgagacgtggtcttattctgtcacccaggctggacactgtaaccttgaactcctgggctcaagctatcttcccacgtcagcctcttgagtaactaggcccataggtgcatgccaccatggctggctaattttttcctttttggtaaagacagggatgttgcaatgtctgtgttgcccaggctggtcttgaatacttggcctcaagcaatcctcctgtcttggcatcaagcaatcctcctgtcttggcatcctaaagtgttgggattagagatgcgaaccatcacactggcccaggctccttttaacaaccagctctcttgtgaactaatgggaggacattaattcattcatgagggatccacccccatgactgaaacccctcccaccagggcctatctcccaaaattgccgcattggggatctaaatttcaatacgaggtttgaaggggaccttttttctgatctgctgttgtaaaaccacagcagctgtggggacaagggtaactctatttcagatgctaatccaccatgtgactcctgactaacctcgagtctgggaatgcctccaagatgtctagttgatgtattattctttatgtagaaatctctgtttactgtaagttttgccttccctcctaatcaacccttgatgttgttgcacacatcataggccatgacaccctcagcattctttcagctatctacacattccttccggagcatgtagacttccctcccgatacataagccatgggtctcaggggttgcagtacacagatctgcctgtctcgtggccatagaagactacacttctgtgtgtaagttccctaataaatcaccctttactgacaaactggatttgtctgccttgttctttggtttcttatctccttctgtgtttgtgggtcactttgcatttacagggcttttaggaaagaacaacagaccagacaaagattatacctccttgaactagtgagaaaactaaagatcaggaaggctattggatatacccaatgtcaaagtccttaatagcaaagcagcaatcagagagccagaaaatctgtaagcaagagatagatctgtagtggattgagtagtgttcctccaggtactgtctaccagatcctcagaatgtgacttcgtttggaaatgaaacgtctttgcagatgtaactaagctaaggatctcaaatgatgtcatactggacttaaggtgggccataagtcccctaactggcatccttgtgaaagaaaggagaaggagatttgagacgagacacagagggagatgccttgtgaagatggaggcagagattggagagatgtgtctgcatgacaaggaacgccaaatattgctggcacccaccagaaactaggagagaggcacagaacagaccctccctcacagcctctagaaaaaatacccccaccgacaccttgatcttggactgcaggcctccagaattgtgagagaataagcttctgtttgtttgaagccacacagtttgtgggattttgttacagcagccttaggaagcttctgttgggtttaaatttcagagccataacttctattcccagtgacaccacaggccttgagaaggggatggagtctcaggcactctcacaccatgctgactggacagcaaatctgtaaagtcattctgtagggcaatctgactatatacatcaaatgtacgttttattttatcagtagcaacaatcgtaggagcctcactcagatgcaacagtaaaggaccaaggtctgcaggaatatttaagacaccatattctgaacctaagaccactgcccagccttagtggacttgtgatttctcttccccctagttttacatttggggggcctgctctgcaacgtggtcattctgaaatcgagaccaaatcttgttcagatgcgagagaaacaaaacaaaactaggttccacccttggctaacactcaccccactcaccacaaaggatggtagtgaaactacagaagaaaacagaggccaggcacggtggctcacgcctgtaaccccagcactttggggggccgaagtgggcagatcacaaggacagaggttcgagattagtctggccaatatagtgaaaccccgtctctactaaaaatacaaaaattagccgggcatggtggcaggcgtgggaggctgaggcaggagaatcgcttgaacctgggaggcagaggttgcagtgagccgagattgcgccactgcacgcgccactgcactccagcctgggcgacagagtgagaccccatctccaaaaaaaaaagaaaaaagaaaaagaaaacagatttggctgggtgaggtggctcacacctgtaatcccagcactttgggaggccaaagcgggcggatcacctaaggtcaggagtttgagaccagcctggccaacatggtgaaaccctgtctctactaataatacaaaaattagtcgggttttgttggtgcatgcctgtaatcccagctactcaggaggctgaggcaggaggattgctggaacccgggaggtagaggttgcagtgagccaagatcacaccattgcactctagcctgggtgacagagcaaaactccgtctccaaaaaaaaaaaaaaaagaaaaaaagaaaacagatccaactgagaggggaataacaggcaaattggcatcagaaaaatcaatcccgtgcttgtgtgcggttataaatacctctgaaaattgaggacttgcccgttgttagtggattgtttcatcactgtattaaacgtaaaggggacaagatagaagatgtggtcttctaggcactggctccatggaacactatctgggggaactttctttaacacagataatgcaaatgcctatttttctaataacaattaatttaaaaaatttctatcttcaatagtgagaaaaacaaacaaataaaaacagaacaataacaacaacaacaaaacaatgaatgaacagaccgggtgcagtagctcatgcctgtaatcccagcactttgggaggctgagatggaaggattgcttgagctcaggagtatcacgcccagcctgggcaagataatgagaccctgtttctactactactactactactactaataataataataataaatagccaggaatggtgatgtacacctatagttccagctactcaggaggctgaggcaggaggatcacttatgccctggagaccaaggctgccatgagccattaacacaccactgcactctagcctgggtgacagagaatctgtctcaaaaaaataagtaaacaaacaattaatggacagatgtttggaagacaaagtttacctcccagaattctatagacctttccagagatgtggaatgttagcatttttatttattttttatatttatttatttatttatttatttatttatttatttatttagagacggagtcttgctctgtcatccaggctggagtgcaatggcacgatctctgctcactgcaagctccgcctcctgggttcatgccattctcctgcctcagcctcccgagtagctgggactacaggcgcccaccaacatgcccggctaatttttctgtatttttagtagagacggggtttcaccgtgtcagccgggactgtctcgatctcctgacattgtgatccgcccgcctcgccctcccaaagtgctgggattacaggcgagtcaccgcgcctggcgcaattttgtttatatgattctgatatcgtcccatttaacacatcaaaaaatgcacaaatacatactttaaaaacattctacagttctttgacttttaaaaaatatctttcaaaaatctttttaagaatgcttgacattgtatctaccctcttaacatgcagacatgcacacgcagggtcatgcacacacacactggctgggactggcagaaggggccactgtggtgtgcctgcaagcctaggggtgggcccaggtggcaccatggcaggggcagatcttggtggtagtagtaaatattcaaatgagcgttttgaaggccaaagtggagaaggattccatgtgaaaagcagttgaacatgggtcagtcggtcctgagacaggcgagcatcatcccaaaggagtaggcattggcctcaatcgctgtcagtgatagaaagggagttgggtttggattcccaaatccagagtggcggagataggaaacaccaagttgccttctccagtgctgtatcctggaggagccggcaggagcccagggagagatctctttttcttgtgaagtgcagggcgtgctagaataaattcacagttctggagacttctagtggcacttgagaatccggggaagggggtgcaaatctccgtggcccatataccagcaggtctcccaggtgaacagcctctggacaaagtaggtaagggaagtcatccagccaatcacttacttgggaataaaaatgggctctaagggctcgtcaggtactcttgactggtgaatatggtttggatgtctgtcccctccaaatcacgtgttgcagtgtgatctccagtgcttaaggtaggatctggtgggaggtttttgcgtcatgggggtagatctctcatgagtggcttggtgcccttcctgaactgatgagtgagttctcactctattagttcacatgagagctggtggtttaagacagcctgtcatctcttgctctctctctcacatgtgacacagtggctcccctttgcctttggccatgattggaagctccctgaggcctcaccagaagcaggtgctagtgccatgcttcttgtacatcctgcagaactgtgagccaaataaccctcttctatataaattcccccagcctcaggtatttctttatagtgaagcaatatggactaacacactagataaggtgattaactttcccatcctcacccaggatcccctggaccttagatatctccagcctcctgcccccaaggaagggtggatgtagggccctagtgggagaaagggtcctgcagtgtcatggggtcgctgggttcagggactgtggctgtggacaggagctgggcc

SEQ ID NO: 7517 - DNA, 6000 bp, Homo sapiens
accatcttccagcacttggcagtgtcttctgggggtcttgccgccacttgctgagggctttgccagctggctctgtctctcccctggcctgcaggattgggaggggtgatgtcagctcagggactgagccctggtcatttctaggggtgcagcacctgggcctggaaggtgcccagggagaccttgcgggaggagggagagaggaagataggaaggggtgagggatggagggagagggtactaggtggaggcagagagagagaggcagctgccaaaatctatgagacagttgaggaggagtggaggaggggcgcctcagggatttagcagttgttggtcactgtctggtgggagacctgggggacgaggcagggggcggacagctcaatcctccccaactgtcctttgccctgaatgtggggctgagccatcagccagagtccccaccctcccaagggagaaatgggtgttttgcagtcaggaggcagcggagaggggttagaggaaaggacattggtccacagcccttgtggtgcatgtctctgggagccaaagggcaaatgcaacacctttgggcccagtgaggtgtaaccaagtgagaaaaggttaacagaggccctggacccagactgtacttggcaggactccaggaaattagtcacgtgaaggcagggcccaaggacctggcccttgcccccagcaggctccgagcctgcaggagctgagccctcaagtgagggggacttcctggcatgcccacatgcctcttggctctgcctcagcgaggctgctggggctgggggagcagctccccctgggtcaagcttcctcttgctggctgggagcctccctaatcccagggtgtgtgctgggggcttgccaggactctccactcccttgcctctccccgtgcctcctgccattcctaggattttgtagctttgggtcctccttccccaaagaggtcctcgatatgcgtgagtcctctcatcactgacctcaggggtctttatctgcttgcccttgctcggggccaagtgtggacagcgggtggcacaagagagagcagaagagagaatggagagggaggaatagaaaggaggaagaggagagtgctggttaaaggcatggcctctcggccactcccacctagaagtggaggctgttccctctcctgtgaaatttgggcgagtccatgattagctgtggtcaacaggatgaggcagaggggcatggggacctcccaggctggctcttgacctgtatgcagcttccacttgcaccatcgaatgtcctgtcttctgttccagctccatgctgagatgcccgtggtgcacggggaggtcactccatgctgagatgcccgtggtgcgtggggaggtcactccatgctgagatgcccgtggtgcacggggaggtcgctccatgctgagatacccgtggtgcatggggaggtcactctatgctgagatgcccgtggtgcgtggggaggtcactctatactgagatgcctgtggtgcgcggggagatcgctccatgctgagatgcccatggtgcgtggggaggtcactctatgctgagatgtccatggtgcgttgggaggtcgctccatgctgagatgcctgtggtgcacggggaggtcactttatgctgagatgcccgtggtgcatgaggaggtcctatgaggggaggtggagatgctccgactgacagtctcagctgatagcaggcacccaccgcggcctggacatgagcctggaagactggccagcctgggccagtccccggtgactgcagacacagctagactaggggaggcagaaggaccacccaactcgccgcacagactcatgacacagatgataatggttttaagacaccaattttgggggggctggtaatagataaatgaggcagggtgtgtagccatgttttcactttcatagcatcccatcctctggggggccccctgccccacttcaggtagctcacagcttccctccttcccaccctttccacctccattcttgttcaggttggctcttgccccagtcttccaggaatttgcctctgggactgaaggtgtttgggctgagtcacctttccctgaatcaccctgagagtccagagtctcccttctcaaggctggcggctcagccctcttctgtatcacctggcaataatgatctcctctcccccttcctcccttcttccatctgctgacatgatcccagttcgtttctactgtttccatcagagaacgtggctgacacggcaactggcatcgggagaatgtcataggccatgtgccccaggaaataagggccttggaaacaagtgatcagctgagaagggaaagggtccagcatcgcccggacttgcttgtatattctaggggattggcagccctgttcctgagagtgagctgctgatccgtctgttgtgtgcagtatctgagaccacagaagatgcaggactgaagggtggcatgttgctcctgacagcattggaagctctggagagagggcagaggctgaagtctcggaggctccccccgccccagccacaggatggcgcacaggggccatgtgcagctccgctcaaagtatctcaggttccggggcagaatcctggaaaacccaactcggagctgagtctgcaggtggctgcagggcggtgctgctgagtctgcagttaccaccacaaaaggagggcctgaaggcattgccaggagactatggaggactcacggagctctgacacccctcacctggaggaggtggcttccccccaccccccactctgcctgcaccacctttgcctggggcggccaatgcatggcagtggagtcagtaatcgcccttgctcctccccagggtcaaacccactggggtctggggattgaaattctgagaggagtgtaggaggagagtgtcttcccgaagaaaatgtaggaatgcattggcttctatcacaaaaatcctgggaatgttcctgagaagggattttggagatgctcggcctaggactggccctcgggaagatgacccgacctttgtcctgtgcagctgagtgctgaacactggtcagctctggataaagcctgatgtcaccgagctgatggcggggcgtctgcactgaacaccttccagcttggtgggggcacgggaaccagctgtcctcattaaaagtgacctggagtgagatggattcttctgcctatacctccacgtgtgggctccctgaacacccccatcgccatgggctcccaagaagtattgcttctggctgcagggctcactgcaatgctgcgacaggaggtgacaggccaaggccagcaggtgactgctctccccagaggccctgtcagctggaagcagctggtttcacataacagagaccccaggcccaggtcccctggatgcaggaggatttgcggctgcccttttggaagaggtaggctgaccatgagaactggccaaaggtgagaaggacgtggagaaggtgttggaggagggaagtcagacatactagcaatagcctggcctgcagggctgtagctttcacctgtacttcctcctgtttggtgtcatcatcacaatcacgatggtgataaaatgtcttctttcctctaggcaggtggtaaaggtactatttggtgcacaggttggagagtgctgtgataagaaccatcagaacaagggcaggaatgtgacctcccaggtgatcctgggaggatccagtggagcgtttcagaattctgtgtcaaaaaagaaggctgcgtgttgactggggtggggctgtgcctgtgtttggggccgcccatgggtgtagcaaaccctttttttttttttgtatttgtcctgcctcctctccttcagggtctgctccttcctcctcgcggctctgggggctgcatctcggaatcctgccggccactcctccgctgcaggggtggacatgggaaccaagtggggcctttgggatgtcttcagccctcccacagccactggccagcctgcctgctgtcttcctgcccccctcgctcactcctccttctcctgggctgaaccacacccaaaagcttgatccaggactgggctaggtgaccggtgcaatccttagatgcctctcttggttcccactgccctgctggtcttgaggcaggttgaggggggagtcacaggccatccctgcaaggaaaagcagagagggcaatttgggaaggtgacagaggaccctgtgggacgtcgagtcacagccttgctgggcacagtgactggcgtgcatagtgagctgctttcccaagcactgccacccctggctctcagatatgctgctgaaaggggtgacgggcagtggggggcttgggactccgccgaggtgtcctagctcccatccctatccccaggcccaggcccaggcccctccagcatgaaaggctagggaccgcactgccatggggtttgccaggcccctgtctcttgggaagccacccctcccagggaaaagcagggctgagggctgttcaggctctgccaccacctgctctgtgacttcgggcaggccaccaattcttctgaaaaacgggagtcactgtgggcaccatcacgcccgggtacaggacgcccagtggctcagctgccccagccaggctgccctgtcctggcctcagcacacctcccacagccactgcaggcagccctggaccttctcctgctgaggccttactgccaatccctctgggagaccagacacaacaggcagcggtctgggtgactcccaggaacctgtcctccctagtggctgaggcagtaggcttggcagcagggactcagtgccctaggaggcagggctcatcccacaagttgccatggtagcccctcctcctgccccttactcatcagccaggctgtaccgacacgggctgcccaggcagggggtggctcgctggacaaagctggccgtgcaggcgctcaggcgtgcagggtagccagtgccccggccaggaatggacagcctccaggacacagtggccctggaccatgggggctgctgccctgccctcagcaggctggttcccagaggctttgggactgagatgtggactctctttgccctttctggacccctggtaaggaggaggagctggggggcaggtagggagtggaggaagctgagaggctgagggtgtctgccttgcaggcaggatccagaaatgtgctcacattttccccagaaactgcccatgttgactgccaggtccagagtctggggacagcaggatggctcctgaaagctgtctctggacaatccccagtggcagtggggcctgactttgctcagcagcaggcagcccccacacagaaggggtgggtgtgcctcagctggaaacccacaaaagcctgagttggaagatggctccaggacaaatgggacccagagatgcatgaagcctgcagcaccttcgcagggggaagaaggggccggctacccatttcatttccaaaggggaaattgttttaaatacatttattttttctgatcatgaagaggaataggctgggcgtgctgcctcacgcctgttatctcagcactttgggaggccgagcagggaggatcacctgaggtcaggagttggagaccagcccggccaacatggagaaccccccgactctactaaaaatacaaaaattaaccaggcatggtggcgggcgcctgtaattccagctacttgggagagagaggcagagaatcgcttgaacccgggacgggtaggttgcagtgagccgagatcgcgccactgcactccagcctgggcaacaagggcgaaactccgtctcaaaaaaaaaaaaaaaaacaaaaaaaacaaaaccaaaaaggagtaatggaattgcacttcctgtaaaacttttagaaaaaaatgaaagatataaagaagaaagaaatttaactcaaatcctagtacttggaaatagccattactaagattttggtgta

SEQ ID NO: 7518 - DNA, 6000 bp, Homo sapiens
gtgaaaccccatctccactaaaaatacaaaaaaagttagccaggcatggtggcgcacatctgtaatccaagctactctggaggctgaagcaggagaatcgcttgaatctgggaggtggaggttgcagtgagctgagatcgtgccattgcactctgcactccagcctgggcgacagagtgagactccatctcaaaaaaaaaaaaaaaaaaaagagagagagagagagaattggagtggattggagttttcacctgtaatgtataacgctagaagcatgggaatgtgtaaaatatcatgaccgcaaacattcagaaagcacacgccacaatatcctgagaaagtacccactagaaaatgaaaagctaatcagaatttaaaattacagggaagatacagacgtggtcagaacatggtgagtatgagatgctgaataaggcctcccaaagatgtccccatccatctactgaaacctgtgaatacataaccttgcatggcaaaaggacttggagatgtgattactacaaggatcttaagatgcaaaggttatcctgggttatcgggtgggcctaatggaatctctttttctgagaggaagacaagagagtaaaagctggaaaaaggagacgtgatgaaagaacagaggctgcagtgatgtgctttggagatggaggaagagggaggcggcatctagaagcaggaacaggcaagggaatggattcttcctgagccctagcaagaacgcagctctgctgacaccttgatttcagcctcacggaacccatttcaggcttctgacctctgttaaatagtaactttgtgttatcataagctattaaatttgtggtaatttgttacagcagcaatcaataaacacttatcatgaatgaccaaaattaattcaagaagaggttaaacaaaaccctgaatagaccagcaacttctaaataaacagaaaaccttttattttttttcttatttttaaataaaataccccttctataaaggcatcagatggtcctctaggtgagtggccttcaaaccttcaagaaacagatcattcttatggtatttgaataattacagagcctaaagattcacggaagccaggcgcagcagctcacgcctgtaatcccagcactttgggaggccaaggcaggaggactgcttgagcctaggatttcaagaccagcctgggcaacatagtgagacccctgtctgtataaaaataaataaatataaaaatcctgaatataatattagcaataaatctaccactatatacctgttatagtatactattatgaataagggaagtttattccaggaatcagtgacagctaaacattaggaaatctacaatgaacttacactaacaaccgaaaagagaagaaaaatttgattatttcaattaatactaaatatatatatatatatatagagcacagtggctcatgcctgtaatcccagcactcttggaggccaaggcaggaggatcactttgagctcaggagtttgagaccagcctaggcaatatagtgagacctctttgtctctataaaaaatatgaaaataggctgggcatggtgcctcatgcctgtaatcccagcactttgggaggccaaggcaggtggattacctgaggttgagaccagcctgaccaacaaggagaaaccccaactctactaaaaaaaaaaaaattcaaaattagtcgggtgtggtggcacatgcctgtaatcccagctactcgggaggctgaggcaggtgagttgcttgaacccaggaggcagaggttgcggtgagccaagatcgcacaattgcactccagcctggacaacaagagtgaaactctgtctcaaaaaaaaaaaaaaaaaaaaaaaggaacaagaaaacaaaattagccgggtgtggtggcacatgcctgtagtcccagctcttcaggaggctaaggtgggagaattgcttgagccagggaggtcgaagctgctttgagccgagatcaaaccattgcattccagtccaggcgacagagagagaccctgtccccccgaaaagaaaaaaaaaaaaccctgataaaattcaattttaatacatgcttttaataatatatttcagcaagttaagaaccgtatatgaacatacttatgactatttatcaagcatcaataacaaattcatcatatccctagtccagtgagtctcccattccctagatgagtactgattagactagggatatgattgaaatagaagacagaattttaacgaggtgcattctttctgaataaatctgcagatataatgcaatgtcaatcaaaatcctaacactttccaagtaacagggttctttgttcttttaattgttttgttttttgttttttattgagatagggtctcactctgctgcccaggctggagtgctgtagtgcaatcatagctcactgcagcctcaaactgcggggctcagtcgatcctgtcacctcagcctcccaaagtgctggggctacaggtgtgggctactcacctgtacaatgtgctcagccaaccacacgttgttttaaaagctatttaccagccaatagagctacttctttcctccttacttttctttttcagagtttttgttatatcttttcctgtttacactatcaattgcttttagaatcattctattaaattttaaaataatggaatacacagtagtggactaaaacctaatatattaattgaaaattaattttcctgtgctactttttggaaggaagtcactgtgtacaatccacctttaaggagtgaggagttatgctctgtatcacgaggaccttttgttttttgttgctattgtgaaagatttcttttagtattttcatatatgttattaccaatataaaggactgatatgacttgttgaagaacttctatgtagcaactttattaaacccctttatcaattctattagcttttgttcatattttatttctttgggttgtgtggattttttttaagagatggggtctcactgtgttgcccaggctggtctcaaaactcctgggttccagtgatcctcccacctcggccttccaaagtgttgggattataggcatgagccactgtgcctggcccggtctgtcaatttctactgtgagtaatccctttgccttttctttcctaacattatacattacatttccatttcctgtcttattacatcagtcaggacttccagaaaattatcaaaaaacagcagtgatcagagatctagtgaatatcctcgggtatttgtctgttgacactctcagttcttttgggaaactgcgctactccatatgtacagtccttgtgggacgagaccagtcacagggcacctaaccctaaccctgtaggttcaaagctgggtgcatggtccagggccagccaaacatcagaccctattttcccacccagggcgattgttccagaggtgggcaagaaacctaagcagggccaaccagattttctcccagttttttgtttgttagtttggaaccagaagagaggaggggagggccttactttctggtttaacagacgggaaagataggaacgagggtatcagaggccaccactgtcacttgcacaggaagagaaaggctgccggcagaggaggaagagaaactacggaaagaatcccaaggggcgaggagaagggaggagagggacagagatgggaagagggacaacaagaatgatctggttttgttttttttttttttttgagtggagtctccctctgccaccaggctggagtgcagtggcgagatctcggctcactgcaacctctgcctcccgggttcaagcaattctcctgcctcagcctccctagtagctgggattatggcgcgcgccaccatgcacagctaattttcggtacagacggtgtttcaccatgttggccaggatggtctcgatctcttgaccttgtgatccgcccgcctaggcctcccaaagtgctgggattacaggcgtgagccaccgcgcctggcctaatgaccttgttttcaaatccctgaatccaaacttcctgattatgtgagccaaaaaatttgttttccattttctctacttacattggatcattacaacggaaggaattttgactattagagaaatcaatcttgtcctggtaactgacacttattaggtaacggctggtgccaggctgagggcaggtggcactgactccggtcctccgcccaggcaaccccagtcttcacagctggcgacgagtgttctttcacgtttgcagatgaggaagctgaggctctgggaggaaagcgcgctgctcctgcccttctgggccgcagcctctcgtactcccacagcaggcttgatggataaacttccaacacgaccagctggcacaaactgtgctacttggcaaatgggagcatgttgctctatcctggtagattctaagttctctaatggaacaactgatgagaggagaggagtatgcaacaccctaaccagcatcaaagggtgtacccaactcaatctgcacagcaaatgcgcccaaccccacacaccccgcggggtgctaaccgagtcacggctcgaggcctctgggtccttccacgccaggtcattcagaacctgaaacccccagcggaggtggagagccggggtgagtcctggcgtccgagacgtggaggacccagcccccggagcgcgttccgttagtttacagagctttttcaaactttgccttccaagtgcaggagttccttggtctttgcaagacccgcaggcgtccgcagtggtgcagagagaggtgcaaggggcgcgcccaaggtcgcaggctgcctggctgcgcgctcagtcgggcccccgggcgccaggcgcggggcgggctctgggcgggcggccggggcggggactgcagagcaggctgcactgcgcggtacccactgccggcctgcgcggtactcactgccggcctccgcggtacccactgccggcctccgcgctacccggccgcagcgcgcgagtcacatggaagctcctgaggagcccgcgccagtgcgcggaggcccggaggccacccttgaggtccgtgggtcgcgctgcttgcggctgtccgccttccgagaagagctgcgggcgctcttggtcctggctggccccgcggtgagtaaggtggcctcagtggcaggccggtaccggcgggctggggacctggtgatttctgcctccgcgggtgactttggcgggctttggggaccgagcgagctgtccgccggcgggctccggggagcatcgtgccaggagccgggcgggcaccccagctcctctgcctgcgtcccggccgctttccgctccgcaccacccgactgggggccccgcggggcactgcgggaacggctggtacgcgcccgggcgcatgttggctcggagaggccggcggctccagcctcctgcgccaggagacaccggagagctgggacctttgcccctaacggggctctaccaggtccaggctgcatttgcatccgggggtgccttctctgggagctgattccggccaataaaacgcaagttgcctgaacttcaaaacacaagggaacttgtttctttgaaaagtagcggtcaaaagttcgggagctctgcgatctaaataatcccgaggcacggaggagggggtgcgtggtctgtcgtggactcagagctgcgaaatgatttcttcagaattcagtcaacctctaccgaggaaaccagaggcatcctgtaccaccccctccccgccagtaattatgtatgtgaaagaaaaaaggggttttaatgtggttctttgtggggtcgaggtgttcttatctgtgggattcttttctttttaatcattaggttagggctgtttctgccttgtctcctaaaaataatgtggttttaaaaaccacaaaaacacaatcctatccacgttctcctgccagcttgggtggttttcaaaccgagagggtaggacgcgg

SEQ ID NO: 7519 - DNA, 6000 bp, Homo sapiens
gagaatggcgtgaacccgggaagcggagcttgcagtgagccgagattgcgccactgcagtccgcagtccggcctgggcgacagagcgagactccgtctcaaaaaaaaaaaaaaaaaaaaaagaaatcaggcaaaaaaaccccagctgtctgggccaatttccgatcagaatgtctggggcgggccctggatagcggttttttcttttttcttttttctttcttttttttttttttttttgaggaggggcgaaagcttcctaagtgatgataaagtgcaactggtttaaacccaaatttgccacccagggttgctgccagagctctcaggccctcatttggatgaggcaatggagtttctttcagcgcaatgttcaggctctgggactcctgctggaaatttgccagggcccagggcttggggtggcagctccccacaaatatgacaaggctgaacggacaacctctcttgccactatcctggccgccttgcaggtgagcctccagcctcttttatacattttcccaaaatgtaaaaatctatctttgcacatgcaattcttcaccgtcccaacatatatataaccttggtgtgtaaagagcttacagcatccctccccccacacctataaatagcttcattcagataaaagtcacatgccatatgcacctttttttttttttgagacagagtctcactctgtcgcccaggctggagtgcagtagcacgatctcggctcgctgcaagctctctgcctcccaggttcatgccattctcctgcctcagcctcccgagtagctgggactacaggcgcccaccaccacacccggctaattttttttttttttttttgtatttttagtagagacggggtttcacggtgttagccaggatggtctggatctcctgacctcgtgatccgcccgcctcggcctcccaaaatgctgggattacaggtgtgagccactgtgcccggccgccatatgcacctttttaaagtatacaattcaatggcttttagtagattcacagagatgtgcaaccagcatcacaatcaattttagaacattttcatgaccccccagagaaaccccatatccgcttagctgtcaccctatgtgccccgcaccccccgctgcccgctctctgccagcctctggaaatcactcgtctactctctgtctctatggatttgcctattctggacatttcatagaaatggaatcacacactttctgaccttttgtgattggctgctttcacatagcatcatgttttcaaagttcatccatgtttttagtggatcaatactgcatttctttttatggctgaataatattccattattggatattccacatcttgcgattcctttcatcagtgcatggacatttgagcttgccacagtttttggcaactgtgaaaagtgctgctgctgcattctggatccaacatgaaatgcatgggcaagagggggacatgttccctagagatctcaagaaatgccccgttgttattattttgtgtaccattttaaaaaatagactttctgttttagaggtttacatttacagaattgcacagaaagaacagagtttgcagtgacctcgtgacctccacccccacctccccaccagtttccccattgacatcttgcatgaggatagtagtacgtttgttaccactgattaacaagtattgacacactattatgaactaaagtccataatttacattagagttcactagtggtgttgtacatcctatgggtttgcagaaataatgcgaggtatccaccattacaggatcctacagaatagtgtctctgccctaaaactcctctgtgctccacctgttcatcccgaacccccacagcaaccactgatcttactgtttctatagttttgccttttgcagaatatcatagagttggaattgtacagtatgcagccttttcagactggcttcttccaattagattagcaatatgcatttgaggttgctccatatctttttgtggcttgatagctcatttctttttattgatgagtaatatttatttttatttatcgtagcttttctccagatggaaaggcccaccatcttccagcacttggcagtgtcttctgggggtcttgccgccacttgctgagggctttgccagctggctctgtctctcccctggcctgcaggattgggaggggtgatgtcagctcagggactgagccctggtcatttctaggggtgcagcacctgggcctggaaggtgcccagggagaccttgcgggaggagggagagaggaagataggaaggggtgagggatggagggagagggtactaggtggaggcagagagagagaggcagctgccaaaatctatgagacagttgaggaggagtggaggaggggcgcctcagggatttagcagttgttggtcactgtctggtgggagacctgggggacgaggcagggggcggacagctcaatcctccccaactgtcctttgccctgaatgtggggctgagccatcagccagagtccccaccctcccaagggagaaatgggtgttttgcagtcaggaggcagcggagaggggttagaggaaaggacattggtccacagcccttgtggtgcatgtctctgggagccaaagggcaaatgcaacacctttgggcccagtgaggtgtaaccaagtgagaaaaggttaacagaggccctggacccagactgtacttggcaggactccaggaaattagtcacgtgaaggcagggcccaaggacctggcccttgcccccagcaggctccgagcctgcaggagctgagccctcaagtgagggggacttcctggcatgcccacatgcctcttggctctgcctcagcgaggctgctggggctgggggagcagctccccctgggtcaagcttcctcttgctggctgggagcctccctaatcccagggtgtgtgctgggggcttgccaggactctccactcccttgcctctccccgtgcctcctgccattcctaggattttgtagctttgggtcctccttccccaaagaggtcctcgatatgcgtgagtcctctcatcactgacctcaggggtctttatctgcttgcccttgctcggggccaagtgtggacagcgggtggcacaagagagagcagaagagagaatggagagggaggaatagaaaggaggaagaggagagtgctggttaaaggcatggcctctcggccactcccacctagaagtggaggctgttccctctcctgtgaaatttgggcgagtccatgattagctgtggtcaacaggatgaggcagaggggcatggggacctcccaggctggctcttgacctgtatgcagcttccacttgcaccatcgaatgtcctgtcttctgttccagctccatgctgagatgcccgtggtgcacggggaggtcactccatgctgagatgcccgtggtgcgtggggaggtcactccatgctgagatgcccgtggtgcacggggaggtcgctccatgctgagatacccgtggtgcatggggaggtcactctatgctgagatgcccgtggtgcgtggggaggtcactctatactgagatgcctgtggtgcgcggggagatcgctccatgctgagatgcccatggtgcgtggggaggtcactctatgctgagatgtccatggtgcgttgggaggtcgctccatgctgagatgcctgtggtgcacggggaggtcactttatgctgagatgcccgtggtgcatgaggaggtcctatgaggggaggtggagatgctccgactgacagtctcagctgatagcaggcacccaccgcggcctggacatgagcctggaagactggccagcctgggccagtccccggtgactgcagacacagctagactaggggaggcagaaggaccacccaactcgccgcacagactcatgacacagatgataatggttttaagacaccaattttgggggggctggtaatagataaatgaggcagggtgtgtagccatgttttcactttcatagcatcccatcctctggggggccccctgccccacttcaggtagctcacagcttccctccttcccaccctttccacctccattcttgttcaggttggctcttgccccagtcttccaggaatttgcctctgggactgaaggtgtttgggctgagtcacctttccctgaatcaccctgagagtccagagtctcccttctcaaggctggcggctcagccctcttctgtatcacctggcaataatgatctcctctcccccttcctcccttcttccatctgctgacatgatcccagttcgtttctactgtttccatcagagaacgtggctgacacggcaactggcatcgggagaatgtcataggccatgtgccccaggaaataagggccttggaaacaagtgatcagctgagaagggaaagggtccagcatcgcccggacttgcttgtatattctaggggattggcagccctgttcctgagagtgagctgctgatccgtctgttgtgtgcagtatctgagaccacagaagatgcaggactgaagggtggcatgttgctcctgacagcattggaagctctggagagagggcagaggctgaagtctcggaggctccccccgccccagccacaggatggcgcacaggggccatgtgcagctccgctcaaagtatctcaggttccggggcagaatcctggaaaacccaactcggagctgagtctgcaggtggctgcagggcggtgctgctgagtctgcagttaccaccacaaaaggagggcctgaaggcattgccaggagactatggaggactcacggagctctgacacccctcacctggaggaggtggcttccccccaccccccactctgcctgcaccacctttgcctggggcggccaatgcatggcagtggagtcagtaatcgcccttgctcctccccagggtcaaacccactggggtctggggattgaaattctgagaggagtgtaggaggagagtgtcttcccgaagaaaatgtaggaatgcattggcttctatcacaaaaatcctgggaatgttcctgagaagggattttggagatgctcggcctaggactggccctcgggaagatgacccgacctttgtcctgtgcagctgagtgctgaacactggtcagctctggataaagcctgatgtcaccgagctgatggcggggcgtctgcactgaacaccttccagcttggtgggggcacgggaaccagctgtcctcattaaaagtgacctggagtgagatggattcttctgcctatacctccacgtgtgggctccctgaacacccccatcgccatgggctcccaagaagtattgcttctggctgcagggctcactgcaatgctgcgacaggaggtgacaggccaaggccagcaggtgactgctctccccagaggccctgtcagctggaagcagctggtttcacataacagagaccccaggcccaggtcccctggatgcaggaggatttgcggctgcccttttggaagaggtaggctgaccatgagaactggccaaaggtgagaaggacgtggagaaggtgttggaggagggaagtcagacatactagcaatagcctggcctgcagggctgtagctttcacctgtacttcctcctgtttggtgtcatcatcacaatcacgatggtgataaaatgtcttctttcctctaggcaggtggtaaaggtactatttggtgcacaggttggagagtgctgtgataagaaccatcagaacaagggcaggaatgtgacctcccaggtgatcctgggaggatccagtggagcgtttcagaattctgtgtcaaaaaagaaggctgcgtgttgactggggtggggctgtgcctgtgtttggggccgcccatgggtgtagcaaaccctttttttttttttgtatttgtcctgcctcctctccttcagggtctgctccttcctcctcgcg

SEQ ID NO: 7520 - DNA, 6000 bp, Homo sapiens
tggtcttgaactcctgacctcaagtgatccagctgccttggtttcccaaagtactgggattacaggtgtgagccaccgtgcccagcctggatcagctttcaaatttactcagagctggaagggatcctgtggttgtacttttgcaaaactaatgatagaaattttttgttattagattggaaacctgagattgtttaaggaaggatatacctgcaattcatatgtctttcttttttaaaaaattaataagctttattttaattttatttttttgagacagggtcttgctctcttgcccaggtgggagcacagtggtgtggtcatggctcaatgcagcctcaaactcttgagctcgagcgatcctcctgccttagcctcctgagtagctgggtctacaagcgtgagccaccacgcctggcaatttttttttccccgtgcagagatgtggtcttgctatgttgctcaggctggtcttgaactcctggcctcaagcagtcctcccgccttggccccacaaagtactggcattgcggtgccagccacagggcttggccagctttatttttcgagcaactttaggttcacagcaaaattgacacaaaaaatatataggaagttctcatacacctgctgtgcccacaacctccccagctactgccatcctgccccagagtggtacattgttacaatcagtgagttgacattgatacatcattatcatccaaagtccagctcatgcctgtaatcccagtactttgggaggctgaggcgggcggatcacctgaggtcaggagtttgagaccagcctggctaacacggtgaaaccccgtctctactaaaaatacaaaaattagccaggtgtggtgacgcacgtctgtcaccccagctactcgggaggctgaggcaggagaatcacttgaacccgggaggcagaggttgtggtgagccgaggtcatgtcactttactccagtcagggcgacagagtgactccgtctcaaaaaaaaaaaaaaaagaaaccaaaatacaaaaaacaaagtccactggggtcactcttggggttatagattccatgggttttgacaaatgtatgacctgcgtttatcattatagtatcacacagaggaattttattgcctaaaaatcctccatcctccacctattaatccgtccctctctccagctcctggcaacaccgacctttttttttttttgcgacggagtctcgctctgtcacccaggctggagtgcagtggtgtgatcttggctcactgcaagctccatctcccaggttcatgccattctcctgcctcagcctcccgagtagctgggactacaggcacccgccaccacgcctggctaattttttgtatttttagtagagacggggtttcactgtgttagccaggatggtctcgatctcctgacctcgcggtccgcccgcctcggcctcccaacgtgctgagattacaggcgtgagccaccgcgcccggccaacactgaccctttttttttttttttttttctgagacggagttttgctctgtcgcccaggctgaagtgcagtggtgcaatcacggctcactgcagcctcgacctcctgggctcaaagatcctcccacctcagcctcctgagtagctgcgactataggtgagagccaccacgcctggctcatttttgtattttttgtagggatggggtttcgtcatgttgcccaggccaggtcttgagctcctggcctcaagcaatccacctgccttggcctcctcaaatactgggattacagatgtgagccaccgtgcctggccagccactgatcttttactgccttttccagcatgtcatgtagttggcatcatcaatacaatacatagccttttcagattgatttattgtacttagtattatgcattagagtttcctccaggtcttttcgtggcatgagagctcatttcttttattggaggataacattccattctcttggatgtagcactcttttttttttttttttttttttttttttttgagacggagtcttgctctgtcgcccagcctggagtgcagcggtacaacctcggctcactgcaagctccgcctcccaggttcacgccattctcctgcctcagcctcccgagtagctgggactacaggcacccaccaccatgcccagcaaatttttttgtattttttgtagagatggggtttcgtcatgttgcccaggccaggtcttgaactgctggcctcaagcaatccacctgccttcgcctcccaaagtgctgggattacaggcgtgagccaccacgcctggccggatgtaccactctttatccattcacctactgaaggacattttggttgcttccaagttttggcaattataagtaaagttgctataaatatctatgggcaatttttgtgtgggcataagttttcagcttctttgaataaacaccaaagagtgtgattgctggattgaatggtaagagtatgtttagttttgtaagaaaccaccaaagtgtctttcaaagtggctgcaccgttttacattcccaccagtgatggccgagagttcctgttgctccatgtcctcaccagcatttgctggtgctgtcaacattttggatttgggccattctaaagagtatgaagtggtcattttatcttttatctttttttctgtttctctctgtgtgtgtgtgtgtgtttaatttaaacttaatagcattgaccaatgtgttgtatgcatttacactatagcatgttatatttttgttctgatcatattccttttcacttttccattctttttcttttttctttctttcttttttttttttttttttggaaacggagtctcgctctgttgcccaggctgtacagtggtgcagtctcggctcactgcaacctctgcctcctaggttcaagcaattctcctgcctcagcctcccgaatagctgggactacagtgtgcagcacctcaccccgctaattttgtatttttagtagagacggggtttcaccatgttgtggcctcttccctccttccaagtccaggcagatgctccctctttcccgaactcatcccctacaccccatcacagggacttcctcccgccttgggggtctcagcccattttgtcctgatgacccacatggtgggtcatggttcctgcctgagcctgtgtcccctgtggcccacgagggtggacacggccttctccagttctgaatccctcgttgtccacctgcgcccttgccacggcctctcccgtgggctctcaccatgtgctgggttaaatggggttgaatatagaccatctaaggggctgaagctgctgcttctgtgtgtttggggtgggattaggatgggctcgggcttcctaagtagtgactgtgactccactgggtgacctggctcctgctgcctctcatagcagagcgggggtccccttcttccttgctgggcacagggcacacctctgggtgggagacaggggcctttttcaccagctcccacctgccctctgagaaaagttatgaacacgagcaaaatggaagcactgacatttggcagcagcttcctccccaggcgtctgagccgccagaggcaaacagggagggcgcggggctgggtcgggagagggtgagtaagctagtggccggaggccgtgctcaaccccagatcgggcttttccggtcgagtttcaggcacagtcatgagatttcagattgtgagtgggaacttcaggaccccctgacttcaacggcagaagcggtctcctgcttcacccacaccctcaagtctggtctgccccttaccggccataggtcctgctctcccgtggcctagaagcctcacctgcctcctgcctcctccccaggccaggcaggttgtgatgatgagggattgagaggctcacagctggggatttccctgcccatcaggcgccagctgcggccgcgtcagcagagacttcctgctctgtcccagctgtgtcttgtccacatctcgccccggggagcaggtgtgcagttcctgagtgacgcgagacacacacggccatcctgactcactccacccacttcacagctgcagcctgggccaggagagagggcaccgattccttctatgacgccctggccttggagaagggcaacctgggcagttgctgggagaatacattgagatgacaaaagcaatcatagctaagagctgacattgtttattgagttcttgccgtgccctgggccttgttctggccctttctacttgtacttgttgaagccccacgataaccttgcaaagtgggtttatgaagcacgtttcacagatgaggagactgaggctcggagaaatgacctgctaaggtcattcagccaggaaggggtgaggctgacactaagggccatgatgcgtgactgctggtggacagcattaaatggggacttccgtccccgagagacctgatcccaggaaccgacttttgagaacaagtgccgagtcttggggctggccaccctgaggtcaaccaggctaggcctgggctgcggtcttccctcccaggggacagagcagagcgcttgactcttcactaggccctcccacctctgtgatctctttggctcttcacggctcccttggaaagtagatgttatcattcccatttcctagttggaaaaataggcctgagatgggcagtccctgcccagcatggaatgccagagagggaggagttggacccacaacttcgatcttggcacctgcggcctcccctgccttttctccggtggggatgaggctgctgtgtgggtgtgggggtgactcacacgggccacgtgggtgggcgggtgctgcagctgtggctggtgggcgtggcctgcctggcgccgagggcaggtggctcagccagttctgcctctgacgcctcattccagccatccctctgcctgcaatgagagcttcccgccgcctcagccacagtcccacccgggggccttgggccccagacatgcggtgatctcagggcaagggttgccacgaccacccagaacctcaccaggtgagtcttctgtgcacaaggcagctggtgatctccaaggcccctggggagcccagagcgtggccctcagaggtcctctgggccatgtctgcccttggccaataggccttgggaggagggttggaaggagcttgggccccagccaggggcccactcttggctgtagggaggcactcttggctgcactcttggctgtagggatgtgtgagaatataggtccttacagactcaggaacattcccctgaggtttgggaatcctggggagggacatctcaatctcaccactgctgggggcagaggagaggctcctgcctcccgaggctgacccagggaggtggctttctggggcaggattgtgatgggagttcaggatgggaggaggtggccccaccgtgggagacagacggggcccaggcatctcacaggtgctgagtcagcagctgtggctccgcggcctggtctgtcgcccgggaaaggccatttcaatcagtgtcagggattgggagagagagggagggccagggcaacaagagagtccagcaggtgagaacgtggggtttacggggtgactcagggagctaatgatagctgctgcggccctagtccagagttccctgagcctctcctgccccagaggcccagggcaggccacattctcgggcccagagaagagagagagcaaccagctctcagggccacagagtccttggggaccattcagcccacttctcagaaaggaaaccagaggccctgggaggggcaagagacgtgcccttcttctgtctccttcacgctcggtgcatcccagccttttagtccaccaaaggccacgtggggatggggaaagccatagaggctgcccatcctcatcaggccgtgactggacacgggagggccgggtgcccaggagtccctctctgtgggctactccacctgc

SEQ ID NO: 7521 - DNA, 6000 bp, Homo sapiens
gaaggaggggggccgtggtgaggcagtgagggggttgtgactgctctgaacaccagccattcgccctgggcccctggctggggtgaggggagtttctggggaggcctcaggaagcttccaatcatggtggaagacagaggaggagctggcatgtcacaggatgagaggcagcaggagagagaggaggaggtaccaggttcttttaaacaactagctctcgcgtgaactaccagagtgagaattcactcattatccgggagatagtgccaagccattcataaagaagccacatctatgaccctacaccgcccactaggccccctccaacatgggaggtcacatttcaacatgcgatttggaggaacacacatccaaactgtatcactcgaaagcagcaggcatttttctctcagttggagaattcatcttggttttggaaatgtccctgacttggaattttttttttttttttcgagccagagtctcactctgtcgcccaggctggagtgcagtggcacagtctcggcttactgcaagctccgcctcccgagttcaagcgattctcctgcctcagcctcccaagtagctgggactataggcgcgtgccaccaggcccggctaatttttgtatttttcatagagagggggtttcaccatgttggtcaggctggtctcaaacttctgacctcgtgatctgcctgcctcggcctcctaaagtgctgggattacaggcgtgagccacactgcccggccctgacttggacttttaataaggcaggtgtaaaaagcaaagtcctcatctccccactgggcacaatgggtgtttggcatgtgcttgtgagggtggtgagttggcctcagccatggggagatagaatgcagatactgggggccacagcttgtaagtgttttccacattatttggactgtgacccacaggaagaagtatattccacatcacaatgccatatgtggacacttaaaacaaaagtttcacataacaccaatacttccttaaatacactaattttctttctttctttctttctttctttctttctttctttctttctttctttctttctttccttccttccttccttccttccttccttccttccttccttcctttctttctttctttctttcttttttctttttctttctctctctctctctctttctctctttctttctttcttagatggagtatcactctgtcacccaggctggagtgcagtggcgcgatcttggctcactgcaagctccacctcctgggttcaagcgattctcctgtctcagcctcctgagtagctgggactataggcgtgtgccaccaggcctggctaatttttgtatttttcatagagagggggtttcaccatgttggttaggctggtctcaaacttttgacctcgtgatctacctgcctcggcctcccaaactgctgggatgacaggtgtgagccactgcatccggcaatattttctatttatttgcgataattgctcactacagtgttgaactcccaggctcaagagatcctcctacctcagcctcctgagcagctaggactacaggtgtgcaccatcccacctggtcaattttttttaagaagcagggtctctatcatacaggctggagtgcagtggtgcaataatggctcactgcagcctcaacccacctgggctcaggtgatcctcctgcctcagcctcccaagcagctgggaccacaagtgtgcacgaccacatccagctaattttttattttttgtatagaaggggtctccctatgttgcccaggctggtcttgaactcctgggctcaagcaatcctcctgccttggcctcccaaggtgctaggattaaaggcatgagccactgtgcctgacttggctagttatatatataggtgtgtgtgtgtgtgtgtgtgtgtgtgtgtgtgtgtgtgtgtctgtctatatatatagacaaagttttgctatgttgcccaggctggtcttgaactcctgggctcaagcggttctgctgcttcagcctcccaaagtgctgggattacaggcatgagcgcctgtgcccaacctattttttttaatgctggttgtcgcccagtaatttgatgtcatgcctcaccagtgggtctggatctagtctctgaagctgtgcagtaagggaccccgtaaggatgggcctggtcctgtccccgagagccctgtcccctctagatgcccctcatgtggtctctaaagcttcaggacagttccgtcagaagttgcagcctggtcttggctgtgccgtggggagttcaggaggggctgcctgtactggaggggaagtcagagcagagcccttctctaaagccacagtggcagttaagacaggacatggagggcaagtgcctggcagttcagcctctccagtagcacacaaaggtttgatgaatcaagaacagcagagtgcctgggactggggctagtggtaggctctgctctggggcctcacttactcaccccttccctaatcaccccagaaaaatgaaggtcctggtctctaaagaccccttcaaagaacaaacaggccctggaacaaaacctggaactcccttggggagtggagagactcaatgtggcaccatctctgtgacactcatgttgtcctgtgctggggttgatgggcaagctcttctccagggcagatgcaattcaggcgactcctgtgagactctgaaagtccacctcccctctataccttaccctggagcagcactgtcagggtgacgggcatcttcttaggggtgatgtcactcggtggcggctgctttagtgagcattggagtgctgtgttagcagggggctgaggaggaggctggcaggagagccaagatgacttcagcccctaaaattcgcagtcatgactggggcagggtggaatcgaaatgccctccctgttgaaaaaaaaaaaaatcagggccaggtttgtccactcattcaataatatgtctagaactattatgtggcaggcacagggacatacagagatgtccaaaggcatggtccctgctctccgggagcttctggtcttagcatgggacacagtcactaagtcaacgagatcctactggatagtgacaggtgctctaagggaataagatgagataatgggatagaaagtggctgggctgggactgggggctactttgggtgggcaataataacaggcctttttgaagaaatggcagttgagttgaaatggatgaaaagatgcaaagatccacgctttcccaaatgacagtttgagagcaaaatacaggttcccagccccatcttagatttcgtgaatgaaaatttgaggggcagggcctaggaatttgcctttttttcttccacatgattcccatgcactttgaaactggacaccttccttggggcttttactttagaatcacactgatgaatttcagggtaccttccagttccccgagtctgtggcttagggaagggagcctctttgtgtgtgaaagccaggggtagggagaggagcaggactgcttgtggtcagactgcaggatgcagaaaataagcgtgcgcagctcctcaccacaccgcgctcacccagggccctgcgtctttggctgtcaggagttctaaacctgcccccccggaggccctccctcatcccactcccactcctgttgaattccacatactgagagggttgcagtcatagctgcatggatcagttctatttcttgtgcgttgggaaccattccaaacagttggtacatgcgcactctccaggcatatttttaggatcctagggtgggttgcctgtgtctccccgcccccaccccgtctgccccccacccccgcaccatccgccctgagtgtgggagggaggtcttcatgctgccggcactcgggacctgcctgaccaccgactccgccggagtgtgggcttttaaacctgcagcagctgctgcagtagaaacgcgcattagtcgcagcagacacaggcagcctcaggtgggacaagtcttgtctcttccagcctgtgggggagccacggcttcccccccacaaccaccccctgcccacggagcaagaatgtatctccctggcaggagacctggcgcgaggtgaatggagaaacctgttgtgtccccttccttcctcccctggcctcagttccccatctattcaataggaagaaccctttgggatttctttgcgagagaaaggggagttttgctttaaacggagctcttcccggccgtgcgcggtggctcacgcctgtaatcccagcactttgggaggccgaggtgggcggatcacctgaggtcaggagttcaagaccagcctggccaacatggtgaaaccccgtctctactaaaaatacaaaaattatcacgcctgtagtcccagctacttgggaggctgaggcaggagaatcgcttgaacccgggaggcggaggtagcagtgagctgagatcgcaccactgcactccagcctcggcgacagagcgaggctccgtctcaaaaataaatgaataaataaatttaaaataaaataaaaaggagcccttccccctttcacttcctctcctccgcgatcgctgctttcagctgggcaacagcacagggcggtcctgcgcatccggggggctgcgctcccagaccggtggctggggagtaggttgcaggggtgtcactgtgtcaggggaggaggaggaggaggaggaagaagaggtagcggcaaggtcgcggtctgaggttccggtgctcgccgccgcccagctcccagccgaggctttctcaaccgcgtcaataaaaggccgccccgacccgcccccgcgccccgcagccctgccggacaccccgggctgcagctgagcgggcgcagacgggccgaggcgggcgccgggcgcgcagggaccgagggaccgagtgctccccatgagcgcacgtgggccgggcggtccgcaagcccggctgagagcgcgccatggggcaggcgggctgcaaggggctctgcctgtcgctgttcgactacaagaccgagaagtatgtcatcgccaagaacaagaaggtgggcctgctgtaccggctgctgcaggcctccatcctggcgtacctggtcgtgtaagttctccgcggacttttgggaaggcgggggaggggcagggcgggtgccagccgccgcgtccttctccagggtcctggaattcgcaggcgtgcacgcggttttcccggtagctgggggtctgtgagcctgcttgctgtgggggtcctctttgggtccttgggtgtaggagtagggtgtagagagggggctctccactcccccactggcgctagaggtgatgagaggtgggcaggggccttctggtttcctcgatttatcaggctttccctgcagctgcttctcccagagtcgggtccccacgtgttagggccatgggaagggggcagggatgccagggggctgggtggcagctgtcgccccaggagcctccctgggccttggcctggcagctgacccaggcgccggcaggttatttataatcacagggtgtcactgcctactcagagctggagaaactcatcagcccggcatgttcctgagctcccttccggtcaacttgccccacccgcggccagcctctctggtgtccagctgggggtcctgcccagaggcctctatctctgcacccagctcggccatccccttcccccatcctcatgccacctggcaggagctggcgccacaaagccaaagaggcaacttgtggaggctgctctgccaggcgccttcagagccctgaccccggggtgggtcgggggtgagcaggtggaggggagaagcagcgctggacaatggggatgcgcctcattccactcgttcagtaaatgcggtggagttcctcctgcttcctcctgggagggcagccctgacgcctggctctccctcggaggtccagcagtccgcgttctctgagctgcat

SEQ ID NO: 7522 - DNA, 6000 bp, Homo sapiens; identical to SEQ ID NO: 746

SEQ ID NO: 7523 - DNA, 6000 bp, Homo sapiens
gcctcagcctcccgagtagctgggattacaggtgtaatcccctggctaattttttgtatctttagtagagacggggtttcaccatgttgatcaggctggtcccaaactactgacctcgtgatccgcccgcctcggcctcccaaagtgctgggattactggtgtgagccaccgtgcccgactaagttttctatttttagtagagacagggtttcaccatgtgggtcaggctggtcttgaactcctgatctcaagtgatccacctgccttggctgcccaaagtgctgggattacaggcacgagccacctcacccagcccactattgcattttctatgttgtggggtgtgtgtgtgatgtattgtttatacatgatgtagttgtggtgcttaagttgaggatttagcccatcatttggagaatggatggaaatcagacctgagtgaaactacttagagcaggggacactggactctgggctgagagtgtttttttttttttttttttttttgagactgagtcttgctctgtcaccaggctggagtgcagtggcgtgatcttggctcactgcaagctccgcctcccgggttcacgccattctcctgcctcagcctcccgagtagctgggactacaggcgcccgccaccatgcccggctaattttttttttttaatttttagtagacacggggtttcaccatgctagccaggatggtcttgatctcctgacctcgtgatccgcccgcctcggcctcccgaagtgcagggattacaggcgtgagcccccgcgcccggcccggagtgttttcttgaaggacccttgccataatcacttttttttttaattcccccaatcatttatcctttaagttaccaaccatgcaattacactcttaagttttttttaacatgtacaatgaaattattattgactacagtcactctgttgtgctatcaaatagtaggtcttattctattttttttgtacccattaaccatccccaccatccacctacctgcccactacccttcccagcctctggtaaccatccttctactctctatgtccatgaggtcaattgttttgatttttaactcccacaaataagtgagaacatgcaatgattgtctttctgtgcctggcttatttcacctaacataatgatctccagttccattcatgttgttgcaaatgacaggatctcatccttttttatgggtgaatggtgctccattgtgtatatgtaccacatttgctttatccattcatctgtgtttttcttttttcttttttttttaaacagttttctctcttgtttcccaggctaggatgcagtggcatgatcttggctcaccattcatctgttttttaaaattttatttatttatttacagatgaggtctcactatattgcccaggctggtcttgaactcccaggctcaagcaattctcctacctcagcctcccagtgatgaccaatgatgctgagcacgttttcttatacctgtttggcatttgtgtgtcttattttgagaagcgtctattcaaatcttctgccctctttttgatcagattattagattttttttctcataatcactttttgaagcaagatttcaagtttgaatcctgctggggaggatagagtgaatttatattaactgtattaatttatgtatatttcatatatttgtatatatttcagctctagcagtgagaatggcatcctggcaggccgttttgggagctaaacatataggagaagtgggctgggttgctagagggtgaattaccagacatgtggtgtcagggcctgccacacccactatccatcctaaacaaggcagtcttaggccaaccccatgatccttcttcagtgttggcaccccaagccctcagagcatcaggcagtagcaacgggaacaaaagtgctgcctctgcagagagaagccaagaagttggtctggggctaagaccatggtgaaatgatgcacaggtgacgagaaagcagaaactacacagtagaaaggggacatgcaaagtagggggaatgggcagtgctgacgaagtgagaggagcagagagcggacagagcggcagagacagatcaggagacaggctctggagctgccttggcctctgacactggtctagtaagttccagtccatgtgcaagactacaggaaacctaggagaaacttcatttttttgttttttgagatggagtctcactctgtcacccgggctggagtgcagtggcacgatctcggctcactgcaacctccgtctcccaggttcaagtgattctcctgcctcagcctcccgagtagctgggattacaggtgccagccaccacacccagctaatttttgtgtttttagtagagatggggtttcaccatgttggccagactggtctcgaactcttgacctcaggtggtccacctgccttggcctcccaaagtgctgggattacaggtgttgagccaccgcatccagccggaaacttcatttttttgagatagggtctcgcttgtcacccaggctggagtgtagtgtgatcgtagctcactgtgtccttgatctcttagggtcaagcaatcctcccgcctcagcctcctaagtagctgggactacaggcatgcaccatgatgcctggctaatattttttgttgttgtttatttatttttgtagagatggggggtctcactgtgttgcccaggctggtcttgaactcctgggctcaagtgatgctccagcctcagcctcccaaatagttaggattacaggcatgagccactgtgcctggccaaaaccttgcttttctgacagatctgattcaccctagctacagattctatagcacctgtttatttttatgcttctcatagtctggcatcactggctgttgataggtctctgtcattagatgataactccttgaggcttgttttatccatctcaataaccgtagcactcggccctgtaagggggaactttgtaggtgtccactgatgtttgaataaatatttgcatttatcacaattcttgtcccaagccttgacgcggaagctctggaataagcagcagcacagatttgagacttagtccatgtaccagccacatgcaaagaggtaagctgggtcaaagagacccagaaagggagtctgaaatggaaatcgtggggttgataaggcagcagtggaaacagaggctttacacaagtgtgggaaatggactaggaggacactctgttatttgatgtgtcctcgcttgtaacatggaggtgattatgacctacctcataggtgggggaaggagacccaaaggtgatggacccgaaagtgttttgtgaagggtaaaataaacacaggtgtacgagatcaatagagttgattgataagtctcatgcattattgccaatctacttgtgtgaccctggatcccgaccttagcatcccctttcatgtattcaggacagtgatcattgctttgctggactgctgtgaggaaatgagatgtaagcagaaaatatgcttaggccagcccctcctacctcacgaggaacacctggacagtttcctaaaaatacagattcctggcaccctagtcccgaaatcataattctctgggaatggagcctaggaatctgaatttaaaataagcacccctccaggtgattagaatggttcaagaaggctttaaaaaacactgaggccgggcgtggtggctcacacctgtaatcctaaccctttgggaagctgaggcaggaggatcgctttagcccaggagtttgagagccgcagtgaactatggtggtgccactgtactcctgtctgggtgacagagtgagatcctgtccccccaccccctgcaaaaaacaaaaaacaaaaaaagaaacagaaaaacaaaaaacatcgaggctgggcgcggtggctcacgcctataatcccagcactttgggaggcccaggtaggtggctcacgaggtcaggagatcgagaccatcctggctaacatggtgaaaccccatctctactaaaaaatacaaaaattagccgggcatggtggcatgcgcctgtagtcccagctactccagaggctgaggcaggagaatcgcttgaacccgggaggcggaggttgcagtgagccgagatcatgccactgcactccagtctgggcgccagagcgagacttggtctcaaaaaaattttttttaaaaaggaacatcaaaaggatctattaaggtgtcatcaggtgtgtgtgtatgtgtgcacgtgtgtgtttaggagagtaggatgggaagacggtactatcatctgtgaccacaaggtggcagcagggatagacaaggagaaacaagtctcccacccagaggggctgggcatgggcaaacctggcgatcaggttgtggaaggaggtgggtcctttacatgatctcctttgctagatggaatctctgtaccgcagggctaatcccctgtgaccacctgtctctttatcaggtctttatggagactgttttttgccactctgtcggcaagaaaggcattgtgagcttgggtggtgatagtgtgtgttccacatgggtgagaatgggaggcaaggggtgtgtcacatccccagatgtgttcatcagtcagggtcacctacacagggcagcttactcaaaggacaacagtgcctgctgaaagcagtgtctcccaccccctgctactagaattgtggttgcaggtgcctctcaggagacgcccacatctgtggctggggagttggccaaataccaggcaaaggacgctgggctggggcggggcaggggcaggaaacacaggatggggcagctgcctctggaagcagccaaaatgtccccagctgcagcaggggtgagcagaggattaggtgacagtcccctaacagcccggaactaacaccctcctccccctcacacaggcaccctggcatgccccctccaagcctgccagagctcagaataaccctgagaaccacgcagcaggatggcaagggctccgcttggggtcctgctcctcttggggcttctcggtacggacaggggctagaggggcaattggacacacacagatactgacatgaagggactgggaagacaaagacagagaccaagatggagacttagacacagtatttcgttcccaggcacagcataattggtttaggagacagatactgatagtacacagcctcagaggcctgtgaggacccaggggaggcagaggggagagaggtgctccagcctcttcattgccaatgacccttccttcttgaccccatcgcaggcaggggtgtggggaagaacgaggaactgcgtctttatcaccatctcttcaacaactatgacccaggaagccggccagtgcgggagcctgaggatactgtcaccatcagcctcaaggtcaccctgacgaatctcatctcactggtaagctacccccaccctcatcttaagccaaaaatcccacttctggccccaaccgctgagctctgtcctaaagctcacttctggccctgaaatctcacttcaatcatccccatctcccatctgcagaatgaaaaagaggagactctcaccactagcgtctggattggaatcgtgagtcaaatctggggaatggtgtgaggtcttgtccagggcaccccttttcccccaaacccctcccaggcagcgccaggtgggagatgcagggcacgcggccttccatcccccaccccttaggattggcaggattaccgactcaactacagcaaggacgactttgggggtatagaaaccctgcgagtcccttcagaactcgtgtggctgccagagattgtgctggaaaacaagtgagaaccgggccagacgccaggctggagggaagccggcctggggtgcgggctggacttggttggggaagggggtactctgagagggtgcagacctgtgcaaaaagctcggtttccccgagcccacagtattgatggccag

SEQ ID NO: 7524 - DNA, 6000 bp, Homo sapiens
ggtttcctgaagccacaaagcaacacgagttcactctggggttcaggtcaatcggcagctgggagccccagaggtccactcagtgtggactagttctgtaggttttgcctggaaagaaaaaagaaaaccagctatagacaaaatctcagtaaactacccattaaacgtctggctttgcttcacatccttccctggtatacctgtcatgacaaattacttgctaagtgttcaccagctgactaaatgggaatacgtgttgtatgaggcgtttatttataaaccaaccaacagcaaagagatgctttggttttacaatagttgatctttaacccttctttatgggaatgacaaatcagagggaaaagttgtattttgagatcaccgagtttcaaattataatgtcatctgtttattagcaaagaatgatttttcccctttaatgagcaggtggtggccatggcatgtacctagcacatgttaagtagcaaattagcattcgagctgagctgattgtagatctcagtttccttaactctcctgcctgttactctttgcagaggcaggaggctgcaccctgagcttctaaccctccccagaaaccaggctcaggactggccttaggttccccagggttagaagagggtccccctccttgcgtctcagagtagcaatttcagggtcatagaaagttaattaattcctgacttcattcataagtgaataaatttgccacagcagaaatatgggcatgtggtctaatagggggttaaactgcctgatttgcaaatgagtttgtctgaaaagttctttaatgtcttgtcatacacttcaccaaaaagaccataattatacacaattaggtcaatgcttacaaatctgggccaaattgacccactctaaaaccaatctctgttaccactagtgccaagcaaataggtattgtaaacctgattgaagaggggaatgcttaaccaactgaataacacaaaagcatttttaagaatgatagaatatctgatgcctttatgtaaaccatactgctaactgcgagtgagtattatcaattaaagagtgtttttaagaagatatgtggaaacgttttattagccatcaagttgaattgctacatgtgatagaaaatgttatagcagtatttcttaaagaatattctataattcagttcctgttcaagactgttgccatcatggtctgtgctattgaggtctcgttgaagcatttctattgagtttgtggaccacacccttcagactcagacacacttgggtttgacatttaagccctctgccacttttcagctgagggaccctgggcaagttagcttttttctctgtactcagctttctcatctgtaaaatgggcttggcaataccctcctctcagagttactgataatgtccgccaaatgtcaagcacagagccaagtgcccggctgtgaaatgcaccattagagctattctcttctagtccccccttcccaccctaaatcgcctcaccctcttggaaagctttagtcaagagctgcttcagaagaccttgagaagaccttaaggccatggacaggaagcagagtagtgtgaggagtgtgtttgacactggcctacaggaagggatggtgacactaacaggtaaacactgctctgggcaaatgatgtcttctagagctataaatggttctccaatcacctgtaagagagtgccaacatcaaaaacgaatgttctcttcgtagtcatcaagagaaagtgtcaattgctaagtgtctaaattgtaccagacactttataatctatatctcgtttcatttgcacaaaagttctgtgaggcaggcattctaagctccatcattttggaggtggggaaactgaagttcagagaagtttagtcacttcccccaaggtcacagagcatcacgttatgtttgtaatcctcaaaacaaacaaatggcgaagggtagaggtaagcagtcaaagagtctaaatgggaaaggagcaattagagcaactctgagacccatctcggcacacatgagaaaacatgtctgggacacgaactgagagaaaatatgatcctgtgaaaagaagaggcttcatggggaaaacagatctgggctgctggggaggagggcggaacacagcctgggagagggctggaggtggaaggaacatgaacagatatggagcagcatgatttccagctgggcagtgctaatcccaggaacccatgagccatgttgcttctctcgctatccacaccatggagcagggacttgtgtgtgtacctatctctctgcctcctcccccgctgatccttgagttatcaaaggcaggacatgtatctcatttacttttgtttccccaaaaccatacagtgcctggtatagagttagaggccaacatacctattaaacaggtggatgagctgaagattagcagattaatccaggaagtcttcctgtaggagagggcctggagctggggaaaaaaaaaaaggacaacagagatgtggtgtggtagaaaaaaaggcatagagatgtttaatacaagtgaggaactgatgtgtgtgtgtgtgtgtgtgtgtgtgtgtgtgtaatcagggacaaagcatagaaaggactgctcctttcctaaatttgggaagaagtgttccggatctgctttaacaacttgcattttggagacaaatatgcctgagttcaagtcccacctctgacaccactaactgtaacttggacacagcactttacttttgtgagccccagcttcctcacctgtacaatagggataataacaagaacatgtacctgtcaagatagttaagagggataagtaagatgatatgacaccctcacacaggtcctgacacatggtagacctttgttaattttggtcctcctgctttaaaaacctgtgtcctatcctaggagtccaggacctcttggttaacgaatatgtgaagtttatcaatctttgccattgtgcttgcttgtgatgcttctgttctctgagctcccaggatcaataaaccactgatttaatgctacaggttgcttcagagtgcacctggatgtttttgtcagtggacctagtttagcaggggtccagatggaatgaaaacatatttcagagtagagctaaacctagagggacgtgccctcagctgccttcttttccaacattgtccaaggagtatgatttaagcctggaaagccctgaagatgagagcttggctcatcaaggtgactccatgtggctctgccccagcttggcagtgtggcttgggatggccactcagactttctgttcccttccttctgatgggaatttagcaccattgattcagtaggttctagccatttgagctctggcatgggccaatagggcgagccacactcacctgctagcaggagctgactgccagtggagtttcaggaaaaaagaggtaggcagcggaaaggctaattctttgctcccacctatagttccggctgtacttccatctgacaaatccaggatcagaatacacacacacacacacacacacacacacacacacactgcccaaatgtacttccatctgacaaatccaggatcagaatacacacacacacacacacacacacacacacacacacacacacacacactgcccaaatggaatggtatgcagccagtcccacctggagtcccagttgcctttctctttcaaatacagactctcccgacagctatgtggcggtgggggaggcgactacttgttgctccttctctgaggctccaggggcaacttggcttttctgtctcaggaggggctcctggctgctctcctagaatgccccctcgctgtctgcatcagaggcactgtgggtttggatcgcccccttccttctgcatttttagcattctcccctctggagatcccaggctgggtctaacctgggatccctgacattgatgcaaaggaatgccgcctccaacctcacacctggctcctaggagtttagcactgtcttcctgccacctggggggcggggtgtcatgtcaaccctcgaagaagcccccactagctaccttcaaaaaaggctaaaaagaaaacttggagaaagtccccagcccccaccagcccttctcccccgccctgcccttccccccaaggcagcctagcagggacagggagctggggcgggggaagcaggcaggctttgtgacctgggggttgtcccttttttcccaggaggcgaggagagaatggatcccggtctgagctccccgcttccgtccccagtctccagataccggtcctcgcctctccgcgccgcgcgctgcctcctctccccggtgctagcagcggccgctggcatttggaattctgcccacaaaagggggcctggaggaggaggagaggagggacggaggccggcggcgagaaacggcattcggagtccaaaacatcatgggaaaaggaaccgagcggcggcggctctgaaggctgtgccgctgcgcccgaccgcagtgcatcagcgtggccgccctgacatcccccaggatggttaacatggggcattatgcgctggttaacaggctccgagctgctcagcgacttgttttaagcattttctctctcgctctcgcttttaatcttgtctctagtggcgtgtgtaggggggaggactttatttccattggctaagctctcccttcccacccacatctcttccacatcaccttggtgtctccctaaataaaaccagccctccttatcgcctggaaaaaatcaagagctagagtttgaatgggttttatataaacactcacccctgtcagcgtgcggctgggctctcaggataaactcacagcatctggcgcgatgcttgccttgcgttctctcccctgaacgtcaaggtttaagcagagcccgaggactgggagctcttctctgaaattcgatcaacctgaagccagttgcggaactgcacggggtcccgatggacctcaaggaaagccccagtgagggcagcctgcaaccttctagcatccagatctttgccaacacctccaccctccatggcatccgccacatcttcgtgtatgggccgctgaccatccggcgtgtgctgtgggcagtggccttcgtgggctctctgggcctgctgctggtggagagctctgagagggtgtcctactacttctcctaccagcatgtcactaaggtggacgaagtggtggctcaaagcctggtcttcccagctgtgaccctctgtaacctgaatggcttccggttctccaggctcaccaccaatgacctgtaccatgctggggagctgctggccctgctggatgtcaacctgcagatcccggacccccatctggctgacccctccgtgctggaggccctgcggcagaaggccaacttcaagcactacaaacccaagcagttcagcatgctggagttcctgcaccgtgtgggccatgacctgaaggatatgatgctctactgcaagttcaaagggcaggagtgcggccaccaagacttcaccacagtgagtacttggttttcagctcactctgtctggtcctctggagaagtggtgcgccggtggtctcctgcttggtttggggtttccttgtgctttgggacaggagagagagcagtgcctcacctgaaggccacgagggtagttggtcagagttgtgcgagctggttgcagggaaggctaccggccaggatagagcactgctgtcagatcaaatatggagggtgagtggggggcttgcggtgggggatcacttccccagacgtgctcagttggcttcctcccagtcagagggaggaggcctgggctgtccgttgtccggtccgcttggtgtccgagctgtgtgattggaacagcttgtcattgacgaggtggcattctgtgtgtgtgtgcgtgtgcgtgtgcgtgtgtgtctctctctgctcggaagtggcatcaggcactgcatcct

SEQ ID NO: 7525 - DNA, 6000 bp, Homo sapiens
gactattgtggtatggacccagggagatggaaaaatgtcaaatataggagtatgtgggagatgatattaatagaactttggacaggcttggtgtggaaggtgaagaaaaaggagaattcagggagataccttaattttttatttgagcagccaatagcagtgatgccgtttcctgggttgaagggtggaacagtggaagatgcaaacgtctgattgcagttgggagggtgtgagccatcccggtggagccgtctgggggcagttgaatataccagcctggacgtcaagggaaacgtttatcacattcccatgacattactattattttattcatgaacttattattttataattaatttattattttattgtatttattgatttttagagacacggtcttgctctatcgccgaggctgtagtgcagtagtgcaatcacagctcactgcagactccacttccgtgggttcaagtgatcctcctgcctcagcctcccgaatagctgggactataggcacacaccaccgcacccagctaattattttgttttttgtggagacagggtctcactatgttgcccagactggtctccaattcctaggctcaaacgatcctcccactttggccttccaaagcactgggattacaggcgtgagccaccgtgcctggccccatgacattatttatggtcataggaatgatgccaccctgaaccagctcgaaccctgaaaaacattagagattggggacagaaatcaggacaagcagaggaaagtgatacggagcagccagggatgtggaagggaaacagcaagcagcttccatggaggctgtgagaatcaggtgcttccagaaaggggctgtggccaactgggctgcatgcttctgagaggctctgggagctgaggacagaagcgtgttcactggacttggcagcagggagggtgttagtgacttgacaaaagtagtttcagttgaaggggaaacggaagccaggttggaatggattggagagagaatgaaaggtaaggaagtcaagacagctggtgtagacactttccaagaagttttactgtgaagaggaaagaaaaatagggcaatagatgcagggaggtgtggggccaggagaatagttttgtcaccactgccattgtttttaaagtgggggacactagagtctgttcacagatggggagaggtggatgggcagtagagagagggcacctggagaggtctttgagaagcaagaggggctggggtcctgagccccaggaaagcctgacccttgcttcttattattattctaacaggatagaggaagacggggtgggatggggagatggttctgtggatttgacagtgtgtgtgtagtggttcttccttcctcagggaagaccatcagctgggaggctcatggggaggagcgcggaggtctgaggaaagaggagaaggcatgaaatagttgttttcaaaaagtggaaaagtgagcctaccagaaaaatccacactacagggctggcaggattgaggacaaacccagaatatgtgaccatgaatttacggtgagctcagcctagtcataccatttccccagccacatttctccagctcggggctgactttggaaaaccagagctggggacatgcagttaggggttccccaggactgtgtgatagaaggagagagatccctccttctgggatctctccctgggagctgtggaggagggaccagaatgatgatcttctaagtaagcctagatgaggagggacatgaagtcagaagcaggtggaaagggagaaagtgcagggtcaaagaactgaaagtgcccaaagattatagcaaccgggcccctgagccaggagctgagaaggtggcaggggcaaaggaagagtttgaagtggtgatttcagaggagatatggtttctggttatgatttaggttcagggtatgcttaaaggagaaaagagctaaggtagagtgtccctgtgattcactcacttattcatttgataaacttttattgagctggtgacacaaacaaggggagagttccacccagccagggtacccagggagggcttcctggaggaggtggttcttgtgtgggttgagtctagaaagatgaatggaagctctccagggagacaaagaagatgggtgctctgggaggagagcaaaccacaagcaaaggcatgggggttagggcaggggggtggaaaacagcttggcccatttgtgaaaatggaggtagcatggccagaggatgcgggaagggtaggcaatgaggcagggatctgatcatggagggccttgggagccctgggtagggcttaggacgtactcctaagcagtggaaagccattgaagatttaagcagggggtgaaatttgtgactttacaaatatttatggcagtctaggggagagcctggtgggaggtgtttctttggttggtttttgagacagggtctcactctgtcacccaggctggaggacagtggcaccatcatggctcactgcagcctcgaactcctgagcttaagggatcctcctgccttcgtagctgggactacaggagcatgtcaccacgcggggaggttatttgaacagaacaggtgaggggtggagggtggagagggcagtgacactggagagggagcatcagtagggtgtggaactggccagatctaccaccatgatgcttcgggcagccaccaaccaaagccagcttcagcaagtggaaccagtgaggacattcctcccctcacattacaaaacagccagacctcaggggtaatggaggagtaggagaagaggaaattaggaggaagtgaacattttgaagggagaggtgtacgctgtgcaaagaaaacaggctgcagagcaggccccagagaagaagcatcttccaggggcagggaaggggcaggtcccagagcagagctggggagagtggccggacgcacaggtgatgtcctgctcccaagaagaaaggcggtgtgcggtgtgggaagctcaggagggccagcggggaagaaaacactggatctgtcccctggggagctctggtgactcaggtgagagtcatttcctcgagtgctggggttgggagccagactatgtgtctgtgggcttttgtggccctacttgggctcgtgtaatgaaaagagtgagcagtatcaggacaggaggatcatcacagcagggactgcagactgggtgggtgcacagcagccctggggtctcttcaaggccatctggctggttggcgccttctgtgtagtgacaagcagcatgtgggggtgtacgtggagtgggtgatggggaggaaggtggcaaggtatatgacagagctgtgagatgcaactgggaaggtctgcatgtggggtggctccaggccgggtgtgcgtgcatgtgcctgtgtgtgcaagtgtgtgcacatgcacgcccacgctcacgacaggggccagtgagcagctgagggcagggttggcaggaataagcagagtcatccccgtggaaacacgactccctgggtgctgtaaggagcagctgggagccaggcacaagggcgtggccagctctgcccagtggctctggcctctccctggccaccctccccacctgttgagcaagcctgagaagcgcccgtgctgaccagggcaggggcgctgctgcaagggtcaaggcccactgggagaggtccaccctcaggtgtggctttgggggtctctaggggtctgtccaggtccctgtggtgcaggggtggctccaggtctgtccatgtgggtctggcagtggctgcctgcagctggtctgcaggggtctcactgcaactgcctgctgatgtggtcattcccccagggccatttgcaataagtgatcccccttcccttccacaggaataggctctggagggctgggcagaaggggagaggggccaggtggggcccagaccacacaatgctcacaggcatcaaaggctccttgtggatgccccttcccccaatccagcttgtgctgggaccaccagccaaaagcagtccccaggagctctagccctgcccccaccattggagttgtccatctccttgtccctgtgaccttccctgtacgtcttctcttccacgttagcacctgcagctctccagatgcaatgttcctctcccagttcaccctgcctgcccagtgggctagagcccccagggctgtgggagggaactgctaggagacccctgccgggcccagggccctttcttcttccctctcccagcccaacaccaagtaccccaaagatcaggaaagaggaatccacacccacccccatctttcttttcccttccctccaggccagggatggcaaacacaggcagaggcaccacggtcttcctccttgcgcccctggcagacatcactaatcaatcacagcaacctttttgcacagagcctggctgccaccttcatggtctccacctacatctccaggtggccaatatcaggatccacgtcggccctcagggtgaagtccctgtgccagtcccactttgatctaaccccccaaccaggcccctcatcctggcctatccagaggtcgcctgagcacagccagctgtggttctctctctgtcccattaggctgaagccacacagttcccggagcttgggcccaggaggcagtcgaaggcactggggtgttgaccccaagtcccaaggccacaaagaatctggttggtttgccgtcggtcctgagggcagccgctgccacttctggggaaagtgtggtgggggggccaggggtgatgctctgtgcccagcacctgtgcagcagcagcaccttgcaggcacatctcccagtcctgatagagtctgcacgcccacctccccggctcggccactgggcaagcaggaggtgaggagtggacggcccgcccagggaggggcggccgcccagcaccccggggctgcgcactgcagctccccaggccacccaccacccttctggtctctgagcccaggatgcgaggatggccagaccatctctgtgcaccctggtgcctctgggccctgagtgcttgcgccccttcacccgggagtcactggcagccatagaacagcgggcggtggaggaggaggcccggctgcagcggaataagcagatggagattgaggagcccgaacggaagccacgaagtgacttggaggctggcaagaacctacccatgatctacggagaccccccgccggaggtcatcggcatccccctggaggacctggatccctactacagcaataagaaggtctgggcctgggaaggcttcctctgtctgtctgccatccatccatctgtctgcctgtctgtctgtccctgggtctcacagcctctctcccaccttagaccttcatcgtactcaacaagggcaaggccatcttccgcttctccgccacacctgctctctacctgctgagccccttcagcgtagtcaggcgcggggccatcaaggtgctcatccatgcatatcctgcccaagatgggagaggcgggaggggttagggatgggcgagatggggtgctgtggcccaggagaccctctatcacctcccatcctagctgcttcctcactttccttgaccctgccccacgctgttcagcatgttcatcatgatcaccatcttgaccaactgcgtattcatgaccatgagtgacccgcctccctggtccaagaatgtggagtaagtctccctgctccctgagctccccagccctgggacacagcccatctcaggtgtttgcacctctgtgtggtgctgctcttgtctttcagggagacacactgtcattgtgaccctcatccacaccttgagtccctggggtggccatgctatcactcgctagtgtccttagccacctgagtggcatatttcatttctgtgtccctcccttctgggggtctgtcgttgccacactgacccctacccaggtgacatgcctgtcccggc

SEQ ID NO: 7526 - DNA, 6000 bp, Homo sapiens
tgtggctagtgggccggcgtggacccctgcaagtggccttcaccattaaggtgctggggccagagtgggaggagccagggttccaggtggagggggcctctccttaaggggttggggtggggcagagcccctgggagtagctgctgcctgggatggaagaaggggagcagtcagggccccgggggccctgtgcctttggggaggaggcgggtggtggtctctcctgcctgggctggaccctggggtgggctcaggtggactgtgttctgggcctgacctcctcccccattccctgctcccaccttcaaggagcttcgggagatgattcagttaccgggagcccggcccattttggatcctgtggatttcttgggtctccaggacaagatcaagggtgaggggccctggcctggccccccaactactagggagagggtggcctaggtcagagagggattggggaagggcatgcagggagagggccggggcccagggacagcctggagacattctacgttgctgacagaggtcccccgcccgaggaagcggctgacggaactgctgcttcgaacggccacagagaagccagggccggcggaagctgcccgccaggcatcggcctcccgtgcctggggcctccgctttttccgaagcccccagcaggtgctgccctcaccagatgggcggcgggcagcaggtgtccgcctagcagtcactagactggaggtgagtctcatgtttctcaaagacacccccttcccaggcctctgccacccgcctggtgttgcccacactctccccaacagggtgtcgatgaggccacccgtgcagtgcccacgggagacatggaagacctcccttgtgggctggtgctcagcagcattgggtataagagccgccctgtcgacccaagcgtgccctttgactccaagcttggggtcatccccaatgtggagggccgggttatggatgtgccaggtgagagggtgtgaggaggctgggtgctgaattatggtgagaggccgagaagctggtatctcctggggccatgcgttcattcatctagcaacatgtactgagaagcttctgcagggcaggccctctctaggacccagtgccgccctcctcttggccctgagagaagttccagtctggctaggacatatgtgacatacgtcgggtcattaagtcattcaacaaacgtttactgaggtcttttctgggttaggccctgtgcttagtgctgggattggagattaataaggcagcctgtgtcctcagggagcgtccagttttactaagtgcccacatacctatctagtgattaattcacttggtaaacatttaccaagggcctactgaaactgcaggggagcaagcctcagctcctaagcttagggatcccctcatctacagggaaactgaggtgtaagggggtcggcctggtaaaaacagggagagaagaatccagggcagtggaccagcggccacagcaggctcagccgacagtctgccaagaggcgtggggtgtctgtgtgcgtgcacgtgggtgtagattgtgggcacaggatggccagggtggtatccagccacctccctcccttccccttttgttaccccctctcaggcctctactgcagcggctgggtgaagagaggacctacaggtgtcatagccacaaccatgactgacagcttcctcaccggccagatgctgctgcaggacctgaaggctgggttgctcccctctggccccaggcctggctacgcagccatccaggccctgctcagcagccgaggtctgggccccgatgctgaggtcctgggaggtggggtgggtggtccttctctgggcctcactctttgggagggggctgttctgggaggggtgaaggaggaggtgttgacaatctcccctttgcttcaggggtccggccagtctctttctcagactgggagaagctggatgccgaggaggtggcccggggccagggcacggggaagcccagggagaagctggtggatcctcaggagatgctgcgcctcctgggccactgagcccagccccagccccggcccccagcagggaagggatgagtgttgggaggggaagggctgggtccgtctgagtgggactttgcacctctgctgatcccggccggccctggcttggaggcttggctgctcttccagcgtctctcctccctcctggggaaggtcgcccttgcgcgcaaggttttagctttcagcaactgaggtaaccttagggacaggtggaggtgtgggccgatctaaccccttacccatctctctactgctggactgtggagggtcaccaggttgggaacatgctggaaataaaacagctgcaaccaagagccatggttgatgggggactttttttggaagggttggggtcgggggtcaccttctggccgtagctcccctaccatcaccaggtggcgctgcagagacggctccctgctcaggggcctcattggggcttgatggggctcggcagccaggcctggcatagccacccttcctttctccgctcggccctgctgtggctgcgggttgcctgtcttctgtccacactagggctgcccgggaccgggaccgggaccacccctccctggggagccctcagtacaatcaaaacagaaaagaaatgggagcgggggactgagaagcagcttgtcccctgtacctctgggtgccccaggcgagtctagcctggggcccattctttggctctcaaagccttcctgcttccgtttccagtcagacacactggcctttaaaaatagtgcctcagtctccctagggctttgcagtgtccagagagtggtcactcccttttatggcagccctcaagatgctgcctcgctgtataacctgaggggtcctcgaaattggcccaaggtcacacactcgtgagctgcgggctcaaacccaggctccgggcaggctggtgtgtcctccgaggcgcacttgccccgagtgtcaggtctggggacgcggttccggagaggggagaggggcccgggaatgcggcgggaggggcctcgaggggcagcgggccgggccgggccggggcggaggtggcgggccccggcggggcgggccctcgcgggcggcggtgagagctcccgcacagtcggctgcgagctctgggagcaggaggcgcggtgcgcagcccagcccgggacggagccgggcgccgtgcgagcctcgggagggtcgcggggcgcaggggcgggtcggggccagcggaccaggccgcgccacccgcccccgcccccgccccgccgcgcccgggctccggcgcccgcggagctgagactgagcgcgccagccctccggggccgaggctctgggacagacaccgcgagggaggcggccggcgcgggctctcgtcgcgggcgcagcgccccttcccctcggtaagtggcgagcggcgggcgaggggcaccaacttcgccgccaacttggggctgggttcccgcggcgcgcgagcaaggacggcggagacagaggcgggacacccggggggttggacccacgcaggactctcggggctcaaggagggggcggctggaggacccggaccctcaagaacctggccttgggttttgacccgggcggccggagagaaggcgaagaagaggccgagcagacaggcgcgcggcggacgcgagagaaggacgcgggcgaagcgtccaagacgttcgtccccagggtcgccgagccctcctcctccttcgcttggcgcggcagcaccgcgggaccaggggagtctgggctgccgcggacccaaactgttgctgctggaagccgccggggcggagagcggggaacagggccgggagtgggggccggggctgggatccaccagagcgaggggttggaaaggagtcgagaaggtgaaagggggctgtgcggctccccagcccagtgccccagtttccctaggtctgctgggcacctgctgcgcactcgcctcggcgcccagaccccttcccccgccgcgagtcccgcttcttccccttccagctctgccccatctcctttgccccagcctagctctctccttcctgcgacctgggagaatcggagtgggcttccagagtagtggcatcttgcagatgctggcccgtgcccggctcccgggcttccagagcgcaaagggaagggtaggcagagagggcactgggcgagcaagacctggcgctgggccctggctgcgcaccagccgcctgcgccggtctctgggggcttcgcccaggatccccgacggcggggaggggaagccccgagtctcctgtttcctgcctacgcgggcagggcggggacacgcggagcaaaggcacccggcaacctgaacccccaggtgcgtcccgcgaccctgcaaggagctgctgggtgagcaagacgggaattcccgccaggccctgatgcccaccccattcgtccactcggtttcccagccctggtcgtccaaggggacttctggctcggtcccccagccctcggatggtggcgttatcttagttcagtccctgaccccgggccacaggaaaatcgaggaaagacacttatttggggagggtaccattccgctggctgtatttcagagcccgtccaggtcttggcggtgctagtgactttgagcctgtttctaaactcccgaagaataagagcgtgccaggggcaggtaggcaggtccgggacacctgggttcgcccagggcccccgggcgggcctgggatggtactggggccgcctgccaggctggcttggtccccccactgcgggactcggggtcacgacccagcttgggggagtgggggtgggggccccggagccgcggacgccggcggggggcagcgtggggcggggggcgccgggtgcgtggtgctcagcttggccgccaggaggcgtggcgcgggtccccgcccggagccgccgccgccgccgccgccgccgcatcgcgagtgtccttgagccgcgggtgacggtggctctcgctgctcgcgccccctcctcccgcggggggagcctgatgccacgttccctatgaattatttatcgccggcctaaaaataccccgaacttcacagcccgagtgtaagagattgctgcggaggggagggggcggggcgtcccggtggccagggggagtccgggcggggtccgcggagacgggggccgtagccttggaggagcaagaactccgtgcccccagcagtggggcaagctagaacggcggtcctctcccctggcgcctgggttcgggttttggctgggcaaaagggagggagggaaacccgacggcaaaggaggggcggctcaccggaagggcagggggtccgggggttctgctggtgggtggggaggactcctgcgacagagtttcctagcctgggagagggagagccatcggtatctcagatgtgagcgggtatgagtgcgggagtgtgcatgtgtgtgcaggtccgtgccagggggtctggctgagctgtgaggacccgggaaggagaaggcccccagcctgggaaggtgctcagacccttctagatgctgctgtgtcctgcaggactgaccactgccatcctctctggggctctttggggatctctgtgtttgtcaaacattagtttaagggctgtttgtggaaggggtgagaccctgagtgggtgggtgggcagaggtctctgagacaatgtgtctgccctcaaggagcccgcagtccagtgtggggcagggtgttaatgagtgcacacacacctgccgcagggcagaatggaggggtggaggggaccactacacagagctccccacccaggaggggaagccagggcagggggaagaagggcaggtgccccagcctggccgcagtccctgcgcctagagcctgaggcatcaaggcaggtgcctgtgggagagggatttcagctgggccctgaaggagagtagacttctgttgggatgaggacat

SEQ ID NO: 7527 - DNA, 6000 bp, Homo sapiens
agtgttccggcatccacaggttactccacaaggcccatgcgggagccccactccttcgggccacagtgcggctccaatacagagcgcatcacaccggcccctcttccttccctgtcctggcttcctctcttagcttctggctttgtcactgggtaccaggcctgggcccaagcctctggggtgccagttggacccaggcgggcctagcccctctgtgtcctagtctggccagaattgggggatacccagaatttgttggcttggttggaagaagtgtggggtcaaggctgctgagggtgggggagccagtgaagactaggcagagaaacggtcatgaggccttagcaagtatctaaggccctcgccccccacctcagtgtggtggaagggaggtgacatgggagaggttgtccaggccaaagtgtcacaagtgtcactagagaagggaggtggctggagtgatgagggccttgaaatgaaacctaaggaagaaggaatggtgacgaggcagagtcctgccagggccaggtcaaggctacatggcggttacatggccgcagctgccctgcctcctgggccagcacctctgcacgggcccccatgccagccttgcctcccagtgtcttcaggagcagcagcagctccccaggccactgcccccctgcacagggcctgaccctccccctctggccctccaggagccttggtgttcacttctccaaagtccggtctctgacccttgactcatgggagccagaactagtgaaggtaacttagcgtattgtgaagattgggggcaagaacttggggtggggcaaggacatggcggtgcaggggcgtgatccctgaggagtcactcacccccaccttccctgtctctgcctctgcctgggcctcctgaagctcatgtgtgagctgggaaatgtcatcatcaaccagatctatgaggcccgcgtggaggccatggcagtgaagaaaccagggcccagctgctcccggtgagcttggggtttagcctcccaggggaatgggggacccctggagcagaagagggaagactgcgtgcttctcccctcccacaggcaggagaaggaggcctggattcacgctaaatacgtggagaagaagttcctgaccaagctgcctgagattcgagggcgaagaggtggccgggggcgcccaagggggcagcctcctgtgcccccaaagccttccatcaggccccggccagggagcttgagatccaagccaggtatagggttggttgggcattcattgagcatctgctgtgtgctcggcatcgtgccaggtagcgccgggaggcacagagtgtgaagcccaggccttccgctggacaatgtcggagggaccggactgccgtttcaggggttacggtggagtgtgacattaagaatgagaaggaatgtggggctgggcgtgggcagggagggtaaggggtgccaacagcacaagaaaaggagagagagagggggtgggtttggctggagcgtcaggggttgagagctgaggccaagtgtggttggaccagatgaggtgatgatgccgtctctcccccacaccctagggactcgtacacatgcatacgcatacttacacatacccacacttgcatcactctattccctccacagtcccaagctccccatcatttagaagagacctgtcccattatagcattgggacactgctgagggttttcttcccagactcggagctgcttccccctaacagaaccaaatcccccgaacagagcccccctctgaggacctgggaagcctgcaccctggggccctactgtttcgagcgtctgggcatcctccatctcttcccaccatggctgatgcccttgcccatggagctgatgtcaactgggtcaatgggggccaagataatgccacaccgctgatccaggccacagctgctgtaagagccctgctgacctctccaccccaccctagggctctgacacctactcctgactctgggccctgcccttacctcctttccccaccacctgttccctagggcttccacccatagggagagatcaacaatagagactggttgctaagagtgtgtgatttggaggcagagaacctgagtttgaacccaggctctcacctcttacaggagacttttttttttttttttgagacagtctcgctctgtcccccaggctggagtgcaatggtgcgatctcggctcactgcaagctccgcctcccgggttcacaccattctcctgcctcagctgcctgagtagctgggactacaggcgccagccagcatgcccggctaattttttgtattgttagtagagatagggtttcaccgtgttagccaggatggtctggatctcctgaccttgtgatccacccgcctcggcctcccaaagtgctgggattactggcgtgagccactgtgcccggcctacaggagacttttaacaagttattaacctctcagcctcatctgtaaaatagtaacatacctcaaaagcttgtactatggatttatatatgaatacatgcaaagagctagagccaagcctagcttggttacagttagctgtaaccccttccacactcctgattaccacactccaccctcccattctctgaactggcgccaccctaagacatcttgaaatccaccactagggatgccaccctcaaccccccttctcgacttctccatgcagaattctcttctggcctgtgagtttctcctccagaacggggcgaacgtgaaccaagcggacagtgcgggccggggcccgctgcaccacgcaaccattcttggccacacggggtagggatgatggcatggggaggaaggctgggagaagttgggcggccggctgaccctggctcttctctccaggctcgcctgcctgttcctgaaacggggagctgatctgggggctcgagactctgaaggcagggaccctctgaccatcgccatggaaacagccaacgctgacatcgtcaccctgtaagaatgcctgaaggggcggggctggcgctgggactccccccacccccgcccacccacgttcgggcgggcgggcggggctgacgccgaaacagaagcctgtgctgtggggcctcggaaaggggctgggccagcgccggggccaggctcgagaaaggctgcgcgaagtgtgcactgggacgtggagtagaaggcaggcgggagggcgggcagggtgcaaggatgcttggcccaccctgagaggcgtaattcgcccatcaacattgctgtcaggcatctttttagcactagacgtgaccccgggggtgggggcagatgaacggaacgcaacccagctcaaaggatgggaagttgtgggggaggtgaggatagtctttttttttttttttgagacggagtctcactctgtcgcccaggctagagtgcaggggcgcgatctcggctcactgcaacccccgcctcccgggttcaagcgattctcctgtctcagcctcccctgagtagctgggactacaggcgtgcgccaccacccccggctaattttttgtatttttagtagagacggggtttcaccatgttggccaggacggtctcgatctcctgacctcgtgatccgcctgcctcggcctcccaaagtgttgggattacaggcgtgagccaccgcgcccggccaaagatagtgtcgttcatttcttaattccctcctcttcaggctacgactggcaaagatgagggaggctgaagcggcccaggggcaggcaggtaaagaatacacccaccccaccccccaggcccaacacctgaactctgggcttctggtccacggtgacctctctccctagtgcccagctgcattcattccgttatttaacaaatgcgtattgggcgcatgcgacgtgccaggccctggcaaggcataggtgctggcgcagtgcccgcggcgcgcacgttcccacccaggctcggagcgcgaggtccccaggtgggccccaaccgccggatcctgcccttctgcactggggcccagccgcctcccggcctttcctccctcccccaggagatgagacgtatcttgacatcttccgcgacttctccctcatggcgtcagacgacccggagaagctgagccgtcgcagtcatgacctccacacgctgtgacccgaggcccacggggcccgcgcctgcctcccttccccgccaccgggccctctgccattaaagcctccgtgcttcgctcttcccttctggttcacttcttgggcgccaccttcgggcccgtagggtgttgggcgctgcggctcccgaggtgcggggagcagctgggggtttgcgagctccagtccagcaaggtgcgactccggggagcgaggcggcagcttcggccgcggcctgagcgcagggcgctgcggggcgggggctctcgggctggggcgacgtggccagcccagtcctgccgaggggtggggctggccctggggctcgctggccccgcgccgccgcggagagagcgcgcccgggccaccccggctggaaggcatccccggaatgcggcggctcagcacccgccccctcgggaattccccgggggagccgctgggagggactcggctcccgggctgggccggccgggcctcgggctctgagcggtgggattagaggctccagccccgccgacttgcagacgtgagatcgggcacacctgagcggcggcggggcggtcgtggccacatccggggcgacgtgcctgagtcaccccgtcccgccagcgtctgccagtccagccagtccgcccagtctctcgcgtccgagactcgcctccagcctcccacctccgcccgggccgcgcgagcctcgcgggggcgggggcggggcgccaaggggcggggctgtctcttaaagggccccgggccgctgcccttaggccacttcctgggggcggagaggacctcagcggctgcggcgacacccagggaaggcggcgcggccgggtcccgaaactcctggctgtttccatcagagccctcggacactcccagcccgggctgagcacgcatcgtcgctccccggcggatacaagggggctccgccatccgctcccgtcagttcggcctccatctcctgggacccgcgccggcagccaggccaggcctctgagtggccccagagccctggctggactcgtccacggcggcagcgatctgcccggggtctcggaggccatcccttcagagtcggccctgtgctcgccaccgtcacctgctggttggattccggaaacccactgtctgaagaccacagaggggtgtcgctgaccaccccaaatcggatacgtccagacctcaagctcccttcccctctctggctgccctctgctcttttcatctcttctctcaaccttttggggatttctgtgtcctgacaccacctccccatccaccaccaaagtagccggggtgagccccaaaccttactgggtgtgctccacctgtgcctccaacccagcgaatctgacagcttcgacccaattctgcacacacccaggaagttctgccttttcttttctttcggtgtctcctgtacttcccaaaatttctcctcctcctgtgccctcttcgcccccctcctttgggggccccgtgaccctgaatgtggggggcacactatattccaccactttggagaccctgacccgcttcccagactctatgctgggggccatgtttagggccggcacccccatgccccccaacctcaattcccaaggaggcggccactacttcatcgaccgggatggcaaggccttccggcacatcctcaatttcctgaggctgggccgcctggacctgccccgtgggtacggagagacagcgctgctcagggcagaggctgacttctaccagatccggcccctcctggacgcgctgcgggaactggaggcctctcaggggacccctgcacccacagctgccctgctccacgcagatgt

SEQ ID NO: 7528 - DNA, 6000 bp, Homo sapiens
tttggatatttcatataaatggaatcacgcagattacttcttgacctttcagctaaaatcaagtgtagtatctgttcttatcagtttgacgtgtcccttatctgaggatgtaataaaaataaaaataaataaatggaatcatgcagtgtgtgatttttgtgactgacttctttcatttaacctaatttttcaagtttcttccatgctatagtgtacatcagtacttaatttctctttttgtggccaaataatattccattaaatggatatgccacattttatgtatccattcgtcatcagttaatcatcatttggggtgtttctatttggttattatgaataatgctgctgtaaacattcatgtacaagtgtgtatggacatatgtttccatttctttgagtacatacctaggagtggaattgctgggtcgtatggtaactatgtttattttatttttttttttttgagacagagtctcactctgttgcccaggctggagtgcagcggtggcactatctcggctcactgcaagctccgcctcccaggtttatgctattctcccgcctcagcctcccaagtagctgggactacaggcgcccgccaccacgcccggctaatttttttttgtatttttagtagaaacagggtttcaccatgttagccaggatggtctcgatctcctgacctcgtgatccacccgccttggcctcccaaaatgttgggattacaggtgtgagccaccgcgcctggcccttttttttttttttttttttgagacagccttgctctgttgtccaggctgcagtgcaatggcaggatctcagctcactgcaacctccaccatccaggttcaagcaattctcctgcctcagcctccccagtagctgggattataggcatgtgccaccatgccctgctaatttttttttttttttttttttttgagacagactcttgctctgtcgcccaggctggagtgcaatggggcgatctcagctcactgcaacctctgcctcccgggttcaagtgattctccttcctcagcctctggagtaactgggattacaggcgtccaccaccatgcctggctaatttttgcatttttagtagaaacaaggttttgccatgttggccaggctgctctcgaactcctgacctcaggtgatgcgcctgcctcggctgcccaaagtgctgggattacaggcctgagccaccgcacccggcctaattttttcatttttgatagaggagggttttcgccatgttggccaggctggtctcaaatgcctgacctcagatgatccactcacctcggcctcccaacatgctgggattacaggagtgaaccaccgcgcccagctctctatgtttaatcttttgaggagcagccggactgttttccaaagtagttgcaccattttacaatctcccaggagtgtaggacaggtccaatttctccacacccttgccaacactttgttgttacatgtctttttataatagctatgttagtagtgtgaagtgggaccacattgtgcttttgatttgcctttccctgatggctacaatccaaggcctttttgtaaccagaatttgcaattaaggttatctgtctacccaattgtcattttcaccggatgtggtgatggctctggaggacttcaggttgtccacttttcacttttttctcaacagcacagcagtgccctctgcactatgattataagccatcctgtcattcaaagccttcttgagcaccacttggatgccaggcactgtgctggttgctggggatacagcaacaaagcaagatctcaccccttggaaagtatggtggtaagcctgtggccctggacttgaatccttgctttctcacctcccagccttgtggccttggccttacccatgctcagttttcttgtctgtgaaataaggttgctctgggagttacatgttgagcgcttagcacagtgtctggtgcatagtgagtgctccgtaagtattttttattgttaaaggtgaaggcggggacagtggctcatgcctgtaatctcagcactttgggaggcggaggtggccggatcacttgaggtcaggagttcgagaccagcctggccaacatggtgaaaccctgtctctactaaaaatacaaaagttagccgggtgtcgtggcgcgtgcctgtaatcctagctactggggaggctgaggcaggagaatcacttgaatctgggaggtggaggttgcagtgagccaagatcatgccactgcgctccagcctgggcaacagaatgagactccgtctcaaaaaaaaaaaaaaagtgaagccagacaatataataaatattacagtaacggataatgagatgtgggggaagtacagagtgtcatgggagcacatagtggcgatccccagcccagtccagggtctaggaaaggctatctaaaggaagtgatgcttaaattgagagatgatggatgagcaggagttggctagatcagatcaagagcagtgtgtgtgtgtgtgtgtgtgtgtgtgtgtgttcctggcaggtggaacagaagaggcatggcatactggggagactgaaatgtgttcagaatgtctagagcagtgctgtctaatagaactctatgtttatgaaaaatgtctcaggctggcacggtggctcacgcctgtaatcccagcactttgggaggctgaggtgggcggagctcctgaggtcgggagtttgagaccagcctgaccaacatagagaaaccccgtctctactaaaaatacaaaattagccagacatggtggtgcatgcctgtaatcacagctactcaggaggctgaggcaggagaatcacttgaacctaggaggcggaggttgcggcgagctgagatcgtgccattacactccagcctgggcaacaagaatgaaactccgtctcagaaaaaaaaaaaaaaaagaaagaaaaaaagaaaaatttgtcatctgtgtgctatccgatatggtagccactagccacatgtgccaactgagcatttaaaatgtggctaatgggacagcagaactgaatgtttactgttattttattatgtatttatttttgagacagagtttccctcttgttgtccaggctggagtgcaatggcacaatcttggctcactgcaagctctgcctcccaggtttaagcgattctcctgcctcagcctcccaagtagctgggattacaggcacgtgccactacgcctggctatttttttttatttttaggagaaatggggttttgccatattggccaggctggtctcgaattcctcacctcaagtgatccacctaccttggcttcccaaagtgctgggattacaggtatgagccaccgcgcctggactaattttgtatttttagtagagatggggtttcactatgttggtcaggcaggtctggaactcctgacctcaggtgatccacccacctcagcttcccaaagtgctgggattacaagcgtgaggcctattataattgatttaaatctaaacagtcattgtggctagtgactatcttattggatggcgcaggcctagagtgtaatgtgcatgacagggttgccatgagtgacggatagcgatggagaagggcatctggactttgagggctcatggtatggagtttgcattttattccaagcaccatgggtgaggttttgtgattaagtcaaggcgttaggtgacctggttttctttttttttcttttttgacacagagtctcgctctgttgtccaggctggtgtgcagtggcacaatctcagctcactgcaacttccgcctcccaggttcaagcgattctcctgcgtcagcctcccaagtagctgagattacaggtgcccaccaccatatccagctaatatttgtatttttagtagagatggggttttgccatgttagccaggctggtcttgaactcctgacctcaagtgatccatgcacctcggcctcccaaagtgctgggattacaggtgtgagccactgcgcccggccctggttcccatttttaaaaggtcacttcagttgctataaggagaaatggattatgagtgtggggcaagaatgaagcagggagaccagtttggaggtggctgcagttgcccaggggagcagtgatagtggcttggaccactcagaaagacaaattttggaggaagagctgatgccaggttttgggagtgagggagagagattcctagggctacttcggtggtggttgggtccccaagctccaagactgagtccagaccagggccccgttggtggtgaggtctgattttagcagtgcgtgcccacctccttgtctccacctgctggctggtgcttggagcacctttaggggaactttagccatcagagtcctggggtcaggaggctgggagaaggtcctgggaggtgggaaagtcccccaactgctgggtggatgggtgggtgggactgtgttcccaggggcatctgctgggctgagcctctccctgggggctgtccacatcagctttctcccctgccatgggtcaactcaggcccatttatgggccacacggctgcttggaaggcatgtggtggagaaggggaggagatagctgtcagtggacttggggaagaatcccccatccatggcagcttccatgggtggcaagtccccagcatccaagggctgcctctgagtgtcacccacccccacctgagaccttagtggctagaagggggaggggtgggggtggagcctgattcgcagcagggtgtgtccagatggtcagtctctggtggctagcctgtcctgacaggggagagttaagctcccgttctccaccgtgccggctggccaggtgggctgagggtgaccgagagaccagaacctgcttgctggagcttagtgctcagagctggggagggaggttccgccgctcctctgctgtcagcgccggcagcccctcccggcttcacttcctcccgcagcccctgctactgagaagctccgggatcccagcagccgccacgccctggcctcagcctgcggggtaagtcggtgggcaatgctggggacgttggagggggccgggtctccaagcctgacagtgaatgatggggtggggaaggcctagtgggctcctggcttctacagcctggagccagggtctgtgtggggctccagcaccctctccctggacctccacaccccttcctctgctgccagggtgggtgagggtcccaggaggtggggtgggggctggacagacaactgttgctgctggggcttgggagtctagggctggaggaatgggccagggtttggttggggacacagatgggctaaacggtatgaaacggaaagagcacccttctgccccagtgtgtgtagaaagggtggtgggtcacatctgcaaactgaggcagccaggcagctccccacctcccatgtttccatgggaaaataccccacccgggtccccagggcctggtcccagcctaccctctccacttccctctgctggtgccgctcctctctgctctctgccccctgccccctgcccccttctccacccttctgtctccttaccactctttgactccttcttctttctgatcctgctcactgggcccatgagggttccccaaccctgaccgaggccccacccttgccaagtgatggaggctgtggtttcagttttcctgtgagggtgagattgtgctgtttgctgagcttcctaggccagcctagggcctgaggcagcgtggtggagagagcctgggccacaggctaggggcctccctcccttcgtgaagcccccagaggccctgaggcacacaaaggtagtattcgatgccttcagagctgaatcagactgaaaatatagacagaccctgaaaggctttgaaaacggaagaggaacgtcatggtagacgcatggtgtcagatccggctctgccaacaactggcgaccttgggaaagccactccccctt

SEQ ID NO: 7529 - DNA, 6000 bp, Homo sapiens
atgggaggacttggaccagtgtccagcatgcctctaagtctctcagccagacagaaaccctgacacctaggtctgcccaggagatgccagatggagcatggctaaacgtcctggcctcaaccttggccctggtggctgccctcctggccacagttagtgcatcctcctcccagctgctcctcccgcagagggcggggccacgggagtgccggagcctgcacacgggaaataagtcaaccggtcagctccaggcccagctgatcaatgcctgcctcctgatggggcaggagggactcagtgtcctgtttccagggccgccaaccgttcctgaagttctgtgtgcctcagatcaatgctgcagggtcagccaggggcccaagggcacctgggcagggggaggggcgtgtgtgcatgcacgtgcgcgtgtgggtgtgactgtgtcctgggtctgggccatgtccccacaatgctcctgggggcagccacgtcctcttgggcaagtgcttctacccacctgggcgtcatttctccgtccatctgcctgtggcctgtggcgcaggttggcatttagcctggagcctaatgcatggcaagtgcgtggtgggcattggcccttgtcacttttgctgttgttagtatcatcaaagtgtctagtgacaaaaggtgtttagggaagagactgggctgagggcagggctgctagaactggtctctgctctgtggctcactgcctgagggacagagcctctttccaccttgtccagccagggtgtggatctggctcaggtggaaagcaaccccaccagaagagcatatcctggaaccgaccagcacaggtcctcctgctggccttatggtgggtgggggtgggaggccaggtgagacccagaccctggccgcctgcctggaggagggggcaaggcttgtgctgacagacagcctgtgattgcaggggccagcgcggctcggtgatggtgcaggtggagttgggagtggctgtgagagccaagctgcgcagagcagggtgagagaatccctcatggatgagacgttcctgagtcgggtctgtgagcactcgttttgcactcactgcatgccctcagcatgtgaggtcctgggctgcagacacgcctgaaggacatgcttctgccctcatggaggtgccatgctggtggggggaccacagtgagccagacacctcagagagtggccagctagggaagaaagcaagctgagcacagcaggtgcgtcctggtggtcggcaggcccctcacggatgtgccgtcacagctacccttgcacgtgaggcagttcagagagacagcgttcctgactgagggggaggcaggccccaaggtccagtgacagaatcaggctactggtgcccaagggcctgaatggccagtgtgttcagaaaagagtggctgagagggggagggtgtctggggcctcagggactttggctatcactcctagaaaggttaaactgggcatgctgagagctcattttacattttgatggtgggaagacgtgagggccaaagccgggccaaggtctagggtgggcaggggaagtctcagtgggctcttgggaggaggcatcttggaggggaggagatgctgggactctggggagcactggttgcagctgcctgcagggcgagcaaagccgctggggaagggccgtctggtttcacatctcactcggtgatggacttatgcctcccacaagcgcatcggcattgtggcatcaagatgtgattaccacaagagctggcagctgctgtcgagaggctgcagctctggggctcctacacacagggcagcgaaaccagccttcgggacacctgccctggacagctcagtggtcatcgtagcaaccttccctctctgggccttgctttcctcaaaacaaagccatgattccaaatgagccgaggagctcttctgtctcctgggcctgtggctccagggacactcagatatgcaaaggcgtcttgaacagccaacacgcccacccaaagctgggagagactgggctgcaaacaagcctcagtctcacccctgtcttggagaagctcccatcctggaggggaagaaagaatctgggatcaagggaaagccaggtgcagggcacaaaattcagggtgttgggaaggtgtgtgcgtggtgggacagctgactgctgttcatctccctggcttctcccatggctgtgccaggaaagttactactctcatggcctcggctgtcacgatcacccccattttacagagagggaagtggggccttagcaggggacgtgtcccaggtctcctgctgggcagcgttggtactgggctcagtccatttggcctcacccagccactctcgacactgccccctccacactgtaggggcaggatgtcctctgctcaggcttcacgcagcaccccgggagggccgtgagcccctctgcccacgtggggatccctggggcagatgtgtgagctgcttagggagagatctgcccacatccctgcctctttgtgtcccagcccctcctggagggaggctggtgcccagtggcgtggcagaggggatttgctttgaggggcccttaatggctgctcatgggttgcaattacaattaagaattgaactctgaccctgcacgtgggttgggagggtgggacgtggagcccaagggagtggcccagggagtcaggcttgcgtctctgctgggtgaccttgggcaagacgcttgccctctttgtgaaatgggtctgataatggctctgggagtggggatagggaggggcggagacctggcctgactcacagtagtcatcttgggtgtcgagcccctgggcaggggccctgtgtgtgtgtgtgtgggaaggggggggtggtgttccaggcgtgaggatgccctgggcacagccacttgtcccaggagctgtcagaatcttagacccagaggagccctgaggtgttcccgtccattcccttgcccctttctaggccaccagagtaaggcctcgagggagggatgtctcaggccccattcctcttgggacagctgagtggtctctgagggtgggagctggtttgaggcttcttccgcagctggcttgggcttccccatctgggaaatggagcaggggcaggtggggagctgagtcatttccctccttggtcactcggagggagaagaaggaagtttcctgagagcttttggtcccctgggaggctgtttctcccaggaggaggaggaaaccaggacacagtgtgccaggcagggcagggtgggggctgcagacttctgcgatgccccttctttctccactgcagccctaagttgaggacacacctgattctgcgtactggctccaccatctggtagttctgtaattaagcaagtgaccacccctctgtgcctcagttccttcatctgtaaaatggagccaatgagcttatccaccacagatggccgcagtggtaatgaaataattctagctgggtccatagcacagagctcagaacatattgagtgctccgcctggctgttttaccagccaagtcaagtgctaagcactttaggtagactcatctcatttaatccttgctacagccccatgagtgtagtgatttctactgacaacagggaaacagaggcactgagtggtgaagtgacctgtcccacagctagtcagttgaggtgggattcaaacccagggcagactgatgtcggtgagtgctgggctggatttcacccaccagctgcctggggccaggatcctagggctggtggggcctgcagatcactctgctctgagccgccagcaatctgggtgcgggccagagagccgtcctcctcggttagaatcctgcagccagtctccctgctgtgcagacacataattatatttcacattaaaggggaagctggaggccaagggggccaaggagccctttgaggctcatgctctgggcacagactggcctcctcggcccaattctgaggccctagggccgagctgggggtcagactggtgacaaaatggagttcccctgggtcagtgtccaggcgagcaggtctgtctgccaggatgaaagacttggcccctgcgggaggctcagagatatgaggcccagacaataggcctcagaaagctgggagggcagggcatttggggacaggttgggaagaaagcctgagcctccagagacaggggctcgaaagagaagggggtcacatggggatccggtcggcagagagaggtccagggaggagcacagagaaggcaggagatgggagaagccaagcagctcaagatggagaggagaaaaatgctattagggtgggatggtgtgtgtagagggtgcgtgcctggtgtgcaggggaaaagggctctgtgggaatgcacaagcttagacctgtgtgtgcgtatgcacacgtgcagatgccatcctgcatgtgcacatatgagcgagtgtgcacatgtgcccctgcgaacatcatgcatgtgggggcatgtatcctgcatgtttatgcctgtgtgtgtgctcgccatgcacctgtgcgtgcgcgcgtgtccccggcggacgtgcctgcatgtgtgtgtatgtgtgtgtgcgcgcatgtccccgggaagtcgtgcctgtgtgtgtgtgtgtgtgtgtgtgtgtgtgtgtgtatatatatatgtgtgtgtgcgcgcgcgcgtcccagtgcgcaagtggctggcggtgtgtgtgtagggggcggcccgggactaggaggggctcggggccaggccggagccgtggtaggctggtgcagcggctgcgcggcgcggcgcggcgcggggcgggcgtgctctccgcggagagttagaggagttgccgagctgagctccggtggagcgaggcgcggagctgggtgcgcgccgagcctctgcctcccgccgcctcctcgccctccattcctcgctccccgtcttctcccggccacaccgccactgctgccgcctccctgggaacagtagccgggggagggggactggcgcggtcagagcctgcgaggaggtgcggggcgccggggcgtaggggagcgcgccgggccctgcccgagatcagataacagccggcgggggagggggtgggccggccgtgctcacagccggaccgagggaccgacgccagccgccccggcccaagcgagcgcccagcggccgggggcgccgtccaggcgcgcgcccccgacccgtggctggaccagggcgatccgctttgcagagaagacgcgcccctcggcatggagcgcccccgggagctgccctgaggcggtggcggcagcggcggcgatgcagccagcgcggcagctgccggggccaggaacggccgcccggagcttggaggacgccgagcgcgccgcgcccgggccactgaccgaggtaagtgcgcggccgcgggcgcatggtccctcccgggcccggccccagttccccgcaggccgcgcctcgccactagcccggcccggagctagcacgaggttgtgcagcaacagggaaggtggagcgggagggtgttttcttcctctcgttttatttttttccctcccttggtgagacatcggaggaaatgctgactgcgagcttttcttttcctgccatgtctccggctaccaccacaaggaactttgctcctggctaaccttcgtcctggggggcgctccgggaaactttgaggagccctcggcccccctctgactggtttgcactagggggctcgggagggagcgtgcggaagcactctggcgcgcggcacgggtcctacgcgtgaccttcccggagaccccgcgatcgaggtggggttcggaggtgggcgcccgggctatatgagccgccccgagaatgcctcccgtcagagacctgcgggttcttggagtcgtgtctctttctcacctcccgtgctgtaatggagtaaaaatattctggaaatgattccatgccagcaagtcagccaagtccagaggct

SEQ ID NO: 7530 - DNA, 6000 bp, Homo sapiens
tttggggtatccatctagccccagcctcgaaaggatggaagcagggcctccttgcaggaggtcatgttgtccatttgtctgctttcatacaagctggtccaaagaaagagttctctttcgtttggaacatctgttgggttggaagtccttccccaaatctatctgagtccttcttgctgcagagaaagccttcctgtgacctcatcctttcccctaaatgttgggaaatgctcctgagtcctgtccttgacacatacatcttccttgggttgagggatggggactgggacacatgctttgggaagggcaggtgcagagtgatggggctgacggggtgggggaagcagggggaggagctgtccctctgaggcctttgggaatcggctgtgccaggcatcctcagccctccagctaagcaacacagagagccaaaagaggctactagagacaagaaggccttcatggggccactgcttgtgggggatgtcagcagtggggaggagtgaagcaggaaggaaccgggagactggatggaattgctcccttcacacggtcacacatagccacacatggtcactgggaccagagtcagctctgtctgggcagccaggccctcagtgcaagccaccagcccatctggaggggattagtgctccggccaacaaggtcagctggccccttcctagctggagcctactcaaccttgccaggaagtcagagagctggacaagtggagcccagcctggggaggtggaagagagggaggatggagcatggtgaagcacaggtggcctttttggcagccccagccctggctttggaacagtctgggcagtgtgccaacccctcttgccactgtcgtcccattgaccctcatgaatgagttgcgaaggcagttaccttcagcctcctatggataaatattcgaggcccagagagggtaagagacctgcctgcgacccctcagcacttctgtttctctctggggtcttgagggtacaataaagacccctaaggcttcctcttctcgcaggaggtccaggcgcagctgtgggggagggtgcccttggtgtcttctgtccctgcagccagtctgctttctactcggcagctcctctctccctcctgggatgagatgtgcacgcgatgatgggattctgtaaatgggttgggaagaaggagttacctccttaaagggttagttctcccaggagtgctcgaatttctaaagggggcagggtcccacataaatctcactcagaagcaggattataagagttcctgcagcatcccttcccctttgctggtccctcttgagtgtgcaccctgttctaccagcggaacacctgcgggccagggtcactggagacagggccataccgtctgggcagtcacttaagtaacttcatcattctgagcaccccccttccttatctgaaaggtggggggccatccacccagctctcagggctgttaaggtgactaaatgggataatggttgtatcatccctgagcaaagggtatcacagatgggaagattatcttagctccgcagggagccagatgggctgtgagggaggggtaaaggcagggctggagggggctggaggggctggctgagcagggtatatatggggggggttcttcctcaaacccagaaaaactcttagttaggcttagtgtctttgttgagaaactgaggcccaaagaaaggaatttcttgtccctttgtttccctttccctgcctgaggtcattcattcacctaacaactttgtgcccgacactagacaaggccctagtgagcaaaatgaacatagcccctctgggaacacagagcctagatagggagatgatcatttcattactgcaaacacaaacatataatcccagcctgggctaagtgctgtgaagttccagacttgtgtctggctcggtgctgtatcctaagcaccttggcacttaagtggcattgaaatacttgctggaaagaaggccactctgaggaggtgatgtcagagctgaggcttggagggctggagttaaataaagatggtttcaggtcttctttgccttccctgtaggttctgcctctgcctcctctctggcactcaggctaagggtaagcatctccgactggccatcagccccaacatgccgagtacagggatcagatcctgtcttgcgtggccggtctcccctaggtcctgaacccagggaagtgcatgtggatctcaatttatctagatggtgcgtttgtgcctgccctcctttcgggcatgttctagaacagagttcagtccagagcccaggggtggccgggatgatggatgagggtgtggggcctgctgaccaccaggggacctgatcattgggctgggccagcctctctgtcctcattttcccctctgcaaagaaggggtgttgggcgtccctacttctcgcgccagccccggggcctctatcctggcgggaagggcaggccgacccggcagactgcggcctctcgggagggaagaaggtgtcagacgcgcggagcaaccataaatagcccccctttcccagaagacggcacggggttcaagactcaggcgccgcatactcagaatgagagcagagactcccgccaggaaaaaaaggcacttaggggatctgctcattagcatgaaatgcaaatgagcccgcccggcctcatttacacaactctgtgcatggattcggcgaaagggcaaccagggagacgacggcgcagcagccactctgccacttcccccatcccctccccccatcggccggggcgggaactgagacgaccccaaccctctgcggtggcgggaggtgcgcgggggctgcgtgggtggtgcagccttaggagagtgaacaacgcccaggggtgatggcctcagcaaagtgaggggtggtgatggaggtcatccgacccatcccgccgcctctccgcagtggcgcaagcgccccaaaatctccggagagggaactgactgacccactaggttccgccgtgtctacctctcgcagatgttggggaagtgcttcccggcgtctaatcctcgctgttcccccctccaccggcgcccagcacacccgcggcgctccgctcccgggtacccacagctttctggagtggcgccggcggcaggagagagctagagccgactgagccccagaactcggggaggtaggcggggcaagggccggggtctgcgcgtgcgtgtgcacgcgtggaaagcacaaacccacgagggcccgctgccggtagggttaaggtgagtgagtgaaggcggcagacccgcgaagttccagttccgcggacactctttccctaagccacatagggacttaagagaaactgaggcacgaagttggggggtggcggtggtggggactttgaaggtcgagtcgataaagcccagctctgtgcttccgccccctcccacacactcgagacccccacaggttccttcttaggggtcctcgctctgctccgcagcccctcctggggatccgggctctgcggtccagcgcgacctgcctggggccacgtgttcaagcacgaagcccctgcgtggagtccacgcccttcaaaaggtccctaggggcaaagggatgaagcccaggagcgtcaatgtgaggtcaggtccagcgggttagggttacgaggtcagggtcgaagtctcagaattgactcgggagtatgaccaataagcccaagagatttgtggaggccacgcccagaccatgcctaccctagcctttctcgagctccgcccgtttctccaagactgggcccctccagcctgaagccccacccccaggacatccagctccgctccttccctcccccagtcccgcagccaagctcaactccagggtgggagattaaccaggtggagacctgggatttcgctctgggaccccctggtgacaaccctcacccccgtgccgcctgtctcctttcttccccaggcccgcccagagctgagctccgtcctccggctgctgcccaaatcaggggtcgtggacaaaggatgcctggggcctgcggccctacgccaggaccccgcgccgaatactctgattcttcgggctccctccaagggagtcccaaagaccccaatggccaataggaaagtgggttcggtctgggcagcagtctgattggctccagccttcgggagcggacccaggggcaaggggaggggagaggggcggtcctgggttttggggtgggaatcggattccagctgtggttctctccctgcgctcccgcccgcactgccacggcggacggccaatgggcgcgcggctcggggccggcggcgtccggcgattggctgcggggctgtctgggggcggggccgaggcttgaagttgaagtgagggatccagctgtggtgtgcgcggggctcctcgccgccgctttcgctcgctcgctccgcgtctcggccggaggaggaggctgtggcgccggcgacagctacggcagcggcagccaccgcggcggctgcggcggcggcatctccgcctccactcccgcccgggactgccccccactgtctccccgcccctcccggacagtgagcccgcggcggggcgggggaaggagccgcccccaccccctccaagcccacccctaaagagatccctcctcccctcccccgccgcctggcgcggagccgggacgatgctgaccccttagatccggctccagctgcgccgcgggaagagggggcgcccctccccggacccccgccctccgccgctgccccccttttcgttcgccctctcggggcggcttcgccgaaggtagcgccgaatccggcaaccggagcctgggcgcgaagcgaagaagccggaacaaagtgagggggagccggccggctggcccgggaagccccaggggcgcaggggaagcgggactcgcgccgggcggggtttccctgcgccccggcgccccgcgggcagcatgcccctgcgggcagggggagctgggctgaactggccctcccgggggctcagcttgcgccctagagcccaccagatgtgcccccgccggggcccccgggttgcgtgaggacacctcctctgaggggcgccgcttgcccctctccggatcgcccggggccccggctggccagaggatggacgaggaggaggatggagcgggcgccgaggagtcgggacagccccggagcttcatgcggctcaacgacctgtcgggggccgggggccggccggggccggggtcagcagaaaaggacccgggcagcgcggactccgaggcggaggggctgccgtacccggcgctggccccggtggttttcttctacttgagccaggacagccgcccgcggagctggtgtctccgcacggtctgtaacccatatccttcggggcacgacggccaggcgcggggtcagaagggggacgggccgcaccgccgggggtcgggggggaagaagacccaccgccaggtgagtcgaagtgagcccggagggtaggcggatggggggggggctgccagggaggggagggggcaccagagtgggagcggagacgcgagcaggtctcgtcggtaacccgggcttaccccacctgcgtacacacacctcagtcttcctgggttgggggggtggggatccaggccaggagaagagagctgtgccccgctggctcgcagctggacgccctccagatgtggtcaggggagggtcgtcatcctccagatgtgggaagcttcgggagcctgggagctgtactctgcccgcgccggttagcgagctgggtttggtttccgagtttggtggggggtgggtgggggcggtggggaggaagctgcggggacggaggaggggggaccgcaatctcctgggtttccctccttcccccgccccaaagtttgcggcggattctagggtctgatcccccaacctggtccttgaggctgaggtttttactgacctagaaggagatgttggggggc

SEQ ID NO: 7531 - DNA, 6000 bp, Homo sapiens
ttacaacatgagacattctgatttgtggtttgatggactagctgtgtgaactttatctttacaaaaggaaaaaagcccgtttgcataagcaaaggcatcacatttcaattatatgccctttggagattcaaaagttctcaatttctccctcctccaaatacaaacataaactcagtcaggtttctcatcagcgcagaagttaaagaacacgtgactctggtagacaaaacaagaagatatacagactcattggaaatgtctagattttgaaaaatacctgatgtggggaaaaattaaaagagacaggaatggaaaattcctctgctggcttcctgttctccttcctgctaaggtgggattagttaccagctgtcaaaagaaatatcacttttaattcttattttagggggaaggaaagcatcagaaaaagctatcttggaagggagtgaggcaataaggacattcatttttgcaattcattcctgaggtttgaaagagcacaagttgggaagaaaaggattatgtttcctatgaaaagtgaagaactgaggacatgataaaggcagattaatctccttcaaatatctcccaataacataatcaatgtggtaatgaagccagttaggagtttggggcttgaagtatccaagtaattatttgaaatctctccttggatagaaaaagaattaataagagcaaactagtctttaaaatgagggcatgttttgaaatgaaatcaattatctttgatgcaattactcttcccctggaaagcatttttttttttgagaaggataacttttcaatttacaagcacttcttgcagaagaatagaatttacctaatgcttgaggatgcccttcaaatgttgggtcacatctggtggatacatgatagtttataaagctctctcaaggtatggtttcaagtaatccccataacatagcgtagatcatatcagtcaacgcggctgtgattggagtactaaaaagccagtacacatgctctaaaagatctgcttcactcaaatctcctgcaatgttgggaattccatggttagaaatgcattcctttgcattcagacaagagctccttgactaaggttaaaaagcaagattcaaaattgtaaatctgaccgaatctcaactttatcttaagacagtagagaaaatgactggaaataatttgaccaaagaaaattgagacttgtgattattttttattgccctctttgcactcttattcatagtatctacaataaacctatataactttaacatccaggaaagatttttttaaggtgttctttccattttccccactctgggagagataatgtagtttttcatctattagcatgattcaatgtatcagattcattcaaatgagacagccaatttcatccattttatttaaataattgttgaagtgcagtgcatcatcttaggaaaatgctgagtgggaattttcatttcaatcttaagaaaattgctccttgaggaagaaaattcaagttggctcttttccccccttttccttctgcctctgattccatatagtctggagggtttcaaacacaataaaacacactgagctcttcaagtgattgagacacttcagaggaacattttgagaactgggattatgaagcgagaggacaactcaggcacaacctagtaatgctgcagtatctgggcagcaagagggtcttgcgactcaggagagatggacgatggacagtgatagggaagctcattaagaaagtaaactgaagaaaaaggtaaagaaacctttaaaagacaaacagttttattttcctaatatgcttgtttgcttaattcagaaaagcattcatccctcagtattagtattagtatcagtactgaattctagctttctgttagtcacttggttggactcaaagatgaatgagggagtcaagcacaatgacacatgcctatagtcccagctacttcggaggctgaggcgggaggattgcctgagtccaggagtttgagaccagcctggacaacataggaaaaccccatctgaaaacacacaaaaattaaaaattaaaaaaaaaaagatgagtaagattcagtaagttcctaaccacaaatatttagaatttagtagaggaaataagacatgcaactaaaagctaaaatatatagattgaaaaacatcgtgcctttaaagagtattattcttttattattattaattttgaaataaactatttattgatatttatagtaggcaaggaaagacttagtaaaaggaatattgaaggaaagataggattttaagtcatagaaatgcagttgacttggacttaaccgtgagaggaaaatcattaatcagaaaagaggaacattacttttggagaagagtaaattttacggcttagctagttttgtttttgttttttttttctgtaaagggccagatacaaaatattttaggctttaaggaccacagtctctgttgaggtcttgaaggtcactgaattctgttgtgtaatatgatgccttcattgacagtaagtaaaaaaatagggataggcatatttaccaataaacatgatttacagacatagaaatgtgaatttcacatcattttcatgtcacaaatattagttttcttttacttttcccccgctatttatcattgtaaaaaccattcttagctgggagtccttacaaaaactggaagcaagccacagtcttccagtgacggagctagagtgttctctctaacaagtaacccctttgtacaatgtaacttcctcttaggccaatactaaaatcacagaacagcaatacattacagatttttgaaagagataattatttatcacttacattcaagtaacaaattcttgtaatttgacaaatcttgaacatgcctcctcaacttgcctcagtttgtctttctgtttgggggaggattaaagttcacaaaagttgaacttcaatgaagttaattatcagttaaggtagactgaggaggcagagacatgtaacagaaaagccaatccagatatcatttttatttatttggctttagaaagtgtttttctacttacatgtgagtatgggtgtgtctgatattctgggaatttacttcaaacaaaggaatgaagccacgcaatggcgatctgactcagctggagttgggaatccatctagtttccccatcttgcctcccgtcttgctcttctccatggtctgtttttacgctgtgtttagatgcctcgtcttctcagatcaatctaaatgctcacccacataaaatcacctttcctgaaattgtatttgcagagcagatggagtcctgtccatttttgcgtgtgtgttttttttaagtcttttgagatagaactctaacaaagtgtgctctgctttcaaacaaggcagtaattgagcagcattaagtgataatattgaacaacatcatggataaaccacaatgagagttgctgcaattgttatggaaatgtaggcatttgtttagtcttcaatttttttttttaacagaaaaggcaacctctgcattcactgcttacctgagatttatggatgaatgaaaagataggtcccttggagagttcaaactcttctgcagatattgtgtaacagattgcaaaataggtcttcctatcagaatatgtataccttagtgacagctatgagtttggaacacgaattatctatctgtggtaggtgttgtcgttgttgctattatcatccccatttgacagttgagaaaatggagttgcagaaaggttaagcagtttctcagtgtcacacagctagtaagtggcggtgccaacatagaagtccacttcctcaagtgttcatgcttttaaaaatggaaacaaaactctaacaaccgtcaaacagcaacgattgtcagaacctagaaaaggcctcttaaatttgcagtgttaaccaagcctgatgtggttccctagatcccctggctgccaccgctctgtgaagcaaaggaaaaactaattccttgctagcataacacttctattgagcattcctggacacaactcccccaggttctgaagagcctagggttgctatttgtttagttccccatggctgcttttcacattttctggatctttctcttgattctagcattataagtctacctcttccctgatcactcacttttctacctcctggagagcactgaccacgggatcacctcaccattttatttaacccattaggactcaatgccaggcaaaacctataccacagcctgcattgtattcaccatctcaggctcgagctctgattcctggggttgaggaaaggaagactttccaaccccaatttctgccatccatgttgattagtcagagggctaatcaactgtgaactcatgttctttggaactaggcagcacaggaaaaataatcattaaaggtttggtaaataaaagactgaatggatgcttagctacctgtcattatcctgtctcgcttttcgtcagcatgcaatcccaatcctcagctgttaagatgtagacaaagagttctgatgaaagggatttatttgtactattccaacagagtctgaaaactagcaggagcatttccataggtcgtctctcaacaatcctgtctgtaaatatttgagtcacttacaggcattgttgagcatagttctggcccagcaaatcttcctcctttgtatccctgatcaagtaaaaacttagtcaggatatacttgggtgaccttcacactgtacctcctccagaggtacagaggtggtgacgtaatcactgccacagctgactggctatggcttgcttgataagacgccaggggctacctatgtagattcccagggaggaactgtaggaacaaaccggtgtcaatggttaacccaggttcttggtgtctggagcttttctttcctttattattaactaaagagcattctctaccattgcccagctgaaagcacctagctcatagattctctgtggggagagtgaataaaggtaagtgctattattgctatggatacaatgtcattcagcctatgttttgctcttgctggcatctgtgtttggggagcagcaacactctgtttccagcaaacgtaaatattaatgatcaattaaatgcaattaagataatttaattttttatccaagtgctttaagtaggaatcaaacagtgtgtcatattccttaagttattttgaagctttggttaaaagtagtctcacattggtgtttacagagtctgttaaacagcccttgcctgctattatatttgtaaatgtctaaaagtggctttattatattcataccacatggagtattctgcaatgtctttcaaaaccagatttttgcatcctgtatgcacttatgaacatataattgcaaatattgaaaaatatgtattttatacccccctcttaaaaagctcagagaaaatacacgttaacttttttttatagttgtctataatcattgaaaggaaataagagatctattttttctagatttattttaacataaattgaaagtgaagaattttctccttttgttttcaccttaatccctctaaagcttttttttttttcttatcatttaaaaatcttaaaattttgttttgagtatttagtcagaaaagtgtgagcttgtaaaactttgctctctggatgccacgaattctctgacatatataattgaacagttttccttgttggtatatttaggtagtaaacaataacatttctataagccagatgaattttgatcatgtgtattacatggactgaatggtctttagaaaaagagtattggagtatttctgctaaatattactcttatggctagtaagagccagatcctgaagaagaaaaaaatgtatgaatgcacctttgttactttagtatgggaaatgtagactagccactctttatgtcagattttaaccaataaaggaacatgaagtacccaaa

SEQ ID NO: 7532 - DNA, 6000 bp, Homo sapiens
aatacagaacatcagaatagcacatcctgtaaagcacaaaagcagtgtttgtttcctggaaaaccctccgtagaggctagcttattattagtcttcttattactgcttgattactatgattaaatgatgatactacacccttccagttataaggcttgcctttccccagtggcagtgatgagtctgtgcataatgattgatgttttctcagctggcacctcttctaaccaatgacgtgcacttacggcaaggctacctgatctaaggaactgccatccgtggttatagagggtaaaccgaggctgtaaactcattacctttgggagacctaatgtatcccagaaaacacagatgaaatgatcattgtaatcactgaatcaagaaacatagtaatgtagggtctggccctaaaatgaatatggtattttcagagtgtaattgtctcactcatgtgagataaatgaagtcttccagagcatgacagaataggtaatttactaaataataacatggaggctctggaagtgtgagcttcttaaagaacagccccacttattgattttggttttaacatatttgatggaaaataaaggtcataataataaacggataaagtaagcactgaaatattttctcaatacatcagtacatgattttatgtgtacatataaacatatggatagttgcaaacacgcgggtatctcacttactcagaagttttcctcagctatttataacagcaaatacaaagactaagccatttaaatgctctgagaagcaaaatagatgccataaatccaaatcctgaagcttttttacccaaaaaggaggttgaccaagcgaaggtaactccaaattcagcatctgctcatactatttcaaaaatgcatctttagatatgttaaatcatatttgcttgtacattactttagcaaccttggttacataatttatcagcccagcacagattagaatcaacaaattaggcagagcatggtgacagtctgacagattcaaggcacattatcagaagcaaaaatgagaacggaaggctcacattgatggagaagggaaaacaagcagaagggcttaaataagcttagtctagggtcatttaatgcaggagaaaaggctctactgtaacctgataggcctactgtattgcaggtaaaaaatgaaatagcttatgtttattataatcatattgagtaatcatcaaaagttatactaaaacatactgttcctttcattcatttccatgtaactgacatttattcttagaaacaacttataattcatatgcttgattacctgtatatagaaaggtctggggcatagcaggcatttaagaaattaactgaatgaggagccactcctatcttctgacgtgttctcagcatccttaataccactacacatagtaatatgtcatatgtattaaatcttccattacaaagtcttaccctgcttcattccattcttcaaaatctaagattatcgttttatttgttgcttgatccattttagtgcataatcataagctgccttatattgttgtttaatcatttaaatgtttcacttctgccttgttcatcttctcagttagacattttgaactcttaagaagaggaattactcccgctaggacacttctgtctttcatctcacctagcatatagccaaagtacaacgtagttatttcaacaaatacgttcactgaatttaaaaatatgaagattaaatattatcaatgcagtaagtgaaactaaaggccaaaactgttttccaataaataagattacatacagtgccttaaaataccacagtaagtggcttgttctcatagcagcagattgcaaactcagcctgtctacatttccgggcaatctgacaatgatttatttactatttattgctaatgatgattactttgaagattagaaagtggtttttaatatccagtggatacaaatgccaggagcgtttgatgttttaccattgtgaatttgaactgcatatacatggttaatgtaagtctgaaagtatgtctaattgttggggatctttatataaatgcaaaggaaagatctgtgcttctagtgaaacaatcaccttctgcgtcacacagctattcacaatctgactgcagatccagattgtgactaatatttggctctaatattataggtggttaccgtggagagaatcagtaagagcataattgtcatttccttggaaaaatttaatccacagatggatcccaacacccaattgcattcgtgtccaagactaatggggatttttgctaaataaggcctgattcagccaaaaaagatagactctgaatacagaaatctgcatcacgcatcacttcaaaagatgtattaaatcaaacactgaaagcattggcacacagaattttcctaatagggacatgatgaaaagtcatttattaattaaaatgcatttatattttctttttttaaaatgaagcaatgggggtattctacgctaccatacatttacaaaatttcatttgcaaaatttcatccttcatacttccttatttagctaattaaggtaatgattctacttagattggaaagttctaattaaaatcattaatttttcccgaaccttctccttcaagatctaagctttgctgcacatccttcagtctttgggaggagagaatgttgggggatgtgctgctgataattgatgagagagagcaggatacatttattatgaccttcctcccgctgcccagctaaatttatacagccaaccataatctaataactctgtgttcctttctttaaagattttcctatcatatgaaactatttcggcctgtggtgtattctttctaattagagtagaatactaaagcaaaaccatttcaatccaagttgcataaaaatgccatccctttccgagtgactggttttcaaagcgagctcattacctggaaaaacaacaacaacaaaagtgttgcctctctgaattcacgtggtttggaaaattcttagccatctacagatgcaccaactgaatcataataaagaagagaaaatctataaatgattaatttcctttttctatttaggcttaacatgttttaagggataattaaacttttggcctgtttcttagaagtccaggaggaagcatatttcagaagaagcttattgaactgagcggtgaactcattcattatcctttggttaatacagagtgaacttgtctaccctcaggttcatttagctttaggctacagcctagattcttagacatccgtctattttacagtattaattcaagctgtttataaataacacatgactaaatagatgttaaagaagacctcccttggggcaggcattattcccacgtgcatggcaacagagttcgtaacagggcttggtgaacagtataatctcaacacattaactgggaccacatcgccatttggctatcagagcagccacaccgagtgcatcatctcttgcacacccttttaatttaagtaccttgctcagtgctaagaaaaaaggcacacttgttaaggcaggagtaagtgcggatctgcgaaacctaagcaagcatatttcaccagcacctcctaggggccacgtgtggatatgaggatgggaggtggggactcgcacagaacctttccttgaattgtcagtttcacctctcctacacacaaaaatccaccccgactgcgccgtccacaataccagctagtttgctgaattagttcagcgactcaaggaggccttacgaggtttaaataaactgcacaaaagacacatttgatcgctcgagaaaataaacatttaaaaaactcagtggaaagaaagactcctaaaatatatcctgtcctttaggagcaaagcttcgttaggacaccgaagtactcagaaataataggcacttactcttcggtttacacacacacacacacacacacacacggattagtttataaagttccaggatccagacccggttaacactgaagttgctttttaggggtctgcgcgctctcgcctggctgctgggaaggagggctgggaggcgctgaagcgagggcagatctgagtgtctgtaggagttgctattccaaaaaaaatcattactctctaattgttctgattttagatcagcaaagcgtgccgggcggtggtggagagactgagggcggacaaggcgagagggaacgagccgtccacccttcggagaagcctaggcgccttgtaagtaattcgcgaacagtcgggagaacaaacagccaagcggcgctgcagtggccgcacttgcgcgcgtctcaatcctgggggctctgcgcgcccgccccagtccctcgccccattgactcagtggcttctccgggcgctgcagcctccgcggggggcttcgaagggccgaggggctccggcagagagggagtggagagggagacgcgccgggaccgacgaacaatcctgcccctgcggcaaaggtctctacccggcgctggcacctcgcaggcccctcgaggagcacgcagggcaagcggcccaagagcgggggaaccgggaagtgtgtggggctccagacggagtaggaagctttgcccaaggccaggctgcaatcaggcagccgcaacagccgggcgcggagcttcccacctgctgctgtcccagctgggccgcaacttcctcctccccggcccgggcccgactccccggccgggctccgagggtggagggggacgaggcggcggcaggttccctccgctggcaacgcctcgcagcatcctcccctccccgccgcggttcccggggccggccgcgcggccaggcgcgctgcgattggccggcagcggccgggggcggggccaggagagccggtgtcgcacggaccgcctcaaaagagcccaggatattgcagagcgcactggagccctggccagcgcgcagccttcccggcgccggcgggctgggtcttgggaattctggtttgctttggctcactcgctttttacaaaccactggatcttacatgcctctgtaccccccacttccactccatgtccccatgctcctgcgccagcaacaggtaagggctgctgtgttttcttccttttcgctcgctgccggtgtgtcctggggaatggactctggccgccgtcccctaccctaccctgccccgctgctccagaggtgcccagctgtcacactgctgtagcgctcacccacactccggagtcccagatcatgcctatatagtttgtgtgcgcaccagaacatccccagagctaaaaatactgagacatgcttggaacagttgagcaatagaaacagatttctctgcagcatctgtttgtgctcataacttccaatgcaccagctgtagcgagatactgggtttggaggcaagggcgagagcgtctgtgttcggttctcactctaagtggggaaaaaaagaaagaaaacgtggttgcgggtttgggggtgcgtcttgagccctggtcttaaaccttggcaaagcttgggactcagcactattcttgatccttggctttttttttttttcgtcattgcttcaagtatagctgtgagtttcaaacagagtgagtgtctcaaagttgccttcctgaaagaagagcgggagcccgagttggatttgagcctgaggatcgcaaaactttcacattacatatcactctcccctaaccaatttgttattttcagtaataatggtattaatacctggcttgaagacagtgtggttttaggaaagcaaaatagtcaaaacgacttgattctgcaaaaagattgcatcatagcgtggattcatcatgacaattggaaaaaaaatagggatagggaatgggcagtttaatgtctgtgtctgggtaaggatatcataggatgatcactaggataaaaggctgtgaattccgacgattttcataaattcagattttacctgttaggaaataaggtg

SEQ ID NO: 7533 - DNA, 6000 bp, Homo sapiens
gccgagatcgcgccactgcactctagcctgggcgaaagagccagactccggggcccctcatccgcctccgccccgcgtttcctccccccgatctcccaggggtcctcttttgagggcaccccagcccctcgacggtcccgggatatcctgcacccctgccaggctgcagggaagcgccgaggcgcgcggagtgcgaggtccgtgctccctgcggcgcggcgcacacgcagggtccggggtcgacccctccaccgctccggcgtctgccggggaagtcagtccgcctggtcagcccagaacccccgactgcgggggctggagctcggaagcaggtacaagcgccactctccgcctgcgccgtggaatgcgcgccgggaccactccgcagcccttcccccagcgccgccggccgctgctggggacaacctcgccctcctgtctcttgctcctcctcctgaccccagcgcacccccatccccgccccagatgaggcaaggctccctccgccttcagcccggcagagtcgcactaggagttgcagcggccgcagccccgggagcttcccgctcgcggagacccagacggctgcaggagcccgggcagcctcggggtcagcggcaccatgaacgtctcgggctgcccaggggccgggaacgcgagccaggcgggcggcgggggaggctggcaccccgaggcggtcatcgtgcccctgctcttcgcgctcatcttcctcgtgggcaccgtgggcaacacgctggtgctggcggtgctgctgcgcggcggccaggcggtcagcactaccaacctgttcatccttaacctgggcgtggccgacctgtgtttcatcctgtgctgcgtgcccttccaggccaccatctacaccctggacggctgggtgttcggctcgctgctgtgcaaggcggtgcacttcctcatcttcctcaccatgcacgccagcagcttcacgctggccgccgtctccctggacaggtgagccagcgccttggcctccctgggagatgggcatccacgcgggggatggagcgggaggcgggactggggaccaagaagggacgcgcagagtgggacaggacactaagaaggcagtggaagacaagcgggcgcggaggaggaaaaagaggaataagaatgggggaccgtggtgtccctcggttagatgcgtcctggggcctggaagcctggagaatgtggctctccagcgccgcccgtgcctgacaacgcgcagcgtttcccagtacgacgcgtttgtgcgcgttcatctcgcttgagcttaatgccctccgtgagggtgggataggacaaagtgcccaatatacagaagagttgagttcctaagtaactcgctcagagtcgccagccagggatcgggtgcgtgaagtgaccgtctgtctcctgcagccaacttcaggcgcctccactgcgctcgcctccaagccacggtttggttggttggtgcagctggctcaggtccaggctgtggatcttgggtcctttgcaaggatccactccggagtcccagcgagcgtgcctaaaggtccctagctcagtcccagcccactctgcctctcgcctccaaacaaaacaaaacaaaataaaatccaaaacaagtcggggccgggagaggagcgtgccctggggttcttcctccccagccagaggagagcgagagacgcacattcgggagagcgcgggactcaggtggagcttgaaaggacactgggatggttcctggggaggaaatccgggtatttcccctctccatcctctggaaaaacagagaggcgaggccagactgcccccacacctcctgtagccactgagcgcgaagtgcgttggttccgagcgcgctggtgggatccacaaagctcgcattctctcaggaatcccctgagaaattaactgtcccttgcccaacatgtcttctccaggctgtctgctagagcctcaggcgcctccgccctccctcccgcggcaccgtcaccagtgggtagtcacagcctcccggagcccatagccggttctccaacctttagtcttcagtggctttggggtgccctctcagtggagactgtggttgcagtccccgggggcagcgggagaatggcttgaaggcacacctttcctgctgccgggcccgccccatttccaggctccgctgagtgtctgggacacgctgggaggcccccacctccgccctcacgccgagcctcacccccacctcctctgtgtgcggtgtaaccatgcgctaaggaccttcctcgagagcagccttgggaccgaggtgcaggggtcgcggccctccagcatgaatgtgcccgctcagccgacgtctcccttcccggtctgaccgcaggtatctggccatccgctacccgctgcactcccgcgagctgcgcacgcctcgaaacgcgctggcagccatcgggctcatctgggggctgtcgctgctcttctccgggccctacctgagctactaccgccagtcgcagctggccaacctgaccgtgtgccatcccgcgtggagcgcccctcgccgccgcgccatggacatctgcaccttcgtcttcagctacctgcttcctgtgctggttctcggcctgacctacgcgcgcaccttgcgctacctctggcgcgccgtcgacccggtggccgcgggctcgggtgcccggcgcgccaagcgcaaggtgacacgcatgatcctcatcgtggccgcgctcttctgcctctgctggatgccccaccacgcgctcatcctctgcgtgtggttcggccagttcccgctcacgcgcgccacttatgcgcttcgcatcctctcgcacctggtctcctacgccaactcctgcgtcaaccccatcgtttacgcgctggtctccaagcacttccgcaaaggcttccgcacgatctgcgcgggcctgctgggccgtgccccaggccgagcctcgggccgtgtgtgcgctgccgcgcggggcacccacagtggcagcgtgttggagcgcgagtccagcgacctgttgcacatgagcgaggcggcgggggcccttcgtccctgccccggcgcttcccagccatgcatcctcgagccctgtcctggcccgtcctggcagggcccaaaggcaggcgacagcatcctgacggttgatgtggcctgaaagcacttagcgggcgcgctgggatgtcacagagttggagtcattgttgggggaccgtggggagagctttgcctgttaataaaacgcacaaaccatttcacacacagtgacagcgctgtttcgcgtttctcattgtcttgagattctgggaggaagcctctggggcttcacagaggggctccctaggggtaagtgcaggaccctttgcagagctaccaggaaagagggctgatcacacctcaggcagccgggttacaatccgcataaaaatctgagtctggggagcgtgcgacagaggcaggcagattgtttaaggcgttcgataaagtcggttgatgacagacacagatgtgtgttcccagccgcatttgtgctctggtgtgtgacaggtctgtccttgcctgctttcagctcccagggcccctttgagtctgggcagcccagtcagtccccgtccatttttggccttagcttttccttccctggctacatctgggccaggatcaagtctccagcagctgtttcactccccggcggggggggggggggcaggaaagtctttccctggcaggttgggctccaggtgcacagcactgctgggctggcgcaagctgagaatccacttcaggacaagaatgtcccagggctttgctcatgagttggcctttacctgttgtcaggtaaaactcccttcccagaggttttttttgcttctgttttttttttttttttttttttggttgttgttgtttgtttttcttttgagacggagttttgttcttgttgcccaggctggaatgcaatggcacaatcttggctcaccgcaacctctgcctcccaggttcaagtgattctcctgcctcagcctcctgagtagctgagcttacaggcgtcgaccaccatggacgctaatacggctaatttctgtatttttagtagatacggggtttcaccatattggccaggctggtctcaaactcctgacctcagcttcccaaagtgctgggattaccagagttcttttgttctttttgttgttgttgttggggggaagtggggtggaaggcagaatctcgctctgtcgctcagactggagtgcagtgttgcaatctcggctcactgcaacctccacttcctgggctcaagtgatccagcttcagcctcctgagtagctgggactacaggtgcatgccaccacgcccagctaactcttgtgtttttgatagagacagagtctccctatgttactctggtctcaaacccctgggctcaagcagtctgccctccttggtctcccaaagtgctgagattacaggcatgagccaccacatccagggttcttgagccaaggctctttacacaaaatcacttcagtgtttaaggagagcaaggagactctcaaggctgtccccatctcacatcgttaagcacagaacactctgcccaaaggtttgggtcttaggtaggctggtgtcagccaccgaaatgcaggggacactcgtgggccctgattggaagtacaaagtcagggagaggtagaggtcctacacctgccaggtccccctgggcaggcattgagcgtctcaacgggttccaggtggtggaaatggagcgggacagggacaccaaggcaggtgcagtgtgggcggggctgggtcctgggctttatctttgagcgtttgcggaactggggcaggggctgccaagtgcacggccccagagtccttgcccagagcagctgcctctggctaattgctcagctgccagagaagtgactggaatagaggttgtagcttaggcaccgctgctccctccagtccctccgtgcagccgatgatggccctatggtccctgctccatctcaccttcctggggttcagcattaccttgctgttggtccacgggcagggcttccaagggacagcagccagtaggtggagggcaaggtcataagctttgggacttgggccctagggcacctgagtgaccttgacttttctctctcagtctggccatccctcttcaacgtcaacttgtccaagaaggttcaggaaagcatccagatcccgaacaatgggagtgcgcccctgctcgtggatgtgcgggtgtttgtctccaacgtgtttaatgtggtaagtgcctctaggccaagggccccaagtgctgagctgggcagggaacaggactcagccctggatagtgctggggtctcctgctgcgttctttcaacacagcgctcaccctgaggtgatgcattgcccttcccccaggacatcctgcgatacacaatgtcctccatgctgctgcttaggctggtgagctcctatgcctggggaggtgggatgggaaagcccagctgagtccagctcagaactaccagccttcatcaacatgctgagcttaggggcatggatatgtggagagcaggagcctcagtggtgcccttgtgtccccagtcctggctggacactcgcctggcctggaacactagtgcacacccgcggcacgccatcacgctgccctgggagtctctctggacaccaaggctcaccatcctggaggcgtaagtgagacagttcctgccccaggaatctgccatgcatagccctccttttcccccatctacaacctagaggctgtctgagtgaatatgaccctcctggcggtccccgccggactagcagtgcaccttcactgcctcgaattcccctcccactgccagaactctgaaagcagctggggttggggttgggatgccagggtctccccccggccccgtccaagaaggggctggggctctggctgtggtgcctttccccacaggctctgg

SEQ ID NO: 7534 - DNA, 6000 bp, Homo sapiens
tcatgccaacacccaggacgttgtacgcactcaacacatattcacagccattactgttgtcatcattgtggccatgagtactgtgcccgttgccataggaagcgcattggttgaagttcctgtaggagtttagaagtgagcacttctggagttgggcgtggtagctcatgtctgtaatcccagcatattgggagactgaggtgggggatcacgtgaactcaggagtttgagaccagtctggcaagatggcgagactctgttgctaccaaaaaaaaaaaaaaatccgagcgtggtggtgcacacctgtagtcccagttacttgggagggtgaggcaggaggatcctttgagtccaggaggtggaggctgcagtgagctatgattgtgagtcccttgcattgggtgacaatgcaagataccacctctttaaaaaaaaaaggtgagaaatgagctctttatgctggggcctttgggagaaggtgggatttgagcatccctagggctcacctcgcacttgaagatgggttaagtggggtactgggatggaggagggtgggggaaagggtggagtcagcacgtttagtgtggctgggaaggggtgtgcccaggtgacagaaggtgggtttcggtgggagaggagactgggtctgtgggctcagggtgcgggggtggggcgttgctcagcagtggggacccctgagaggcaagggggcctgatcaggatgagcttccaggactgttgatctggaggtgaggggttgtgggaggttggaccagggaaaggaggcacttctggtcattcaggtgagaagaaggggctcccaggtagaggagggatggacggaagccacagaaacagcccagggagggccgagaaggagaggctggaggtcacaaagggcaccgggtttggtggccagaaggaagttgatgcctttccaggcagggactgctgcagggagcgggaggggagtgaatgtggagggaacaggagcccattgtgggttatgctggggggagggggcttgtgggcttcacctgcagattcagggaggcagggatggagctcagggaagagggctgggtggactctggatgaagcagccgctgacttggacacatcagagaggtccttgggaggggccaggcgaaggtctccaaggacagtggtggagctggagaagataaggctgcggacggggtccttggacccccaggtgtggggaacggcaagaagaggagagcagccagggagtcccggcaggagtggccagggcaggaggagggccgggacttcccctgcaggcctctgagcaggcactgtgccctgtagactccggtgatactgttagcaccaagggctctgttaacaaagaggacaggacacatttagtgatgtgtgctgtgttcactggaaatggtgctgtcttttgttttgtttcgttttgttttttttaaatggagtctcgctctgtagcccgggctggagtacagtggtgtgatctcagctcactgcaacctctgcctcccaggttcaagtgattctcgtgcctcagcctccagagtagctgggactacaggcgtgcaccaccacgcccagctaattttttgtatttttagtagagacaaggttccactatgttggctaggctggtcttgaactcctgacctcagacagtccgcccacttctgcctcccaaagtgctaggattacaggcttgagccaccgtgcccggctccgtgctgtctttattggaggcagaaatcactttggaggctaaggcaatggttctggagaagaagcatgaccatcccctttcccagccattgctctatcccacattgttagaaggaaatgatcccagaggactagaaagttgagaggtcaccactgctgagtcttttatatatgacagatcccacttctgggtctatatgtgcccaaaagaatggaaagcagggacaggaccagatatttgcacgcctatgttcatagcagcactagtcactatggccaaaggtggaagcaagccaagtgttcatcagctggtgaatggatgagcaaaatgtggtccatccatcccacgccccagtggaatattactcagccttaaaaaggaaggagggctgggtgtgatggctcatgcctgtaatcccaacactttgggaggctgaggcaggtgaatcacaaggtcaggagatcgagacccgcctggccaacatggtgaaaccccatttctactaaaaattagttgggtgtggtggcatgcacccgtaatcccaactactcgggaggctgaggcagaagaattgattgaaccagggaggtggaggttgcagtgagctgagatcacgccattgcactgtagcctgggggacagagtgagacttcatctcgaaaaaaaaaaaaagaaaagaaaaaaaggaaattctcttacaggctactacatggatgaaccttgaggaaattatgctaagtgaaagaagccagtcacaaaaagcaaagagacaaatactgtatgattcctgaccagaggactcctagaatagttaaattcataaagacaggaagttgaatggtggtcgttagggggttggggtcgggaaggggagttagtgtttaatgggtgcagggtttcagtttgggatgatgaaaaagttctgtgcatggatgatgctgatggttgtacaacagtgtgaatgcactgagtgccactgaactgtactgttaaacatggttaatacggtaaattttgttatatatattttgccacaacttattataatatataaatatatattttgagacagagtttcgctcttgttgccgaggctggagtgcaatggtgtgatcttggttcactgcaacctccacctcccgggttcaagtgattctcctgcctcagtctcccgaatagctgggactacaggtgcccacaaccacgcccagctaattctgtatttttagtagagatggggtttcaccatgttggtcaggcctggtctcaaactcctgacctcaggtgatccacctgcctcggcctcccaaagtgctggggttacaggcatgagccaccgcgcccggccttttgccacaatttataaacaagaatgaattctaacgttcatattaattgaagccaacatgacacacatagcataaacaggtgtctaagcggccaggcgcggtggctcacgcctatgatcccagcactttgggaggccgaggcaggtggatcacttgaggtcaggagtttgagaccaggcctgaccaacatggtgaaacccagcctctactgaaaacacaaaaattagccaggcgtggtggcacgtgcctgtaatcccagctacttgggaggctaaggccggagaattgcttgaacctgggaggcagaggttgcagtgagccgagattgcgccattgcattccagcctgggagacagagcgagacaccatctaaaaaaaaaaaaaaaaaaaaagtgactaagcgaggggtatggtggggtgtggcgtggtgggatgggcctggcttttatgcctagaccaacgtgcggcctgggcaattatctaattatcggttgtctaattgcccagcgtcacacatttctcacctgtaaaatgggtatgacagtctctgccctcccactgcccggggttgctgtacggcctgcgagagcgggtttgggaaagctctttgtcaactgctgtgcggaattgatggggtggccacacttcaatgccttgactcaggggtcagagctttcaagcgaccccaggcagggttacgagggcctccctggcagtggctgcttattccaggctggacctgccctacggcttgttggcgtcccgcaggcagctgctaggatggtttttgcagggcatttgggccgcagcctggatgcatacctagacctcactgtttttctcagccagggtctgggagagaatgaaacctattgttctagttatctgctgtatgtgactctctcctgtgcgtttctctcttgtgggtcttctctcctgtgcatttagggtggtatgaagtgaagagagaaaatagacacttgtggccgggcgcagtggctcacgcctggaatcccagcactttgggaggccgaggcaggtggatgacgaggtcaggagttcaagaccggcctggccaacatggcgaaaccctgactctactaaaaatacaacaattagctgggcgcaatggcaggtgcctgcaattgcagctattcgggaggctgaggcaggagaatcgcttaaacctgggaggtggaggttgcagtgagctgagatcgcgccattgcactccagcctggacgacagagtaagactctgtctcaaaaaaaaaaaaaaaaaaaggaaatgacactgatagttatctgtgttttgtggttccctgaggaacccccagttgagaagaaaggctgggacctggctgacccagaagaccccctcgacgccaacccctactccaggtttggggacccaggaacgagaggcctaagagagttagggactagttcaaggttgctcggactctcaaaacaagtccctaatgccaggccagtactgtgtggcgggcagcacgaccctccattccctctttattttgaaaacggaacagttacaggacgctagttttgacgtcgctggttgtgaatgtcatttgtggagccgtttcccagacctccgggggcaggagccacaggtttgagaggccgagcagcgccctcctttcctgagagctgaggttgcagctctggctggctctggtaagtgctctgcagccctggcatggctggaggaggggcagcagctaagtggtttctgaaaaagggcaaaaatgatgggaaaagctttgggatcctctgggaatcagagccgcagcaaaggcagctgcttgcatcgctggaagcgttttttccttgagtgccgaagggcgtccacagcgactcctgctagtgcagggcagctgctgccagggccgggcccgggaccccacggaggcggggagaccactcttctcccacacgagcccagctctcccttcgagtagcaaccgccttcaagctcacaagcacccgtgggcctggggtgtgcctgcgtctagctggtgagtccctttctttgtctgatggccaatgcagacattagcttttaagatggcatagtgagtggccaaaagccgggccctgtcacttcccagctgtgcgactgtgggcaggtccactcacctctctgtgccccagttaccttatctgaaaacggggggtagtaagagtggctgcctcaaaggtggtcgtgaggctgaagcgaacttgtggtgccctcagcctggctccttggaagcacctgggaggtgagagtggaggttgttgttactggggtttgttcttgttgctcctgcatcagccgtcctcgggggaggaggctgcagctgctgctgagattgctggtgtgtggccggaggttttcagcgtgtcgccctctctgtggagtggacgagcgcagggctgggaagcaggcacactgggtccttgtgctgctgtcctatctctttgttcttcacccctgggttgggaagcccgcagcctactgcctccctttgacagaagggactactgagaataatctggctgggtcctgggccagcgttctcccagcttccagaaagtccccagtggcgagcgggaggtgctcccaagaacttggatggatggatggatggatggatgctttgggcagagagaggagcaggggagccacaccccatgttgtctcacttgcattggggagagaagggatccttcccccagagggtaggcagtatctgttctggctttggagttgagaaagactcagatcataccacgtctctgtgggcagaatcgattcttttaggattgtcctttagtccagattgatgagtttgtgagtcttgtgtaaaccagaatcaccatctccatcacacagccaacactcgtttgc

SEQ ID NO: 7535 - DNA, 6000 bp, Homo sapiens
aactacagaaataagaccaaaaaaaaaaaaaaggcagagaaaggggaaaaaagagattgatttagggtcacagttacccccacaaaagcccatgtgcctcataacatcaataaactttattatttatttatttatttatttatttatttatttatttatttattttgagacagggtctcactctgatgcccgaggctggagtacagtggcatgatcacagttcactgcagtctcgaccttgcaggctcaggatccccccacttcagcctcctgagtaactagaactacagacgtgcaccaccacatccaggtaattttttgtgttttttgtagagacagggttttgccatgttgcccaggctggtctcaaactcctgagctcaagcaatctgcccatcttggcctcccaaagtgctggattacaggcgtgagccactgcacctggccagtgaattttaatattaaaagtaatgtggctcttatcaccatttgcataacagccctaaaagaaagtgcatacagcattctaagcagcacaccaagaacccatcattgctgtttcatctctccacccaccacctccatgaaattcctgaagcaaggggacggtcaagagcccccaaccacccgcagaaatatcaggagctagaagtaccagatcaagagtaaaagggttggtaggcttatactccacagggctggaggatcacattgcgaggagattcacacccaagagcctatctcaagagcaaaaactacaggagaaacagttgaaggaactggtgacatttagcctggagaagaaaggatggtcttgaggacttcactagcaggtggactgctagacccctttcagcatcaacgtgctctgattctataaagagtttgaagagtttccatgtgaaagaaataccaaagttatttttgtgtgggtccccatggataaattaggagaaatgggagaaattcacatggagacagacttcaatctgatgaaaggaagaagctttaaacacagcaagatgttccagaatagaattgattacactgtcactgaaggaatgtattgaacggattcctacagtgggcaggaaggaggcttaggtagtatctcagatactttccaattctgagcctctgagtagcaggtaaacaggaacactgagggatccagtgaaacctgatcaagccacacaagtgtcagctctgaaaattgtattacaaaaacagaaaaccgtgttcacttacattgatctcccctcccaacagattcatttaatgagagaaaacagcttatcagtggtggtggtggtggtggtggttataccccagaatgagggcaggctggccagaagactttcctgccactgcacacaacatcacacagaatgccagaacaccaggcatggtgaacagatgtttcagagataaacaagggaaattttcctaaaaacttatgattggcacatcacaatgctaaatgctaatttcttggtggagaggttatgtgggtcacccctgttctgcctcatgaatttgtttttctggccaagggagtcttccaggatggtaacactaatccacaggagctattgtgtccaagtacctctgagaactgaggcagcgtggactagggctggagaacacagggatggagtgactacctgggcaaagcctgctctcctgactggtagctgtgtggcttaaagtgagtaacttaacctctctgtggttaaagtttcctcctctttaaagtagagaaaaaatggtatttgcctcattttgaggattaaacacttagagcatgtatgatacttgtttttagtgtaaaacacttacaggaggccctagcacttaggaagtcccacatttatattattatcataataatataattttgtaaggaagtatgatggaggggggaagccctgcactttgaaatgagttagagttggattcaaatcctgtgcatgcaccaaggatttgcatcaacaatggtaaaaatagccaggcatggtagcacactcctgtaatcccagcactctgaggctgaggcaggaggacagcttaagcccaggagttcaagaccagcctgggcaacataacaagaccctcatccctaaaaaacaaatagtgtataaaaaaggccaaaatacctcccccgcagagttggagtgagaaattaaataacatttatttatgtgcctagttctgtacctggcgtatagtagttgttcaagaaatactagctcctttttcctcttccccggtaacagtgtttcatcaacgtgctaggtcactgtgctaagaggtagggatacaaatatgaaggaggtgtagtccctgtctgcaaacgggtcatagtccagcagaaaggcttggacacaaacaatgataagggctatcctagaggtatcaatcttccaaggtatgctgggatcataggaaaaacatgacccaagtttgtctgggagaatcaaggaaaccttgacctaggaggcaatgcataagctgtgatttgaagaaagaacagaatttcactgggctggtcaaagaactggtcagagaagagggtgggagtatttcaagttgcatagagaatgtgctgcatacatgtgccataaagagagccatcaatcattgcttggagtcactagctgcccgtgtgtctttctctagatttctgtgtcaaggccccttgaggcctaagcaggatacccctcctctccctgaaagagctaccatctggagaattcacaggaaatcccatggcagagaagacagttggtcaatcaaaagtagcacatgtacatttcaagggggaaatagctaggaaagagcaagcccacaacagctgaacacatcagaaacccaaaatgttttaaaggcttttataaaatagagcttcatgccactccagatttatgatgctggaagatggcacatgcttgtcctggttgcttcatcagtaactgcactgaggtcactaggtcaccccaccttggccaagacacgggtcactgtggcatttccaggacccttgagaccaggctgggagcactggagtatgagcctttggtagaggccccagtacagcaggcagcttcagaaccctcccctcaaagccagcaacagacatcttcaagcaaccaaacccaaagcaaactgtcatcaatgcccaactgcaatagctttttccccagatgagtgagaagggtttccaggtgtgtgtgtgttgtgtatatgtatgtgtgttgtgtgtatgtatgtatgcagtatgcattgggtatatatgcatttaagtgtatatgttggtatacatgtatgttcatgtatatgtgtgttgtatgtgtagtgtgtgtgtgtgtttgtgtatatgtgtgcttgtacatgtgtgactgtgtggatgtatgtatgtgggtgagtgggaaatgaggggctcagaggtcctcttctccagagaccagatgcagggagtcatcacgctgtaagggtgccctcaggtcagtggggagggaaagcccatcccagcactgcttctctcctgcttggaaacccacagctcattcaacagatctggccaaattgcccctaattcatcattacaaagacggtaaaactcctctccacacccaaatctctgcttccccaagcctcctctccccaaaggatacacacgttggtccttcttccactggagcatcctcccacccttggagtcccttcacactgcctccaccaccaaattctactctccggataatgtctggaaaacccctttatctcatggagtaatggggctccaagtgttccctgtcccagcaaggggaatgggaaagatggagtctcctgtccctggaagtcctactcccccttcccaccctcttggagagctgtgcttggcagactgggccagggctgagcagtaggcacttccagggaaggggctgggacacacatgggatgtccctaagaggctgaggggaggattgtcgcactgagcctaccctgctcgcaatgcctcaacacacatactcattacatacaacacatgcacatacacacacacacaaaacacaccaaccacacaccacatctagaaaccctgatatccatccacacatcaacacatgcatttcaaacccaggactcactaagtgcacacatacacacacggaacatacacgtcaccatagacactacatcctgcatgcaccacactctaatggccacagcacgccacccgcagacatgctcacattcaagagtttcacagaaatgcccattcacacatacacaatgcacatcctacgcacacccaatacttggcaccacactcgcaatcgtgttcaaatgcccacactacacagcaactcgctctctctacagcccatctcacaccctcaggagtcctctcacccctgtctacactggggccacatcagcacaatggttatactacttatctctcccacaagcccatacacctgagcacatctgtacagcgcatccccatcccgctccccaccacaccccacccccgcacccggccgactccagcaagaggcttcccgctcggtgtgcagcggccacagtggccaggaattaaaatgcagcgaggaggagccgggcgcgtcagcaccgcgtctccaggagcgcacggcgctcacggccgccgccgccccgcccgcccggagccgcggggccagcgagctgaggagcaggtgctcggagcccagccgcgccagcgtcgcgcggccgctgcccaagttcgcctggggcccaaagagggttctcccgggcaaccggggaaggagcttagccggcgtcacggccaccgcgagctcggagtctcgagaggagaagggcgcgcggagcagcgagtccgggtcacccccgggaggtgttggcgggtccccgcagtccccagctcttgtcgccgcgggggcagagagaagacgcgagagacagcaaggctgggcttttctggagacgcgaggcacctgggagagccgaggcgagaagcgacacttccctgcggctagcatccttgaaggaccccggcggcgaacagcctcccgcaggacgccctgagaagctctcagccccaggcgagagcgggcgcctggcaggacttaggcgcaggacttggggaagcctaagcaggtctctgccgagcgcagcccagggagcagtaacaaggaagggtcctggaggggaagggaaagaaggcggcagccggcaaggcgaccactcacccccgtacacacccaccccgcccgcccagccaggagccgcggtgcgcctctgggggcgctcgttccttggcgccttctctcccgtgtcccagcaccgctgggctacgggccgggctggtggggtccctggggatgtccagatcaggcatggtggccgagtggcccttctcccaggaccagcgtaaaagctggggttaggcggggcaggggggactcggctcagggtcccccgaggtccaggacgagggaaggcgggcgcagcacccagggactggagaggcggctcccagtgggacccctccagaagtagtgccgggcgccgggcatcctccaggaagaccaggggccgggaaagcctgggaggcgctcgggagaggccactgccaggggctgcgggctgaggcggcgctcagccccgggcgggcgcccgcggaggcggcagcggcggcgccgggcgggcatgccgcgccaccggagctcctttcgggcgcacgcttccctggcgcgggctgcgcgcggctgccgctgctgctgcttccactgctgctgcggactcccatggcggctccgcccggccggggccgccgccgctgccgccagccgcgggctgaatgaatgagccggattggcggagccgggctgcccgcagccgcgctcaccggcccgggacgcttccgcatggcccgcgaggagccggcgcccgcggcgttggcggctgccgggcagcccgggggcggcagag

SEQ ID NO: 7536 - DNA, 6000 bp, Homo sapiens
tatcaagacctttcccctccagctggagccagacctgagctgtgacacagccgtgattctggggcaggggaacgtggctctggacgtggcccgcatcctactgaccccacctgagcacctggaggtgagtggtaggtcagggctggcggggttggaggtggggtcaccctgaggagagagtgcccttgtctgcagggttcaggccttacctctccaagctgggctcagtgcctctgtttccccgtggtgcccaggcagaggctctctgaagggcagtgccatgagcttcctcttctaccattttcccttcactttctgcactccagctaagtggcgtttttctcttactcttcagtaagccacatcccctgcttggatcatccccactcacctcccaccagttaacagttaaagttcatctttgagatcttggctcggttgtcccttcctccaggacttccctgaattggtccactcccccatcgtgcctcctcccatagacctgtctacttctgtttcaccgcatatcatcgccacggcaattttacacacattgatgagtatttgatgagtatttctctccccagcagatcacaagctctgagagggcctgctccttgtctcttttcctcaccattgaccaccccgcccctccaagctctttgcatgggggtgagcacatggtagaggcccactacatacttgttgaatgaaagtgtgggcctggtgtgctattagttggagccatttgcagagttggcagcaatgctccatctggccaccaggggggagcagtggcgcaattttgagccgccagccttctccaggcccacggtggggacatgaccaaatggagagtcccctttcctcggtcagtgtctgatgactccaaggccctccttttgtgccagagaacggacatcacgaaggcagccctgggtgtactgaggcagagtcgagtgaagacagtgtggctagtgggccggcgtggacccctgcaagtggccttcaccattaaggtgctggggccagagtgggaggagccagggttccaggtggagggggcctctccttaaggggttggggtggggcagagcccctgggagtagctgctgcctgggatggaagaaggggagcagtcagggccccgggggccctgtgcctttggggaggaggcgggtggtggtctctcctgcctgggctggaccctggggtgggctcaggtggactgtgttctgggcctgacctcctcccccattccctgctcccaccttcaaggagcttcgggagatgattcagttaccgggagcccggcccattttggatcctgtggatttcttgggtctccaggacaagatcaagggtgaggggccctggcctggccccccaactactagggagagggtggcctaggtcagagagggattggggaagggcatgcagggagagggccggggcccagggacagcctggagacattctacgttgctgacagaggtcccccgcccgaggaagcggctgacggaactgctgcttcgaacggccacagagaagccagggccggcggaagctgcccgccaggcatcggcctcccgtgcctggggcctccgctttttccgaagcccccagcaggtgctgccctcaccagatgggcggcgggcagcaggtgtccgcctagcagtcactagactggaggtgagtctcatgtttctcaaagacacccccttcccaggcctctgccacccgcctggtgttgcccacactctccccaacagggtgtcgatgaggccacccgtgcagtgcccacgggagacatggaagacctcccttgtgggctggtgctcagcagcattgggtataagagccgccctgtcgacccaagcgtgccctttgactccaagcttggggtcatccccaatgtggagggccgggttatggatgtgccaggtgagagggtgtgaggaggctgggtgctgaattatggtgagaggccgagaagctggtatctcctggggccatgcgttcattcatctagcaacatgtactgagaagcttctgcagggcaggccctctctaggacccagtgccgccctcctcttggccctgagagaagttccagtctggctaggacatatgtgacatacgtcgggtcattaagtcattcaacaaacgtttactgaggtcttttctgggttaggccctgtgcttagtgctgggattggagattaataaggcagcctgtgtcctcagggagcgtccagttttactaagtgcccacatacctatctagtgattaattcacttggtaaacatttaccaagggcctactgaaactgcaggggagcaagcctcagctcctaagcttagggatcccctcatctacagggaaactgaggtgtaagggggtcggcctggtaaaaacagggagagaagaatccagggcagtggaccagcggccacagcaggctcagccgacagtctgccaagaggcgtggggtgtctgtgtgcgtgcacgtgggtgtagattgtgggcacaggatggccagggtggtatccagccacctccctcccttccccttttgttaccccctctcaggcctctactgcagcggctgggtgaagagaggacctacaggtgtcatagccacaaccatgactgacagcttcctcaccggccagatgctgctgcaggacctgaaggctgggttgctcccctctggccccaggcctggctacgcagccatccaggccctgctcagcagccgaggtctgggccccgatgctgaggtcctgggaggtggggtgggtggtccttctctgggcctcactctttgggagggggctgttctgggaggggtgaaggaggaggtgttgacaatctcccctttgcttcaggggtccggccagtctctttctcagactgggagaagctggatgccgaggaggtggcccggggccagggcacggggaagcccagggagaagctggtggatcctcaggagatgctgcgcctcctgggccactgagcccagccccagccccggcccccagcagggaagggatgagtgttgggaggggaagggctgggtccgtctgagtgggactttgcacctctgctgatcccggccggccctggcttggaggcttggctgctcttccagcgtctctcctccctcctggggaaggtcgcccttgcgcgcaaggttttagctttcagcaactgaggtaaccttagggacaggtggaggtgtgggccgatctaaccccttacccatctctctactgctggactgtggagggtcaccaggttgggaacatgctggaaataaaacagctgcaaccaagagccatggttgatgggggactttttttggaagggttggggtcgggggtcaccttctggccgtagctcccctaccatcaccaggtggcgctgcagagacggctccctgctcaggggcctcattggggcttgatggggctcggcagccaggcctggcatagccacccttcctttctccgctcggccctgctgtggctgcgggttgcctgtcttctgtccacactagggctgcccgggaccgggaccgggaccacccctccctggggagccctcagtacaatcaaaacagaaaagaaatgggagcgggggactgagaagcagcttgtcccctgtacctctgggtgccccaggcgagtctagcctggggcccattctttggctctcaaagccttcctgcttccgtttccagtcagacacactggcctttaaaaatagtgcctcagtctccctagggctttgcagtgtccagagagtggtcactcccttttatggcagccctcaagatgctgcctcgctgtataacctgaggggtcctcgaaattggcccaaggtcacacactcgtgagctgcgggctcaaacccaggctccgggcaggctggtgtgtcctccgaggcgcacttgccccgagtgtcaggtctggggacgcggttccggagaggggagaggggcccgggaatgcggcgggaggggcctcgaggggcagcgggccgggccgggccggggcggaggtggcgggccccggcggggcgggccctcgcgggcggcggtgagagctcccgcacagtcggctgcgagctctgggagcaggaggcgcggtgcgcagcccagcccgggacggagccgggcgccgtgcgagcctcgggagggtcgcggggcgcaggggcgggtcggggccagcggaccaggccgcgccacccgcccccgcccccgccccgccgcgcccgggctccggcgcccgcggagctgagactgagcgcgccagccctccggggccgaggctctgggacagacaccgcgagggaggcggccggcgcgggctctcgtcgcgggcgcagcgccccttcccctcggtaagtggcgagcggcgggcgaggggcaccaacttcgccgccaacttggggctgggttcccgcggcgcgcgagcaaggacggcggagacagaggcgggacacccggggggttggacccacgcaggactctcggggctcaaggagggggcggctggaggacccggaccctcaagaacctggccttgggttttgacccgggcggccggagagaaggcgaagaagaggccgagcagacaggcgcgcggcggacgcgagagaaggacgcgggcgaagcgtccaagacgttcgtccccagggtcgccgagccctcctcctccttcgcttggcgcggcagcaccgcgggaccaggggagtctgggctgccgcggacccaaactgttgctgctggaagccgccggggcggagagcggggaacagggccgggagtgggggccggggctgggatccaccagagcgaggggttggaaaggagtcgagaaggtgaaagggggctgtgcggctccccagcccagtgccccagtttccctaggtctgctgggcacctgctgcgcactcgcctcggcgcccagaccccttcccccgccgcgagtcccgcttcttccccttccagctctgccccatctcctttgccccagcctagctctctccttcctgcgacctgggagaatcggagtgggcttccagagtagtggcatcttgcagatgctggcccgtgcccggctcccgggcttccagagcgcaaagggaagggtaggcagagagggcactgggcgagcaagacctggcgctgggccctggctgcgcaccagccgcctgcgccggtctctgggggcttcgcccaggatccccgacggcggggaggggaagccccgagtctcctgtttcctgcctacgcgggcagggcggggacacgcggagcaaaggcacccggcaacctgaacccccaggtgcgtcccgcgaccctgcaaggagctgctgggtgagcaagacgggaattcccgccaggccctgatgcccaccccattcgtccactcggtttcccagccctggtcgtccaaggggacttctggctcggtcccccagccctcggatggtggcgttatcttagttcagtccctgaccccgggccacaggaaaatcgaggaaagacacttatttggggagggtaccattccgctggctgtatttcagagcccgtccaggtcttggcggtgctagtgactttgagcctgtttctaaactcccgaagaataagagcgtgccaggggcaggtaggcaggtccgggacacctgggttcgcccagggcccccgggcgggcctgggatggtactggggccgcctgccaggctggcttggtccccccactgcgggactcggggtcacgacccagcttgggggagtgggggtgggggccccggagccgcggacgccggcggggggcagcgtggggcggggggcgccgggtgcgtggtgctcagcttggccgccaggaggcgtggcgcgggtccccgcccggagccgccgccgccgccgccgccgccgcatcgcgagtgtccttgagccgcgggtgacggtggctctcgct

SEQ ID NO: 7537 - DNA, 6000 bp, Homo sapiens
aaaggaagggctgggctttccaggccccagtgctgcatctgatgaatggtgcctggattaggaaagattctgagctgctctggatgcagtggatgaagctctgtggctgaggaatggtgcttgcctgggcgaggctggagcaggcaccttgggcggggaggcgtgcgccagccttccctgcattgagtgatctctgaggggtcttccaacggtgaggcttgatcatgaggtagagtgccccatctccgaatgagggtgagtggccgtgggttggagtgctggtgagggcccttgaacctgtgcttttgagtgccgatttgcagcagtctacatctcatcaccacctgggactgcaggggcttgggaccaaaaggattgcagtgccacgcacacagtcaggcctcaggtcttggtgttgtggggcactggtttcacccctacagcccagcctggaagcttcactcctgaaaggctgtgtaaccatcacagtgactcaatcttcctaggcttccgtctgctcatctggaaaatggggataataatcacagtgtgatggaagggattaaatgaatcagtttattaaagctcttagaagagcacgtggcaggtagtaagcacttgatagatactgagtgctgtgttcgtgcctcgtgaggcgccccagctagctgaacagtctctgcatgggggatgggggctgttggcgcctccccctccgagtccctatgtcttaccctgggtgatgcaggcgcctgcactctcccttccggtcagtgctttcttggtgtctgggaatgtgggtccaggccttgccctgagctcctcccggatgtcaccgaaacctgagaagcccagggcctcagggcagtgggcatggggcatccagttccatccggaagcacctcccggtgactcctggaccccacccttaggtcacgtggcagctgccgtctggcatcctctctaaaagctcccagcccaggtcctggtctgttcttcaagtggactggtcgctgggaggctgcgtctgtaggcactgtggccagcaggaaagcagggatctccgggggtctgccgggcccgtgctctctccccactgcctgctctctccctcctgggtttgcttcactgccccttggtgttgaaaccgccttgtctagctcaggtagtgtaccccagcgcccctctcccattcccctcccggcgaccctgggaccctggcaggccaacctgggtgtctgcggaaaacggtcctacctttagtagtgagcaccttgtcttggcccttgaattgctttgtgacctgggacaagtctctttttctttttggacttggttctcccatctgtgaaatggggagccagccttcttgcttgctaaggcctcttccagcaaaacagtttctctgatttcatgtcttgtctgatttcactgtatgcaccccattgagcaagagccaaaaaggcctgtgtgtccctggtggaggatattgtcctatatttcttatattgcgaccttgaaggccgcatggttgtgtaacatcttgccacacctgtgtttacgcaggagtgttcttgagacattgtctagcttgtggtgctagggtttctatgccagggtccccttctgggtctgtctttgtggtgctgtattcaccaagtgcccagtgagggggctcccagcacccctggggagggtttctctctctctctctctcacacacacacacacgcacacacggcagagcagggctgtgtgaggctgaggactgacattctgggctccaactctctcttctgctcagtttccaggggtcctgggacaggtgtctttgtcagtttttggctctgagaaatgagggagtggggcatgaacttgaccttgttgatgctctctgtgtggtaaaaccacgcagagaggaacgtcgacagaagtgggggtttccaagcctgtatgacaccatctgggcaggtctgcggtgcccagccctggcagagatgccaggagctgtggcagcaccctcaccagtctggtagttggccagtttcgaggccgccagctgctgggagcacatgcagaccgggctctctggcctttaattcttgtgattctgttccttgcaggctttgagctgctcggagcaggggctggagcagccatgacccgctggaagtccctcaaggcccctgggccacacaaatccagcccctgtcagctggtggcctcacgccggcgtctgagtgccccggccctggctgcctctttctggagggtccaggaatctggggctgagcccccttcccagcacagcctcaggggtcccccctgctgccggctccctacttccaggcccaggcagaagcagtgtccaccattccggccctgcgtcccagctcctcagcgtcatggtgaggtggtcagccacagcggtgttgggggaggacggcagagtaaggaaaggcatccctgcagagcttgggggcccatggtgggggacggcgctagaggtggtttaaaactcaactctcctgcttaatggctgtgtggcctgggggaagtcacttaacttctctgaacctggatggtggctgcacccccgggttgttgagaggacgatctgagggcagctgttgatggatctgtcccccaaggcgcccaggaccccgcctgctctccctgtgtctctctcaggcggcagttgctgtgtgctgctcggaccagcgggctcggggctaagcaaccaggcagcccctgggagtgttccacagcctggccgggcaggcggctccaccatcacctgttgctcaggtgtttggagcagagctcagaggccgcacccgctccgaggcccagactagtgtggacgtggccagaagctgggtcacacagaccggggctgagtcctggcattgctgcctcctgcctatgggactgggacaagtccattctggcttctgggcctccaggtccttgtttgtaaagcagggtggcccacccctccctggagggcttgagaggcctgcagaaggctgtgtgcagcgcctggttcacagtggtgccatccccccaggatgttctcttggggcctcagtgtcttcgtaactgagtaatgtggctgcaggtgtgctaagggagaaggctttgtctagctctgaggttatggtgtgactggactgggactgggggtgctgggtccctgtgggcggggaggggtgggcctgtccagctcctccgtcggggctaatgctggaaggcccaggtctccctgcttccagcctagcccagccaaggcaggctgccatccagatgtggctgtgggccaggcggtgccatagcccctagcttgcagatgccctagcctgtcactgacaggccagtgtggggcctttagtgggggcagcacagcctgtgtgtcccgggggtgggcacgtcagtggctgagagcaggctttgttctggctggcatggatgccctgctgcggggcctgtcctggggtgcctgaatgtgcagtaggctggcctggagccaggtgctgcctgcagtgagctgagggtggtgctgggaacaggtgacacccctgagcactgcccaggtgctagggtagcagccttgcaatcttccttagagatgcgggaagcaggggctggggagggccctcggctgaggtcagccagggagcagcccatgtctgggtgccagatcttaccctctttggcactgctggtgaccaagaagctgcaagcatggcatgtgggtggacactgtagagtggggcatgtgggtgtcaggagggtggtgggacccagcttggggtgttcaaagtgggtggcgacaggggtggcaggccgcattctaggccctgggaaggacaacaagaagcaaaagagaaaacgtctcacgcctgtaatcccagcacttcaggaggccgaggcaggtggatcacctgaggtcaagagtttgagaccagcctggccaacatggtgaaaccccgtctctacttaaaatacaaaagttagctggatgtggtggcgggcacctataatcccagctgctcaggaagctgaggcaggagaatcgcttgaacccaggaggcggagatggcagtgagctgaaatcgcaccattgcattccagcctaggtgacgagaggaagattctgtctaaaaaagaaaaaaagaaagaaaagaaaaaaagaaaatgtgctacccttagggagtggtggtctcagggtggggttgatggttgagtgcccctggctacgttattgttattgctgccgccattgtgcccttagaaggggcagtgctgtggatatagcagggatgggacatgggtcttcctggggcacaaggaggcctctggtgccaaggtggcgaggcagtggcaggatgtcttgcgggagggtgtccagggtgggtttgagggacagcctggggccaggggctgtggccggaaggggagtccgctggaggaggctgggaggtgaggtccgaggggtcaggagcttccctgtgcaggtcctgcatgtcctggggggcctctggcattgagcaggggagggataggcaccgactcagcttccacaggccctctgtggctgccatggagactggggggccatgggcagaggcagagaggctggcaagttgtgccccgaactggctgggcaggcactgttagattcaggccttgagggtgggagaaggggtcggatcctaaatagactcttcagagccctcagtgtgggagtgaggtgtggagctgaggtttttggctggagctgctgggggcccgaagggggtggccattcgcactgggaaggcggagtggggagctggcttgggcaagaccagagcacgatcgtgggtcaatcagggtggaagcgtcctccagtcacgtctgggggccctgggatgggggtagaggagcccggagccaccagcccagccagacatgctgtcgtctctgttgcaggagccgccctgcctggagctagcctgggggcgagccagggtcccccaacccccgggatgaccgcggccagccgggccaacccctacagcatcgtgtcatcggaggaggacgggctgcacctggtcaccatgtcgggcgccaacggcttcggcaacggcaaggtgcacacgcggcgcaggtgccgcaaccgcttcgtcaagaagaatggccagtgcaacattgagttcgccaacatggacgagaagtcacagcgctacctggctgacatgttcaccacctgtgtggacatccgctggcggtacatgctgctcatcttctcgctggccttccttgcctcctggctgctgttcggcatcatcttctgggtcatcgcggtggcacacggtgacctggagccggctgagggccggggccgcacaccctgtgtgatgcaggtgcacggcttcatggcggccttcctcttctccatcgagacgcagaccaccatcggctacgggctgcgctgtgtgacggaggagtgcccggtggccgtcttcatggtggtggcccagtccatcgtgggctgcatcatcgactccttcatgattggtgccatcatggccaagatggcaaggcccaagaagcgggcacagacgctgctgttcagccacaacgccgtggtggccctgcgtgacggcaagctctgcctcatgtggcgtgtgggtaacctgcgcaagagccacattgtggaggcccatgtgcgcgcgcagctcatcaagccgcgggtcaccgaggagggcgagtacatcccgctggaccagatcgacatcgatgtgggcttcgacaagggcctggaccgcatctttctggtgtcgcccatcaccatcttgcatgagattgacgaggccagcccgctcttcggcatcagccggcaggacctggagacggacgactttgagatcgtggtcatcctggaaggcatggtggaggccacagccatgaccacccaggcccgcagctcctacctggccaatgagatcctgtggg

SEQ ID NO: 7538 - DNA, 6000 bp, Homo sapiens
gtgtgagagatctacaggaggaaagtccgtttagcagtgagaacttcagacacttcctctatatcctatggtaaccaggcagttagaataacaggaagccctcaggccggcaaaaatggcacctgtgaagtttgtttgggtctatctgaaggcaggatttcagcaggggctgaggctgtacagaacaacttaaaattttcagttggataagaaaaatcggtaaaacttaaaaattgtattcatttcctaatgcctacgtggtattacatataagtcagacaattgttttctctatttcaaattactggattagtttgattattatacggactatcagaagaatagtggtacagcttttctccaagatcaacgcctttcatttgtggatcttccatcttacctgatacttctctgcccgtgtcttcagtactggaatttactccagtacttcttattttctgtttgtcttttcaccacccgaaaaacattactctcactcaccaaactatgtacacctttctttatattctcccaatcagacttaacaaacacttagatgacatttatttttgcctggtactgttttaagtgctttacaaatatgaattcatttacttctgctaagagctaatatatttctattatcttccttttacagaatgggggattgaggcacagagtgttaaaatagtgagacacaggattctaactggcagactggcactttatctcaattcttaactgctgtgttgcctctcactttaaagataagaaattaaaccaattttaacatgattctccgaaaaaccaatacttgcactccttcctccatgaaaatgtgctttatccctacgcatttttccagaagtccagctttctacttatacgtttatattttcataaactttgctacagagcaaattcggtgttacaaacattgcttccttttgttcacattttacacgtttactgcctccttaaatcattcaccttcactgtattttaggaaagaaatgctatttatatattttgtgaatccacagtctattatacattctgctaactaagaataaaacttgtctacttggttatttgagtctagagaatgattttcaacctggagtgactttgctcaccaagggacatctggcaatgtctggtcacatttttggatgtctctactggggtttggggtcatactggcatctagtgggaagagtttagggatgctgttaaactaaatgccataaccacaggtcatcttcccacaacaaagaattttctggccctaaatattgaggttgagaaacccagatctaggatattctgtgcatttaaaatgattccgttcagaacaatttaggtactttctcaatagtactgcaaaagctatatgaaaactatatgtatataaaaattatatctatctgtctctagctacattaacatatcaatctgctaggttaagtagactcaatttaaccatctggtgtttcatgtttgcttttgatttgtaaaagactcagacctataacatagccttaatgctaatatcattcttgagataaacgattataattgcagatttctttttttttgagaaagagtctcgctctgtcacccaggctggagtgcagtggcaccatctcagctcactgcaaactccacctcccaggttcaaacaattctcctgcctcagcttcccgagtagctgggattacaggtgcccgctaccaatacttgcagatttctttagtgttatgttatttagccactcatccatttttttaaagatttaagtattaagcattcactgtacaccaagcaatgttcttagtgaacaagtaatttagaattagattacaattaaattgtggattttaggacattttagttaacgtttactgaaaagtattatcacagaatttatattttctatagtttatgttgttttatatgattataaaagcaatgatttaagaattaagtgaagtattttacatgatgtggaaaaaatgagagaaaaagatggaaaagagttgattgaattattcattttcacctgattagttgaagccagtggttagtaacatcacatgcacaaaggacccagtggctgattcaaaatagtattccattctctccccatgattttacaatgaaactacgagaccaatcaggacaccttcttctttcttcttgttcaccaaaagtacttttttttttttttttttttttttttttttgagatggagtctctctctgttgcccaggctggagtgcagtggcacaatcttagttcactacaacctctgcctccccggttcaagcaattcttctgtctcagcctcccgagtagctgggactacaggcatgcgccaccacgcctggctaatttttgtatctttagtagagacggggtttcaccatattggccaggctggtctccaactcctgacctcgtgatctgcccgcctcagcctcccaaagagctaggattacaggcgtgagccaccgctacctgcacaagtagttatttttaatagcaatgacacacaagagtaattgcaggacatttacttaactaaaaaaatcagttggcaaaatcttatgtgaaaaattaaaacaaaacaaataaccatttccctgaaaaattaaccccacttggacctccacatcctttcccatccatcaccacatttttctaccccatttgacagcggaactctctgtaggctttctgcatgctttcaacacttcctgtcaccgtttttactcgtccctagtcaaatcaggcatttatctccaaaactctgttgtgacatctttcatcaaggtcaccagtgacatcacactgctaaatccaatggtcaattcttgtccttatcctgactgattgttaatatctaacacacatgatcactgactttttctttttcctttccttttttttgagacagggtctcactctgccgctctggctggagggcagtggcatgaccagggctcactgtagccttgacctcctgggctcaagtgatcctgccaccttaggcactcaagtagctgggactacatgtgtgcaccatcatccagcttatgtatattatatatatatatttaatatatatatttatatgtgtatataatatatataatttatttaatatatatttatgtgtatataaatatatatgtgtatatatatttttgtgtatatatatgtgtattatatatttatgtgtatatatatatttatgtgtatatgtgtatataatatgcatatatgtgtgtgtgtatatatatatatatatatatatatacacacacatatatatatatttttttgtcaagacagcgtctcactattttgcccaggctggtcacgaactcctgggctcaagcaatcctctcgccttagtctcccaaagtgctaggattacaggggtgagacactatgcccgaccacactgccttttgcttgtaacactttctttacttcgtatcacatgtcacaatttttcctcctacttcaagcaattctttttctcagtcttcttagttatagcctcctcattttcccagacttaaattaggctgtcccaggccttcgtcattggaatccttctcctttctaactactctgactcttgtattgtttcatccatgttcatggttgcaattactctatgtacactgataacttccaatcttatatttccattctgaaattctcccctgagctccagactaatatattgtctccttgacatgttcatttggctgtcagaaagcatatcaaattttgcacaataaaacaccaattattgatttcctcactccaaaactccttttctaccagctccattatctgagtaaacagcacaagtatttactgtgctatttattgggtaatggttcatttttattttattatcttttttttttttttttgagacaggatttcattctgtcacctgggctggagttcagtggtgtcatcctagcaaacttgcagcctcgatctcctgggttcaagtgatcctcccacctcagcatcccaggcgatcctcctacctcagcatcccagatagctgggactacaggcacatgctactgtgcccagctaatttattttttatttttagtagagatgaggtttcactacattgcccaggttggtcttaaacttctgagctgaaaccatcctcctgcctcagcccctcaaagtgctggaattacaggaatgagccactgcacctggcaagtaatgcttctttacaagaaacttgctccctctctaatctgaaatttagaggaagcaaatgaacaaacagcaaaacaagaccagcatgttgaaagaacatctaaactttgtccttggagtcactactgaggtggctgatagtctttctgggggcatacgcttccttgaaacccaaatgaaatgatgttgggcaagatgctgtttgccataggtatagggttacatagtcagacaaagtgtgcatttgcatagaaaaatctttgctgtcacaatcacagagcacctacacttaagaagcacacacttggaagaggttgtacaagacctagaggtgtcagtaagagaaaatgcagccttccaggacaataagaaatttaggggtaatgtgtggccacttttgtgatatggaaagatttttattattatataagcttccagaggtttgatcagaaaacaaagatgtaaataggcatggaagaaggctattcttggttcttgttttctgtccgccaccattggcaagactatctactatgcgtaggcatgggaaccagttaaagaaagtgtcgattcactagagcgaagctgagaactcagtggcctttgtctgtggtgaatgtatccggaaaggcaaagaagagagagattctcctgtggggtttctcatctccatggcggtaggtgctgacagcttcagaagggtactaacagggccaagagaaaagggccctgagatgctcagctacggtgctcttacaagatgaaaaggacatggggttcagatctgcacttcatcatctttcactaaggtaagatcgtgttgtggattaaaagtgttccaagcttgaactaattgcttgtcggctcttttaagctcatcctttttgcatgtatccccgctaatatgcatctttatgatgctttttttggctcagcagtcatgctttatggaggcatgctctatggctgggaataggttttctttctctcatatatctctggggaatgctgagccaaacagattaaaaatgtcagtgccatttgcagatccattaagggaagtaacattcagagacagagggagactaaaaggatgatgacttagccagctgacataacttactgacgtggagcaacgtggaagaggtgaatctttcatttcctgtggaaaacagtcattcataaaaccatcttttttgtatgtctttgtcactcttccactgttgcaaagtgacagcaaagtagcatcgcaaatttgaaactgtgtaataaaatacgttgacatcaatttggaattacatcttcacaactaaaaatatagacagaaatgccgtaaagactctttagaaaaacaactgctaaaaggtaacttcaataaataataagcccttcaagcattgaaatctgactaagtataaaagcacggggctttcgaacttttaatgtttttcttctgctcattgctttctttcaatttgtaatctggactgttgctatggagtaaataacacctactacattccatgccttcaggtttccatttcactagaagaagtggcacaagttgaaggaaggcagcttatccatgtgaaaattctaagacagtatagatgcctggccatgggtttagccataaatgacttacttatgaaacatgttaagcttttctgtttaaaatccctcccctgccttttaaaaaatttcccatgaatcttgaaataatcctgagaatt

SEQ ID NO: 7539 - DNA, 6000 bp, Homo sapiens
cccaggtgtggggaacggcaagaagaggagagcagccagggagtcccggcaggagtggccagggcaggaggagggccgggacttcccctgcaggcctctgagcaggcactgtgccctgtagactccggtgatactgttagcaccaagggctctgttaacaaagaggacaggacacatttagtgatgtgtgctgtgttcactggaaatggtgctgtcttttgttttgtttcgttttgttttttttaaatggagtctcgctctgtagcccgggctggagtacagtggtgtgatctcagctcactgcaacctctgcctcccaggttcaagtgattctcgtgcctcagcctccagagtagctgggactacaggcgtgcaccaccacgcccagctaattttttgtatttttagtagagacaaggttccactatgttggctaggctggtcttgaactcctgacctcagacagtccgcccacttctgcctcccaaagtgctaggattacaggcttgagccaccgtgcccggctccgtgctgtctttattggaggcagaaatcactttggaggctaaggcaatggttctggagaagaagcatgaccatcccctttcccagccattgctctatcccacattgttagaaggaaatgatcccagaggactagaaagttgagaggtcaccactgctgagtcttttatatatgacagatcccacttctgggtctatatgtgcccaaaagaatggaaagcagggacaggaccagatatttgcacgcctatgttcatagcagcactagtcactatggccaaaggtggaagcaagccaagtgttcatcagctggtgaatggatgagcaaaatgtggtccatccatcccacgccccagtggaatattactcagccttaaaaaggaaggagggctgggtgtgatggctcatgcctgtaatcccaacactttgggaggctgaggcaggtgaatcacaaggtcaggagatcgagacccgcctggccaacatggtgaaaccccatttctactaaaaattagttgggtgtggtggcatgcacccgtaatcccaactactcgggaggctgaggcagaagaattgattgaaccagggaggtggaggttgcagtgagctgagatcacgccattgcactgtagcctgggggacagagtgagacttcatctcgaaaaaaaaaaaaagaaaagaaaaaaaggaaattctcttacaggctactacatggatgaaccttgaggaaattatgctaagtgaaagaagccagtcacaaaaagcaaagagacaaatactgtatgattcctgaccagaggactcctagaatagttaaattcataaagacaggaagttgaatggtggtcgttagggggttggggtcgggaaggggagttagtgtttaatgggtgcagggtttcagtttgggatgatgaaaaagttctgtgcatggatgatgctgatggttgtacaacagtgtgaatgcactgagtgccactgaactgtactgttaaacatggttaatacggtaaattttgttatatatattttgccacaacttattataatatataaatatatattttgagacagagtttcgctcttgttgccgaggctggagtgcaatggtgtgatcttggttcactgcaacctccacctcccgggttcaagtgattctcctgcctcagtctcccgaatagctgggactacaggtgcccacaaccacgcccagctaattctgtatttttagtagagatggggtttcaccatgttggtcaggcctggtctcaaactcctgacctcaggtgatccacctgcctcggcctcccaaagtgctggggttacaggcatgagccaccgcgcccggccttttgccacaatttataaacaagaatgaattctaacgttcatattaattgaagccaacatgacacacatagcataaacaggtgtctaagcggccaggcgcggtggctcacgcctatgatcccagcactttgggaggccgaggcaggtggatcacttgaggtcaggagtttgagaccaggcctgaccaacatggtgaaacccagcctctactgaaaacacaaaaattagccaggcgtggtggcacgtgcctgtaatcccagctacttgggaggctaaggccggagaattgcttgaacctgggaggcagaggttgcagtgagccgagattgcgccattgcattccagcctgggagacagagcgagacaccatctaaaaaaaaaaaaaaaaaaaaagtgactaagcgaggggtatggtggggtgtggcgtggtgggatgggcctggcttttatgcctagaccaacgtgcggcctgggcaattatctaattatcggttgtctaattgcccagcgtcacacatttctcacctgtaaaatgggtatgacagtctctgccctcccactgcccggggttgctgtacggcctgcgagagcgggtttgggaaagctctttgtcaactgctgtgcggaattgatggggtggccacacttcaatgccttgactcaggggtcagagctttcaagcgaccccaggcagggttacgagggcctccctggcagtggctgcttattccaggctggacctgccctacggcttgttggcgtcccgcaggcagctgctaggatggtttttgcagggcatttgggccgcagcctggatgcatacctagacctcactgtttttctcagccagggtctgggagagaatgaaacctattgttctagttatctgctgtatgtgactctctcctgtgcgtttctctcttgtgggtcttctctcctgtgcatttagggtggtatgaagtgaagagagaaaatagacacttgtggccgggcgcagtggctcacgcctggaatcccagcactttgggaggccgaggcaggtggatgacgaggtcaggagttcaagaccggcctggccaacatggcgaaaccctgactctactaaaaatacaacaattagctgggcgcaatggcaggtgcctgcaattgcagctattcgggaggctgaggcaggagaatcgcttaaacctgggaggtggaggttgcagtgagctgagatcgcgccattgcactccagcctggacgacagagtaagactctgtctcaaaaaaaaaaaaaaaaaaaggaaatgacactgatagttatctgtgttttgtggttccctgaggaacccccagttgagaagaaaggctgggacctggctgacccagaagaccccctcgacgccaacccctactccaggtttggggacccaggaacgagaggcctaagagagttagggactagttcaaggttgctcggactctcaaaacaagtccctaatgccaggccagtactgtgtggcgggcagcacgaccctccattccctctttattttgaaaacggaacagttacaggacgctagttttgacgtcgctggttgtgaatgtcatttgtggagccgtttcccagacctccgggggcaggagccacaggtttgagaggccgagcagcgccctcctttcctgagagctgaggttgcagctctggctggctctggtaagtgctctgcagccctggcatggctggaggaggggcagcagctaagtggtttctgaaaaagggcaaaaatgatgggaaaagctttgggatcctctgggaatcagagccgcagcaaaggcagctgcttgcatcgctggaagcgttttttccttgagtgccgaagggcgtccacagcgactcctgctagtgcagggcagctgctgccagggccgggcccgggaccccacggaggcggggagaccactcttctcccacacgagcccagctctcccttcgagtagcaaccgccttcaagctcacaagcacccgtgggcctggggtgtgcctgcgtctagctggtgagtccctttctttgtctgatggccaatgcagacattagcttttaagatggcatagtgagtggccaaaagccgggccctgtcacttcccagctgtgcgactgtgggcaggtccactcacctctctgtgccccagttaccttatctgaaaacggggggtagtaagagtggctgcctcaaaggtggtcgtgaggctgaagcgaacttgtggtgccctcagcctggctccttggaagcacctgggaggtgagagtggaggttgttgttactggggtttgttcttgttgctcctgcatcagccgtcctcgggggaggaggctgcagctgctgctgagattgctggtgtgtggccggaggttttcagcgtgtcgccctctctgtggagtggacgagcgcagggctgggaagcaggcacactgggtccttgtgctgctgtcctatctctttgttcttcacccctgggttgggaagcccgcagcctactgcctccctttgacagaagggactactgagaataatctggctgggtcctgggccagcgttctcccagcttccagaaagtccccagtggcgagcgggaggtgctcccaagaacttggatggatggatggatggatggatgctttgggcagagagaggagcaggggagccacaccccatgttgtctcacttgcattggggagagaagggatccttcccccagagggtaggcagtatctgttctggctttggagttgagaaagactcagatcataccacgtctctgtgggcagaatcgattcttttaggattgtcctttagtccagattgatgagtttgtgagtcttgtgtaaaccagaatcaccatctccatcacacagccaacactcgtttgcctaaatcacggtagaagttcccctgatcactgtagaatgttttgcggtgacaggtgcatcaccacgggcttaggtgcagggtacactccaggcctggcagtggagggctgtcctgaccctgttccccggcccagcccagggcacatgacccctcagttcctgtcccaccccgttccctggaagaagcttggtttccagtagggaatcaggtgcagagtgtgcagtatagattcagcgtttgtcgactgactgaatgatagcacaatcccggctgcttcctgttggctgggtttggttggactgggacccgtcagaggaaaaggcaacgccgctgacaaagaacattgccgaaaggttcatgggaggctccggctaacaggtgctctcttgctgggctgcctaacgagcagcccctattcttattcttagcttattcttggagaccatagacatccctgggacagccaggcatgggtatgacctgggtcttattcacactgcattttggggttcctgagctgcttgtttgagcgagaggtgcttcaggttcaggtcttatgcctagccccttgggtgagagggcctattctgattggcccccaggccctgctgtggagtctgggtctgagttgaactgctgagaaagagccccagacctccagcatcgtggtggagcactggagatgctctggagccagcctgcctggggtcaagtccgggttccatctctgactgtgtgacctcggggacgtgccataactgctctgtgcctcggtctcctcatcggtgaagtatttccctcttagggatgttgtgggaatgaagtgggtgaaggaatgcgagtcctgagaaccgtgtctgctttgtgcacgtgctcagacgcatcaacgattctgcttctcattcgcttctggtgccttttaagtgctgccagggctgtccgcactgtgaacggtccttgacggggtgttatcttcagaaagggaagactagcacccggccccccaggcttccaaagcatcatccatgcaaccatgttggctttcaattccttggagttaaggctgacggccatctggttctaacccggcctcctgtcttcctgtcccactgacttcccgttcttcagctgctctaggcttccctgtctgtctccagaccctagcccacctctgttcccttcccaggctcagctcatccatcaccaactg

SEQ ID NO: 7540 - DNA, 6000 bp, Homo sapiens
ccctttttgtggggcacaacatgctgctggtcagtgaagagcccaaggtcaaggagatggtacggatcttaaggactgtgccattcctgccgctgctaggtgagcaagcacccctgccagttaggggtggggtgaagaggggcctgctgccatctgctaggcttgtcttggtaaaaccgtgaacgttcttggagagagcatcctttcacggatggagcctgagtaaacagcacatttattgagggccgactgtcactcccacacctgtgttgtctcactaccccaggtcacttctgcactggagggaagactaggaaaggcagacatggagcagggagagaaaatttagataccttgagtctaacagtggggtagtaggtgctgaaaccctcacagatgaagatatttaatacaagtagcccaagtaaagggtgccgagggccagtgaccagtgtttcccagactcccctgatgctgactcacttaaggggcagagaatactgcacatgtccttggaaatccagatttcacaggtctctgtagggagggggcgggacaggaatctgattttttttttttttttttttttgagatggagtctcactctatcacctaggctggagtgcggtggcacagtctcagctcactgcaacctctgtctcctgggttcaagcaattctcctgcctcagcctcctgagtagctgggattacaggcacctgccaccacgcccagctaattttttttttttcgtatttttagtagagatggggtttcaccgtgttggccaggctggtcttgaactcctgacctcaggtgatccgccacctcagcctcccaaagtgctggggttacaggcatgagccaccgctcctggtgaatctgtgattttaataccccctcaacactccatgatatttattcaattttttaattgtaaaatacacacaaaatttaccatcttaaccattttaaatgtacagttccgtgttaagtacattcataatgctatgcaacatcaccaccatccatctccagaacgttttgtcttctaacagtgaaactctacacccattaaacaatagttccccgttacttccctccattccatgattcagggtctcactcccattgcccaggctggagtgcagtggtccggtcatggctcacagcagcctggacctccttggcttaatccatcctcccaccttaacttcctaagtagctgggactacaggcgcatgccaccatgtccagctaatttttgtattttttgtatttgtattcaccatgttgcccaggcttgtcttgaactgctagtttcaagcaattatgccaccttggcctcctgaagtgttgggattacaggcgttttccactgcacccagcctgattctttgtttttttgagacggagtttcgcagttgttgcccaggctggagtgcaatggcgtgatctcagctcactgcaacctccgcctcccaggtttaagcgattctcttgcctcagcctcccaagtagctgggattacaggtgcttgccaccatgcctggctaatttttgtatttttagtagaaacggggtttcaccatgttggccaggttgatctcaaactcctgacctcaggtgatccaccgaccttggtctcccaaagtgctgggattacaggcttgagccaccgtacccaacctcatcctgattcttttttttttttttttttttgagacgaagttttgctcttgtcacccaggctggagtgcaatggcacgatctcagcttactgtaacctctacctcccgggttcaaacgattctcctgcctcagcctcccgagtggcttggattacaggcgctcgccaccatgcctggctaatttttgtatttttagtagagacggggtttctccatgttggccaggctggtcttgaactcctgacctcaggtgatctgcctgcctcagcctcccaaagtgctgggattacaggcatgagccaccacacctggctgcctgattcttatttacaaggaagtttaggaaacactgacttaataggggtcagggccaggtggatatattaagagttttctgagggaagagtgaagaagtagggatcgatcccaagcagagtgggtgtggtgtggggcacagtggaacccaggtcctggggaaggcaggattttgagaagggcaatggagagcaagttactagggtcagaatattgttttcagagaagaaaggcaatctgcaaggagcctaactgaccctgtgttcttccaggtggctgcattgatgacaccatcctcagcaggcagggctttatcaactactccaagctccccagcctgcccctggtgcagggggagcttgtaggaggcctcacctgcctcacagcccagacccactccctgctccagcaccagcccctccagctgaccaccctgttggaccagtacatcagagagcaacgcgagaaggattctgtcatgtcggccaatgggaagccagatcctgacactgttccggactcgtagccagcctgtttagccagccctgcgcataaatacactctgcgttattggctgtgctctcctcaatgggacatgtggaagaacttggggtcggggagtgtgtttgtcacttggttttcactagtaatgatattgtcaggtatagggccacttggagatgcagaggattccatttcagatgtcagtcaccggcttcgtccttagttttcccaacttgggacgtgataggagcaaagtctctccattctccaggtccaaggcagagatcctgaaaagatagggctattgtcccctgcctccttggtcactgcctcttgctgcacgggctcctgagcccacccccttggggcacaacctgccactgccacagtagctcaaccaagcagttgtgctgagaatggcacctggtgagagcctgctgtgtgccaggctttgtgctgagtgctgtacatgtattagttcctttactgctgaccacattgtacccatttcacagagaaggagcagagaaattaagtggcttgctcaaggtcatgcagttagtaagtggcagaacagggacttgaaccaagccctctgctctgaagaccgcgtcctgaatttcttcactagagcttcctcatcaggttacccagaagtgggtcccatccaccatccaggtgtgcttggatgttagttctccaccctcgaggtgtacgctgtgaaaagtttgggagcactgctttataataaaatgaaatatattctacttcctttattttgtggtttacacggttgtcctccctctaaacttactctcaggggcttctctgtcatctgactttcctcactcttgcttcccttcctaggaaaatcctcttcccctatacctgttcccacaaatggcatcccgcgcatgcttgccctattaaaggcagctgacagctgtacccactagctaacgtgtctctggtggttctggacaaaaggcctgcgggaaaactaggattctctattaatggggaattctgagagctctagggtaggaggcctcatgcaagtcttcatgaaccagaaattcctaataaaggagacgggatgcttaactcagagtccaccatcatccttgactggagcacattctgggtggatgcaggggtgacccggggaaggtggctgttcaacattccttctcggacttgaagcaatgccaccgcttccttagtcttggacaggcactgtctggcagggatgacctgcagcagctcttttgtggcctgggccaggaccagcttcccccagtgcctcatcctgtgctgtatgcccagggatgttcaatcactgggaagtggcttaaaaggcccttgaggctcctggatgccagagcttgtctggtcagtgctgcccagtgctcctgtccctcccagaaccctgccaggtgctaacaacaccctcctcctggggtggctggagcagcactgaggctctgaataaaggcaagacagtgggtgttcccgagagatatgtgagaccctgaaacgtaaaccaagctcggtgaggatgaagtggaagggataagtggcccatgtcacttttggggtcagagaagaaacttgaatcacatccttcacctgaggccccacctacttctttccagaaaacttagctgcgcttgaaactgtaggtctatgccacattcatttgaatgaattttagatctttgttaagagccgatttttcattagaattgagcagctgggcacagtactccagcagaagggtaaagggaagggaggggaccagcattgcagcccttttaacggcagctgtgactgccccaggcctgctcctgatcagagactgcaggctgtggggtgtcttcatacacacaagcactttcagatctccatggggcctgacctagtggggcatcaccccagtgaagggcctcagtgtggggactgctggctgtccctttcctggcttgactgcccctgctgactgtgctcttggcactctcttatggtcccagagggggcatctgtccctccaccatcaacctgatacttttgctggctccaaattttgcagtctattttcagatgtaaaatgagaggcggggggcgggggttaattaggaattggccttgggtactaacagggtcactgccatgctagtctgaataaatcctttatcaccactggcgtacagccaacagttccccagtcctctgatctatctggaaccatgcccagcagggactgtgcccccactcccaagccacatcgatgctagggcagtctgctcagccctgagtcctccggggagcaggggggcagagctgagcggctgcccggagcttggcgggaggaggggacaggggagagggaggtggggagatccggctagaggggaggctctgacatctccttccttcctggttcctgcagcagctgctgccactgctcagcgcggtgaggagggagccggtgactcggagacggtgactcagaggcagagcggcgcaagggccaaggagtactggcgtccatggaccctggggtaagggggctgcgtggcagcagctgacattcctgagaagagcttcctcccacctgaagctggtgggtctgctcctgaatagaggtggagagggggcacccacctggctcacctagacccttcacctgcctaccgatagagcctccccctctacccacaagcagtgaggggccaggatccccacagggccgggagaagggcccagagatacctgaacaccggaagagtttgagaactttcaatggctgaatgcaggagtttcctcccaggtcagcctcttgcagcaagggtccctctgccccaacctcctgggcacccgttcctgccacatccctgtcccctctgggcctcagttcctcaggtgcttgctagctccattagaagatctgggctgcttcccccacctcaaaccagcctcgcccctccagtcccctcccccgtctcacacatgcagagcctcatgcattattgatctcccggtggagccaggatggccagggccagtgccaagggtgcctgtgggcactgctgcaggacctgtgcagacctgggcatgtcctgggccccctcttctctcatgaagtatctcctttagcccaatgtcctgccctctctgggtgggtggcacttctcagagccccaaggactgtgagggtagacaggggatggtgaggctttagggggtactgagggtccaaaaagggcatcctaggggcatgtttggtgggaggagacatgggaaaatgggggctatctcaggcctcagtttctccaagcactagataatatggagattaattggtgggaggctggggagttttctgcaagatcatggcagagaagtctctgagctacggtggcagggtggaggggtcctgaaggcagaggcagctggattgaggaggtctcgcttgtccagtctctgaaccc

SEQ ID NO: 7541 - DNA, 6000 bp, Homo sapiens
acagcggaaggcatggacaaaggcagaagtgagccccaggccccccatgatggccagctttcctaggagctggtcttaggccacctcccagagtctcagtttcctcactgcaagtttctaagatatgtaagtgcatcagcaatgcttaattggacttgaccagaattaatattaatcgtgactagtatttatttcaccttctcaccatccttagaaagtagatgttactatgcccactttacaaatgcagaaactgagattccagagctgttaattgcaattatttgttaattggtacttactgtggtctaggctgggctcaggctaacagtaggcacttggatgcaaagatgtacagggaaggccttattcctgtcctcacagcactgacaaagtcagttacaagtgctttggattaaattaaataatggggggggggtgggcacagataggtgggtcagggctatgcagcctctctgaggcccaaaggatgaaaaggaaccaagcagacaagaagagggcaagggcattccaggaagaggaaacagcatgtcagaggccctgagaagggaaaggatatggtgtctggggtcagtgtgctggtgcccagagcaagaaaaaggttgagctcgtggttagacccagatcagacagggcctggccagccctagtggaagctctggattttctcctgtgtgtagcaggaggagggccacctgatcagttagacaccaaagacaggctcccttcactgcgccacgctgtcccctcacagggctgctcctgcaggagtaaaggaaactagtggtcacctccttggaaagccttctcatagccccagattggaccagagtgaggaccctggaagttcctagactagggttttcttctcctggtcacacaggagccacacagagctaggacattgtctttcccattttaaaatcccatgttactccggataaggacagcaaaggaggaaaggaaccttttctgggccaccagaaggatgagcttgggcttgggagacacatctctaagcatccagaaatgtgtctgggagtggggacggcagagctcccatgctgtgatctcacagggggacagggctgggaagtcccttttaacttctgacatcccagtccaggtagtggcaaagatctgggctctggagtaccccccattccttgctgtgtgacctggggcctttccaaactctgtgtgcctttgtttccccacttgtaaaatggacagtctccctcaaagagcgttggggaatagaaaacagctgcaggcaccgagccggatgtctgcactgagtaggtgctgagcgacattagcattaacctccatctgcttccaggctgcccctcttttagccagtcagcatcaaacctacaactcctattgtcccagagccttgctgcatctgaagtttcaaatcccttgttaaaaataagcttcaaaacaagccagaagaggaggtgggaaaggaaaataagagaaggagagaggtggaaggagctttgctcacctgaagccagacctctaattctgctggtggccagggacagccctgccgccagtttctctcacaaatcaaagggctgtggagtaatcaactgcaaagtgctgagttctttgagggtagaagccagaaaggatgtgcttgtccttctcagctcacaggagtgccttgaggagatgggctgggcgggcctgtaactggagttggaggggagaggagggtggtcaagctggagaaagggaggagagttgagaccaacactggctgtgcagtcagacctgatcctcctcctgtgattctggccagttacccacttccttaaggctgtgttgtcttatctgtgaaatggatcgatagcagctgcctggcaggcttgttgggaggagggtattgaataccagattcagagccctgtaccctgggtgtggcacacagtaggtgcagcacacaagaggtgctccgtgagtgttgcttctcattcattcacccctctctgcagggaaaggggaggactggagtgggctcaagtgtccaaatgccaggcttgccatctccccaccccattgagctgtcttccctcatgtgttccttagaagcatcttcctagtcttagggtgtgaagttgcatgtctaggctcctacgccattattcccctcctttctctctcttttttttttttttttgagacagagtctcgctctgtcacccaagctggagtgcagtggcgcgatctcagctcactgcaagctctgcctcccaggttcacgccattctcctgcctcagcatcctgagtagctgggactacaggcacctgccaccacgcctggctaattttttgtatttgtagtagagacagggtttcaccatgttagccaggatggtctcgatctcctgagcttgtgatccgcccacctcggcctcccaaagtgctgggattacaggcgtgagccaccgcaccatgctccctttctctttttattctgtccccacggccctccccactgcctttctcctgagctgacccagccccctcctaataggcttcactgcccccagcctctgagctgcccccaggcccactgagcacacgactgcagatccaccaccctgaggcccaggtctgctttcccctggcctcggcaccaggctcaggcacactccccatcacaatggctccacttggcagccaaagccagccactctctgggtgctgctggccttatggaatgaccatcacagcacctggcaccagctggcacccaaccaaccgtcaacagccctcaccgcacaaccccctctacccgctctcagcactgccattcccaacgctcaccatacccgatcctgcctctttatttttgctcatgcaaaaacccaacatccttcagcaatcagctaaaatgctctctccctccagaatccccccagaatattctctccctcacactgtgcagaatttgggctccttattctagcactcatcaaagtctacttagaatagggccatttgcatagatgggtaatttgctaagtctgcatttaagtttgtactacatggaacaggatgttagctctgaggtgccaatgagatagatacctggaaacaaagtgagtgtgagttggggctactccagggcagtcaggggatggggtaacatgaattgtcaagggtgtggtgatgctgtgggacagaaggaagtgtgtgggtatgtgcacaccagtctgcatatgtgcactggggacttcacacacacagagctccttgcagtcctaagtgagcattcaggcctcattctctctctctctctcttctctctctctctcacacacacacaaacacacacacacacacactgcacatataatgcaaagacatcttgtagatcttcacattcttaaacctcatgattggtacaaattaaacaaatattgaaagaaactccagcagagctctccaagcctcagtcctgctgggtataccaaaacacctccagcagctgaacagcacaatgataaggaatgacaatatgttttaccctttctggagtgctgttcacaagcagctcttagatccttgcgatctgctcccatctttagggaggaggcctgagggcacagtctgtttgaggcagagctggtgttcaaagtccctcttgggattctgactcccaagctctacgggcagaagctgtggaaggctttatatcatcaggtactgcatctccttgggactctctccacaagcagagttcctccaagcctcacggatctacgcctccttcttctatgagacaagaaactggaattttccatgtgagctaagtaatgagggcatgagcatgcacatcctcccttgaggttcagcttagacacaacttcccccaggaaatctctcctacaactctcccctcatccccaggctccagtatgttcccatagcaccaaatcttggcaggtagtatagtggcctgtttgcaggtccgtcatctggatcctgcagcagcctttgagccctaaccacagggacagggtctcattcacctatgggtccaggtcctggcatatcttagactttaacaaagccttactgaacatatggttggatggatgactggatggacagatggatggagggatggatggatggatggatggatggatggatggacagatggacagatggatggatggatgacccaggatgcaaatgaactctatgcacagctacagctatagaagcaaggctcaatcacttgcgggtgtatggggagaggaggaggagggagagggaacgagagccggcctttgtcctcatctcttccacccggcaattttcccaaggaagcatgagttagtcttctaaggaaagtagaggggatgtgaatagagaaggaaaccccactaccttcagtggggtccaagaaggcagctcagccctcaatcctagatgcctcctgagcccagagatcagtctttagataagaaagtgagtgttctctgtcactgcccctgccagggggagagaggcccctcctatacctgctcctagtacactctgcacccattaccagtttccctggctgaaaatctcaagagatttttcctcaagtacttgtatctacaggagtttaagaaatgatcatgcagagaattgtcatccccgactcctctgcaaaccctacagaggcttggaaaagttcatcttccccagactcccaacattctcttttctgtggccagtagccaaccatgagcgagttcattaatattaatgttaataatctcctacatttgcttcacgctttcctgcttacaaagcactttcagatccatcatctcagacaatcctcaacaccagcctgagaggtcagcggggcagtgattaccatccccatttcactgaggagggaacaaaggtccgggaagagaagggatcagcccaaggtcacagagcagccaggactggagagagctcagggcagagtccaggtgtcctgacccccaggccagcgctgggttactccacctccatgctgacaacccctttccttctctgcctcatcaatgtcaccattggcgtcatctcctggttctcagtcattaaaaagataggcttaaaataaatacaagaggcaggctttagccatctgctaaaatgggtaaaacgacctgccagcaatttgctggatgaccttgggctagacagtttcctatctgggcctgcaattccttgtgtttcaagtgacagtgctggcctcttctcctccggccctacccactgtgacgggaggctgctggaacctaagggtgccacccttggtgccagactggggctggcagcaatcatgcctctgcgatcccctcctcagcactctggagtgggagggatagacacctgtcatgagcctgtgacagccaaaggatggagctataaagcaacagaggactggcaagaaccctcctgagcgtgggggtggagctaatcacaattgctacagtgtagctactctatgacaagtgctttatgcatgttattgacatgcctcaaaatagttctaccagacagcaattagcaattattttcattttaaagatgagacactccaagctcagagaggtttcttgacacgcccaaactcacacagcaaacagcagaggcaagttccaaacccagatctgctctgatttctcagtcccaaatgctagaaggtggagtgggaggggtgcacgtggaaccccctaagttcacccttcctccattttctttctcccaacctctctcccctcccttctcctctcttcctccctccctttccctggagtcacagtcccaggctgggtctcctctgctgcaccagctcgccctgtcatctcagcacaggcggagatttatggatctcacttcaaggatttttctttaataataacatttataatcattttagaaattaagaactgaggatgcaaagc

SEQ ID NO: 7542 - DNA, 6000 bp, Homo sapiens
acatacatgtgtataggcccctgtgaacacagatacatttatttgtgcacaggtaggtgggcacagacagtgagacacattctcatcaccaggcacccccaggagacagagaccccttggtggcactcaccttgctccctcagacgccatcgcaggcctcctcgtgtggacgctgggcttgacggcagcctcgcattctttcccacgcggcccacgctcacgcctgctccacacacagtctcctcaccccagccggcaagctttcttgcaacccctctcctcctccacccacccagctctgtcattggagaaagtctgggaagctgagagttaaggtgctggggaaaaaaaaaaaaaaggagggaaaatctactgtattccggtgatagaaaatcctgccaggagatggggcttaggtcccaaaagggacccaggattctgagattgcagcagaaattaaaaatccaaatgaagcctcctccctttctagaattttccatctgggcttgactgaaaaatcagccaaaaatcaggagcctggtccttctcacagagaagacaaaggtgagtctgacagagcggcaggctctgtgacaccctgcaggagatagtgagggtctcggggagcgggtctgggtggctgtatttagggcggctgtgatgtcagcggaaaggagggtttgagttgggaatgtggcacaatggcccctttgtccccctcccctcctgtcctgtacacactgaaaccacacaccggccccacaccacgtgatgcaggctcagagctgcccatggggcactgccacacaaggctgcccccgctgcagccctgacccacagtgcgtgtgtccacatacatgcccacgcgtgtgcacacacacccacgtacccacatgtagatttgtacagaggtgacaagaggcatattcactcctttgcctacagctctgctgccccgtatggtaacccttatcccacatatagttagtaaaactaattgcaattcagtaaaagtggaaactgcattcctcagtcacactaactgcatctcacatgctcaacagctgcatgtggttagcggctaccgcactgggcggtgcagctctaggacatgtctgttgctgcagaaagccctgccctgcgccctccgttgctgtctgctcccccatgggccttccacttgctcttcctctcacactcgctcactcctgtgcaccaagcacacacagcgccatgctctcacctaatgggtggcctctctagctcagtctctctctctttagtctccccagtacctaagcacagactctgcctagccctgcattgcaacacctggcctctagtctggagagaataacaggatggaaacatgaccacatccacaatcctaggatgaaggaccgaggggagctatgtggatctggagagctttggaaactcagaggggctgagctcaggctgggttgggcaagggaatgggaagagaatgagacatttgagcatggcccggacagtagggtgttgagcatgcagagagaaaggacatctagaaggcctggaagtggggaaatgcagtgcatttgtgagaactgttggccaccctttttggttggtgtgacagatgtgggcaggggaggggacagtgagcctgggcaggtgggtagtggccaggtagagccttggatgccaggctcaggatgtccctgggtcccccacgagggcagatggggatgtggcctggacagccagggtcctaaagtcccagaggtccaagtggacagggtttcctgggcagcatggcaggcatcaccaagcaatcaacacattgatcaagagatggagcctggtgctgtggctcatgtccgcaatcccagcactttgagaggctgaggcaggtggatcacttgaggccaggagttcgagaccaggctggctaacatggtaaaaccctgactctactaaaaatataaaaattagctgggcgtggtagtgcatggctgtcatcccagttacttgggaggctgaggcatgagaattgcttgaacctgggaggcggaggttgcagtgagctgagactgcgccaccgcactccagcctgggtgacagagtgagactctgtctcaaaaaaaagagagaaagagagatggataggcatcacacaactttgggtaatttgcatatgaataagccttcatttatatgccatcattcttatcctctctacactgattccctttctacactgtcctaagtgtggtagaagtgctaatgatgaattattgaaggccataatgaacggccatgaatacttaatgacatcacgatattagtattgctgatggatggtatctacagacttgtccatctctctggagaccttagggaggagtgcgggctttttgttctttttgggtttagacctgagatgaggtgagagaggtgaccagctgtcgtctcgctgtctccctggctccgggtgcctggttctctctggacttctgacgccctggattctctgtcccccgctgaccacactcgctgtcccccttacctgagatgggggagccgaacagtcaccttccctccgggcctcgccttctcagggcctctgggaaggagcaggcagaaggtgaagggaaagagaagggacggagaagaggggggaagaggaagcaagaatttaagaaaaaaaagaaagaaagaaagaaaaagcttaaaaaggagtaggcgggaggcgggggcacgatggttccccagaccaccccagcccaggggggttgtgttctggggattcaggaggtcgaggcacccagtccgtggtgagcagggccaggtctccttccttcccaagagcacggtgcgagtgccttccccacagctctcccaggtgtctgtctccctcactcccccagggccaggacagcgagcagggagcacgccttcctcctggtccctcccagaccctcgccaggctcagcagacccctctcctgttgcgttgctccttcggcaggaggtcagcgtgggtgagaagggagcagaggccagatgacccttcatgtcagttcaaggagaggcccccaggtcctcctcacgggttccactcccctcaccctcccagtatccatgagcatcccaccgccaccaagtgcagggcatccagggggtggagagtggatgggcttgaaggggagtgggtatgaggtttggacaaccccagatgtgaagagtgtgtgtgtgtgttgtgcacgtggattgcctgtatggtattgcaggggagaagaggatttggaaaaggtgcaaggaaattgcaagaatagaaaatgaaagaggaagtagaaaggtttgcggtataagaagggtgagagaaaggggagtggggttatggagggatctagaagagaatagtggggagggaaagggcaggaatggaaggcaagcccatcaccccaaagccccttccccatgtctacccctcccccaactccaaagaaggaaattaggaggccactgcggattatgtttgggtcatttccacatgctttattccagcaatcaaaataattaaaaacatctcaaattattatacacatacaaaataggtacagagtcttttgcttcctcccacccctagggggaaaaactgctttgtgctttgggaagttgtctctgaaacccggggacagaggacgcaggacagactaggagggagccgggaggatgggctgcagctgtggaggagggtttcagaggagagaggtcggagagcagaggcctgagaagccagaggcaggtggagagagggtggaaagtgagcagcgggctgggctggagccgcacacgctctcctcccatgttaaatagcacctttagaaaaattcacaagtccccatccacaaaaaaaaaaaaaaaaaaagaaaaatatcaaggaataaaaatagactttgaacaaaaaggaacatttgctggcctgggggggcatctcaatttctatagcaccagtgattccctccccaccccacccatcacatagatgtagcacctttggtataaaatggggagccgcttccaccctgcccccatccccgcccccaggcagttgccccggtgacacatcaagacaagaacgaggtagtctttcagcaacacagttacacaaggaacagaacagtctctcccgcccagccctgcggcacaagggattgacacgcgttccccaaatccgatgtttctgctttgtcgtggcccttcctgactctcctccgaacccagtgaggggctggtggctcccccggcatgaccccctcaaaaacgaaggggagatgttgcaagagccatgggagcgccagatggcaaggcttctttggcagtctgagaaccccaggtcccccagggcctgggggtgctgggcgggcaggagcgggctgagggtgggggccacttgggtgtttgagcattgcctttgattgctgggcagacaatacattgtttcctgtgtcttctggggagacagatttgggaaggagtggaggggaggccccaaggggggtgtggagaaaggagcagaaagggcagcattggggtttcataagcccaacgggcagaaagggacttacccccgcatgggtcttcaagcaagtggaccaagcttccttttttaaaaagttatttatttattctttttttttttttttttttggtaaggttgaatgcacttttggtttttggtcatgttcggttggtcaaagataaaaactaagtttgagagatgaatgcaaaggaaaaaaatattttccaaagtccatgtgaaattgtctcccattttttggcttttgagggggttcagtttgggttgcttgtctgtttccgggttggggggaaagttggttgggtgggagggagccaggttgggatggagggagtttacaggaagcagacagggccaacgtcgaagccgaattcctggtctggggcaccaacgtccaagggggccacatcgatgatgggcaggcgggaggtcttggtggttttgtattcaatcactgtcttgccccaggctccggtgtgactctggggtggggcggagacaacgggagggggcattaccacgtgggagtgatggagagagggcactatggcctggccaaaaagcccaaggccggagaggtggggccctgcctggggattctgggcactcaccgtgcagccatcgacagtgacgctgtaggtgaagcggctgttgccctcggcgcggatctcgatctcgttggagccctggaggagcagggccttcttgaggttgccagtctgctggtccatgtaggccacgctgttcttgcagtggtaggtgatgttctgggaggcctcggtggacatcaggcgcaggaaggtcagctggatggccacatcggcagggtcggagccctggccgccatactcgaactgcaggggaggggagagagggaagagtgagccgctatgcgggaacctctagtcctgcctggcctccctgtccagggtcctcagagagctgcccaatgcaccgttatatcgagaggaggcaccacctgcccatcggcagcctgtgtctgaaccactatcagggacctgagacccctgcctcccagcccagctctgtccatcacccttagcagagacctactccaggacttcatgtcccttctgagcactgggctagcccatctcctaacactggctctgaggtccagctcacgcacctggaatccatcggtcatgctctcgccgaaccagacatgcctcttgtccttggggttcttgctgatgtaccagttcttctgggccacactgggctgagtggggtacacgcaggtctcaccagtctccatgttgcagaagactttgatggcatccaggttgcagccttggttggggtcaatccagtactctcctgtggtagggcagggcaagatggagtcagggaaagggagcagccagcaccatatggtaggggcacatatgg

SEQ ID NO: 7543 - DNA, 6000 bp, Homo sapiens
ttttggtctgaggacctggaagaatgaagtgtcatttgagccagcaaagactatgaagggagaattttcgtggggagggcgtgttggagcttagtgttggacatggtaggtttgctatgcctaggtgacatccaagtggaaataccgaataggcaatcgtatatgtaggattctggagtccaggagaaagtggattgaagttgtgatttggaagttatcagtgtatgaaatggcaagatctttcatgttcattgtgggagtggccgtggagtcatttaataaacatacattatggagctgagcacctgcttggtgtgaggcatgacgcacatgcgcttgggtagctgaagggtgagggtgccatttattcacagagacagggaacacaggaggaggtgtagttcttagggggatggtggtgggacccgtgttggacgcgttgcatttgcagcgtctgtggagtgtgcaggatgcttgctgtatacttggctgcacaggggtgaagctcagggacaagtctgggctggagactcagcgtgtgtttggcaaccgaagccacgggagtgactacgataggccgggggagcgtgagtctctcggctgccgagaacagagatgacacatcttctcaccttcgttttttatttcccttaagcgcctgtcgtcatcacacaaaacgccctacgtcgacgctgccaaatattgcttttttattcctcacagctcctcccgtctttccgagactgcggacagagggagctcaacgccattccctgccgggggcggccctcgccgcggcgacgtcacggaagaggcgggatacggaggcggccgcggcgcgggctgcaggactgaccccgggctgcgcggccccaccccgggcggtccgctccgttcccgccggtccccgcagccgccgtcttaggccagctggagcaggccgcgctcggccagcaggctctgggtgcggttgtagacatcctccaaggtgccggcggcccggagcagcgcggcccgcgcctccgcctcggtggctccgggacacgccagctccagcaggcggcggcgacccgggaaggcgaggaaggcgaggcgggcggtctgtcggaccagccaggggtgatgcggacccagggccgcacggtaggcgtcgctgcactgcacgcccgcttccgggcctcccagcgcgccggtcgccacccggtggaggcagagctgggaccagcgcagcgcgcggtgcagcaggagcagcgtgcgagagcccgagctccgggtcgggtcccggggggccgcccccggctgctccagcagtcccgccctccgctcccacgccgccatggccgccagcgaccagtagtgctccgcgtccgggccgtgcacccgagcctccaggtctgtcaccttggtgaaggcctccctagtggcgaaggcgaagacggagccgaggggagtcaggaatctgcgggcgagacgatttgagagaatggagatggagccgccaaggaggcggggaccggctggggggcgggaggccactcactcgacgagtgccctccatcccgccaggtacggcgacagccccacatccccttcgggtttcagactggcgtggaaccgcctcatcatgcggcccagcatcccccgagggcccagacacggaggctgtttcctctccggggcctccagggttcccgactcctgccggacctggtggggagacacgatgggaagaggtgggagcagattctgccctgaagaaattgttccgaaggtttagctggcggctcttctgctgtgcgctcagcttccgacgggagagggtagaccgggggaggacccgccctttgccggaccctcagcctggctccacgtccccctgttctggtccctcctggagcgcccgcgcccaatcctgcgcctagcgtacctggaagggcgccgtttcccctggaacgcagggctgcgccctgggtccgcagcccgagcgggcgcctgggtagaggagaagcggagcggtgagggctcgagaaagaggcttgagtcgtgagggcctggattccgggcttcctcccggagcaagtgagggaaggggcagctcacctaggctccgaacactgagataaagcagcagcagcgcgaagatagcgagaggaattgagtggctgaaccagtgccgcagggctgggggccgcgccgccactcccatgcctgctgctgggaccgccgccccctcaccagcgcctagccagtccgtgtccctccgcctccaggaggggacagaagcccgtggtgccctgaggcgcaaaggattaataattaacctactaaggccccttcccctgtgcccttcgccccaaagggcagctaccctgggtgcgaggaactgggtgaagggaatttgggggattcgacagcagtgacagatcagtgcatttcccttccctgtagggccagctgtagcaagaggcactctgagtattgggaagagaggcagggcccagaacagctcccctactgagcagtggtgtgggccctaaattcactctgggcttgagttccctccactgtaaattgaggataataataggtactttgcaagcctcatgtgaggattaaatgataacgtatgtgaaaacactaaatggaaaagctgaccacaattgccctataaatcttattaagttcaagcattgtccggctctgggatccagggaacacccacttctctctcgctctctttttttgtttgtttgttttttgtttttttgttttttgagacaaagtctcgctctgtcgcccaggctggaaagtgccggctaatttttacatttttagtagagacagggtttcaccatactggacaggctggtctcgaactcctgaccttgtgatccgcccaacttggcctcccaaagtgctgggattacaggcgtaaaccaccgcgcccagccgggaacacccacttctaaattctctatcttattcccaggggactttgtcttgacctggatacatgacctcttgcaatcatatacgtacgtcaggctttatccttttgcatttttgtggtttaattttcaaaactccagattggctcttcaatcattcattgcaccaacttttattaagtacttccgcacgtactaggcttcaagaatacaaaagtgccttcacagagctcaaggtccactgggggagaatttatcctctgtctcccccactggaatgtgacctctgatgacaggggccttgttattcttgcttacagcaagtggaatattgcttaagccaaaacatattattgctaaataggtattgaataaacaaaggagtgtgtatgaggggcaggtaaatctggggttgtggcccctaacaaatttagccaggcatttttaggccaggcacggtggctcacgcctgtaatcccagcactttgggaggccgaggtgggcggatcacctgaggtcagcctggctaacatggcaacaccccgtctctactaaaaatatacaaattagccgggcgtggtggcgaacgcctataatcccagctactcgggaggttaagggaagagaatcgcttgaacccgggaggcagaggttgcagtgagccgagatggcgtcactgcactccaacctgggcaacagagtgagacttcgtctcaaaacaaacaaacaaacaaacaaacaaaaaacatacttagccagattttctcgctttttgttttgcaaattaggagtccatctggtggtcacagggggaaaggcattccaggaaaggatataaggatacagaaagcaatggaagaaacagcatgatcttttcttaggggttcttagtctcctgtccccaaacttcttagagttattcctgttggaccgggcgcggtggctcatgcctgtaatcccagcactttgggaggccgaggcaggcggatcacaaggtcaagagatagagaccatcctggccaacacggtgaaacccggtctctactaaaaatacaaaaattagcggggcggcgtcttggcgcgcgcctgtagtcccagctactcgggaggctgaggcaggagaatcgcttgaacccaggaggtggaggtagcagtgagccgagatcgcgccactgcgatgccgccactgggcgacagagtgagacttcgactcaaaaaataaaaataaaaaagaattatttctgtttgtgtatgtcttcttctaaggtagggaggagtgtcccggattctcaaggtgttagggccctgagctctcagaagacctctcagaggaggaagagacttctgagctgacaggagttttctcagcttctccagttcgaggattcttgtcctatcctcactctgatgtcccctcacatcctggaggtctctgggttgctcttgccccatcccgtcactggtgggactcccgggaggtcacttccatccctagccctggtctctgctctgtctccactctcactgctggaatgtttcccagcttgcttggctgtaaacctaaggcaagttgcttgccatttttgagccagttccctcatctacaaaataggaaggataattctcaccccccaaaaattgttgtgagggttaaacaaaatactgcaaagcgctaaccataattcgtagcctatagtaaatattcagtaggtgatggttattttaattcgccctctctcactgcccctcctaccctagctctgggagcctctgcctccgggagcaggaaatagggttccgggagtggattagttttgggtttcacttaatctgggaggcccttccgcaatcggagccctcacagaggccaaactgatataaatctgcttaggaggcctgattcacagacgctacaggatggagcggggcgcaggagccaagctgctgccgctgctgctgcttctgcgggcgactggtttcacatgtgcacagacagatggccggaacggctacacggcggtcatcgaagtgaccagcgggggtccctggggcgactgggcctggcctgagatgtgtcccgatggattcttcgccagcgggttctcgctcaaggttggggctcaggcgtaggtcctggagagggcggagatgcgtgggaccatagagccaaggatgataattccgtgactcgcccttgcccctctcctcgatacccaggtggagcctccccaaggcattcctggcgacgacactgcactgaatgggatcaggctgcactgcgcgcgcgggaacgtcctaggcaatacgcacgtggtagagtcccagtctggaaggtggggcgcaggggtcgaggatcccttggggtgatggtatgtcccttaccctctattacatactccgtcgcaacaggcaggctggctccgccagagctacggggcagtatagaccggggaggcgaagggtggatggaagacccctcctccgctcctcggcggaggtcggggagcacccagcccaccaggtcatatacacagcacttggcttggaaagtctcaagggcttggtgaagggggggcccgcagaggcaacgcatctccctttgccttgcagctggggcgaatggagtgagccgctgtggtgtcgcggcggcgcctacctagtggctttctcgcttcgcgtggaggcacccacgaccctcggtgacaacacagcagcgaacaacgtgcgcttccgctgttcagacggcgaggaactgcaggggcctgggctgagctggggagactttggagactggagtgaccattgccccaagggcgcgtgcggcctgcagaccaagatccagggacctagaggcctcggcgatgacactgcgctgaacgacgcgcgcttattctgctgccgcagttgaacggcgccgccgccgccgctctctcccgggccaggaggctagtcccacctcttgctattaaagcttctctgagttgactttggtctcgcctgtttatttcatttatttatttattaatttatttatttgagacggagtatcgct

SEQ ID NO: 7544 - DNA, 6000 bp, Homo sapiens
aaataaaatttgcttaaaatccattatccatgttgcaactagagtcatcatctagaacaccaacctgaccatgtccctccctgtagctgcaaggcctggcttcatctggcccctgtttacctaacgaacctcacactgaacttttcttccccttccatcactaggtttctgaaatgctgccttccttactgttcaacaaacacacttggcttgttctcaccatctttgcacttgctatgtcctctgtctggaatgctctttccctagatgttcatgtagctgactctttcacttccttctattcagagaccttggaaaaccttgcaaaagcaggtcctggattttcctcacttttggcctatgacaacttctttcatctgtgaacagttatatttgatgaatctctcactgggggagctcacctctgaaggtctaggtcgaaaatgcatgtaagttgcagacagagggaagaaaagcatggagagttcgtcagtctttttttttttttttttttttttttgagacaggtctcactcctggcactcaggctgcagtgcagtggtgtgatcatggctcactgcagcctccacttcctgggtgcaggtgaacctcccacctcagcctcccaagcagctggaactacaggtgtgcaccactatgtttggctaattttttgtattgttttgtagagacggggttttgccatgtcgcccaggctgaaccttcagtctttttatcttgtctcctaagaacgtttgaatgcttgctatgctgtaatttctgcattggagaatacaggaagctcatctctcattgtaaattaggtgtcattactatcactcattttaggaatcaaatgcaatgggggtcatttcaaaggagaaaacttaatgggtttccttgtccatcctgagagcagggaggtttgaaactatcttcagaactttgaaggggtccaacagttaagaaaagaactggccgggcgtggcggctcacgcctgtaatcccagcgctttgggaggccgaggcgggtggatcacctgaagtcaggagtcagaagttcgagaacagccgggccaacatggtgaaaccccgtctctactaaaaatacaaaaattagctgggcatggtcgcgggtacctgtaatctcagctactagggaggctgaggcaggagcatcaccccaacccacaaggcggcagttgcagtgagccgagattatgccattgcactccagcctgggcgacaaaggtgaaaactctgtctcaaaaaaaaaaaaaaaaaaaaaaaagggaggggggtgccgggtacggtggctcacgcctgtaatcccaacactttgggtgccgggagactgaggcgggcagatcacgaggtcaagagatggagaccatcctggccaacacggtgaaacgcggtctctattaaaaatacaaaaattagctgggcatggtggcgtgcgtctgtagtcccagctattccggaggctgagacagcaggatcacctgagccagggaggtcgagggtcactgtagtcatgatcatacccctgcactccatcctgagtgacagagcaagaccctgcctaaaaaaaacaaagagagactttgttgaacctcctttaaaaaaataataataataataatagtaactcctcagtaaagtttagaaaatcacaagcttttatttcatggggataaaagcaagttttggtgattacattgtctccaatatgaagaaaaggctgtgctgtcttttaaagagatggtttatatgaaaatgtcattacatagtttcaatatataggagttcaacattttagggaccctcaatcctataaatcattccattttttttccaatttcttgtcttaataatacaatataagactccgaaaacattaatgtttattgtttaaaactttttttttaagacggaatctcattctgtcacccagagtggagtgcagtggtgtgatctcagctcactgcaatctccacctcgtgggttcaagagattctcctgcctcagcctcccgagtagctgggactacaggagcgtgccacgatgcctggctaatttttgtatttttagtagagacggggtttctccatgttggccaggctggccttgaactcctgacctcagatgatccacccgcctcggcttcccaaagtgctgggattacaggcgtgagccaccgcgcccggcctaaaactttattaaaaagatatctatgtatgtatatatgtgtgtgtgtgtgtatatatatatatatatatatatattttttttttttttttttttgagttggagtcttgctctgttgtccaggctggagtgcagtggcgcaatctcggctcattgtaacatccgcctcccgggttcaagcgattctcctgccccagcctcccgagtagctgggaatacaggtgtgtgccaccatgcccggctaatttttttttttttttttttttttgtatttttaaatagagacggggtttcatcatgtttgtcaggctggtctcaaactcctgacctcaggggatccgcccgcttcggcctcccaaagttctgggattacaagcgtaagccaccattcccggcctttattattgttttaacagagagaggtgtctcactatgttgctcagactggcttcaaagtcttgggttcaaggaatacttcgccttggcctcccaaagtgctgggattacaggcatgggcttttgcttctggtcccagagtgcattttctttttatttcttttctttttttttgagacgaagtcttggtctgtttcccaggcgggagtgcagtggcacgatcttggatcactgcaacctctgcctcccgggttcaagcacttctcctccctcagcctctggaatagctgggattagaggcgggcgccaccacacctggctaactttttaacttttttttttttttttttttcagtagagatgaggtttcaccatgttggccaggccggtctgaaactcctgacctcaggtgatctccctgcctcggtctcccaaagtgctgggattacatgcctgagccaccgctcccggccaatttttggccaaagtttctaaaataaagtttaaggttaaatgtccggctgggcgcggtggctcatgcctgtaatcccagcactttgcaaggccgaggctggcggatcacgagggcaggagatcgagaccatcctggctaacacagtgaaactccgtctctcctaaaaacacaaaaaattagccgggcatggtggcgagcgcctgtagtcccagctactcaggaggctgagacgggagaatggcgtgaacccgggaggccgagcttgcagtgagccgaaattgcgccactgcactccagcctgggagacagagcgagactccgtctcagaaaaagtaaataaataaaataaaacaaaataaatgctctattttaatagaattataaatgccctatttttatagaattataattctagcgtttcttttttttttggagacggagttgcgctcttgttgcagaggctggagtgcaatggcgcgatctcggctcactgcaacctccacctcctgggttcaagcgattcccatgcctcagcctcccgaatagctgggattacaggcacgcgccaccacgcccggctaattttgtatttttagtggagacagggtttcagcatgttggtcagtctggtctcgagctcctgacctcaggtgatccgccctcctaggcctcctaaagcgctgggattacaggtgtgagccacagtgcacagcccgcttttccctgtttgtagcgcctattatcttacggatttatttgtttgcatgtctgttgttgatctccctgactagaatacccttactaggtaatcaataaacatatacaaatatttgttgaaggaatgagaaatgcctcttgggcttgtagtttaggctggctaaaagcactgagatggggagtggggagtaggaagagattgttctcctgggagatgggccgggaggttccttgaggatgggacttgactcagcaattaaagaactttcagatctgcagggacctgcgctgaggcccaaaggtcatgaggtcgccgatgataagagcttcttggactgtagctgggcaatgtcggaggcccagcacctccaagggacaaagaaatctgagttgagtttcccttccagccggctccaagcctcccagagacgcagggactgtcccattcccttcgtccactcccactctttccagccaccttgctctgctcttatccccatgctagtttaaggacgctggccattttttgcactctgcaaatccctcaccaaactgagcaaagtagtctgaaagaaatcagtcttcctcaaggaaggttcaggcctggggtcctcagacaaccaggggctccgtgacaatctgtgactgcagagcagtccaggaacaccggcctctccaggttcgggtcccttgtttctcaggcccagcttggtgggaagctaaaggcatgcagaggaggggaaggggagcgggtctgagtcttcggcatggcggggaactcagcccggcgtggtggtggcagcggtctcaagtgatccacaactgggcagcgtagctggggctgggggccgctcccggcgtgggcaacagcagaagcattggtgtccccaagctaggccagggtgggtttccgttcatccgccctgcgtgggcagatcgggcgctgcggggctgtgccacctcgcaccctctgaggaacaaagggcctggctgcgcgcgggtacccagccgttaggttagaagcgccttcgggtacccctgaccttcgctggccctgagagacccgcagcagccggagaatgtactgctcgcgaggatttccgagaacgcggcgccgagcccgcgtacacggttaccaaggcaactgggcggtgcctgagcgggcgggaaggaggcgttcgtctagatttgtcggcttgcggggagacttcaggagtcgctgtctctgaacttccagcctcagagaccgccgcccttgtccccgagggccatgggccgggtctcagggcttgtgccctctcgcttcctgacgctcctggcgcatctggtggtcgtcatcaccttattctggtcccgggtaagacccacggctgcactcaatccgtccccattcccatctctgagtggtcctagtcctaccctgccccctcccagtgtcttaccctcttgggttttcttgtttcccgccgcccccaggcctgccctgcagcctgcccctttttcacttctcttcctgtgccctgctcccaggacagcaacatacaggcctgcctgcctctcacgttcacccccgaggagtatgacaagcaggacattcagtgagctcttgggacggggtggccagaacgaagaggtggtgggagtggaggggtcttagaataagtccaaaggcctgggccagtccacttcctctctgcaggctggtggccgcgctctctgtcaccctgggcctctttgcagtggagctggccggtttcctctcaggagtctccatgttcaacagcacccagagcctcatctgtatcctttctgcctgcccacctttcccacacgacccacttctatcaggactcccttcagccacctgacacaatagtgtctgctgtagccaatccttccagttcaaagatcttcaacgatgtgctaaatcctgctgtttactaggcacttaaaatcccaaaatgagagtaaaatacagtttttggccaggcatgttggctcacgtctgtaatcccagcactgtgggaggcgcaggcaggaggcaacatagtgagaacccaagtctacaaaaataataggaataataaaaaccccaccgtttctttttacaatgaggaggaggtagatacaaatctgtaattcagtgtgataagcactgtgctatagaagtgtgtgaagatagaaagcacaggcagggcgcg

SEQ ID NO: 7545 - DNA, 6000 bp, Homo sapiens
cttactgcagcccaaggaaaggtttgccccttactgcatcctgaatgttatgtgtatatccctgacaattctcacaatatgaatctccttgcaaagccatgaggggtgtggtttttattaattatgcttttagttctcctgtgcttaccctgtatctgtaatctatatcaattgtggcttccctgtgtatccgtaagagtattttcctacagttgagtatcagattgaggccaaatgtggaggaaaagttaaatattaaatttgaactcaattgaacatggacacaaacaatggtcaccaagtcccggaacaggttgtgtgagccccttgaggcattcatccagcgctgtttcagataaatctctatttcaatctattcctatatgttagttattgaaaaacaacagacaatcgcaaaaacaagttgacctttttatgttccttgagcctggtcatgaagggccctcgtgcctggagctcatgccaaacaactcattacaaaagagctagggtcctagattgtgccgaagcttcatgagacctctcctcgtctgtgcacggacgagtggccgactctggagcccaggctgttgtttcctagtctggtggtgaatccgccatagtctggtgagtgcagtgtccgactctcgagcccaggctgttgctgttgcttcccagtctggtggtgaatcctccatagtctggtgagtataaatacatatatctcttttcctttctccccttcccattgcaacttgcttactatatcatttgcttattatatctgcattgccatttatgtgggataaagcttgtttacccttaaaggtattgtatgtgtgccttttcttctcccctcactcgtctctcgcacagaacactaggcaggggtaggaggaactgggagtggggggaccacagggacaaatggctgtgttcatttctcaggggccaggccacccacccatccccctcttctggcctgatagcatgccagcatctgtcccaaccctagaaatgaggatttggccccaggtccttcccttctcagtatccctctgggaaagaggaaagagcaggaaaaggtagagagggacttcagccctgagaaggggcgcagtgggtaccaaggcaagcttcctcaatccaatcttcccctccccctgacacaagtccctggccactgctgctggagacttgattggaaactgcttgctaaggttatgatgggagggtggggcattgtgcctatagggacaacccaggcagactcctaggactattttatggacatgttgtacacaatcctggttctggtcctcgtcaacactttagggctgtacacctcagccatttgaaacggagaggtgaggagactggaaaaataaaaccaactggaaagttgattctgtactatgtgcctatattgtggtaaaggaaatttgttttgtgtggttgtcactggtgggtagagatagacaaaattacctttaacccagactttttctcattctccttgcctagagacctccccaccctccaacatacacgtatacaatctcattccctagttctttgcatctatatgttcctctctcgtgtttttttactttttagagatgggggtcttgctttgtcacccagggtggagtgcagtagtgcaatcatagctcaatgcagcctcaaactcctcgaggaatcctcttgcctcaacctcctgagtagctggattacagatgtgggccaccatgcctggcttctcatggtctttctgatttacccagaccttatcctagtgactgtgtttgtttatttatgagatagagtcttgctctgtcatccagcctggagtgcagtggtgcgatctcgactcactgcaactacctcctcccaggttcaagcgatccttctgcctcagcctcctgaatagttgggatcacaggctcccgccaccatgcccagctaatttttagtagagatggggttttgccatgttggccaggctggtctcgaacttctggcctcaagtgatccacccgtgcctctgccttccaaagttctgggattacaggtgtgagccaccatgcccgaccctagtggccggtttaaaatgaaatgtgaaaaggggttttattgcccacctttcactggctggttgggaatttttttttttttttgagacaagagtttcgctcttgtcgcccaggctggagtgcaatggcgcgaacttggctcactccaacctccgtctcccagattcaagcaattctcctgcctcagcctcccaagtagctggaattacaggtgcctcccaccatgcctggctttttttttttttttttttttttgagatgttgtctcaccttgtcacccaggctggagtgcagtggcgcgatctcggctcactgtaagctctgcctcctgtgttcacgctattcacctgcctcagcctcccgagtagctgggactgcaggcgcctgccaccactcctggctaattttttttgtatttttagtagagacggggtttcactgtgttagtcaggatggtctcgatctcctgacctcgtgatccttggcctcccaaagtgctgggattacaggcatgagccaccgtgcccagcctaattttttgtatctttagtagagatgggttttcaccatgttggccacgctggtctcgaacccctaacctcaggtgatccaaccccccacttggcctcccaaactgctgggataataggcgtgagccaccacacccggcctggtgggaattttttttttttttttgagacagagtctctcaatctgtcgcccaggctggagtgcagtggcgtgatctcggctcactgcaaggtccgccgcccaggttcaagcgattctcctgcctcagcctcccaagtagctgggactacaggcgcccggagtagctgggattacagccatcacgtctggctaatttttgtatttttagtagagacggggtttcaccatcttggccaggctggtcttgaactcctgacctcgtgatccacccgactcggcctcctaaagtgctgggatcacaggcgttagccaccgcgcccagcccaacaccttttcatttatctgtacagcacatatttcctgagggcatcctgtatactaggtcctgagggcatcctgtatactacagatggttcccagcattggagttttcaactttacattggtgcgaaagcagatctgcattcagtggaaactgtatttctcttacaatgctgggcagtgtcagcaagccacagcttccagtcagccacacattttcaacttacagtattttcaacctatgatgggtttatcaggatataactccatcacaagtcaaggagcatctgtaaacagtaaacagaaacccaggcaccgtgtttgtgcttagggagcttgcgatctagtaggggaagattgtcaataaaacaatcacaaatatattggctgggtgcggtgtctcacgcctgtaatcctagcgctttgggaggccaaggcggttggatcgcttgaggttaggagttcgagagcagcctggccaacatggtgaaaccctgtctccactaaaaataaaaattagccgggtgtggtggcaagcgccagtaatcccagctacttgggaagctgaggcaggagaatcgcttgaacctgggaggtgtaggctgtagtgagccaagatcgcaccactgcactccagcctgggtgacacagtgagaccctgtctcaaaaataaaaaaaaagcatatatatgtaaagcagatatatatatatgtgtgtgtgtgtgtgtgtgcgtgtgtatctatatctatctatctatctaattgccaccgtgccaagtgattcaaaggaaggtagctgatgttatgagaacatataaacgggtggggcgtgggagaaggggctgagaacacactggaggggaatgcagagaccacctggatgtctgctgcaattaaactgacaaagtatgacaatttgggttacagcgggagcatggcagctggagaaatggactgacttgagatgtcccagatgttcagatctcctttttctctcagggcacaggcaaaaggcaaacccaaagaggtgactttgagccaggaggaccccttactttgatcttaacagaaacgggggtttcctctggtgcgttatgtgtatcatttattgaaccactactatgtactaggaccgaccttgtcacatttaaagttcacaactctggcctggcgcggtggctcatgcctgtaatcccagcactttgggaggccgaggcgggcggatcacgaagtcaggagatcgagaccatcctggctaagacggtgaaactccgtctctactaaaaatacaaaaaattagccgggcgtggtggcgagagcctgtagtctcagctactcaggaggctgaggcaggagaatcgcttgaacccaggttgcggaggttacagtgagccaagatcgtgccattgcactccagcctaggcgacagagtgagactccgtctcaaaaacaaaacaaaacaaaaaaaaaagaaaaaaaaagttcacaactctgaggtaggtgtaattatccccatttcatgatgagtctcataaagtttaggtgatgtgcccagaatcacacagggttggaatcaggattagggccctgatcgggctgcattcaaagaccagtttgcttcaatacatcatactacggtccaagacttctgctatcctgaacccactgttccttcctctagtctagttttcaaattcgcagggacaaatatggccctgaaggctccatgagcagacgagaaggctggacttcgcaactgggtcaccttagatccggaactagagaatgacaccgttgtttccgggaggaaaaagaaaaagcgcttgacccggaagctgcgtgtcccatccccgcgcctgcttctctgactggggtgaggccgcagcggactgccctttcccaagatggcgtcgaagataggttcgagacggtggatgttgcagctgatcatgcagttgggttcggtgctgctcacacgctgccccttttggggctgcttcagccagctcatgctgtacgctgagagggctgaggcacgccggtgagcaggcctacgcagccgctaaacgcggcagggggcggtgatgtgggcaagaaattgggggctagaagtcgggacccttgaactgggaggaattgggacctccctgggaggggttctggtctgggtgtcggaccaaatctggtagggcggtcctgcccatgggaggggagtctggtttgggggagcagtggagcctgtgggaactcaaggggtctcaagcttcttcccccaccgcttcattctgtcctcgttgcttccccactcccggctcgcaggaagcccgacatcccagtgccttacctgtatttcgacatgggggcagccgtgctgtgcgctagtttcatgtcctttggcgtgaagcggcgctggttcgcgctgggggccgcactccaattggccattagcacctacgccgcctacatcgggggctacgtccactacggggactggctgaaggtgagcgcctcggccccaaaagggtcttccctctgggtgacggggaatcagaggccaatgcccagggctgttggtgggcgatgaatggtgctggccagctgcacagtgtgaagcctgggaggttcgaaccccttggcttatggagattacagagcgcagaaatggatcttagagaccacacaaacttcctcttcaaagtgtggaaactgaggtctagagatgggaaacagactttcccaaagccacaatacaggatactggtgggaccagaaccccggtcacctggttcccagaatcttttaaactgttagtttagtaatctcagactcatggggtacaaaggaccttggagagtacctagttttcataaaataaattttatgaaaatgtaattactgttagtatagcatttaag

SEQ ID NO: 7546 - DNA, 6000 bp, Homo sapiens
actttacatgttgcgaggtgatttccaatttccagtatcagattggtgtcaaagcctagaaattgtacagcgattaggagtcgactgggtgccacacaatgtttatgtacataattttatgaccaagacaagtgatatttggcacctgagactagggggagatttctcctgtaaacgagcaccaaagggctccatgctatcaggtatagggaggagtggcaaaggggtgaggtcattgtgatcccttcccttctcctccctgaaaaaaaaacaagtatggtgtgtttcctgcaagccccagaatatgtgagccttagctcactcactaagggaggctgaccctaggagtgtgcatttgtcttaggaaagaaagtgtcagcccattttgaggtaactctcgaacttcgggcttcctcatctttggcctccaaagaataacgtacataaacataaaatgcgatgcaaaatgtatggggttgtatcaggatggcaggagtttcggtgtatattctgattttgagacaagaaaatcaattcttctcatctgaggccagaatggtaattagttcttgttgaagtgagagattatttactcagctctatttttttatgtttatgtgacctttcatagttactcagaacaaaatggggtaagagaatggggattgtaatgtgaatctaaaagatgtatgtttccctttctatattcaaatggatcttatgagattcccatacctagaaattgaccaccaattagtaaaatacagatttatatctaaggcacattcattgttcctcttggtactatcagatctctctatttaatgtcctagacctcaaagaaaagtgttttggaggagaaaaaaagaaaaggaggaataataacatgacctgctatccaaaatgaacacagaagcacagatcactttccaaaatgtccatgatttcagaacataaatgcaggcacacccttaaaagaagcattagagaggagaaaacctggccagcttcccaaatctccctgcatccaattggactgggtgatgactgagatcaaaggcatgtggtgattggacagaaggccaagaggaactggcatcctcaaggctgctggaaattagccagctcaaacacaccaagcaaaagcaaattggaaataaagacaggcgagtaatcaaatgcacatgggggcatgcttcacaaaatgcgaacttcatgtgttcccagaggagaaattgccaggtcttcaacagcacaaactcaataggaaaatcaaaacatccccttttgcaaccttagagcctgaatctttggcttccactttagggaaatgggcaaaatgacctctttgtcatagtacacaccatgctccctgccctcctccactcccagacccctctcccctaagtaactttgtctttcattttgtttctaaagaaaaaaaaatgagatttttgcaatttggggcattctctctggaacagcaaatgttcccagctctgccgtttacaatgcctttggtggaaggtcacctcggaggtgtgatttttcagtataacataatttctatggtgccttgacatcctccaatgaagagcaccaataggaccactcctctgacattagggagagggtccactcaggcaccaaatgccattctcaccactaatcctaatcttccttgtactccttttattacctgcatgttattgggaaagaggatggtttatggtcccattcccctacatacacactttccaaccccatactcccttagaaatgtagagcaaagattacgaattcttttctgcaggttctgattcacagagggagagcatcagaatgggggctttggataggaaaaaccttgcaaattagtgcctgaataaagatataaaaagagaaaagtgaaggaagatattcttctcaaacttgatgccctttctctctgtctctgtctgtatacacacacacacacacacacacacacacacacacacacacacacacacatatatatgggttacattttcatggaggacaacagagtaaaatccagcagcatttaagggatttcctcttgccaaattgtctccggtcccttaattgtgtttaagccttgctgagtactttgtttacggtccctaatgtggtgatttgcatccccctgtctgggttgctcttggcagggcaggcagctgtctcagtctaactctggctgggaaaggtaaggatctttgctttgctttttgaaagatctgggaaggaaatgttgaatgtctatgggggttaggggcatagatataattcatgcattggaggctttgagaaaagttctccaaacttaaaggagtctcctaaagccatgtgctttagaaagaactagagagatttcctcttctttgtgaaaatagagggctcgcagaaataaggctggttgcattgtggatgaaattttgcatttgggggcaggtgtccccaaaggatgcccaggggtgtttaatactttgtagacacagagtggaaggaggaataaacattcagaaacaacaggcatagatcactaggaattctctttgaatttcaatttgaagaggtaaagtcagttaaagctgcatgtgtcagtggttaggatgacaggcttctattcttctgatacaatgtctgctttataccaaaactttctacctctttgaatttaaaatacaaatcattggttgtctactcagagtctagagatgtgtacctgtgtatcaaggcaggtgcacacaccctgtggaggagcattggtgtgaatgaggcacctgagcctgacaaggttgaagaaagctttggtattggaagtgatgacagatttgtgctcctaggacacagacacactcactgcgcctcattatagactcagtcaagggcttactatgaaaaaagctgccattgtcctctctctagacgttcaatgtttgcacctttagctttggtaacaggaaagcatgcttttcaacagaataaggtgatattcagagcttcagtgcagttattgggctatcttgcaggcaaagtggtactagaaaatagaggggaattgccctcaagggccagagtttgcaggtgagaagacagctctgttaaggagcttctcaagaacctccattgtacgtagccagcggcccccatcttaccatcttccgggggcaactttggcaagttctgaaatgccctggttctaagtattcctgaccctcaacaccaagtgacggtactcctcagatatgaaagctgtctctttaggtctgacatttttaaagtgtgaggatcatggtgaccaaggcctccaggtacttgccatgactcccccaacctcagggacttttcaactttattttttataaggacataaccctctctctggctttcattccagaataaacaacttctggtccctctctttttgtgacaagtcatcagggtattgctacaaggcaaggctggagagagtgtgctgtggtagaggagaggcgagatgtttgagaacatccaagccctttgccagctattagagaaatctaacaatttgagagaaagatggaaaacaaatctcttccaagagttaatttggatttgtggttcacagtattaattagaagaggttattaacacttgtgcagatgaaaaaatggaggatgtaaacttttaactacagagtgtaggatgagctcccagtattatcttttctcctcaaaaagacaatcttgggctttatatgtttcaaggttttaaaaatttcacagtttgtctgtaagaaagcataaacctataaagtcacttacaggtttatggggtgggaaatagatgtttaactttattgtttaagtatgatgtgtcaagttgtatatgtttgaatgtttaaaataccttgatccttaaagtgggccaaggaacagaggtctcaacataggtagggagcttgttacagacttactgaatcagaatctaaatttaacaatctccccaaatgatatatatatccattaaagattagggttcaaaccaagggtgtctctgttactgggtgatctttgttaaattacttaacctctctgagcctgtttcctcatttatgaactagtgagaattaacattaatatgtgacatttcttaatattgtgccatgtccacagtaggtgctctataaatggtagcaattatcatgatgatgataatcttggtgctgctaaagttacctccttgcaaaagcagtaaacaatcatgtttaaatcaatataactggctttcccccttaaccacaaacatttgtgcctcccaccctcattcctaaatgaattaacactcaacaagtggggttttaagcttcagatgactatcacgcacatataaagaataatggaaaacctaggaacatggatttttgctggcttagagactgaattcagctgcctgatgacttcacagctgtttctgccaccctagagtatctgtcccctcggctctgtcccctcagccgggtctgcaacgctgactctgggattttcttataaaaatgcctgatggacgggaggaagatctggaggtcggcgggggaaaaaatgagtcattcaaattcacaaagcagtccgcttagtaaatgctgcaagagaaaaagtaaaagctggctcctgtctctggggaatctgtagaaatgattcggactcatcatgtcactgagcaaagctgggggaagccaaaactcagaatctgctggcaaggaaaagaacgaaggaaaaaaaaaaatgttagggaggggcaaacccgagggggagggaataaaaagagagagggagggaaagacaagcgtcatttaggaacagaggtagcctgaaagaagcaggaactccaggatcccaaaccagagcagaccctatagtaaagtatttttacatcttttcctttccccagaagagatccctaacctattgttttattgacagccttgctgttagaggctctttcccagaagttggacgaagaggctcaggcgttgctgtttcttgtcttccaagtcaagtggttactctggtaatggattgcctctctccgaggtgagtgtaagtaatttggggacagatcttgattttcaggttagctcaatctcagctttggggtgaagttatttttttcagacataatctcaaatatcttttaactggcctcaccagaagttagggtgtcattggacaacagtgattaattagtttggtgattaaaaatgacatgtgagtaggcagctctaagatttagtttcattgctcagggagtgatattttgactttccagagcagggaagaaccagtgaggtttgatttggagttgaatttgttttcagtggatgcttaatatatttaaagtatgaatctcattgaaatggtctcaagtatctttctttaaacttgttcggtaactacaactgctcaactgtgtagcagctagacagctttttgagaatggaagacagtgactcaaccatgtctgagcagcagacaagttttcactgatttctcatagacagcatttcaaccagatacttttgatcaaaagtctcaagctttgtcctgaaatgttcaggtacgaaatacttagaaagggtcattgcagcaagttttatacacaaaggcatggaggaaaatgaaggttgtgaaagtttcctgaaaacctagcatgcttatttgtttctgcatgttgtagtatacataatatcgaaattttgtgttgagcttaatagaaaatttgtgaattgacagctaattactcaaataattgattttattttgccaagagaaagcacaaaattatatcctatgaaggggttgaatttttttttcttattttttctcttttatagcagattggaagatattgttacacttcagaccacaaatccccacctcattttcaatgaattttttgctgaactgtccacctaaagtgggtaataaaaagatccca

SEQ ID NO: 7547 - DNA, 6000 bp, Homo sapiens
ttcactcttgttgcccaggctggagtgcaatggtgcaatctcggctcactgcaacttctgcctcctgggttcaagagattctcctgcctaagcctcccggaattaagtttttcttataggaaaaaaggaatttgattgtctcctcacatcaaattagtgtaaatgaaatgactcctgtaatcataaacaaattaccccttaattgtgctagatacatcaatttctaaaggcttttatttgttgatgtaattaaatggttaaatattacacagaatctaagtgggaataataatgtgttaaaatacatttatgtctatgtgtattcaatgattagctgccagttataagtgagaatatgcagtatttggttttctgtttttgtgttagttcacttaggataatggcctccagctgcatccatgttgctgcaaaggacatgatttcattcttttttatgactgtgtagtattccatggtgtatatataccaagttttcttcatccaaaccactgttgatgggcacctaggttgattccaagtctttgccattatgaatggcactgccatgaacatacaagtgcacgtgtcatttttgtaaaatgattaattttcctttgggtatatacctagtaaagacatcgctgggttgaatgattattctgttattctttttttaagttatttaagaaatctccaaactgcttttcacagcggctgcactaatttacattcccaccaacagtgtataagcactcccttttctctgcagcctagccagcatctattatttactggctttttaaaaatggccattttgactggtgtgagatggtatctgtattagtctgctctcatgctgctaataaagacatacctgagactgggtaatttataaaggaaagaggtttaattgactcacagttccacatggctggggaagcctcacaatcatggcagaagacaaatgaggagcaaagtcacatcttacatggtggcaagcaagacagcatgtgcaggggaactcccctttataaaactatcagatcttgtaagacttactcactatcatgagaagagcacggaaaagacccactcctcatgattcagttgcctcccactgggtccctcccatgacacgtggaaattatgggagctacaattcaagatgaaatttgggtggggacaaaatcaaaccatatcattctgcccctggccccttctaaatatcatatccttatatttcaaaaccagtcatgccttctcaacagtaacctaaagtctttatatataatatacatataaaatttaatatatattatataattatataatatatatatgagtcagtatgtatttatgagtcagtatacataatatatattattatattattattattatattatattatattatattattattatataataataatatataatattatattattatattatattatattattatattatattatattataaaatatatatataatataatatatatataatataatatatattttaatattatatattatatataatataatatatattttaatattttaatattatatatattaaatattatatatattttatatactatattatattatataattatataatatataaatatatataatatataatatatataatatataattatataatatataaataatatatataatatataattatatattatatataattatatattatatattttatatatatattatatattatatataattatattatatattatatattatatataattatatatatattatatattatatataattatattatatattatatatattatatatataattatattatatattatatatttatataatataattatatatatatataatatatataaccagccattgaatgtgttgccattagaatctaaagagacatcacagatgctgacctttcttcttactggttgaggctgcaagatacagtaatttttctttcactttgaaggagataggcaaagcacccctagccactggatccataaaacctttgccgaagtgaaaacctccagaatcttcacagggtttatctcccactttctaaaacatgtgtactaccaaaacctccagcatgctagtcacatcttgctcatcttgtctgatcagcatgatgccatcaatgtgtcaatatgatattctgtggatgtctacatggtccagacctcttaagactatattataaaaaaagctagggggtcaatagagcactgagggaaaactgtaaagaaataatattacctaatctatctgattgtgcactgtttttgatgctcttttctaatcagaatagagaagaatgcatctgactaatcgctggctaaaaatcatgtatctgctctaggaatagataccatgtctgacaaagcaactctaattaggaccactagttgtttgagcttgagatagtctaagcattctctagaatctttctggcttctgcaaggatcaggctggcaaattaaattaaggtgtgctaggcaccactacctttcatccttatgtcactatttgtggcattggtctctgcatttcttctccccatgtggaatactgttcttgattaagtgtcatggctggggataaagttgggagaattgtcaaaggtgcccactttcccttctgcattatgatagtttttaccctacaggccaaggactcagcatggaagttattctaactactagatatgtcaattctaacagcacatttggtgacagcaaaatcaccactgggtatgtccataagtccagtgagacgaggcagagctgcttgttaaccggaactccatttacgaccttggctctatattctcaatctagctgtagggccttagtgtgggttgcagttatcaatgtccactctgactttatgcccaacaacccttgacatgtctggggatttttctttcttcagtgtataatcacccaaataatggctttaggtccctttgagggaggactaggaagtataatcaccacagtatatacttgtcaagatgttgcaagatcttttcttctaggggtctgactagttttttaatcaatatgttctgtatctgaaaagtagcttaggactaggagctgagcaagagatcatgactttttattggggtgatggagaccatgttgagcctcttactcctctatttcttccccttctggttatatagttactgagcagcacccttgttgacctccttcctattttgtctgtatatcatagtaaggtttatatatttcacttaaaatgaagaaatattaattctgggtaaagcatgtcaagttaagtatgtcttttgtaatcctgagagtgaccactaaaataactatacaaatagatacagttaagaaacataatagatacgttgaaatgcaataccaaaaaataatttcaaataaccaacaagaaagcagaaaatgggaaataggagaattaaaaccagagagaaaagaagcaaataacaaaatggcagatctgattttaaaaatcaatagctacataaaatgaaaataatttaaacacacccattaaaagatgtgcattgtcaaattggattttaaaaaccaaactcatgactctattatatgccatctacaagaaactcacttgaaatacaatttagagctgggtatagtggcatgtatctgtagtttcagctactcaggagtctgagatgggaagatcacttgaacccaggagttcaagtccagccttggcaacatagcaagaccatcatcttaaaaaaataataacaaacacagacgcacacacacacatacacacacacgcatacacatataatatgaatgtgatgtttggcagggccaacagaattgagatcataactgccactctgaaagcatatagtgtgtgtgtgtgtgtgtgtgtgtgtagataaaaataaacggatgaaaacaaaataccacgaaaacaataatcacaggaaagtaagaatggctatattattaatatgaaacaaagtagactttagaacacaaaagttactagagataaagattaacattacataatgataaaagggtcaattcaccaagaagacataacaattccaaatgttgcaaaatacatcaggcaaaacatgatagttttaaagggagaaatttgaaagtccctaagttttgttaaaatcttcaacattcctctcttagtaatcaacagaactaggagacagaaaattaggaaaaatatagaaaaaactgaacaatatcatcaaccaactaaatgtaatagatattatataatattccactcaacaccaaaaaactatacaacttttcaagtgcctatggaatatctgccaagatagatcatatcctgggtcatcaaataagccttaacaaatttgacatacaaaatattttttctgagtataattgaacttctgatttaaaattaaatcaataaccaaaagataagaaaatcttcagacacttggaaattaagcacatttctgattaatccgtgggtcaaataaattggaaaatagtctgaactgagtgaaaatgaagctgggaagcagaggaatgaaaattttgattatctaggtaaagctgtcaattaagcagactagagctctgggtagagagaagagcttttctctgattaagctgtttactttctcatggcttaaagacagcactttaaattttggtattagccacaataatcttggacgtaaaagagaaattgctccctataatatgatatagccaggcaacccagtataaatgccactgctctgcaggaactggccgaatatcaatgagaagacaaacagtccaagcatgatgacgtgaatgtgatgtttggcagggccaacagaattgagatcataacctccactctgaaagcagtcttcacagaaacttttcacagaagtcaaatagttaaagcaaattctagatacatggtagagaccaggagaaaatatgaataactttcttctaaacaaggagctcagtggataaaccatacctctagattccttgcttccattttcccagaagtaagttcactgtattttttctgttttgttttgtattttgcttttgtgtgtgagtttgtttcagaggttttgtcttttcttattcctatcacaaaattataaataaacctttataaactgaatgacaatcatctatgcagaaattattttgaaaaatattgggctactttaaagattttatatctggtaattaatattagataaataaaaacattgagttagaatgttttttaaaaaattatgcaaacattatgttgttttaaacataactgagtgtagaaataagtttaaattggctaaaaattttttgtgaagagcttagagttttaagaattgggttggaagactgagttgtttttgaagttaaagttatctactttgattgcacaataatgtagggcattttggataagtgttcttctgactttaagactgtttaccaagagcacttacagaaatatttttattgttcctatcgctcactcttagtctataagaattttagaaatgtaagattctttctaggatcttttactcgttggatacagtgagttgaatcagaatgtgaaatatgtagcttctctttaccacaatgttatttaaaatgtacattggtaaaaagaattttcatactcctatagtgaatacatgttgttctgaattttacaacagtataagaggataaaaatgagtcattacaatttgagactatttgccatatgtataataaagtattcatgtttttgctagcctttacataaactgcagaacatacaaaaattggaaagaaacaaagttggcaataatactttacgatggaagatataagggattggagtcagactggagtttgcatgctacctaagactgtagctgattccat

SEQ ID NO: 7548 - DNA, 6000 bp, Homo sapiens
ggagaaggaagagaaagttggcacaggccagcacctgtacttggtctgtttatagcattagcacttggcgtccccatgactgccctgccatggaaatcacattaaagatgaggcacagagagggtcagtaatttacccaaggccacacagcaggattggagctaggtttgtctgactaagaagcctacccttatctaagacacaatgttttgcagattaatgaaaatcatcatcccgcagggcacatggcagatccctgctcctgcccagcatagtgcccatggccttcagccaggtagctgacctggcttcccagacgaggcagactggggagaacagcttctcagggccaagggctcacactgcatcccacagctctggagcccgcatcaggccagggcagcggggccactgcctctaggacattgctgggaagagtgagttctgaccccttccacgttctgcagagcctcgctggggcctggttagatccacctgatgtgctagtccagtgctgactttgtagcattagctcaggaactcagggctcccatcccctctgctctcacgtgcctccccgctcgagcactggagacctcggtacaccagatgtggtccccattgctgcagataatgtccccagtctcaggaaagctttggcggtttctgtggacttacgggcattttgcagagacagctattccagcaggggtcctgtgggatgtggagtgagggcgtggatggcagaggggggctgctgtctcccgagcggggtggcctccctgtccgcaccctacccttggggttcagcaagtcctgctgagcctgccgctggcactgcttctccagctccaggtctctcgtgtcacactgggctcctgctccaccctgtccccagcctccctgacccctggctggctccctccttgttctcgtccatcctaggtccacagccagctggagaactgagacaagccgtgagcagttcccaaactcctggggaaggtcagcggtcccctcctcccgggccttacctgctctgtcccaggctgggggtggctattcccaggccacagccctggggggatcagaagggcggtgctggccttgcagggtgacctgggagccagggtggacagcaggaggcccacagctcctccccttcccctgggcgggtcctaacaggtgccagagccggcccactgggggccctaagctctgcagagttggccgtggacccaatcctggggcttgggaatctgctcttcattgatgctttcaccgaagtggaattcattcctacactttttattgatctgagtgaaggggccaggctggagtggctgctgggctggagaggcaggggctatggcccaggtccccaccctgctcagaccctggaggctgaccctgtgcctgtgcctaatggtggcttctgggcactggggcccgagggaagcctgagggcaggggggagggaggagggcgtgcacgttcacctcgggcccccatgctcaaggcccctctcaccagttccagcagcaccttctctcctcaccccctgcctgaggaggtgacggccccctgctgttgccacgtgctggggcacctcctcgggtcctgacagctccaaaccacggactgcctgatggccagagcccgctgcgaagtggcgatcccgcacccatgcggaggctccaagacaagatgagagggccctgccagaggaagggttccctctcctccacccaccccgataggagtccaccctgggattcggtgatgcctcaccctctgtctcccagcacccctggctgccgggggggattgagggccggtcccaccttcctcctgtacccaactggaccacagggccgccccatgccccaaggggcctcggctgggacgcttgccatctccgtgagccttttctcaggagaaggggggctggttcccgtccggatgcctccctggcctgcctctgcacctggcccacctctgcacctggccctcctgcctgactctcggacactccccttggtttgagggtcaggcagtggccagacgcccagggagagttctccatctcgagctgtgctctctctgcactgcccccctcgcttctagccatcaggggtcccctctgctctccgccagccacctcctgcctgcttaggggagaaacaagaggaaggtgcccccgtaggagccccaagaccaccaaagggacagatctgagaggccactccccaggcctgctgtccagctctggggtgggagatggcaccagaggagaggccatcagaggcccccgagtggcaggacaacggctgcgggactgcctctcccaggcttgccttccctcgggtggctcagcagcccctgagtgatgctcctgcctgggacgcttgacctgcactgagcacaggggagtcggatccggaggcattctcggaatcacctctccggatgctcagaaaagggcaatgtttttaaaaaggcaaaagggtgcggtgcgtgttatagatgagaggaggctaacgggagaccctggataggatcctgaacgaggcttggggtgggactgctctggcgggccgtggagctgactgggaagtttacacacagcaggcggggccacggggccgtgcatcgttctgtgtggcactgcgtttccccaggcgtgctgctggaggcaggcaggtgttcttagacatttgatgctacagtatttagggtgaagtgtcaaggtgtctgcaactgacactcaaaagattcagcagttttacataaagggggagcaagaagtaagagaggaagccaaggtgacacaatattttttaaaagggcttctgggtacaaatcagtgtacgtacagaaatacattttatttgtgcagatgtgcagagacactttcggctggcatggtggttcatgcctgtaattctagcactttgggaagccagggcaggaggattgcttgagcccaggctggacaacatagtgagaccccatctctgcaaaaaacacaaaaattagccaggcgtggtggtgtgtgcctgtagacccagctacttgggaagccgaggatcgcttgagtccaggaggtcgaagctgcagtgagccttattctcaccactgccctgcagcctgggcaacagagcaagactctctcaaatcaatcaatcaataaatttgactgcaggtgccagaagtggactctgactaactgaagccgggagcaggtatttggttggagcttgcagcagggagggcagggggaaggcgctgttcaggccccaacagcagcggctcgggagtggccccagcacaagcccagtgtccctcggctcagcattcaaattccaggaaaagagtcccgatggtccggcttggtctagggctgtggcccgtggcaggtccccaaaaccacacctgccgctccagtgccccccaaggctgcatgaccttcgtgtggacaggatcatggaacacatgacctcacccaagcctcccaaccatgccgtgatccagcactgttagaatcatccccgtttcacagagcagagttgaagtgttgggtgtttaaacgctgtgcccagggctgtccagccagggagtggaatctggtcctggcccagaaggcagcagccccacccaggccacctgctccaggtccccgggctccacagactttcacatctactgcagaggcgcaaggacgttccccagcatcaaagccctcagaccctggtgccagccacgtcgtcacagaacttgtagaccagaggatgccctgcggatagagggcctgccctgggcctgcgccaggctgggcatattgctgaggtccctgctctgtgctggcaaaatccagacctcaggagaggggcaggcaggctctgagaggttgcggctgcccagggcctgcagctgggaggagcggagacagaccccccctcccctgggacacagttgctctgcaccacacagctccgctcctggcgtcccctggctttgccgggggcggccgacccagctggccaggccccctccccctgccccacaggtggccctgagctgctgaggataaggcatgctgggcgatctctgctgattagagtcgccctccgctgtgggctaggggcccctattttgctcctgagatcccagtcggcccatagaagccctcacaggctctcccgggggtccaaggagtcccaggaggcccccgttcaccccgggtttgccttctccctcctgtaatttgcttttcatatgcgtgaaggggaactcagcaggagcagaagatgatgtggcctcgtgggagcgtgggagagctgggacggggtggtggggaggagcggggacccagggacaggggctctgggtccaaccaccaggccttttgcacttcgtgctctctgtagcctcagcttcccccgagggtcaggaactccaggcaggggcatggggcagctcagaaaccttcctgagccccttcccctggcaagaggcaaaccaagcaggtgagggctgggccctgttctcagagctggcatcccagccctggccagatccaggctgagggcggcccagccccctgttctgcctggtgcagaggacacggcttccctggccggagcccccgccccctcctctcctttcttggcgtctgcccctgggcgtgccctaccattaagcccttgttggttccacaagctgggggcaccccttcctcccttcctccgggcagccattggcaatggctggcggctcgggacagggcccgtattctctgaaaatgatggctgggctggaacccgggatcgattctcagacctgcgtcatgtggagtcccggatgcttgttacgaattcggaccctggcctgtgcctgctccctggtacctctgaacagggctttctgccctgggggtgtgaagagggccaagtccactccccgactggggtcacgcctgcctcctgtcaggactgtgaacactgcgtccccatcagctcaaagaatacgcatggggacaagcctggggggccgtctgagagtcccccaaccctggatccccacggcagcccccactgttgggtttttcagtggctggtgtgccctgggctggtcacctctgcattttgctctgctgggagtttgctcctggccctccaacagcgcctcctctgtgaggaggaactcctgttcccgtggctctgctggctctggaggctggagttcccgtgctgggccctcctgggcgggttctctcttgctgccgccagtaccctgcccctctcgtcctcctgggtagcctgggaggaatggcagaagaaagcagtgaagccaggtagcagtagcccggccaccccaccaggctctgctgtaggctgggctctcaaggcagctgctccaggaggggccccctaggaagggactgccacactcctgggagcgttcctggccccctccagtgcaaatgaccctgggccccaaggctccgaacacccgcccctctgctccaggtaagagggagatgtgggtggtgcctggactgttgtgtgcttaggtgggggagtggagccttcaggtctcaggaacccacaaatgcttgttgagctgatgaaccctgcagagatgagaagcttaggcccagagagctgatgccacctgcctggggccacaaagtccactgggcagaggagggtgggaaccccagtccttggccccactgtcaaagcgggtgcttcccagggagagcagagcctggggtcagtgcggaggacactggatccccagttccgggctggggagaggcagctggtgtttcagtgctgcagagagggccaggccggcctcagacaccctccccgaggcctgtgtgggggtggagggcggccacacctgtcccactgcaggccctggggtggggtttcctgtctgtgctggagcccggtcaggtttctcacttcgcccggggcaggggtgcagggc

SEQ ID NO: 7549 - DNA, 6000 bp, Homo sapiens
tcctccgagcgcttggtgagccgcttgcgggcctggtcgtgtgtgaccatggtcatgtcccagccgttcacctggccccaggagagaacacaggctcacctcagctccccgccctctgggatctggaagcagagggctttgggggcccaggtcattcaagtaggcccccagcctaacatcccagggctgggagacaccaagcactgtggctgagacacacaggagagaaagccagcgtcctctggggcaatgccagtatgggttcccaattggctgcagtgagtctctcccagctgggaggctggggcagctccccacccccaagtgcttcagacctgcttgcccaaaccttgtttctcctcctttgggacacctgttacctgcatgatcttgtctccaatctgcagcccagcgatttcagcagggcctccttcagacacccgtgtgacataaataccctggaaaggggcagcccaagtcaagccctgtggtcactggactggccccttatcacacagcggaagccagcatggcacattctcagccgtccctctgtccctgcacccagcctctcccagcacatatggtcagtgaggactgttctgagagagccggggcagagttgctgcaccaccatgcaccggccctgctgatggccgcctcctgctcctcctgggctctgtctgagcagcccttcctcaccccacccgtccttattctcactaggtcacttccgatgccttcttagagagcatggtttgagagatgaagtctgttccttccatgcaggcccaggaagcagagacccaccatctcaggcccctgtgccccatggagcggtcccaggaccccagaccccctcaccttgtccgtcttgtcttcagagaagggattctgggaaggatcctggtcgattccacctccaatgctgaaacccaggattaagttctcaccttgacgcagcttgtgaatttcaactctttgctggcaaagaaaaaagccagttgagagaagtgggtggttggagaattaggctggtgggtgttcccagcagcagcctcagagccatgacaaggggctgggtcccaggcccctgcaggaatccagctgctcaccagcctgggaggctgaggagctggcactcagaacttggccacattgatccacccacacagccctgtgtcctcaacctgtccccacttcccctgttagtcttaggcactagtcttggtcaacatgtggtggaagcccctgctggcccaagagtccaggtgctgtggcttctgtaggtgggaagcccgtctcacaggaggtgctctggaaaagcagagatcaaacttgcatagaaaggagaggaaggggtttcctttcggccggaaccgccatcttccagtaattcgccaaaatgacgaacacaaagggaaagaggagaggcaccggatatatgttctctaggccttttagaaaacatggagatgttcctttggccacatatatgcgaatctataagaaaggtgatactgtagacatcaagggaatgggtactgttcaaaaaggaatgccccacaagggttaccatggcaaaactggaagagtctacaatgttccccagcatgctgttggcattgttgtaaacaaacaagttaagggcaagattcttgccaagagaattaatgtgcgtattgagcacataaagcactctaagagccgagatagcttcctggaacgcgtgaaggaaaatgatcagaaaaagaaagaagccaaagagaaaggtacctgggttcaactaaagcaccagcctgctccacccagggaagcacactttgtgagaaccaacgggaaggcgcctgagctgctggaacctattccctatgaattcatggcataataggtgttaaacaaaaaaaaataaaggatctctgggctccaaaaaaaaaaaaaaaaaaaaaaagaaaggagaggaagggcttgccggccacggggaccagcgcacagggtgccgtggatacgtgttcgtgagactggagtgtccagtgcaggacacagaactgggaggcgagatgaggctgaaagtgtaaggctggggccagatcccgtcctggaaggggagcaggggtgtctccctaagccccagaccctgctcttgtgcagaaacgagtgttctggggcattcccaccatgctctggggtgttcccaccatgctctggggctatggtccccaactgtgccaggttcttttcaaagcccttggcaagcgccgtccagtcagcagatgctgggagccagaccagatcactcccaaagtcaagttttaacaggaaggagaaaagaaaaaagcagaagaccacaatctagactagacctaaagaagtttcccaaagggaggattatttgcaccaggctttgagggggtgatgggtagcctgaccttgatcctgaacccactggagttctcaggaacggagtagggtagggcatggtcaggtttgctgctagaatgaccactcaggtaatcagtagaggaacggacatctcacaaaagcaaggtgcagaggccgggggacatggagctacctgaaaatggagatctacagacttagggaccactcatggaggagaggagtcaagaggagcacccagccaccgtgcctggctgaacacacattattcagatggggacccaggaggaggaggagcaggttaggttggagtgccaggagctgcggggcaggtgtccagaaggcagatggatctatggagccagggttcagaagaatggcctaaatgtctttaatattctcaggattctacatgggagagggtggggactggggagtgagcctgcccaaacccatccccaatccaagactcgagggagaggccagaccatacacaccatgtccaggcacgttcctggtgttaccagaattagggggcatgggcctgcagttttggggaaggccctgggaccagttatggcgtgagggaggggggcaggaagcatgaggcctactgtgcctgggtcctcatgccccaaactgagctcctccaggcctgctctgccggcacggtcagaagattacaggcccttgggttgggagacagggctgtcactgatttgctgggtgaggtcacgcagaaggtggcttgctgtagctcctcacctgtccctgccccccttctacctaaagagcaaacctggtgccttctctctggggcaggtagggatctaaaaaagccaggctgggccgggtgtggtgcctcacgcctgtaatcccagcactttgggaggctgaggcaggtggatcaccagaggtcaggagttcaagacaagcctggccaacatggtgaaaccccgttctactaaaaatacaaaaattagctgggcatgctggtgcatgcctgtaatcccagctactcgggaggctgaggcaggagaatcgcttgaacccaggaggcggaggttgcaatgaaccgagatcgcgccactgtactccagcctgggcgacagagcaagactgtctcaaaaaaaaaaaaaaaaaaaaagtcaagctggtgcagggagggtgaagcttaggacagctgtcagctggtccagcaatgtttcctcctggcccaggcctgagccagtgctctaagctcagcctcacttgtcgcctttatcagtggcttctctgcctccacccacctgattgctggagcttctccagcacacccaactgagataacacacccagtccctatggctccagggcggggactttcgcttgacctactgcccaccgggcaggcatttcttctcattctctgaacgctgtcgggaggtaggcaggagacctgagtctttcctgaggtggtcttttctggctgagcacttctctctgggactccccacctctgtcatagggttgtgtccctctgtgacaccggcgtctgagtctaacgtcccagccttccttcctccctctgcctagtctaatagcacccagcacctaaaacaagccagagggcggccaggggcctaggctagcccccggagggtctactcaggactcaagtgccaggagggaggcctggacttttttgccttaagggctggagacccaggaaaagttcgaagaggaaacgctcatcgcagctatacgagcgtccaccctggaccaggcggcgagtgggttggaggagcaaggctggacaggaagggggcaggggctgccacggcaggctcgggagagccccacccccagatctccctccgggcggcggcgcaggctgcagcggaggaagcatttcctcattccagaggctgcgactcatggacgtcgggatcggcgcccgcccccagcagctccccgtctggggacacggaggcccgggaagggggcgcttttccaggctcctgcagccaggcctttccccgtggccctccccgccctgcgcacgcagtctgggctctgtccagggtctcgggaggctctcgggtcccggccatccctgtttcgtggctgggggaactgcggcccgctccggcaaagcggggacccgagcccttgccgccggttcgcaggagccccgggttcgatgctctgtcaacctgcttggggtgtccgtttcccgctctgcgaggtggggtcaggccaagacgaggaggagcccgcgcaagcgcactcaccaccacggcggtgaccggctggcccgggatgtaggacatctcgaccctgctctggtcgcccagcgccgctccgagaagccggcagcagagtacccgcggtcgcgccctcgctgcttaacaaaggccgccccgctcggcccgccccctcatgaatagttaacaaacctccagccaatcactggccggagcgccactccgctttcggaagtccctgcgcgtgcgcagaaaagcgggcagagggcggagcgtgtccggggcgcccacggcgcaggcgcggagggcggggcgggatctgggcgcgtgcgcagcccgagacctcccggcagtcttccgagcaagatggcgccgcgggcatttcttccactgcccgtctgagggaacgctaagtagtgtgtccggcgccgtgttccaggtaactgggccaccgtggccggggaacgcagacgcgccaccacctcccggccggcccggaccctcaatctcctcggcgtctttggaagatccgaggcccaggactggtgccaggtctcggaagctccagggggagggggcggcgtgaacccaactcaccgagctccgggcgccacttgtaacttggttttctccgcagctccgcgttgttccgcgagaaagcgagaggccgagcccgggctggtgcgatggccgcggtggtggccaagcgggaagggccgccgttcatcagcgaggcggccgtgcggggcaacgccgccgtcctggattattgccggacctcggtgtcagcgctgtcgggggccacggccggcatcctcggcctcaccggcctctacggcttcatcttctacctgctcgcctccgtcctgctctccctgctcctcattctcaaggcgggaaggaggtggaacaaatatttcaaatcacggagacctctctttacaggaggcctcatcgggggcctcttcacctacgtcctgttctggacgttcctctacggcatggtgcacgtctactgaaatgggggcccgggggacttttttaaaaaaccagatcgggaggactgtggccagcaattaacaccatgtagacttccttagttcttaagtggttgaattcgctgcttgttctgtaacgttataaataatttatatctgaagacggagagcctgtaatattcttcagattaaatgaagcgtgagacactttgtggagttctttcctgctgtaacgcttaggctgccactgatgcaaaatcgccgagatttgactcctggagagcaaggaatgggccatagccttgtgttaagtccttgtatttacacataggccattcagaaacgggccctaaggg

SEQ ID NO: 7550 - DNA, 6000 bp, Homo sapiens
tgaaggcagggaccctctgaccatcgccatggaaacagccaacgctgacatcgtcaccctgtaagaatgcctgaaggggcggggctggcgctgggactccccccacccccgcccacccacgttcgggcgggcgggcggggctgacgccgaaacagaagcctgtgctgtggggcctcggaaaggggctgggccagcgccggggccaggctcgagaaaggctgcgcgaagtgtgcactgggacgtggagtagaaggcaggcgggagggcgggcagggtgcaaggatgcttggcccaccctgagaggcgtaattcgcccatcaacattgctgtcaggcatctttttagcactagacgtgaccccgggggtgggggcagatgaacggaacgcaacccagctcaaaggatgggaagttgtgggggaggtgaggatagtctttttttttttttttgagacggagtctcactctgtcgcccaggctagagtgcaggggcgcgatctcggctcactgcaacccccgcctcccgggttcaagcgattctcctgtctcagcctcccctgagtagctgggactacaggcgtgcgccaccacccccggctaattttttgtatttttagtagagacggggtttcaccatgttggccaggacggtctcgatctcctgacctcgtgatccgcctgcctcggcctcccaaagtgttgggattacaggcgtgagccaccgcgcccggccaaagatagtgtcgttcatttcttaattccctcctcttcaggctacgactggcaaagatgagggaggctgaagcggcccaggggcaggcaggtaaagaatacacccaccccaccccccaggcccaacacctgaactctgggcttctggtccacggtgacctctctccctagtgcccagctgcattcattccgttatttaacaaatgcgtattgggcgcatgcgacgtgccaggccctggcaaggcataggtgctggcgcagtgcccgcggcgcgcacgttcccacccaggctcggagcgcgaggtccccaggtgggccccaaccgccggatcctgcccttctgcactggggcccagccgcctcccggcctttcctccctcccccaggagatgagacgtatcttgacatcttccgcgacttctccctcatggcgtcagacgacccggagaagctgagccgtcgcagtcatgacctccacacgctgtgacccgaggcccacggggcccgcgcctgcctcccttccccgccaccgggccctctgccattaaagcctccgtgcttcgctcttcccttctggttcacttcttgggcgccaccttcgggcccgtagggtgttgggcgctgcggctcccgaggtgcggggagcagctgggggtttgcgagctccagtccagcaaggtgcgactccggggagcgaggcggcagcttcggccgcggcctgagcgcagggcgctgcggggcgggggctctcgggctggggcgacgtggccagcccagtcctgccgaggggtggggctggccctggggctcgctggccccgcgccgccgcggagagagcgcgcccgggccaccccggctggaaggcatccccggaatgcggcggctcagcacccgccccctcgggaattccccgggggagccgctgggagggactcggctcccgggctgggccggccgggcctcgggctctgagcggtgggattagaggctccagccccgccgacttgcagacgtgagatcgggcacacctgagcggcggcggggcggtcgtggccacatccggggcgacgtgcctgagtcaccccgtcccgccagcgtctgccagtccagccagtccgcccagtctctcgcgtccgagactcgcctccagcctcccacctccgcccgggccgcgcgagcctcgcgggggcgggggcggggcgccaaggggcggggctgtctcttaaagggccccgggccgctgcccttaggccacttcctgggggcggagaggacctcagcggctgcggcgacacccagggaaggcggcgcggccgggtcccgaaactcctggctgtttccatcagagccctcggacactcccagcccgggctgagcacgcatcgtcgctccccggcggatacaagggggctccgccatccgctcccgtcagttcggcctccatctcctgggacccgcgccggcagccaggccaggcctctgagtggccccagagccctggctggactcgtccacggcggcagcgatctgcccggggtctcggaggccatcccttcagagtcggccctgtgctcgccaccgtcacctgctggttggattccggaaacccactgtctgaagaccacagaggggtgtcgctgaccaccccaaatcggatacgtccagacctcaagctcccttcccctctctggctgccctctgctcttttcatctcttctctcaaccttttggggatttctgtgtcctgacaccacctccccatccaccaccaaagtagccggggtgagccccaaaccttactgggtgtgctccacctgtgcctccaacccagcgaatctgacagcttcgacccaattctgcacacacccaggaagttctgccttttcttttctttcggtgtctcctgtacttcccaaaatttctcctcctcctgtgccctcttcgcccccctcctttgggggccccgtgaccctgaatgtggggggcacactatattccaccactttggagaccctgacccgcttcccagactctatgctgggggccatgtttagggccggcacccccatgccccccaacctcaattcccaaggaggcggccactacttcatcgaccgggatggcaaggccttccggcacatcctcaatttcctgaggctgggccgcctggacctgccccgtgggtacggagagacagcgctgctcagggcagaggctgacttctaccagatccggcccctcctggacgcgctgcgggaactggaggcctctcaggggacccctgcacccacagctgccctgctccacgcagatgtagatgtcagcccccgcctggtgcacttctctgctcgccggggaccccatcactatgagctgagctccgtccaggtggacaccttccgagccaaccttttctgcaccgactctgagtgtctaggtgctttgcgggcccgatttggtgtggccagtggggatagggcagaggggagcccacattttcatctggagtgggccccccgccccgtggaactccccgaggtggagtatgggagactggggctgcagccgctgtggactggggggccaggagagcggcgggaggtggtgggcaccccaagcttcctggaggaggtgctgcgggtggctctcgagcacggcttccgactagactctgtcttccccgaccccgaagacctgctcaactccaggtctctgcgctttgtccggcactgaggatgctgttctcagtttgactgtggggaggagagagaatggggtactagcacccctgaagcctctttccagctctgcttcaggagctatgagagtcgggactctcctgcacctgactggagctcagatgtgggcaggaattcccaaacctgagcccaccaaggactcacaagtggtccagaaggtctcaacctgtgctgaccctgggaggggtagggaaggttctctcagcttgttcttgcctaaggctgagcacctccagtctctccttgatttggagctcagtgtttaagggcttggaaaaggggggaacatctctttacccagactagacctagcaaaaccctggaaggatattgaggtctggggaaaagggaggactttgcattttcccaatgcggtctcttggaccatggcttctactcctgaagctgggtggcctggcctggcctgaccaatgagaggccagaacactctggaacatcggaagaggagttctttgctatgttccaagccatctactgagggaggcagaaaggccacaacccaccctaggttgatgtatgggagctaggacagtccccatggcaatggggctggagcatccctcatctggaagaatcccatactgatggcagggctggccagggggaagagggtagtatctgtgggtcctggcctttcttcatgtgtgcgtgcatatcagcccgtgtggctgactgatgtataggtccctggcatcctggttcatatctgtgttgctgactacagtgtctgtgatgtccgcatgtccaggcctgtttggggttgcctagcgactcttctggcacagggtgtgtctgtggtatacctgtgaggtggttgacaattagtagtttaatcacagggtgtgtgtgtgtgtgtgtgtgtgtgtgtttatgtgcacgcatgtatatgcatcaccacgtagccaggaggggcctgttggggtttgagtcactgggatcttcctggtgagaggtaagagaagtcactgggcttagctgggcctctgaggcctgtatggaactcttggttgctgaggcaaccatggacctgttgctaggagatagctggggaaggcccaaggccgcccagggcagagagaggagacgaagagtttgggacagtgggggaggagatgggaagggatgggatttctgggtcccagagcgggtgggatactcacgcacagcttcttcactggtggggggtggggcacacattatttctcactggtcatgatttacaagaagaaaaataaaactgcttttggaaccacaaacttgtgaaggctgttgagggccaggttgggggtgctgtcccctcacaacagaagccctgctttctctgcccatcgcctgctggagatgccttctggaccccagttccttgagccccagctttaccccagctgaggatgggcagtgccattgttcattgttctggaacattctagaacctccaggcaagggctggagccagggctgcagagcattcctcggctcagctggggcagcgccgccccatcccccagtggtcctcatgtggaggctggcactaggcggggttttcctggcagccgcccaggcttgtgtcttctgtcgcctcccagcccacgacttgtcaggccgcctggctcggctctgcagccagatggaggccaggcagaaggaatgtggggcctccccagacttctcggcctttgccttaggtaggaccagacatccagggatgggcccagcaagcactcacccccctacccccagagggtggcatgtgaccttccagctgtgccctccatctgtggccctttctggacatgctggcctttccctctgagagagctccatatctgggaaagtcaggagagaccccagaacctgggctgatgagggaatcgctggtccttgcccatctccacagatgaggtgtccatgaacaaagtcacagagaagactcacagagtcctgagggtcatgggtgaggtcaaggggaaagagtgacctaggggcttgggaggataccaaggagagggacgggtgacaggggttggggtgggcagggaagggtggaggggtagagacaggagggctgatcagggaggggctgcgtgaagagagggggaactggccccgtcgaggcccagggaaacggagctgctgtctgcctccccagaaatcaaagaggctgtctcctcactcccttcatattggagttggcttcgaaagaccaagctccctgagtacaccagggaaggtaccgatgcgggatgggcctcaaggggagcctagggtcttaaccaaaggaatgtgtggtgagcagctcatccattcacacccccaccccttccttgtctttcatttcagctctctgtccccccgcctgccgtgagtaggaaaggaaaggggtagcaaggacctggggcctgcagggtgtcagaggagggcctggcagctgcaggaggaagctgggtaccaggcagggtggaggcccggcctcccctccccagcgttgc

SEQ ID NO: 7551 - DNA, 6000 bp, Homo sapiens
ttgcagttctgagaagaacacagactcccaggctccattctaccccaaattccttgcctactcccgggatactgcatgtgccaagacttgctttcattctgcaaccactgcccagagctcagtgtgcacccttcctccaccgttcactctttccctgcctctcgttcctcccagatcctttgtccctcctcaacccaccaaccatcagaggccttccaccttaatacaaacccctactgttcttccaacctccaagtctcctcagtccatcctcacttcccaattccccatcccttccctgttcgccaccatttcccaacccctgatccaaccccaatgccctgaatgtcatgagagtctaggccttacccaagattctggccttcaaaggaccccaggcccttcaaaagactccagagttcccaggaatctggaccttgcccaaaacccagacctctacaagaacccaggccttacccaagatccaggcctccacgagaacccaggtcttgctccaaatcaaggcctacatgagttcccaggccttccccaagattcttatctctgccagaatccaagcccttctcaagactttggtcttcacaagaattcaggcattactcaagattcccacccccaaaagaacacaggtctgactcaagaagctggtatccttaggagcccatgtctcacccaatcccctggcctccacaagaaaacaccatttacccaaacttctgatcttcagaggagctcaggctttacacaagactctggaatctataggaatcttgaaccaaaccaagagactgtgatctacaaaaatcaagatctctcccaagcaactgaccaccaaaagaacctaggctcttctaaagattctggaggtcacaagaatacaggcaatgtccaagatccaggagtctgtagtaccgcaggccttactgaagattctggatcacagaagggtccgtatgttccccaagactctgaagtcaataagagctcaggagttatccaggaatcttttctccacaagagcccaggccttgtccaaacctctggcctcccaaagtgctcaggccttacccaaaactcaggagactacaagaatccaggacttatccaagattgtggtggccacaaagttaaaggccttactcaagattccaacctcccaagccttacccaagccactaaagttgaaagaagatttagccttccccaagatgttggagtttacaggagctcagaacatagccaagactctaatctccacaagtgcccaggaattaatcaagatcctggcccccataaagacccagcccttgtccaagactctggcctccccaagatttcaggccttacccaggaatctggcccctacaagagctcatgcctcatcccagatcccagcctctacaagaacccaagccctgccctaggttctgattttgtccagcttttgtccctgcttcagaccccaaagtccacactgtccctgatgaagtcatctgtgcctgagaaggctgctcagaaggaggacgcacagcggcacgtcctctgggctcgtgtccaactcaatgagaactcctgcccttccaaggcccaagtggtctccaatgacctgcagaccttctcagaggtacctgtattaattgagctgcagtcatcctcctggcgggcaggcagccagcacggggcgtaccgccctgtggatacagttccttcaggctaccagaactatcgtcagatgtctatgcctacccatatcaactggaagtcccactgccctggaccaggcacccaggcagggcatgtggtttttgatgcccgtcagagacggttggcagtgggcaaggacaagtgtgaagctctgtctcctaggcgccttcatcaagaggcacccagcaactcggggaaaccatcaaggagtggggatatcagaatgtgatgagaaccttggacaaagaggggacaaaagtgcatcaggaataaagaggcgagagaaatgttctgtgtttgtttgaggacatccaccccagcccatccccgatactggccacccacaaagccactgaggacaggtccctgtttctcctccatagctgcatagctaagcccattatcctcaaggccctagagctcctctgtcccatacactagccattagccaaatgtggctattaaaatgtatattaggcctggtgcagtggcttacacctgtaatcccagcactttgggaggccgaggtgggcggatcacctgaggtcaggagttcgagaccagcctggccaacatggtgaaaccccgtctctataaaaatacaaaaattagccgggcatggtggtacacgcatgtaatcccagctattcgggaggctgaggcagggagaatcacttgaacctgggaggcggaagttgtggtgagccgagatcgcaccattgcactccagcctcggtgacacagcaagactctgtctcaaaaaaaaaaaaaaaaaaaaaagtagatgttactgcggaacacatttttaaattttgtttaattttaatttacattttctttttttctttttctttttttcttttttttgagacagagtctcgctctgtcacccaggctggagtgcaatggcgcgatctcggctcactgcaacctctgcctcccaggttcaagcaagcgattctcctgcctcagcctcctgagtagctgggattacatgcgtgcaccaccacgcccagctaatttttgtctttttagtagagatggggtttcaccatgttggccaggctagtctcgaactcctgacctcaagtgatccacccgcctcggcctcccaaagtgttgggattacaggcgtgagccagggcgcctggccacattatctacatttcaagtgctcaacagccacaggtggctgctggtggctactgtatcagacaggaccaactcaggacattgctatcgtcacagaaaattatattggagagccatgctttagagtttagaggaactattccttgtcacccattcttaacatcttcaaagcttccacagagtccagagaacttagttctttttagagtgcctcggaagccaccctctgggaaggaggtgagatgcagggatgtctgatgcctggttactccagactgtgagaaacagcccagtctccagttctcctgatctggcctcttgggtcacagccagatgtgtgtgtacgggaacctacttgcgcagttctgggctgctttggtgctctcgcttctcccagggaccccagctctggttgctgaaggagaaaactctctgtcagtgacgaggaacccctgagtcctgggcttgccaaattgatctctacagttggggagtctcttcttttacaggcctctaattttcctagatgtcctccttaattatcttatccatggacttaggcctatcccgtcctggagacagaccaagggcagaaggaatgtaagaagtcgtggcccaggccgggtgcagtggcgcgtgcctataatcccaacactttgggaggccgaggtgggaggatcacctgaggtcaggagttcaagaccagcctggccaacatggtgaaaccctgtctctactaaaaatacaaaaaattagccaggtatggtggcaggcgccgtaatcccagcttctcgggaggctgaggcaggagaactgcttgaacccgggaggtggaggttgcagtgagcggagattgcgccacagcactccagtctgggcaacagtgcgagactcagtctcaaaaacaaaacaaaacaaaacaaaaatttgagatcccaaagtgttttccctgccacgactcaggtagcagtgagctgaggtgggcatcactaacatgtatgtctctcctatgagtcaaacgtccatttctgggtcaccatctgtgtgctcctgcctaacactaccacttttgggattccaagatgcaccccccccaccccacccaggcaggggtccctatctctccccaggccctagggtggagtttcgctcttatcacccaggctggagtgcaatggcacaatctcagctcactgcaccctttccctcctaggttcaagtgattctcctgcctcagcctcctaagtagctgggattacaggcgtctgccaccacgcccggctaatttttgtatttttagtagagacagggtttcgcaatgttggccaggctggccttgaactcctgacctcaggtgattcacccgcctcagtctcccaaagtgctggggttacaggcgggagccaccgcgcccggcccatccctcattattttttgcgactcagagccatcctattacccctctcaaaccccaaggaatgtttgagtggggttgatatgggtgtgaaaagacacagaataatctgtctccagaggaactacaacttccatcaggcactacttcagcggaacaggaaaggatgtgggggcgtggctaccacgccctagtagagcgggaaactacaactcccaggataacgcgggatttcagcagggccaaaagagtgattgagctctgactggcgacccgacccggcggaaaccacctcgacagcctccagaaaggggcgtggctgaaaatgtaggggcgtggccacgtgggcatcaggaagaagtaacctgttgaatctatttctgctccccacccttactgcttcccataagggggaagccgcagactaataagcctcttccaaaaaagaggtaaagggaggtagacaaggggcggcagcggaggctggctactgcattccgtaggaggagccaacagttactttttacctgctgagtccggtgaaccagttcatgggggcggggacctgcctatgagaaaagggccaggatagaagaggtatttatttgttcattttgaggactaaatttagaacccatcatctacagacccatttgtaggttgtgtctggggcactcgctcggcctcaggaagagggaagaacggggacgactttgtggcagcaaagccacctcccttccgtgttttccgcagcccaaagcgatagaaccgcatggcttccgcagtctgggggagtgccccctggtggggcccgccgcccccggccccagctcggccgctcacggacatcgacttctgctccggggcgcagctgcaggaattgacccagctgatccaggagctgggtgtgcaggagagctggagtgacgggcccaagccgggagccgatctcctccgggccaaggactttgtcttctctttgcttggtaagtaaccctacttgcctttgggaactcacagctctcagcctcaccacgcccccgcccccgccccggctttgggcgacgccctcacgatccgttccctttttttaggtctagttcaccgccgggaccctcgctttcctccccaggcagagctcttgctgcttcgtggtgggattcgcgagggctccctggatctggggcatgcacccctgggtccctacgcccggggacctcactacgatgccggcttcacactcctagtgcccatgttttcactggacggcactgaactgcaactggacctggaatcctgttacgcacaggtctgcctcccagagatggtgtgcggaacccccatccgggagatgtggcaggattgcttaggacccccagtcccaggagcacgtgattcgatccaccgaacggagagcgaagaaagttccaaggactggcaaagctctgtagaccagccgcacagctacgtcactgagcacgaggcgccggtgtctttggaaaaatcgcctagtgacgtttcagcgtccgagtcgcctcagcatgacgtcgtcgaccttggctctaccgcacctttgaaaacaatgagtagtgacgtcaccaaggcagccgtcgaaagcccagtcccaaagccgtcggaggctcgggaagcgtggcccacattatgttccgcccaggtggctgcctggttctttgctacgctggcggcgg

SEQ ID NO: 7552 - DNA, 6000 bp, Homo sapiens
gagagcaaacgggatgccttctcacctgtcctgctgcagttctgtacagaccctcgaaatcccatcacagtgatccggggcctggcgggctccctgcggctcagtgagtatggggggcagaaagtgttagggagggctacaagggtctggggcatgtaggaccctctgagaaatcccacacttgaagactcatgacagtggccgtgaggagtccactgagtgatgggtctgctggccttgggctcttctcccatctgtctgtctccagcatttggcaagggagaaggggccatagtcagggcctgattagtcatttctgaattttttggtgattaaggaagagaataatacagattttagaaaacccctgaaaatctgtgatgttggggctctctctcagtcttttattgcgcagaatttcaaacacatacaaaattagagaaagctgtatagaaatacaaaggtcaatcttgtctcctttatacctgtatgttctcccttccccacactgagttatttgaagcacatttcaggctttcacttgactgaatctttaatctttaattggatccaatggtaactcaaagaagctgctgttttgactagactccaaatggggaaaaaagaagctgccattcattgagcacctactatgtgtctgtcaggtgcggtgcacatggccacgcacacatctgggaacactggtctaggggctgagtccttgagcagctgcaggagaaagagggctggtgaggatgcagatagaggccagcactcccagcttcctgtggggctagggctcctgcctatttcttctgggctgagctctgctaaacctatgaccaccctgtcagagccagaggagtaggaagggaaagggtcgattgggtcctcggtccctatcctctgcctctgccccgacaccctgctcggccctcccttccagacttgggcctcttctccaccaagaccctggtggaagcgagtggcgaacacaccgtggaagttcgcacccaggtgcagcagccctcagatgagaactgggatctgacaggcactcggcagatctggccttgtgagagctcccgttcccacaccaccattgccaagtacgcacagtaccaggcctcatccttccaggagtctctgcaggtgagatgagaacgtggccagaggcaggtcctgggacggggctgcggtgggagggctctcgaaaggtctctgacccaggcctgcctaccctctggctgaacaggaggagaaggagagtgaggatgaggagtcagaggagccagacagcaccactggaacccctcctaggtactgtgcaggtgtgccccttctgttcctgcttccttcccctccctctgctctccaccaacctgtgctcttcgccccagcagcagcgcaccagacccgaagaaccatcacatcatcaagtttggcaccaacatcgacttgtctgatgctaagcggtcagtggggctgaggccagggaagttggggcaggagtgctgctaggacctcgtggcgggggcggggtgtagcctctcgtcgcacttccgcaccgcaggtggaagccccagctgcaggagctgctgaagctgcccgccttcatgcgggtaacatccacgggcaacatgctgagccacgtgggccacaccatcctgggcatgaacacggtgcagctgtacatgaaggtgcccggcagccgaacgccaggtgcgctccacgcctgtgcgcgctgatgctggaagcgcgagaggaggggctggcggcggcgctcagccgtcagccaatgagggcagagggcggggctatcggggatcgcagttccgacctggccagccatgccgttctctgtcgacccctgcaggccaccaggagaataacaacttctgctccgtcaacatcaacattggcccaggcgactgcgagtggttcgcggtgcacgagcactactgggagaccatcagcgctttctgtgatcggtgcgtgccgtcctgcgcaagtcagactgccgcgtccccgccctcggtccccagttcccacctgacctgtggccaccccgcaggcacggcgtggactacttgacgggttcctggtggccaatcctggatgatctctatgcatccaatattcctgtgtaccgcttcgtgcagcgacccggagacctcgtgtggattaatgcggggactgtgcactgggtgcaggccaccggctggtgcaacaacattgcctggaacgtggggcccctcaccggtgagagggtggggcaggtgttggcgtggtgtggcgcctcagcggcaagggcctgggaggctggggcttggagagccgccagcagtgagggaaggggcttgggcctaggtgtctgggggctgtttgagagtcctgttgtgatcgcctttggcccgcagcctatcagtaccagctggccctggaacgatacgagtggaatgaggtgaagaacgtcaaatccatcgtgcccatgattcacgtgtcatggaacgtggctcgcacggtcaaaatcagcgaccccgacttgttcaagatgatcaagtgaggaccctatttgggtgggagcccacctccactgactggtcccttttcttgttcttcctgtctgactccaccccatttttacctctctccatccttgtctgcctgtgccccgagtgttactgtgttggggaggctaactaggtccttgctgtcatgaccttttctagtggtccaaatagacaaaagccacaggaaacttcgcctataacagatgcccaggacagaggatgtgacctagacatgaagcggggaggcccctaggggagggccctggggctgcccacccctctgcccttgctccagccctgcctcaggcctcctccttgccggtggtctcaacacaaccccactgctccccaggttctgcctgctgcagtccatgaagcactgccaggtgcaacgcgagagcctggtgcgggcagggaagaaaatcgcttaccagggccgtgtcaaggacgagccagcctactactgcaacgagtgcgatgtgagtgggccggctctgctgctctccctgagtgtccacagtggccctccctccccctgactgcactgtcctccctgccccaggtggaggtgtttaacatcctgttcgtgacaagtgagaatggcagccgcaacacgtacctggtacactgcgagggctgtgcccggcgccgcagcgcaggcctgcagggcgtggtggtgctggagcagtaccgcactgaggagctggctcaggcctacgacgccttcacgctggtgagggcccggcgggcgcgcgggcagcggaggagggcactggggcaggctgcagggacgggcttcgggagcccggccgcgcctttccctgagcccccgccggctttctccccccaggccccagccagcacgtcgcgatgaggccggacgccccgcccgcctgcctgcccgcgcaaggcgccgcggggccaccagcacatgcctgggctggacctaggtcccgcctgtggccgagaagggggtcgggcccagcccttccaccccattggcagctcccctcacttaatttattaagaaaaactttttttttttttttagcaaatatgaggaaaaaaggaaaaaaaatgggagacgggggagggggctggcagcccctcgcccaccagcgcctcccctcaccgactttggcctttttagcaacagacacaaggaccaggctccggcggcggcgggggtcacatacgggttccctcaccctgccagccgcccgcccgcccggcgcagatgcacgcggctcgtgtatgtacatagacgttacggcagccgaggtttttaatgagattctttctatgggctttacccctcccccggaacctccttttttacttccaatgctagctgtgacccctgtacatgtctctttattcacttggttatgatttgtattttttgttcttttcttgtttttttgtttttaatttataacagtcccactcacctctatttattcatttttgggaaaacccgacctcccacacccccaagccatcctgcccgcccctccagggaccgcccgtcgccgggctctccccgcgccccagtgtgtgtccgggcccggcccgaccgtctccacccgtccgcccgcggctccagccgggttctcatggtgctcaaacccgctcccctcccctacgtcctgcactttctcggaccagtccccccactcccgacccgaccccagccccacctgagggtgagcaactcctgtactgtaggggaagaagtgggaactgaaatggtattttgtaaaaaaaataaataaaataaaaaaattaaaggttttaaagaaagaactatgaggaaaaggaaccccgtccttcccagccccggccaactttaaaaaacacagaccttcacccccacccccttttctttttaagtgtgaaacaacccagggccagggcctcactggggcagggacaccccggggtgagtttctctggggctttattttcgttttgttggttgttttttctccacgctggggctgcggaggggtggggggtttacagtcccgcaccctcgcactgcactgtctctctgccccaggggcagaggggtcttcccaaccctacccctattttcggtgatttttgtgtgagaatattaatattaaaaataaacggagaaaaaaaatcctgtttcgctaacggctggtggtagcaggttgagtaccgggagggctgcaagaccgtgattgatggggaggactgcgcagaccctggcgagggtgagcccctccccggaggcgcctgtggaatgtccagggctctggtccgctcctcgggatggggggtgcctaatcctagagccgcattccaggataaggggggtggggagaggctgggccgggggaggggcaggaaagagggctataagggcagcggcccaggcgggcgggatccaggcgggccatggcggatgtccccggggcacagcgagcggttcctggtgacggcccagagccccgggaccccctggactgttgggcctgcgctgttcttgtaacagcccagaatctgctggtggctgccttcaatcttctcctgctggtgctggtgctagggaccatcttgctacccgctgtcaccatgctgggcttcggcttcctctgccactctcaggtgagcgtgcgccccggggtgtgcgtgtgagtgtgagtgttggtgtgtggtgatgctggcggtggggtctatgggccacaacttcaacccgcctgggctgtttccaccccgtgcacagtatcgcctggtcggcttgggcctgacgcctcttctcccacagttcctgcgctcccaggcacccccttgcaccgcgcacctgcgggaccccggtttcacggccctactggtcaccggattcctgctcctcgtgccgctgctcgtgcttgctctggccagctaccgccgcctctgcctgcgcctccgcctagccgattgcctcgtgccctacagccgagccctttatcggcgtcggcgcgccccgcagccgcggcaaatccgggcctcaccagggtcccaggccgttcccacatcaggaaaggtctgggtctaatgaccctcgagtcaagaacaaccctgacggctgccctccctcttattcggcccaaggacttgaagcccggcatcttccgacctgccctgcccccacccctgcctgagcggagtcctagcatccccttgggagcagcagcgtcagtggacccagtgctgagaaaagcccccacatcccggaaaacccactttcctttcacgacccacatctcaatcctgaacatctaggctggaacctgcacacctccccctcagctccgtcgtgaatgggacaacaatctcgtgccctcgttttatggtgcagcttctctagtatttctggggctggggggcggggctggaggggaaggagtgtccacgc

SEQ ID NO: 7553 - DNA, 6000 bp, Homo sapiens
ggaaccatccactgaaagtgcttggccttgaaaatctttataggtaacaaatttggctaggtgacatttggggttttttgttttgaggcagggtctcactctgttacccaggcaggagtgtagtagtgtgatcactcctgggttcaaaccatcctcccacctcagcctcttgagtagctgggactataggtgcgtaccaccacatcggctaatttttgttatagaaatgggggtctcactatgttgccagggctggatgagatgttttctgagaaactgtcacattgacacctgtacttaccacatttcctggacaaatcctagcccacactcctccggccccattgccctccagcaagcagttataattaagttctacagggaacttaattataacttcctaagggaaggggaagctgggtggagcgcagagcacacacctaacccaccccaaggtaaattaaaaggatatggtaccaccatatccttaaagccataatggatggagggtgggagcagtgctgccaggcctctccagctgtgtagtgtgccaacctagccagacctctcctgggccctgggtttggtctgaagaccctgtgcgggaaggcactgctctgccctagggatagaagacttggcctggggctgggcgttaggataccagggttccagtccctgccttgtcactcactttgtgacctcggacaaacacctctctgagtctcagtttcctcatgaggtgttaggccctagatatctacaaaggccctcccagctcttcatgttccatttttttttttttttttttgagacggagtctcactctgtcactcaggctagagtgcagtggtgcgatcctggctcattgcaacctccacctcccaggttcaagtgattctcctgcctcagcttcccatgtagctaggactacaggtgcacgccactatgcctggctaatttttgtatttttagtagagatggattttcaccatgttggccaggccagtcttgaactcctgacctcaggtgatccacccacctcagcctcctaaagtgctgggattacagtcctgagtcaccatgcccagccttttttttttttctgagacagagttttgttctgtcgcccaggctggagtgcaatggtgctatcatgactctgcaacctctgcctcctaggttcaagtgattctcctgcctcagtctcctgagtagcggggactgtaggtgtgcaccaccatgcctggctaacttttgtacttttagtagagtttgggtttcaccatgttggtgaggctggtctggaactcctgacctcaggtaatccacctgccttggcctctgctgggattacacgtgtgaaccattgcgcccagccttcatgttctcattcaagtgaatggtttggagaagtgagagaggagctgtatacaaaagtcccccttatccgtgggggaacatgttccaagacccccagtggaggcctgaaaccataggtagtactgaaccatattgttttttcctatacatacaaacctatgataaagtttaatttataaatcaagcacagtaagacattaacaataaaatagaacaagtataacaatatactgtaataaatagtatgtgaatgtgctctctctcaaaatatcttactgttctctagatcttagcaacctcagcattatttcctaaatcaaaaatcttcaccttttcacataaaggaactttatggtttctcattggcatatccgaattgtcacatcgctaccattgcactttagggcctttgagaggggtctcactgttgtggaggctggagtgcagtgaggtgatcacagctcactgctgcctcaaactcctgggctcaagagatcctcccacctcagcctcctaagtagctgggactacaggcaagccaccatgcccagctaatttttttttaagagatggggtcttgctatgttgcccaggctggtcttaaactcctggcctcaaggggtcctcctgcctcggcctcccaaagtgattacaggtatgagccaccacacctggcccactattaaataacataaggcttacttgaacacaagcaccgtgataactcaatggtcaatttgataaccaagatggctactaagtgactaacaggagtagttagtctgggaacagagtggagtctgagaaagagcaaactgcctttaaagatttatggtgtgaacaaaatgggctctctcctcaggtgacctaaggtttcccaggcattgactttttttttttttcctggaaaaaaagcagcagctaattctgagtcctccctcctgagcccctggtagagtgttctctccatggagcccggctcccccctcggagcaggacaaacagccctgaacacccctgcctccctgtggctgccggctctgtggtcctgggcaaggctgacctgagacttgggggacgccagaactgtgtgccctcacgatgctcagccacccatgctgttcatcccctgctccccacccaaagacctccacatttctcctactgtctccttccaacctgctcctcctcctctccagccaaacccctccactgttacctcccccagtaactggcacttggctgaggactcagcttccccacagccctctccagcgcaggctattcaccttctcgcacccttcaaggtcaggataagcggcctcctccctccgcaaggccatgtccacacagtttcccctccactctcatcccatgctcaccttccttctggttactcccccgtgtgcagtggcattttcgccaccaccaccctgggtggccttcccttgacctcatctccaaagaccttcccctccactccatttcagccgcacactcccacgggcagaacctcttcctgaccccaggaattcaggtattgcacgccctcctcataagctcccacccttccggcccagtgactcccatcacgctggcacgtgttcctcagcaggcctccactgtctccctgtcttacagccccctttggcctcacctctccctctccccctacctagcttgaactgcaaccttctgcacctcaatcactcttcttcagctcttcaaagccacctttcgcttttctgaacccaaactctgtaggggtccaacagccttcttctgggtagaccccgcactagagaaatgcaaagcacacagcctaagagattggggcctccgggtcagcggccccccacctcagctgggccttcaacactgccataatccctctgtcctagcccacagcgccccaagggaaggggaagctgggcggagcgcagtgcacccacctaacccaccccaatccttccattccctccgcctcctccagggctttgagccgcatttcctgctcttctcgagtaggggtaacctctcccactgtcaaaactaaactagctcaagtctttctcacctgcaaaataaactctcgagtgcatctctctccagctactgccccatgtcttctccccttcgtgaccagctgtctacacttcctgcctccatttccccactttcttactccctggctcctgcccccacgacacaactgttccccacagggccacaggcgggcatcactcagtgttgacaggctgcccctccctgtgacatagccccctgctagtacgctcctatctcagtcccctcctcccatgacctgaggctggagctcccccaggatctctcccaggccctctgctcgccatcaaaggcggatgcctcacaagcttacgactccagacaggctcacccaactgcctcctccacccaacgctgcagcccactcaaggtccacgtagtccaagctgcattccttcctcgcactcccttgccctgtgtcccctcttagcaaatggcagcctcggcgatcctgccccgagacaggcctgcgcccagcgtggagatgaacatcagtatttgctgaacgtgtaaacgaatccttgaccttccctcatgctccacagccggtgaggattcctgtccattttactgcctcctacgtccctcgagtcctcccctctgcttctttgttcaccgcggccagctgcctccccagacccgcaaccccggctgggccgggaacctgcaccgcggcgctcgtgccccgctctgcgacccctgctccgtgacggccgcactgcaccggggtaccgcggcccagcacaggcgctggtcactagtacacgaactagctaggactacaggtgcacaccaccacacctggctaattttttattttttgtagagataatgtcttactaagttacccaggctggtcttctgggctcaagccatcctcctgcctcgggctcccaaagtgcagacattacaggcatgacccaccgtgcacagcgtcagctttatttttttaatgctgacttactgcagaaggcccaagggccagtgcagttttcatactgctgttgtagtggcgaacggagccacgagggaagggagcgccgccggcagctgccgggacaccaggataccacgcggccagcaccgaaacgctaggctcgcgctcacaaccgcaatctacactgagtagccgcgcgccgaacggcgtgactaagccccgcccacacggcgctcctggcggccaatggaaatggcttacgagacgccttctccacgcgctatacttatacggaccaatgggtgcgccctgtggggagtgccgccccctgtccacgagcctcctcttctcgccagccaatggaagcggtctgcctagccctcgcgggggcaaggcggcgaccgaggcgcgtgggtctgggaaggcgcgcggatttggcccctcttctcacatcagcgggtccaggcccaaccgacagactatgggggctccggcaaccaggcgctgcgtggagtggctgctgggcctctacttcctcagccacatccccatcaccctgttcatggacctgcaggcggtgctgccgcgcgagctctacccagtcgaggtgaggggcgcccctcttatcccggcccgctgaggctctcccggcgctgcgtccacagggccttcacctcctccgcgctcgcgcactctgggttccagttgcctctctcgggtcctgcccatgcctcccccgctcctaacccaactttagttcggtgttttcctcgggctttgtctctatcccagccccttctcccaagcggcgggggcgaacgctttgtttcctttaaagtcacttcttccctgggtttaaggtttcccgcgattccacctctggccggttgtcagtgtctgagggaagtagtctggatgaagtggtgtccaaagtcacatgttaggtttgctttaagcttctggttttttgtttgtttgtttggaagggctttaaaataccagtctgatcccaaagaaaaaatccgagtagaaatagacctgtctgaaggtttagcaccttggttggtgcagctggggcgttcacagatcgtcactgcttcgagatcaggttccagcaacttccagagctcaggagtaaattgccatcttttcagattggctcttcaatattgggttcgagtaacaatgatctcctgagtaaaaataaaggtgaaaatcccgatttcctggttgttggagagcattctttcaaccccaaactctgctttaatgctttgtttttttcttcaaagctatagttttagtttcccggttcgttgaggtttttttctcgtatctggaccctgtgaccttcttccatggaattcctgtcctcagttttgtttctccatcttatctataactgtaggcaggactgacttgtctacccgaagattttattttgcgtctgtttttccttaaatgctttttatctgccgaggaggggttctttacctgagggtcatgaactcccaaaaatgggtgcaagtgtgtgtgccttttgtttcctgcaaggagaatatagcttccatcgacttttcaaggggcctaactct

SEQ ID NO: 7554 - DNA, 6000 bp, Homo sapiens
ctagatgggatggcggccgggcagagacgctcctcactttccagactgggcagccaggcagaggggctcctcatatcccagacgatgggtggccaggcagagacgctcctcacttcccagacggggtggcggccgggcagaggctgcaatctcggctctttgggaggccaaggcaggcggctgggaggtggttgtagcgagccgagatcacgccgctgcactccagcctgggcaccattgagcactgagtgaacgagactccatctgcaatcccggcacctcgggaggccgaggctggcggatcactcgcggttaggagctggagaccagcccggccaacagagcgaaaccccgtctccaccaaaaaaaaacgaaaaccagtcaggcgtggcggcgcgcgcctgcaatcgcaggcactcggcaggctgaggcaggagaatcaggcagggaggttgcagtgagccgagatggcagcagtaccgtccagctttggctcggcatcagagggagaccgtggagggagagggagggggagggggagggggagggggagagaccaaatttctttgtataaaagtgttaacccaagtggaacaaaaattagttgagtaccaagaaaatactttgccagatttgcatgctaaatcagcggatactaaaattgtttagatatacaatttgaatgaactccatggtctaagtcaaattacctatgataacccatcagttgtcagtgctatacagctaaactggagaaacaactggtattcaagatgacgtaagtccgatgttaagcatggactcatggagaaccaggacagcagccttgcccttcctgagtccttaaagcttttgttattcaaggttatgcactccatgactcatcatggaaaagataaaataatccaaattaaatatatattggtgtgctgacttatacattgctaaagtagtttataaccaatgtttggtttgtcaaatccatattcctgggaagacaatcaaatcttcaagtacatttggctacctcatgggccatttaaacatttcaattgccattttcaatgcatgtttctggttgtaaaaaagctttcctatgcaagagggctgatgttataacagtagattattatgctacagtgtattttcaccaggtaaagaaagctttttatgggtcactgaggacaatcaaccccttcacaatctagaacccaaagattgggtcttctgagaatatctactgtaaaggctatagttacacaacagattttaaattcttttgtgaaggttacgatagaatcggctgaacagagaagtatctgtgcagctgctggcacttgtggcttatggagaaatacatcaaatgaagattatagagatttagttgtaggggattaacgaagagatttcttagttaagtgagtagattctttagcacattctttgatttaattttaggtggtttggtttatggggatccttggtatgaagtatgctccaaactcttagtattatcctcccagtagtcataataatagtctccctggtgcgctgtattatctcaaaggctttaaatgcttgcattcagccatctctagaatgtcaaatggtctcttttcaagtggaatgacaagagctgaaagaagtgcatgaccaggaggataccataacctatgaatgatgtggtgagactggaaacccaaaatgatggcaagtgagtgtggtgctaaggccttaaattttggtcacactctcacccaagtgagaacctgaccaaaaagggagaatttttttaacaaaattatgagaggccagtgttttggactgacatcatgtgctaggccccagcaaaccaaacaaaccaaaacacatagatcctaaaacagaccaggttttgtttttctcctgcaaacaggatgttccaccataaggaggtaccctctactcagtccttgttcccactgtacaaaactcactgttgttttactgtttcccagtgggtttcaagaccaaataagttcatttatgatggtggtagtgacatgaatgactaaaggtttggtcaatctctcaaaattgagaaaatgaccaaaagggggaaattgttaaagcaaattaaatatagcctgagaaggactccgtatttctatattggagtctctgtggatgaacggtaacctaacttaggaatatgtgcctgtaaaaatagctgagtcttggccaatcccagcaaccccaaatcaggccaggagataaggtacttaataaaacgtggaagtgctctggataatagtggccatttttttattgccttcttccaaacttatggaatcacttcctttgtagtaattagcagaatgtttcaattcatctccataatgaacattcctgacagcataagtatccaccccctgaagttcctgttaaatcttttaaccatattcatttcctttcacatagagaccatcaagcttcagatgatcatgtgacaaagtttccagtcagttccaagtgaagacaccacccctggccatcaggatgccacactgtctccactagacagagtagggcaagagttccatgatctccagtaggtaggaactacgccccaagttggcataaagcagttacagttcctctgcatcccataaagatttatgggggtcatgtctctcaggagagagatgaggcaggagaatagggtctggaggcaggaaacctaagggttcacctgacttcctagaactaaatcaaaaggaaaaccccaactttccgcacctaagtaacaaacggaccagagactactccctttgcaacccccactccccactttctgcttggcagatggaaaatcttttgaaagtacctctgattgcctttccgcaaccaatcctgcgtttgcatagaagtgtaactttgtaacttcacttcagcctctgattggttgtggaaagcaaccagtcagactgattgcggccaaatattcttttgcataggagtgtaactttgtaacttcactttagcctctgattggttgtggaaagtaaccgatcagactgattgcgggccaaatcttcttttgcataggagtgcaacctttgtaacttcacttcagcctctgattggttgctttccacaaccaatcagactaattgtggcaccacttcatttacatggggtgaacgccaagtggccaatgggaaacctctaggaggtatttggaccccagaagattctacagcaggggctcttgagcccatatgcaggggcctgctcccaccttgtggaatgcacttttgttttcaataaatctctgcttttgttgcttcattctttctttacttgctttgcttgtgccttttgtctaattctttgttcaaaatgacaagaacaggccgggtgcggtggctcatgcctataatcccagcactttgggaagctgaggtgggtggatcacctgaggtcaggagttccagaccagcccggccaacgtggcgaaaccccgtctctactaaaaataacaaaaaaaattagtgggacgtggtggcgcacacctgtaatcccagctacttggggggctgaggcaggagaatcgcttgaacccaggaggcagaggttgcagtgagctgagatcgtgccattgcactccagcctgggcaacagagccagactctgtttcaaaaaataaataaataaataaataaataaataaataaaggcaagaacctggacaccctccacccgtaaacagccaagactgtgccacagcactccagcctgggcgactgactgagactctgtctcaaaaaaattaaaataaaacaacaaaagtatgaaccaaaaaaaccacctctgtgggctggatgtggccttgggggtaccagtttgcagaccctgtgtcaagcggcctaggacccaatctgtatcctttgttaactgtcaccgatactgacctcagacctggaccactgggatcctgccctgaaccccgtgctttagttggcccactccagctggagcgtatgttcccttctagatcatgctcctggtaccctggactccggaaatccctgtgtaaacagccctgagcctgcttccaaggtctgacttccatccacccagggcagcctgccctgcctggcctgagtatcgttagaatgaaggatggcagggtagggggtgtgtgtttgcctgaaccagtagacccccttcagtatgtatgggatggagtcgtgtgggaatagaagcagcaagactactagcaagggctctgcatttgtactcttgcccctggctaggcagtcgccaggggtgggcctgcttctcactgacccgtgggtcaggctgtaaataagagcgaccctcgattcactctttaccctgggccaggcagtccgatgcatcctgcatcccatcattcctaataccaactctgaggatgctgacaagcagcagccccgttttacagaccgaggcacaaaggctgaactaagttgtccatagctagtgagtggcagaggcagggtttcaatgggacagtccgtggcggagcacactggctccgccgccagcccccctgcggtacccatccgcgctcgccgcctgggaccgccagcccggggcggggcgcaggcagggaccctccgctcccctctccgtctgccgcccggacgggccaccgcgggggcgcgaggaaggggtgttgggtcgccagggcccgcctcccagctgccccggccgccggggggcctggcggtgacggcggcgcctggcggcggggatttggcgcgggccgggggccgggggccggggcgcgggggcgcgaggctggattcctagggccgcggcgcttcccggcatgctccgctgcaggcccgcgcccgcgcccggactttgccatcggcggggcagtcgcgggatgcgcccgggagccacagcctgaggtgggtgagccccgccgggccgggcgggccgcggcgagtcggggaaggggacgcgggggcgcggggcctggcccggctgccggggagaggggaggcgggtgccgcagctttgttcttgccgcggggccgcgcgcccgaagttggggaaaggagtaggagccgcgccccggagcgctccggggcccgtgcggcgcgtcccgggcgggctgggggtccctccctcccggggacagagtgggcgtcctgggtggacgagcacggggaagcgggtagggtcttgggtctgttctgtccttgtggttctggaaccggaggggaagggggaaagtaagggagagagaaagagacggagaaaaacaggaaaacttactcttcagtacgcagggaagaatagagaaagaaaaacacaaagaaacgccacgcagactgcagagaaggaccacgaacacacgctccgagaaacacactcagctcacacgcactgagaagcacacttaagataaacactcaggtcacacacacaagcacactaagaaacattcagttcacacacactcagaaacacacgcactcagaagcacacaagataaacactcagctcacacacagaagcacactcagaaacattcagttcacacacactcagaaacacacgcactcagaggcacacaagataaacactcagctcacacacagaagcacactcaaacattcagttcacacacactcagaaacacactccgagaaacagttcacactcgctcagaagcacactcagctcacacacacaagcacactcggagaaacattcagctcacacacactcagaaacatactctgagaaacacaatcagctcacacccactcaagcacactcaagataaacagctcacacaagcacattcagaaaacactcagaaacatagctaacactcagaaacacactctgagaaacacagctcacacactcagaagcacactctgagaaacagctcacacacacagaaacagaaaaacagctcacgcacactaacacaaacacacacggagaaacaca

SEQ ID NO: 7555 - DNA, 6000 bp, Homo sapiens
ggtgctggggaaggggaacaagaggctgagctactcagaacagtactgcagaaagaacactactttctcatcagaggtgcctgtgttcccagagcccctgtgctggcctccttcacacactgccctccccgtgttgaacagcctatttatgcctggtaccccactgcccctaaacatgtccacccagaaatgatagctttgctatatatgaaatcctgggcccttgcatatcacagtgaaagtggctaaatgggttacgtatctgagctttggaatcacatatatgtgcttttgagctgtgactctgctactttatagctctatgaccctaggcaagaaacttgccttcactgagcctcagttttctcatctggaaaatggttataataacagtacctacgtaacagcgttgtagtgaggactcagataatgcatgcaaaatgctgggcacagtgactggcacgtaaaaagcatggattcattaacattagtcattaatattactaggttctctatatgggttggtgaaagctcttgaacttctgccatctgggcctttctgtcttgttcaacctatgcattccagtacagaagcattccataatacttcacacacaattagagctcaataaaaatttcaaaggatttcataaaatgactgaattaacaggcctccgtttttgcagctgtaaaatgagagggctagcttaggaaatctcggaacccccttgagctgagacagagtcggattccaggatgatcccaggaacatgtcttcatgatgctccacattggctcatctgattgtctcctgatggtagacattctgaaaaacagaggcatgctgaaggacagatgtcacctggcctatcatgagggcaggtcaggcatgggaggaagtgggtgccagtttatgtatgggtccttgataagcatccatgtagggcaccggggcctgggacagaaccccacttgctgcctggcttcttggcaggaggacagggttcttccaggcatcacctgggaactggtgactgagataacctccaaccattgccaatcctctgtccagaagacacaaacagaatggaaacagcagagacactaccaccttaagttgataaggtgctcatctgggatagaagagtacacacatgccaggtcctctctccagcccgggctccagttggggtggctcctctgacttccccttatctaagctccagtggcattgctgtttgggaatccgtaactaggactaacaggtgagaccgagggcagtctgctggggtagtaggaaaggcagagggaatgtatagaacccctttccaggtaaatgacatgcaggattggaatagctgaaacaactggctgtctaccttgtgccaactgccttctctctgagcagtaggatttacactgctgagaatgacaggtccatggagcactgcaggttgtagtcatattttattctccaggtgggctatcggctgcccttcacttccctgaggcaaggaggaggaaaatctggcatttggagagtcagaggatcatcaggcccatggacttggcacaaggcttcaatccaggaagggtagatccatatcggaggtacaggaagaacttgaggctgaaactgtgttctctaaagatagcaggctgctccctcgccctttccaaccacaggcctcagtcttctccataagatgagcgaagtgcatgatgccaaatcacaccacaattgcaagcaattagaagcttagtgtctgccttcccctctagaaagttagttccatgaggacaagagctggttttgtcctgctcactgttgtacctacaatgcctgtgatgttggagatatgcaccatactactgtgaaagggagggacagagacagggagggaggaggagaaactgaatcacaaaggaaggtcacataagagctatggggtggggtgagatggggttgcagagagaagaattctatgtctgagtccctgcccaccctgaccagaacactgtgctatttccacagatggctgggagagatgcaacattgctgcccctcagaccctagcgtcaactgggaacatttgaggagaaaggaaatttgatccacaacacagggtaaggtgtgtcttgggctcagaaaagcaccttgtctcttccttctggccatgctcaggctccatgacccttctgatggggtgctgggcagggatggagggccctccctgcttccttcctcctcttcctgaagccctcctctgcctcaggaggtggatctttccccctttctcccccacacagagcctgattgctagcttgcttctcagggggttggtgaataagcccttgggtgacattaattgccatcaggcattaggggcctaatgagaataatcttctttgacgactccagcaccttctatccccagggcctccaagagctggccagctctcctcaggctgcacctccccccagctccagacagatgtaggggtgggggaagggccagagcagccctctacaggccccagtaccaagcgaggcagcaacagccagcagccagggaggaggaagccttccatgaaaaatgcaagcacattttccaaaaacaaaatgtcaccgtcctagatgaaaggaaactctcagggtcaagagggctagcatggagtcaggcagatggagggcacggtttgagtgccccagctggctttgctctgacctggccccacactctcactccagttgagtgcagaggtatggaagggtgaccctcaagatccatatcctccccagtagggatatgtccatgggattgaagaccctgtccctccagagcagggtaggattgaaattcaccctctggggattggagttgatacccaacgaagctataaaatcattgccatggatccgatgcctggttgacagatgaggtgtgaaggttgacttgccgggtctgatctaggttgcactctaatggaaagggcctgatggtgggaacagatatcactccagccacccctcccgctagtcagcaggtgcctgggtgagtatgcaagaggggcagttccccacccccacctcatgcctctttaaaggcttgctaaacaacctgtaggaaagcactgtcccctcctcttctccgtcttccttccccagcaacagaataaataggtttcccacagctgcgccccggacccatcccgcacgaagctgagccccagagcccccgcggcccgagaggagctgggcacagcagcgaggctgattcccagccagtgcccagcgaactctgggggtgggggtagggtgccccctacccgcgcctctggaagagcggctgcaaaacacctccggcgcccggtggggagcgtgcatcctttgaaaagggacatcagtgactgcggtggcgtctaccctggagaaacgcagctgagggaggtggaggctcctcccgccgcagctggccggccccattcgggtcccagcgctagccggcgttgggaaggaaaaatcaaacataaaataggggcgagcggaatcgcgaggtcggcccttggcccgagtctcattaaggagccgcgcgcgccgccaggctaggaatgcggaatggacacgtggacagaggagggggagctaggagtcggggagtctccgtggcgcgcgagctgtgggccgcgcgctcgggggccacgtgaccacggggaatctgggaggggtgggagtgagcgcgccaagctcggcgcccgcttctgcccgggtgggcgctgaatcccggacggaggaggagggcgggcgagcgcgagtgtgtgtgtctctctcgagtcatttacggcggagcagccggcgcgagcgccgaggaggcggcgacggcggcggcggctgcttcgtgcaactgtggcttcccccacctcctcttcctttttgctcctcgattcttcttcttcccccacacacgtccatggggagccggctcccctgccagcacctcctctcctctcggccccgtaggcaccagctgccgcttccctggccgcaagctgcgcaggtgccggctgccctggcccctggcgccgcgcccgcgtctcaccgcccgcagcccggactggcgcggcgatccgctcgcccaaactgactcggagggagcgggagccgatgcccggcagcatcgagacagcgggcgaacgggcgtccggggacagggtgggggcggcggggaggaggcgtcggagactctgaaccccagaaaagttcaaggtttgtgcaggttcccccagggaaggcgaggagcgaggcggggcagcgcgcctctctgccgagacagcgagaccttagcggggtggcccggagctgccgtgagctgcaggagcccctctgcatcttacagcgtttatggtcatcaagctggagtcgacgtcctgggcaggaagggctcggggcagggcgcattagccggctttctcgctccctcgcttctccaagccccatctacatggggcagcccgttctggccgcgccacccttgccccagccgccgagcggctgcctgggcaggaggcgctgagccggcctgtgtggagcctgggccctgatccagactggagaaagcgcgctggagcggaggagcgagccttgcgaggggacaaacatctggccgcccgcctcgggcatccggtctgggcgtcgcctagggtggtggcgaccggcgtcgccagtttcagcaccgcacggaaacttttccttctccagatggattaaagttgtctggattttctctttctttgagaaagacagcattcatttgcacctgacctgggatttttatgctgggctgctgcaggggcttggaggaagaaagcggcgctatccatgtgcggttactaccgaaaccgaggaaactggggattgcgttggaagtcggcaccctcgagtgagttcggattcgagctgggccgtgaggccgggagattcagcactgggctctaggtagcccccgggacgcccgcggccaccgggctccggactgcacgtgcagctccccccgcgcctcgcagatcctgcagggggcaccagctgggggaggtggaggctcctcccgcccggagctgcgcccccaccggctccgagggtgtagccgccagcgcctgggacgccccctccccgcaaagtgtccccgaattgcactctctggtcccggagctgcatctgagacagccgggcgccacggcagccctgagttggatgtgaccaagcccagcctggggccaagtcgtcgtcgactgttgctctctcggacccctcccgcccccgcctcggccatggccccggggatgtcgggccgcggcggcgccgccctgctctgcctctcagcgctactcgcccacggtaagtgtcgcggcgcggactgggggtgaggatgcggcaggcgccactggagggggtacggggaagactggggagaggagcacccacaccccctggactcgcagccgccactccgggtttggcgtctctggctgcagctcgagttaccgccagcccccgagccctccggcgagctcagctgaggggaccgagcccggcgccagaaaagggtggggggagggtgtcgctccagtcctctcctggttataaagaagggttcgaacccgaaggtctggggtcgtgtccgcccacggaaatctagagggatccgagggatcctccggatcgcgtccaggccgccccccgcccccgtctctccctgcagccggccgggctgggggctgttgggatccgccgggatcgcgtctttcctcgccccgggcgcgcaggccggtgcggggccgcgccgcccgtcgcctcgcttcctgcggcggtcctcgggaagggaagtggactgactccgggccggggagccgccgcggctcgcacgcccgcggtcctgtgagctgcatctaaatggccggcttaggcgagcccggagggcgggggtctgggcacccgcacag

SEQ ID NO: 7556 - DNA, 6000 bp, Homo sapiens
attgacaaatgggatctaattaaactaaagagcttctgcacagcaaaagaaactatcatcatggtgaacaggcaacctacagaaagggagaaaatttttgcaatctacccatctgacaaagggctaatatccagaatctacaaagaacttaaacaaatttacaagaaaaaaacaaccccatcaaaaagtggacaaaggaaatgaacagacttctcaaaagaagacgtttatgcagccaacagacatatgaaaaaatgctcaacatcactggtcatcagagaaatgcaaatcaaaaccacaatgagataccatctcacaccagttagaatggcggtcattaaaaagtcaggaaacaacaaatgctggagaggatgtggagaaataggaacgcttttacactgttggtgggagtgtaaattagttcaaccattgtggaagacagtgtggcaattcctcaaggatctagaactagaaataccatttgacccagcgatccctttactgggtatacatccaaaggattataaatgatgctactataaagacatatgcacacgtatgtttattgtggcactattcacaatagcaaagtcttggaaccaacctaaatgtccagcaatgatagactggattaagaaactgtggcacatatacaccagggaatactatgcagccataaaaaaggatgagttcatgtccttttcagggatatggatgaagctggaaaccatcattctgagcaaactatcacgaggacataaaaccaaataccacatgttctcactcataggtgggagttgaacaatgagaacacatggacacagggtggggaacatcacacacctgttgtggggtagagggctgggggagggatagaattaggggaaatacctaatgtaaatgacgagttaatgggcgcagccaaccaacatggcacacgtataactacgtaacaaacctgcacattctgcacatgtaccctagaacttaaagtataataataataaaaaaagtggagcagataggggagttgggagattggcaggtaaaattttaagcggaaaatcagagtgggtctcaaagaaaaagtgacaactgtgcaaaggcttgaaggaggtaaggaagaccatcttgttaaagaatattaaccaaggtaacatcaaaagagaaatggagagacatcaaagaattttgatcaaatataattagacttacaatttgatctaatatattagacttacattttaaaaggataactatggttctgtgttgaaaataaactgtagggtagtagctaagcttaaatgagttcatatacatgttatatgtactgagtctacctacctatctgtatctatctatctatctatctatctatctatctatctaatctatctatctatccatccacacatttacccacctacctacctatctatccatccatcatttactcagaacaatgcccggtgtgatttaaaggctattattatcattattttcattgtcaagcttagtttaaccacaactacctcatataaggtagctatcccttattgtataggtaagtaaacagactcagaagggttgaagtaacttgtccaaaggtacataatttgtaaatgccagtgccaggataggaagtccagggatcactgtgtttcagttgcatgctcataaaccatgaataagctctttccctaattcccattctcaaaatgcaatatagatgagaaatattagatgcatcctatttaaccttaatcgagttacttccctgataaagatgaccctaacaaagctatttcttcactcccaagcaaaatatcaagccatcatgggcaccaagattagggtgcaaagcttttaggcctttagcatcataagagaacatctttggggaaacaggattttatcgtgtaatattttttgacatgggtgccgaattggctctgccaatctaattaggcactaccctgcttaaatagcaggattctgtaatgactttagaatctgtaagaatgcatacagaattttttgattaataggtacatgcaaatttatttggtaaaaatagtgccctgtgctatttaataatttttaaaaataattctgtaattttttttactataaataccaatgtccttattaaagacaagtggcttatttagacagattatctttattaaaccatagtgttgggcactgcggcatgtgcctataatcccagctactcagagactgaggtgggaggattgcttgagcccagttcaagactagcatgggcaacacagtgagactttgtctcattaaaaaaaaaaaaaaaaaagcaaaaacaaaccatagttatccaagtccaatcaagaaagcagctgtttatctgagataaagtatttactttatcagagagaatataaataattgtttaaggaggtattgcaagattgaaatggtaagaagacaggaccacgatgtatgcagacttttcaggaatgaaagtttgggtcaccatccaaccacatagaggactctgactgctaagattgtggcctgggggaggagggcagaatgggtagaagagacaaacttaacagcaagcactgctatctcatagtaacatatgtgtacttgcctcgtatcagtggtattgaatataaaaaatctatttcttcagaataaggtgaatggtaacctcagattataagtacaataggtcccggggatttggttaaccttataatacatattttaaaagatggtgtttctgaacagcaggcagtatagcactatttacacagtaggagttcagagtccttatacagcgacgtaaggacttcacagtgtttcagggctctacgcagtgaggcgtgttgggacttcaatagtggatctgagaagactggctcccaaggttagctggtacaaatatccagaggcatgtgagcatttagacatttaggcatttagaggcacaggaacgaaaatggagagcctctgggctgtgctaatatttggtgctaagcaggttatgaagccttgactatagggaaatccatcccattgaaacaaggctcctgtcatcaatttggggtacagagggtagtgtctacagagtggagtgccaacaaatggcatggggatcagggctcagatctggagctcaaatcaaggatactgaggaaagctgctacttggtggacatgagtaatccaagaactcatcagaggacacaaggtagtctaagggacacgccagcttattcccttcataggatccccagtagagtactaagtaatgttggttgggttcttattggctgagggatgtgactgggctatgaaagtacaaggtctttagtcctgatcactgggcacagttggggaaggcagagacctagtggtgtccttttggttacactggcatcactacttcctgacagcgtttctcacgttcatctgatggacatcaaataattttgttgggggtgatatgattttacttgggtggtgtcagaagatatgtcaagctatataacaattgggaagaagtaatatagtaactggaagaaagtaagaaaaggcaaaggtgagaagtcaggtaattagaaaatataaaatttccaattattattattttgggggttttatttgagatattccagaatttccaggattgaaataatttaaagccagagagctgggagccttccacatattgtgtatcttaaagagtaatattggggatttacagactttactcagtgaatttactgacggtggtctgaacatacatgattaaaaaacttagaaaaggcatgacaatagttctgtcttccgaatttctggatacatcaaccttcaactgctatgggttactaatctttaattttaaagagtattatgtacttaagtaaagataaattctgacaaattgggatagtttgcatcagtaagaaagtttattgaaattcattagtaaatgagaacagaaagttgtttttctttccattaaagaacactttctggtaaagtgaaaagaagaaatacagaaaccacaaaacaccttgtagacaccttattttcaaggtctatttccatagaccatcaagacagaagtgttttcttggagactttgttttccatgcatctgtaaataatggtctgtgtgaagggagactctttcctcttgatgcagtttaatagtagtgtttcttggtttctgattcaaccatagatgaaagaactctaccgtcgggcgccacctcttcaataattgtcttgattactctggttttgttagtatctgtgtgaatgatggaaaaaaaattttaaacagtctgtagggatccttagtaattaacaagcaaatattgtaaaaagaaggaaatttcaactttacattgttaagcccaaaaaaatgcttaaggtatgacattttgatcatgccatttttcacggctggtgttaagagtagtttgtgaacaaatgcaaacggaaccgtctctaagatttttaattttttaaaacaactctagagcttaaagcgcaaaaaaaccatcacaggaagttaaaactaattctgattaccccagctagtttctgctgaccttggtcccttagatgaagactcgcccacggacccggaagaggaggacttgtggcctccgctggagctgccgccgccgtatccgccgccggagctgctgccgccgccggagctgccgcccccgtagccgccgccgccgccgccggaactgccaccaccgtagccgccgctggaactgccgccgtggccgccgctggagcttccgcccccgtagccgccgccggagcttccgccgccggagcttccgcctccgtagccgccgccggaactgccgccgtggccgccgccgtggccgccgccggagcttccgccgccggagcttccgccgccgtagccgccgccgaaacttccgccgccgcgtccgccgcctccggaactaaacggggtgaggtcacattcggttatctctaacgttggaaaacggtgggtagctttccagttgccgttaatttagaaaataagcaaaacgtgttgaaaaaataaaaccctgccaggtatatattttaaaacccatcctttgaaaacaatgttaagttcacagaactcttaagaatcattttgggccaaattcatgagaaagtgagattgcggttgcgtactcctttttctgtactctaccctctctcctcccttcctctcattctctggcatcttcttggggtttagataagccttgctatctggaatattgaataaaagaaactgggataacttttcattttaaaatttaccttccctctccttctagcaggctgcggtaggtttgaatttcattctccagtcggatcttaatatccaggagttgttggtattcagtattctggcactcggtttcagctcgaatctgttgcaactgttcttccagagcggatatctgggcctgaatctgtgagagctgcacacagtagcgaccttctgtttctgccaaggaggcttccagggattgtttctgaaacggatttttttgtggcttagtgacttccttgttcagttgagtatggtgacgcttatttgattatttagtaaggcattatatagaagaataagaaaatgaacagaatttgttgtatgtttaatggcaccatttcagtttcagcacttttagatcaacactagtagtacttttcctccattaacatgagcttcactttgttttctctttcttacctccaactctgcatttttttgttgcattgcatattcttaggtgagcatgaaactttgtatgataaagttgaagtcatttcatgagagttaacataccaaggccagttgggactgtagttctatctccagagcttgtacattacgtctcaattcagtaatctcagatttatagctggatatctgttcaatgttattatcaatttctgtagtcagttccttgctctagag

SEQ ID NO: 7557 - DNA, 6000 bp, Homo sapiens
tctacaaaaaatacaaagaaattagccggacttggtggcgcacacctgtagtcccagctacttggggggcttaggtgggagaatagcttgagccccagaggcagaggctgcagtgagctgaggtcatgccactgcactccagcctgggcaacaaagccagacactatcttggggtggaggggaaaaagtcaaggataaatcccaagtttctggcttagtaccattcattaagagcagaagaagagaactaggtcagttttgctggacagtgttgagtttgtggcatatccaggtaaaggtaaagatatccagagtgcagctggatatatagttgtccctcagtatctatgacggttggctccaggaccccctgtgggatactgaaatccatagatgcttaagtcccttatataaaatagtgtagtatttatatataacctaggcacatcttcttgcttgcttgtttagttttagttttttagatacagggtcttgctctgtcatccaggctggagtgcaataactagattgtagctcactgcagcctagaactcttggattcaagcaatcctctcacctcagcctcttgagtagcagggactacaggtgggcaccaccatgcctagctagttttttaaaaatctttttgaagagatggggtttcactgtgttgcccagggcaactaactcctggcctcaaaacaatcctcccacttcagcctcccaaattgctgggatgagaaacttgagccgctgcacccagcccatctcatatacttcatctctacattacttacaatacccaatacaatgtaaatgctatctgaatagttgttatacggtattcgggaataatgacaaaaaagtttgtacgtgttcctttttttctccccaaatattttcagtcctttggtgactgatccatagatgaggaacccacagataatggcaagccaacggtatccatccagatcacaggggagggatttggcctggtgatacatgcttgagagtcacttgcctacagattatagcagaagccatctgatggaatgagatgatccaggaataatggggaaagcaagaagcaacctttaaggatcagggaaaggaatactctgaaagaaagctgggaactaggaggaaaatgaagagagagagttctatgctggaacttaaggaagggtgttttaataagggggacatggtcaacggtgttagatgctacagagagatatgaactggtggtgaggaatttgagagtagaagtatgccacactttcaaatagacaggctacaacaggcagaagctaggatacataagacaagaggaagcatttttaaagttgggtgagactttagagatgggcaagccagcagtgaaagaggttaatgataaagatgagaagacagattggagatggagaaagatttctgaagtggtgagaggtaataagatacaatgcaaggtacattccattaacctgcaaaggaggatggataatctattctgaaataagaaggtagaatggaacagtggaatcaggtttggagggaaatgcttaacatgtttgcatactgttctcatctttacatactttttcaacaaccctgcaaagtaggaggtatgatatatcttcagttcataaaggaattgatagcacagttggtaagtaaatggaagattagggtttgagtctaagcctatctgcctcccaagttaataatctttctgctgcacagtttcagtatccccagtctgtgaaattgggataataacagaaccagaggccaggcgaggtggctcacatctataatcccagcattttgggagaccaaagttcaaggatcacttgggcccagaagttcaagaccagcctgggcaacatagggaaacctcatctctagtaaaaaatttaaaaatttgccgggcgtggtagcgcagaccagtggtcccagctatttggaaggctgaggcaggaggatcacttgagcccaggaggttgaggctgcaatgagctgtgttcacaccactgcacaccagcctggggaacagagtgacaccctgtctcaaaaaacaaacaaaacaacaacaacaacaaaacaagcgtttaaggatttaggaaggtaatgcttccaccacagggcttgaatgaatgaatgttaacttcctcttacctattcttgtttttttttttttgagatggagtctcgctctgtcacccaggctggagtgcaatggcgcgatctcggctcactgcaagctccacctcctgggttcacgccgttgtcctgcctcagcctcccgagtagctgggactacaggcgcctgccaccacgcctggctaattttttgtatttttagtagagatggggtttcactgtgttagccaggatggtctcaatctcctgacctcatgatccgcccgcctcagcctcccaaagtgctgggattacaggtgtgagccaccgcacccagcccctcttacctattcttttggaggagaaaaaatcaagaagccttcccaggttgtaatttcccaagctgttttttttgtccagctcctctgcatatctgacaaaatttcccatagcatctttcagtaacacttttatcttgctcatacttcccccatcatcacaattacacttatgttcacagggtctctggggcttgctgtcattccttcatctggccaaaaaatgcttcttcctgaaagccccgagtgaagcattctcctggttctaagtacagttcattagctccccggtttcccttttctcctccttcaagtacacagataactaatctaaaatagggccttcccagtccgaaccgttggtatcaagtacacaggagtgccatagccttgaatctaattacctagtactttgaataaatctggaaagactagtatgcttgcaagatgatacaaatgtataaaataaacatttaaattatacagaatttttttttttttttttgctttgcttgtctctacacagccaataatttctgaagatcagacagcagccctgatggcccatctctttgaaatgggattctgtgacaggcagctgaacctacggctgctgaagaaacacaattacaatatcctgcaggttgtgacagaacttcttcagttaaacaacaacgactggtacagccaacgctattgaggagtgaccttgtattaaataactgcctgctgctcagagatgatctttattctgtcattggggtatgggatagaagcccttgcttatttttaatctgatgaatctgtatagagcccatcgttgagttaccaagacaatacctgctacagtattttggggagcaaactaaagaccagaacttaaattttcactttagacattggatgaatagtatgaagacagtttttcagttgatttggataaaactattttagtgcattgacaagtgtaacttcaacttcatatagaaccatttttctttctgcttttattgaaactgagtatttttctttggctaatgtggattttttatggggatatctgttaattttcaggttttgaaagacattaacctcggaagttgtttttaagaattattctcataattcttattctcataatttctgtaatccacctcaagcttcatagttatttggcattgaaataacacccagagcatgatagaaatgttgttactcttcctctctcaaggagaaagtaattttcctgcaatacttaataattggcaccgttgctttctaaagactccatggtgcattcaagagtatccaacttcaagggaatctccgcatttcaatgaaaggaggaagagtgtgctgataaacctaccagcacctattgagcaatgtctattatagtaattttgcatacatttttatttaagggaaaaaatataggtattgtgaaatattttgctaatcttatagaaaaggaaaaaatcccgttatttaaagggaaaagtaaatttaacagttgccttttttcttaatgtcagggcagatcttattttacagtacagtgggggaaatagaaacatgtgaaaggcaaaaggcaggctcctaaattaatgtcagtgaagttcagggtgggcaaatgagtgtgtgtgaggtataggaaatgctgatgacttctttaatgcttgaagtccgttcacaggtatctagccctagaatgcctagaacaggaagaggcagctggtgttctgcaaaacttggacaggggcaaagttgctgaaaaagttttggtttaacccgaagataagtggaaaagagcttgtccatgaacccaggttctcactctgtttacagaagtgtgttgagtacagttggtgaaggaagaggtaacaaaaaatgctaaatattttatccatgaaaatgacttccagaaaaggaagaatatgaaccccagaccgaaggggaaaagatagttaatagtattatctaacctggttggtatttgtaatgaatggtgattttaattagtcattagccataatgatgtttatttacagtataactcctgaatgctacttaaataaaccaggattcaaactgcaagccagccaggccgttcattatttaaaacgttttaatcggggcttccgggtagaaggtggagcggcagggtgtaattgggttgatgggtgggacctgtcttgaccatcggagttttataatcgagggccaggagggcccgggttgctctcctggttatgtatgtacttgtacataaccacctaaagaatggtgaaataaatgttcttggaaattcctacccggactggctagtccttgcggaagcagcgtccgggccctcgggtaacgtttgaagagctggcagcgtctcaggctgctgcgtggcgaaggggcggaccgggggacgggggggtgggcccttaggggctggggcgggacttccctgggcactgagtcaaagcttgaggggagtgttcgctcccgcattttcgattccactctcttccgtttctgtcgctgcagtcgtccgcgggtaaggccctccctagaccctttatacctactttacctttcggaggtcaagacacctcctgttgccgcctcctcgcccaacacacaggcgccccccgcacgggtaccaagcttgactaacggcctctaggggtgtgtggtgggacttgaaatcctcccttaatgaagtcacaccttctccgtccgcttccacccggtcggcccatggcagagcccccatgtagcccaggaatcggcttggcccttcggggaggtcagcgtccttactgtccccactctccagtgcggcacattcgttcccctaggactccggccggttgccggccccaggcggtgcttctccccaccaccgcccagctcagctcagcccagcccagcccactctgcccttagaggcccttctccccaaagacgcactccagaagtctcgccctcgtgcggctgaggagcctgggatcccagacctgaacaaggtgagcatccctatattttagcccagaaagatctgtgtggctcacttgccggcctcgttctgtcacacagagtccagatttagccttgagttttcctagtgaaagacagaccctggtatcactatgaccctcctcaggctttcttaccccgcctcagaaagcagtgaggtgtctgctttctcccagggcttctttagataggggtcttaaccacacctgtgaccagtctggcctcctctctccttgattcaaagaatctcttttctgccctatccaacttccttcccttaaactgaatgacagctcagcaacttttccagagaaaaattaaatgctctgacaatcacttatggaagttccttaaagtgaagtaacttctgcttttcttttgttttcccttttgtaggcagattggtctcttttaaaataatgaaaggagtcgaaatgcattgagacttctgagagtcccatgtgaccacccagtttttcacatcctatct

SEQ ID NO: 7558 - DNA, 6000 bp, Homo sapiens
attgggccaaggcaggtggagcagaagaaggggtggtggcctcttaggtgcctaaggagcccaggttgggggcacggcaggcatcagctagggtgagggggcatgggggcagcagctggtgggcctgcctggctcatcctcatcacaggggaagggggagggagtggatggcaatccactctagaacatgcagcggggaagctgctgggcagggcagcaagggcaggtgaggggccaggtgaactaggccccttccccacccttcctgagacctgctgcctggggcctgctggccctgctgccctgtgtgttgaagataaatgttccaggtgcacctaggtcctcaagtagaaggcagagacactaccccagcctgctctgggcagccaccccgagagcccaggccatagctgagggggcagtagggtggggggagggagggggagttgtggggagcaaagtcacagatacagggggtgccctccaggaaaggagttgaatctggagtgggggtggggagggtggcgggactgaagtcttggagcgggatttcagcctggcagtgggccatggccccaaggggcatcagccactcatgtgagggcactgaccagtgctccgagtggccaccagaggaatgattccagggctgatggatgggggtgggcacagggatgggggacctggggaagcagtgatcaaacatacccacgaaagccttctgtgagtggggtcccaggcagagtctcggagggaatgagccttctgcgaattatctgggccctgggcaaccagtccacgggtagatctgggagaaggggcaggagcaagctctgcttgaggtgtctgtgcagacccccaaattggggcatgtgctggtgtgatggagtccagaagaactaaaatgagacctgtcctgaggagagagcagctggaggggactggagttgctccatttcgtctgggcgctgtggctcacacctgtaatcccagcactttgggaggccaaggtgggtgaatcacttgaggccaggagttcgagaccagcctggccaacatggtgaaaccctgtctctcctaaaaatacgaaaattagctgggcatggtggtggtgcatgcctgtaatcccagctactcgggaggctaaggcaggagaatcacttgaacccgggaggtggaggttgcagtgagctgagattgtaccactgcactccagcctgagggacaagagcgaaattccatctcaaaaaaaagtcccatttcaaccatgttagtgcacaattcagtgactttaaatacacaatgtcgtgcaactgaaaccactgagatagaaaaagttctggaacttcttcatcaccccagatggaaatcccatacccaccagtcactcctcattctcccctcccccagcccctgcccgccacgaatctgctctctgcctctgtagatctgcctgttttggctgtttcacgtaagtggaattaatcgtacaatatgtgtccttttgtgtctggcgtcttcatttagcataatgtgtttccacttagcataatgtgtttcggcttagcataatgttttcaaggtccatccacatggtagcaggtatcaaaacgtcattccttcttatggctgaatgctattcccttgtgtggagagaccgcagtttctccattcatcagtggatggacatatgggttctctccacctattccaagttatcatgaatagtcctgctatgagcatgcatgtacacgcttttgtttgaaggcctgatttcaattctttgggatatatagctgggagtataagtgctgggtcatatgataactctgcttaacttatctaggaaccaccaagctgtttcctgcagcggctgcacaattttccattcccaccagcagtgtatgagggtcccaacttccctatatcctcgacaaagcttgtgattgtctgggttttgtgacaaagtgggtgtgctggttcttgttttttaaaagatccacgactccctgcgtggagaacagggcctggagtgagggtctaggttgcccattcgttgctggggggccagaaagggttttactgtcacagccctcctgtggcctacaggcgagcctccctctcctaaccaccctcctgccaacctcccctttgaaatgggagcactcggaagggacagctggcagcctcctcccctgggctctgcctgcttctcctcacaccggctggtggtttgtttgccagtcacttgtatttgttcctgaacatgtttctgacagttcacttgtcattgtaattactgtcgtaatctaactaaatgttatattactgatgaatcagaagtgcactaacaaggagagatgtttcttatgaaaattcagtctaatgctttgaaggatactttacaaatgagtcaccaaaaatattggcaaattaggtgtgggtgagatgagtgtaaataactgggtgagagagaattgtcagaatctcagatgggttccacttgctgaccacttcacatggccctttaaactcaccctccacttcaaagaatccacagctgatgttggagatgatgtttcatccctgtggatttcccaaggaaagcagtttgggactgcaagagatggacccgtaatagaaggagaggccttgacaggcacggtggctcacgcctgtaatcccagcactttgggggaccaaggtggctggatcacctgaggccaggagtttgagaccagcctggctaacatggtgaaaccccatgtctactaaaaatacaaaaattagccaggtatggtggtgggcgcctataatctcagctacttgggaggctgaggcaggagaatcgcttgaacttgggaggtggaggttgcagtgagccaagattgtgccactgcactccagcctgcctaggggacagagtgagactccatctcaaagagaaaagaaggagagtccttgagaaagatcagtgattggccaggcacagtggcttgtgcctgtaatctcagcacctcgggaggctgaggtgggcgattcacttaaggccaggagttcgagaccagcctgggcaaaatggtgagacaccatctgtactaaaatcacaaaaattagctgggcatggtggcacacacctgtaatcccagctactcgggaggctgggtcgggggagaattgcttgaaaccaggaggtggagtttgcagtgagctgagatcgtgccactgcactccagccgagcaacagagcaagaccctgtctcaaaaaaaaaaaaaaaaaaaaatcagcatgcttactccttagaggttaaaattacatgtgtgttgtggggctgcccacaattgtgcccccaaataggcatgttgaagtcctaaaccccagtacctgttaatgcgaccttatttggaagtagggtgtttgcagacataatcaagttaagatggtgtcattagggtgggccctaatccattataactatgtctttataaagaagagaagagacacagagacacacagggagaatgccatgtgacaacctatgcagagactggagtgacaggccaggccagtggggagaacatgaggacaatggaacctggactgccaagctccagcccccaaatccctcccttctggttccggaggccccagggttactctcccgcacactaactgctttgaaaacctcattcctcaaatctactccatcatgggtggcctgaagaagcctggacaggaggtcctgggtgacctgtgagggcatacaccacagagctgggtgcaaacctgcagagccaaaacctggggctcctggcttcaaatccacctctcaccagtatttgagttctctttccagcggaaagtctgcccggcctcagagttgcagccaggagagtggctcagaatccagcatgaaaacatttggaagacatcaaggtccatttaaccagcacaagagccccagccttctttgctgtgtcaatgtgggcttctccaagcctcagttttacttatccatgaagtgggtgtattaaggtaacgttaagtggctataacaaagagactcatgacaaatcaatgccttaaggaagatcatgtctctctcttgtaacagtccatagtgcacatcctgggctactgttccacatggaatccagggacctggttcccttcactttcttcctctccattccttaggacattgtcctcctcgtcatagacagacacatcacaggcccgtccttgttctgactcctgagaaagggaaagagagggtaaaccaggagccccacggtctgtcagcctaagcccctgatgtaaagagttcacatcatttttgcttaatttctcctggtcacctgtccgttcccaactgtaaatggagttggaggtgaattctggtcatgtgcctggtagaaatggggaccaactttgagggacagcctcaggctgtgcagatataatgacacctccttgcaactgtgcaataggtacagctagggtacctggcgcctagtaagccctcggtaaaagtgctcaatgttactgagctcagagctccaagggaccttagaaactctctggcccaacgtcctcatttctttacagctaaagaaacaggcctagagaggagtgacattggcctgtgttccccatgggtaaggagaaaagttggttcagaatcctatctggcctgcaaaccccatgctcacaccttttatttcaaagtacctggtctaaacccactagggtctgggcagagagcagggtccatatgacctctcccctggtctcccagggttggggggcatcattctagagggaccctgtgccccacagcagcgccctcggctggggaccacacagctttatgactaggtaggtgtggccctggtttccaggacaggtggccagactgctctgtgacaaagggccacgcctgcccctgggaggggtattgggctgccgcccgcagatgttgcagtaggaactgaagaagatggcgtgcctgggcttcctcctccccgtgggcttcctcctcctcatcagcaccgtggccgggggaaagtacggcgtggcccacgtggtgtcggagaattggagcaaggactactgtatcctgttcagctccgactacatcaccctcccccgggacctgcaccacgccccactcctgcccctgtatgatggcaccaaggcaccctggtgcccgggtgaggattccccccaccaggcccagctccgctcccccagccagcggcccctccgccagaccactgccatggtcatgaggggtaactgcagcttccacacgaaaggctggctggctcagggccaaggtgcccacgggctgctcatcgtgagccgggtcagtgaccaacagtgctcagacaccaccctggcaccccaggatccccgccagcccctggcagacctcaccatccctgtggctatgctccactatgctgacatgctggacatcctcagccacactcgtggggaggccgtcgtccgcgtggccatgtacgcacccccagagcccatcatcgactacaacatgctggtcatcttcatcctggctgtgggcacagtggctgcaggcggctactgggccggcctgaccgaagccaaccggctacagcggcgccgtgcccgaagaggaggggggtctggtggtcaccatcagctgcaggaagctgcagcagctgagggagcccagaaggaagataatgaggacatcccagtggacttcacgccggccatgacaggcgtggtggtcaccctgtcctgctcgctcatgctgctgctctacttcttctatgaccactttgtctatgtcaccattgggatctttggcctgggtgctggcattggcctctacagctgcctgtcacccctggtgtgccacctgtccctgcggcaataccagaggcctccgcacagcctctgggcctctctgccgctgcctctgctgctgctggcgagcctgtgcgcaaccg

SEQ ID NO: 7559 - DNA, 6000 bp, Homo sapiens
agagagcgacatgcccaacatggcctgtccctccttggcaatgaggtgaccaagctagaggccttgttgaatatggctacgagagtcctgaggagccaggctgcacggggtgccgatggcagtggggataaagggagaggacacctgtgacaggcacagcctccagtctccatgagctctcagcccatgtggagaggcgggcctcctctgtgaagtagacccaggcagcgctcagtgggctgtgcgggagtagaaagggggaacaaactgggagtggagggaatcacatctccagtcccagaccacgttcaggagtggtcggcacctggacggacatcctctgggatctgtcaccagccccaccttctcaggcctgactggccttaagtggggcccagtggacagcagaggggtttagtgagcaaagcttcctggggaaactggggttggatgctgcagcccatccagggaggtgagcagtccaaaagcagcgagaccctgcactccttggcaccccactctgcctccatgtgaaatgcagagaaggaagtatgggccccttgtctctgccaggaatgacagctagcatttatttgccattactgtatgccagactctgagcggcctgtttcatcctcatcatggcctatatgatgagggaggtactgttatccaactcctccctctccttcctgttgagagaggcccagagaagttccatttctcgtctaaggtcacacagcacaacatattcagtggcacactgactaacacgacacaatactgcccctacaggcagagccgggctagagcagagcattctgctggctttgaaaagagatcccagcctagtgccatcagccattacagatattagtgtccaccaaagtatgggggtgggggggactgccaagtaaaacagaattcaccctggctcttccccttcacccaagcctggccccctgggctgggctgagccaggctaggcgaggccacccaccctgagtgatcctccatccagagcagtggagcagggctccccaggcccgaggtgagtgccacctgtgctgggtgtggcgtcttgagcgctgcatggttctgatcctgactcagcccctcatgtcctgtgcgacctggccttcccgctctccaggccctggttgcctcctctgagaagggcgtaagtgggccggctggcctcggaggcccctccttccagctgggccccggcaggatgcacaatcagctcattctttagtgaatgcactgggggcccagcgagcgtttatgaagacatttcgaagtggctgctcttgggaaaccccagatggaatttggtgttgaatctagggggccgctgactacatgaggcctctgggtttctgtgctcgtgtatgcctgagcacctgcacacgctgccctcctggtgctaggtgacgtgccaaacagaagatgctggccttgtccaggaccctccttcctctagaacagcccttctctgctcagtctaggggggtccatggtgctcccacccccttctgacctcacccaccaaaaatccgagggccctggggccatgatgaatgctaacaggccctggtgttcttggcctggcctgggaccacccacttccaggctcctcatcttgtccccatctgcaggaaggaacgtagggcagtttggtgtcatggaactgggggcccagccgaggggctcaagagcccttcagactctgcctggtgagtcaagtgctaaggacctcacttcttcattggaagatgtggggtgggggtggagtttgttcctaggacattgtagcgatgtggatagcattgccagattttgttttgttttgtttttctttttagagcgagggtggtgctctgtcacccaggctggagtgtagtggtgtgatctcagctcactgcagccttgaactcctaggctcaagtgatcctcctacctcaacctccagagtaactgggactacaggtacatgccaccacaccggcttaattgcttttgttttctttgtttgcagagacagggtcttgctatgttgcccaggctggtctcaaactcctgggctcaagtgatcttcctacctcggcctctccaagtgctggggttataagcgtgagccactgtgcctggcctggttgccagttttaacaaagaaaaacacagaacatcccattaaatgtgaatttcagatagaaaagtaaattttagcataagtatgtctcaaatattgcatgggcccaggtgtagtagctcacgcctgtaatcccaacactttgggaggccaaggtgggcatatcacttgaggccaggagttggagaccagcctggccaacaaggtaaaaccctgtctctactaaaaatacaaaaaattagctggacatagtggcacatgcctgtaatcccagctacttgggaggctgaagcatgagaattgcttgaatctgggaggtggaggttgcagtgagctcacaccactccattccagtcttggttctcaaaaaatatatatatattgcatgggacataattatactaaaatgaaattattcatcgtttatctgaaatttggatttacctgggcctcctgtcttttgtccggcaaccctagatctgggtcaggttgatgccagagacccagagagcagctatgccagcctcctccccctcctcctgcccctcttcagggcactggtgcccgcctagttccctcacccccactcctgctgaccccccacatctgtcccttgagttcccacatgcccttctcagcaccctcatttcaccccgcagggtatcttcctcctctaagctcaaccattttcccattttcctctcccgtaagggccacacctctgtagggctcccagcctgggcaggatagcagggagtgtggggtagagaccccaggccttgctgttgcagtggggcctgggtggggacaagaagaaccctggcagcccaagttggcaacgactcaagaggtggaggctccagcactctcaggacgaggtccccctgccaaggtccacctgcaggggaggaggggagacggcggccccttcccttctccaagctcacagtcacttcaaatacagaggggccagatcccaatacccctcggatcaggagactagaagattatcttcttaaggggcaaaaagggctaggaggtaatgggaaatagagacagggaaagggagagagagagcagggagacagcataagaaacagaccgagagactgggggtgcaggaccaaaccagggacaaggagaagggaccagagaaaccgagaaaaacagacgcctccgccgaggcagacagaggtgaacagagagaggagaaacagacgggagaacagagggaaaggctgggaactcgagagaaactgggtgcggacagatgggaagaaaccgaaacagaaaaacagaggctgggagaaacggggagagacacagaggggttaaatataagacagagaacatgactgggagagatgagggagaagggtgagaggcagagagcaaggaaagagaagaaacgcccacgacgtcgggggtgtttttcaggggtcaagacagattggcgacacagcaggaggcgcccaaggacatgacgttgagcctctcagggtcccccttggccgggccagggagcagcgccccacgctccatcaccccctctccccctcccgcggtcctggctgcactgctcctgcctcgccctcgcccagcgcccccagcccacaagccccggccgcgcccctcccggctcccgggggcacccgcgctgggcgacgctgccacctgccggccgctcccggaagctccgcgcctggagtgctggaggcggcggccgcagggggctcagaatcaggcccctccgcactggggcggcctccgcggggtctttccaggaatctggatgggcctgctcgcccgcgccccggcgggcctggcagaggaccagccccagctgcggaccccggggcagtctaaaccctggggccttgagttcccgttttgtcaatgggagaaaatgcaccaacacctcctgtaggatttcaagaggggaggggacacgaaggtacccacgttgtgctcctggtcttccttcctcgacctggaaatctcagggcactctgaaatcagccaggctgctctgtccctccctttttggtcaaaacacaatggggtgatatcccccaaccataacccctcaaaatctaccctagaaccttcgccttcccctccctcaacctctgcccccatttgacttctcaccagacccagaggtccagataagaaggggcttccacgtccccttcccactcccgccggtcccggcacccctccctggagtctggggcacttaggagtggaggagttgggagttaggaaggcccagctcagcggtgtggagttgatcccacctctttttaaatttaggttatttatttatttatttatttatttagagatggagtctcactccgtcgcccaggctggagtgcactggcacgatctcggctcactgcaacctctgcttcccgggttcaagcgattctcctgcctcaggctcctgagtagttgggattacaggcacccgccaccacgcccggctaaattttgtatttctagtggagacggggggtctcaccatgtaggccaagctggtctcgaactcctgacctgaagtgatcctcccaaagtgctggtattacaggcgtgagccaccgcgcccgggaccgcttttttaaaaatccgttaatctcttctacctcccaaatcccaaaacccaacccagacctctgcgcctcccttcctcccttcctcctcccagcccctccctgccccgagtccgcctctcccggtgcagctccgcccccatcccgaggcggggccccataggtggagagaagtgggagaggtcgcagccccgccttctctacacaggaaagctcagtggcccccaagccaggatgtcccaagcttgggtccccggcctcgcgcccaccttgctgttcagcctgctggctggcccccaaaaggtgagactgggaggtaaggttgttgaacttttgggccctacccttgtaggtcaggagcctgcttctggagcctggtcgccaccttccagaatcaggatttcctcctgaccacacacagttagctacttcctttctctctttgctgtggaggtggaggtgggggcagcggaggaggctctgggagaggctgggttctcccacctctgagggggatcctgtggtgggaagtggccaccacccaccaccttatctgacacctagcacgtctctgtgaatagggactttggaccccttattagcctcagcttatccttccagctccttcccgcctgagctttggacacctgggccagcacttagccccagctcagttcctccagtgctgggggaccctgggatgtccccaccctctttgggactgtgtctctgcttgttccctaggggagagaaggctcttttgtccccttctaggggtaagtaatcccagcctgtggtgggatttgacctggctgcctgaccaaggctggggtgacctctgaaatctgtgattttgagagggaggtgtagggttcgagtgttccctccgcccttctgttcctcccaagtaaactctacaggtgatgggggaaagctgtccggtcctgggatgggtgtttatcctgggaacagagacgggtctagaacatgcatttgtgtcttatttccatttaagaaccggagggaagtcagggtcttccatagttaggattttagaacagggcaccttcacacatctgggctgagctttcagagaggctctgccaaaacccttccgtggacccgggttagtgagcaaggtgttccttctaaatcactgggcggtcagtttgtgtcaatgctgggctgggcatcctctggtttacccctcccaccaaccccaggggcgag

SEQ ID NO: 7560 - DNA, 6000 bp, Homo sapiens; identical to SEQ ID NO: 777

SEQ ID NO: 7561 - DNA, 6000 bp, Homo sapiens
tttgtcttttatattcaagaattttgcctggatatatctagaaacatggggatattttttccatttcttttcagttaatctttttaagtatcaaatttaaatatttctttggctcaaaatgttctccttctattgttttcacctttgcttgtgttctttcagttccattatattctctggaatttctactttgcatagactaaatcccttgtattaggagcccttatttcttatctttttctctcattatttttatgtatttagattttaccttcttcatgaaagccaactctcatttttggaggtgaaaattcttgaattttattgagaaaaaaatttacatctttacaaaatgttcactattgtgtgcacactaaatgtgaactaatactgcatatttagatgcaatttagtaggaaagaataagcagtataggaaatggaatgaggcagaagtatttaacaaaagagtgtgtatattgagatacctgtcatttgtagcccctgagattaattattatcactattggccctagtttctatcatatattcatggagaagatgagacatgagaggaaattttttaaaaaaagcaacaagaaaagctggaagcagacttaatgtgtgcccacaaagatattgtgggacatccttgcaatggaacacgatgtagccatttctgattatccgtttattgacatgaaaagagtttgccatggatggttaatacaaaaagagaaagtttatacaaattatatacaaaatatataatcccatttttataagaaaaataacgtacatattatgtagagaaggcagagtgaagatacaaaaaatattggtagttctgttgaaggtggagttgatgtgatttttattttttacttaggtttatctatattgtctcattttttacattatagctaggttttcctggtgccactaaaaaaagaaaaaagacaacatgattctttaaagcaatcatttgtgttttaatgactttcaggcataggctggggaaaattgcttttttgttgttcaaaacagttaaatttgctaatttaatacagacttgcagttggtagtcggtagagggcgcagaagagagaaggaagtgagtgggtaaagctggtgtgtagctggattgaaaggtttcctaacacttaaaggttatttttatttccttttcactcatttatccaagaacatttctgaaagatcatagaagcataatttcagtttggctatcacatcgtgaaatgtttggcattattttatagggaaagtcaaaacatatacttttagtgggtatagggaactaaaaataaatgagtgtctagtttatgccaggcactgacatataatttatacactgtagtctcctattgaaaatttattttgaaaactttaatcgtaggttataaacagattaacacagccttgagaaggatttttttcaaaggatagcaaatgatgtattaaggttaatgagtactatgagttggccatgtccccacccaaatttcatcttgaattgtggttcccataatccccacatgtcctgggaggaaccaggtggagataattgaatcatgggggcagttttccccatcctgttctcataatagtgagttagttctcatgagatctgatggttttataggtagcttcccccttcgctgagcattcattcttctccttgatgctgccgtgtgaaaaaagacacgtttgctttcccttctgccatgattgtaagtttcctgaggcctccccagtcatgctgaactgtgagtcaataaaacctctttcctttataaattgcccagtcttggacatgtctttattagcagcgtgagaacagactaatacaatgagctaaaaaggaaatatttaaataagaatttccatgcctttaggaaaaatatagtaaaatgcacattgaaaaattttttcaaagtgaacatactttactggataatatggaaaactgactcaattctgatatagccaacaataattaagtagttctcatgttaagtgttcttaccacaataaaattttaaaataaataaatagatgtaccatagtaaatctaaacatggatatatattctcccatagctaaatatatgcaaaaaataaaaacttgttaattaccctaaaccttgtgctacttgtaaaaacagatacatagaactcagtgttttaaaaacaacatctatcacctctttcagatgaaacatctccaaagcctatactaaaaggaacttactatttcaagcttaaaagaggggaccatgaagtataggaaagattggaaaataaagattagtcatgatacactaaaaagattacagaatgattcagattgccttttgagatgattagaaatgcaaagaaaatggtaacgagtgagtcacttaacctcttcaggtttcaatatgcccaaatctaaagtgaaagagctagattagataatttccaagccttcttgttgcactgtcagtatatgtgtttaggactttttgacacgtttgtagagaatgttacagtttttaagtgcttttgtactctaagtgtttggggcatgaaatggttaacaagaaagcctggccagctgcagctggtggggggtgggggttgatggtggtgaagggagaagcacagtccacatttccatgcaacaggggtgcttcttagctgaacacaatctggaagctaattatttctgtaaaagtagggagagtgatactgtatataaatcagcttaccacagtgcttggatagcacggaggcaacagtagtggaatggacaaagtataaaaggaagtcataaaataatcagagagagagagagagacagagagtcagagagagaacgagagagagagatgagagagagagagagagagagagagagagagatacagagagactgagagagacagagaaagagacaatgaaagagagacaaagctcttcttgaaggtaataaataataggagaggcatcccaatgcaaaacctgctaatttcctataactgatattaagagtcaggaagcaaggaagcagctggctgtcctagcacagagcagaaaggaagaaggacagaagagggtgcaaagaatgggatttgcagttcctcaagaacagaaaatcagacaggtctgtagcagagaaggctcctttaggcctggttgagtctttagcaggaggcataacagatacggatgagagcgtttgacctttaggatattcatagtgtgctgtacagcattatgttaagagaattcttttaacaattatgttggtctcattccatactggaggttcaatcattttccataagatttctcacatttataatgttctgcattaatgaaatcctccagctattgttaaagtggatgatattgtgtgggtggccctgaactttcaatgtttccagagaaggcaaatatgagagcagcaacctttaggtcacattactataaccagggttcttcctgcactttatactttcccatacctgcataatgacccaaatatgcaaggagggcactattacccccattttccaaataagggaaactgaggcacggagctgttgacttatttgtccacagtcacaacgttgcaagcagtagagccaaccaagattggctagggtttctgacatctagtccatcaataacgctttgctcaagaaatgtgtattttatgtctaactatgcattagatgttgtgctttagtgtaggggacacaaaggttaattctgtacactcgttactcttaagaaactctcagtcttttagattagagaagataaacaagcaaacagccactttccacactattttttgagggctatgatacatgtaagcacagagcagtattttcagccaggaacattttcacgccagggtgatttggcaatgtctgaagacattcgtggttgtcacaactgtgcaggagaggaggggttgctactggcatagagtgggtataggccagagatgctgctaaacattctgcaacgaacaggacagctcttcacaataaataattatccagccccaaatgtcaaaagtactcagattgagaaacactggcataaacattacgggaacatgggggaagggacctcatgctgcctagtctgaaaatagaggaggacttaccagggaaggtttctagaagcaggtgatgcttgaggtagtcatgaaaagatgagtagacatcatcttgagcctccaagagtaggaaccaacaaagcatgacaaacataaaataatgtgttgtttgtgatttgtaatttgatccaagctggagctgagactggaaagaaagggagaggccagctcatgggaagacttgtgtgtcatgtagagattctagacctcagatgagggggaatcatggatgggttttaaagaggggtgaggccggatttgcaaacttgatagctttctgtattagcattaagcagaggatctcaaacttcatatggatgcagataaaaaacacaagtttctgacctttcaacacacacacacacacacacacacacacacacacacacacacacacactatcctgatgcagtaatgtagtaggtctggggtggagcccagaaacctgtattttttgcaagcaccctgtgtgattctgaggcaggtagcacaaatcctccctggtgtacaggacatatttgacagtggtaagattgtaaccttaccaaaaagaaaataagaaaatttggagaagagaggaatatacagtgttacgtttttctctgcttatgagaactgtgtgcttataaaggaatccactgcactgatggaggtcacacagcagcacagcagcttctttctggattccgtgggctgggaagggaggtgctctaaggaaatgcacagtccatgtgatcagagcacaccctcttggcagcctcaggggagcccagttgcttctacaaaacccgtgaaagttctctgtccaaaagccttgttggtcccgcggtacatgcttcctgttcccagagagattcacccttgggctttcctatcagtcttccctaaagttggctgctcctgtgtcctgtcacataaaactgtgaaccgaggtctccgacttacgtcatgtcagtcacagcagggtgaggctccacaagtgtgagttctggcccctgctgctttcctttcaaatgcagtttacagtttattatggtattggacaccccatgctccttactgcattggctttgggtaagaaggagtgaaaattagtgtgcgaacctgaaaacctagaatttctgattgggactgaagaaaacctttgtgctgcagtcagtccccgagccagacgcctgtgactctcttcacatggaaatagatgactatccacagtaaaaggtcagtggctttgctgacagatgttgcatcagggaatatttttttaaaaaagaggcttcctacagctgttctggtagcttgtgtagtagtgttagctatttccccaagttgtcttgtctcagttctctgatattctgagcccagataggatttttttttctaagaaaagaataatgaagtatctacagatggaatcctgagatctgacaatagagcactcagaagttgggtgacttgcccaagccacaaagaggaaaagaatcaaactcaagtttctcgactttcagttaatggctaattttaattgcataatattggagagtcagaaatgttcattttattgtggaagcgatccaaaacctcatgctataacctagattctagaaaaaggatgatcaagccctattagcgctgtaaaaataaggtaatcaagccctatcagtgctgtaaagaaagttttgcaaactaagttaaacttagaaaataaatagcaagaaataaatcagggaagcaaggtttccctgagactactgagtccatcatactggaagtcatccaaagttatcaacagcagattcattaactg

SEQ ID NO: 7562 - DNA, 6000 bp, Homo sapiens
aataaaacttttaacctcttgtctgttttcaactgttttcctagtctttcatggaaacctccatagagacacataacaaattggtatattaatctcagcattatcctcaagataagttatacatcatgtgaatacacatcatatgatgtactctatcagctaaaatgtatctatcagctaaagtgtatctctttttaaaattattatgggtacataaagtgtatctcttaatggacttacaatggtaaattatttaccttttcaaattattttgaagggaatctagaattattatttccagtcccttcctcatttccctaaacaacaaaaacatactctttgtaacatttgggtcttggttcttaattttctcttaaataatggcttgactatggctatccctggtagatttaaatgacaatttacagtactgttttttatttttgtttttgttttgttttgagacggagtttccctctttttccccaggctggaggacaatggcgcactgcaacctccacctcccaggttcaagcgattctcctgcctcagccccccgagtagctgggattacaggcgcccgccaccaaacctggcttattttttgtatttttagtagagacggggtttcaccatgttggccaggctggtctcgaactcctgacctcaagtgatccgcctgccttagcctcccaaaatgctgggattacaggcatgaaccaccgcacccagccttgtttttgtttttgtttttgtttgagatggagtctcactctgttgcccagggtagagtgcaatggcatgatctcagctcactgcaacctccgcctcccaggttcaagcggatcctcctgcctcagcccccactagtagctgagattacaggcatgtgccaccgtgcctggctacttttgttttttgggggggttttttgtttttttggtttttttattttgagacggagtctagcttagctgcccaggctggagtggagtggtgcgatctaggctcactgcaaccaccatctcccgggttcaagcgattgtcccatctcagcctcccaagtagctgagattacagacacctgccaccatgcccagctaattttttttttttttttgagacggagtcttgctgagctgcccaggctggagtggagtggtgcgatctgggctcactgcaaccaccatctcctgggttcaagtgattctcccatctcagcctcttgagtagctgggattgcaggcactctccatcatgcccggctaatttttgtattttagtagagatggagtttcaccatgttggccaggctggtcttgaactcctgacctcaggtgatccacctgcctcggcctcccaaagtgctaggattacaggtgtgaaccaccgaggctggtctaatttttgtctttttggtagagacagggtttcgccatgttggccaggctggtcttgaactcctgacctcaggtgatccacctgcctcggcctcccaaagtgctaggattacaggcgtgaaccaccatggctggcctaatttttgtctttttggtagagacagggtttcaccatgttggccaggctgttttgtttttttgcttttttgtttgtttttttttttgagacggagtctcactctgtcgcccaggctggagtgcaatggcgtggtctcagctcactgcaacctccacttcctgggttcaagcgattcttcggcctcagcctcccgagtagctgggattacaggcgtgtgccaccacacccagctaatttttgtatttttagtagagacagggtttcactgtgttggccaggctggtctcgaactcctgacctcgtgatctgcccacctcagcctcccctggtgctgggatcacaggtgtgagccactgcacctggccagagtactgttaaagtgaaaacattgatttatgagaaggaaagttcttataaatatgcagttttttgttttttttttttttgagacagagtttcactctcgttgcccaggctggagtgcaatggcatgatctcggctcactgcaacctctgcctcccaggttcaagcgattctcctgcctcagcctcactagtagtggggattctgtgcatgtgccaccacgcctggctaattttgtatttttagtagagacgggttttctccatattggtcaggctggtctcgaactcccgacctcaggtgatccgcccgcctcggcctcccaaagtgctgggattacaggcatgagccactgctcccggccacataaatttgcagttttcaaagtcaacctttttgtgcatatatttatatacacaaaaatacatatatttaattatatatatttaatatattaaatatttaaaatattttatatatttgttatattcatgtcatttatttctagtctaaatggatgagctatttgcattcccacctgtaatatataaggaaagattactagtctgcctccctaatataagtctgcttaaaagtcagggccaggagcggtggctcagtgagaggctagtctgaaggtaatgagttttctcgattgttcacagcatcttttatgtctgtcacaggtcttctagtctgatcagtgcagtattcacatttattatatatgtctgttcaggccttttgtacctccttcagtattcattaaagaatcttttttttatttttttatttttatttttatttatttatttatttttttgaggcagggtctctgtcaccgaggctggagtacagtgcagccctgagcttcctgggctctcactgtagcctcctgagtagcagggactacaggcacatgccaccattctcagctcatttttgtattttttgtagagacagggtttcaccatgtttcccaggatggtattgaactcctgggctcaagccatcctcccatcttggcctcccaaagtgctgggattacaagcgtgagccaccacacatggcctagaggacctttttaacaacttcacccctcactgatctctcttttctccctccaattccttcggtatatatcttctgtaccaaaaactttaatattgaattgtaaattattttgttcacagatcagttcgtgtgtgtgtgtgcgcacacatgtgtgcgcatctgcctatgttttgaatccaaatccccataaatgattttaagttccttgtgggcagtttggttttttttttttttggcttttttcccagcaaaaggaatcaattaagtatttggtgactgatagataaaaaggattaaagaaaagaatcagccagaagttagggatatgttagcatctgataaaatataatagcaaaaactcttctattcctgctttttgttataaaaagcagcaaggaattgttctagaaaagaagtgaaggccagtcgcggtggctcacacctgtaatcccagcactttgggaggccgaggaagggggatcacgaggtcaggagttcaagaccagcctggcaaagatggtgaaaccccatctctactaaaaatacaaaaaaaaatagccaggcatggtgacaagcgcctgtaatcccagctacttgggaggctgaggcaggagaatcacttgaaccctggaggtagaggttgcagtgagccgagatcaggccattgcactccagcctgggggacagagtgagactctgtctcaaaaaaaaaaaagtgaagtgaagtgaatttgagtcagtgtacttaataggacaagcattaggcagtgttgcaagtacatatcggaatctctttggctggctctaagaaagagtttgaacttatttacctccttagccctatgtaacaggtaagaaactaaaaggtacagaaaatagagatgtttgatttttctaagttgccccaagctaccgtttttaaaaacgcctgcaagcatgtctaaaacaggagcctgttagctacagttgccaaaccggtttaacagcactgcctccatgtattctgggtaagaaggagctccgagtacataaatttatcaaagatcactatcccaatcatctcagaacaagctgttactaatgtactggagtttctgtgcaaactgtctaccataaaccatgaaaggattcaaagttcatagttccttctttgttcctttgttaatcactgacttctgactagtgggaggtgcctcccaagtttgctaatgcattctttttggataaggatgacgcacagattgtcctaataaggacttagattgagaaagaccgccccctctgagaagaggggacaagtcagagagagggcgggcagtttcttttttaactagggatgacacaagcataagtcatttccttattaattggttcaaaccagttcttacaggaactagtggtgataaatgtgggacttctgagaagtcattcattttattctttgtgccataccagagtacagtatcagctgagctgaccttactctgaggactaactcttttgctggaagcggtttctgatttacagctcttggtttctcccagacatgttggtgggagagattttggtttttaaggggttgttagatggagtaaattttctttttttttttttttttttttaactaaaaaggggtcacagaatttcagcagttctctgatttttatattttattcctcttcctatccaatccctgccttttgagtccaggtggtaagtacattttctttaacgtttttcctgcttttcttcccaaatgtgtctttttctttgggctactgtaccctgcttccagtgctgtccccggcataggtccatctctgcagaagccatttcaggagtacctggaggctcaacggcagaagcttcaccacaaaagcgaaatgggcacaccacaggtaagactttaatccggtttcttctcccctctgggaagtttcgggctgaaattacattcacagctctcactcacatttttaggcaaataagtgaagttggtttgccagtgttccttgacagaagttgagcgtctgtgtatgctctactgggaaatttgtctttgtcttagactagaaagtgtaacttctgtacatcttctcctaaaaacaagggtagagccaatggaaagtaatggttctgttacatagaatgagttgttgccttgatcttaaatgatgtattggtagatatacttcccaagtggattaaaaagttaaaacttacagcataacaaagtattagacttactgaggtgacttgaatatctccttttgattttcactctatttttcttttcacccatgggaaaatgataattttttaataaaccaaggctcttaccatagctgaactttaaaacttagactgtcttttctgtaaacgattctgaggcaaagggaaatgactagaagaggatgagtaaacaataacctgaaatgggaaactcgagggaagcacaggttttttttgttttgttttgtttggttcgttttttgttctttggggtttttttgagacagaatttcgctctcgttgcccaagttggagtgcaatggcgcgatcttggctcactgcaacctccgcctcccgggttcaagcgattctcctgcctcagcctcccaagtagctgtgattccaggcacgtgccaccacaccagctaattttttgtattttaatagaaacagggtttcaccgtgttagccaggctggtctcaaactgacctcagatgatccgcccgccttggcctcccaaagtgctgggattacagatgtgagccaccgcgcccggccagagcactgttttttttaatggccttgcactcttcttatggacctttgctgccctcagttgaccaaacatgacatcagaaacagatacatttgtgtgttttaaaaacagctcctaatactggaacaaaaatatttaactgtcttgacaatactcatgagtatctgcatggcgacttcagagttgagtttaatcaaagagtttattcttaggtcctagtagaagagctaacct

SEQ ID NO: 7563 - DNA, 6000 bp, Homo sapiens
cacacaaattaaagtagtaaagccaagtgaatgttagaggtatgactcaagagcttgtgctcttgcctcaccataataatagctgttgattattgaaagctctctatatgccagacaatgcactaagtcttctacacacgttatttaagccttacaacaaatttatagggtattctctccattttataggtcataaaaatgaagcctaaggctgggggccatgcctcatgtctgtaatcccaacactttgggaggctgaagtaggaggatggtttgagtccagctgtttgagaccagcctaggcaacatagtgagaccctgcctctacaaaaaaatttaaaaaattaggctaggcattttggctcatgcctgtaatctcaaaactttaggaggctgaggtggggggatcacttgagaccagggaggagttcgagaccagcctgggcaacacagtgagaccctgtctctacaaaaaaataaaaaaattagctcggtatggtggtgcacacttgcggtcccagctactcgggaggctgagatgagaggattggttgagcctaggaggatgaagccacagtgagccatgattacatcactgcactccagcctgggcaacagagcaagaacctatctcaaaaaaaaaaaaaatacataaataaaataattttttgtcttgtttttatcatctttagctaaaaaaaaaaaattaataaaaaaaaattagccaggggtggtggcacacgcctatgatcccagctattcagaaggctgaggtgggaagatcgcttaagcccaggaggtcaaggctgcagtgggccgtgatcacgccactgcattccagcctgggcagagaccctgtctcaaaaaaaacaaaaacaaaaaccaaacaaggcctaatcaaatcagggctacatggaataaatgacttaactatataaggtacaaaattatgctctctacaccatgctatggacacctccctcaaggagtggatgctcacaggccctggggagttaatagagaatgtggcacttaaaatgaatagggcaagggatcagaccatgcactatcactgtatcctgtaaaatggcaggtttacttttttttattttattttttaaagtgacagggtctccctctgtcagccaggctggagtgaggtggtaaaattatagctcactgtaaccttaaactcttgggttcaagtgatcctcctgcctaagccttctggctgagggaggctacaagtatttgctaccacacccagataatttttttttttttttttttacttctgtagagacaggatcttgttatgttgcccatgctggtcttgaactggcctcaagcaatactcctgcctcagcctctcaaaatgctgggattacaggcataagccaccaccctcagtgaactattaacccattaatagagaggcaggatggtagaagaaacatgggaactggattcatacaactgattttgcttcccatctcctccacttactagctgtatgacctgcacgagaacaccaaccaccttctgttctaatactactatcttacagggcagtcacatggagaaaacagcatcattaaatgagaagttcttagcacaaggtctagcaccctggagacccttattattgagaagctagacagccaagatgtcagagtacaaaaggagtcttttggacacttgactgatggaggtagacaaaggggacttataaactaatcctgattggaggaaaggtcacagtattccagtagctaaatacaggtaaggaaggactaccactaggggttaccttggttgatcagctcctgttgaatttcctccagcacagccatgtctatcagctcctccagctggaagagaaaggagcggcatcagaagtttgaagtattaatcaccaaccaagccccacagtgattcatacttggaggctggcttgaagaacccagatttattggacaaaatcagtccagtcctcctgcagaatatgctgacagtggggtaatgctgtcatgctgacaagccatcaacaaatgatccaactatccagtgacaaaataatggtacccaattttggagagacgatatagggtagcagttaggtacatattcttccaaggctacgtaaccacatgaaaagttcctaatctctgcaaatctcagttttggcctctgtaaagtgggaataaaatctatctaagagggttactgtgagtactagttgtggtgatataaggcaaacattggtgtactgcaggacacacaaaagccactgaataatgcatcattattacacagggtgttgatggtttcaaacagttgcccacattttcttacacagtccttacaatgctgaaaacattatcttctcattttataaatgtgaaaactaaacctcaaagaggcaaactgaagttaacagtcaatagccaaaccaggatttgaattctggaactcctgacttcgaatccagtgttcttcctgatacactataaatggttttcccttccacacatggctgccaacgttggctgagattagaatcggaaagtttctggagacctttttagaaagagattcctgacgtgggcagatcactagaggtcaggcgttcaagaccagcctggccaacatggtgaaaccccatccctgctaaaacagaaacaaaattagccgggcatggtggcacacatctgtaatcccagctacttgggaggctgagacaggagaatcgtttgaacccaggaggtggaggttgcagtgagccgagatcttgccactgcactccagcctgggcgacagagcaagacagaaaaaaaaaaagagcgagagagagggagagaaagagattcctagcctatgcctactgaatcataatttccaagggtggaggcaagaaatgaaatttctttctttttagtttcataaatgatgatgttgcagtgatgagcaggtctacggtctggtatttcagaccatttcatctagacaagtctaacattaagtgtagaaaagcctgggttaaaggctgttgaattctaaatggggttaggggaatggtgggtttagaggactcaagtaaacaaataaaagaggacacgagccgttcttggtggtgcagtccccctccctgaaaacacatagcccagcctgacctgagccaagtcttctggacaattctccactgactgcaaagcattccactcttcttccatcacctcttgaactagaaagctgttctgagaattccctggcccactgcttccagcctggcggtacctgtttaggagcctgtcccggctgtttctcattctctccaggcatctctgggaaaaaagagcaagattgggggggaaaaaaaaagcatttctatttttaaaaaacactcttacattagttgagaaaacattaaagaaagtttatagacacaaaatttcaatgataatactaactagtgttacttttgcatattcctctgtagagatacataaaattacaatgctttgtacacgtatttacaaagaaccatattttttattctagcttgccagtttccttaatggttgtgtgcataatatctcagcatccaatgtcctattacagaacatttatattccttccaaattcttgctactctagatatggctgggtaacggccttcctgcacagcagcgtttctgaactcagggaggttttgtcccccaaggaacatttggcaatgcttggagacatttctggttgtcacaattctagttataggactattagcatctagtgggtggaggcccgagacgtggcttaaacaaccctccacaacatataaatatctccctcaaaatgtccattgtcaaggctgagaaactctgctgtatctgctatctttcttgcgtcgggttactttcttggacattacttactaataaccacactgtgttcagaagaggccagaactgaggtggagccctcttctaagcctcattttactactctctagaatagaaatcatctctatctcacaagacgaacgtagacaaagtgcctctctcggtggccacctccgcagcaacagtaggtagtgttattgcagaggtgcaaacggtgatgtcctgaccacaatttaaattcaaaacaaaatcgaatccaaaaacaaggctttctaggacttgaccgacccgggctaatcccacactctacagtcagcaggcctgggtttgaccagaccaggcgcgctgcggcacctgctccacggagcagggctaaggcgaaggcagggaagacggcggtcaccgggacgatctagggtagaccactgcacaaaccccatacccacctgccggaaagcctctttccaaggcggcgagcccaccagtttgtacagggagcggcgcggagacctcaacgactccgccatctcctcttcgcgggagacaaagccacaagacccgttccctggaggcgcgcacagacccctgggaggtgtactttccgggtgcagaccgcgaatggatcgcagcgtattctgggaagtgttgttttatcgaccggccccacgtggagacagatttaggcatccaagcgaaatgcgtgaggccagcccgacctgcactgagggaggtaagtcttgagggaaagttctggatgcctgggtttacccagatggaggtgtccaataggcaattagatacacaagtctcaggctctccccaggtgctagatttccagcagcaccaccattatgttgacttctcgtcccgcccccttgggcttcagaaataatggtgattggctttcccttggtgacgcccctgcttggtgggctggcctcgccttcgccccccgacctggcacgagcctctcgagcttccgggccgtctgctcggtgattggccgaaacagtgagtggacggccgcggattggctgtgctcagcggcgggctgagcaactggagtgaggggagcagttgggccaagatggcggccgccgagggaccggtgggcgacggcgagctgtggcagacctggcttcctaaccacgtcgtgttcttgcggctccgggagggactgaaaaaccagagtccaaccgaagctgagaaaccagcttcttcgtcgttgccttcgtcgccgccgccgcagttgctgacgagaaacgtggtctttggcctcggcggagagcttttcctgtgggacggagaagacagctccttcttagtcgttcgccttcggggccccagcggcggcggcgaagagcccgccctgtcccagtaccaggtaatgccaggccgatcttggaagtgaccctcaccgggatcggaaccagtcttttttgttccttgctcctcttggctgtttttcatcttgtggcaggcgttccagcggattgactccgacgctgccatacgcggtcgcggggactcaggctctctcgatgcttacggcctggaggcctgggaggaaggaaagggtcattgaatattcaataaaaatactagtgacggatgagtgctctggagaaaaacaaagcgggctaaaggggttgagaacgagtgggcggagttgctatttttagtttcgtcgagagaaacctgtttcctgatgtgacgcttataataggttagatcgtaactttctcttgcgttgtgcacagcaagtcaggttgcaggtttcaaagcaccacgcttcatgcttgacatggaggaggaagtctctgttaattcttacccccgtaacgcccgctttagaaaataaagccatacccaaaatggggatttttgtttttgattagccgacagcatgtgaaaatgggtgtgatccagaaagtattacacacttgccgtggtcaaatattggtttatggaaatgtttatttgtaatacacagattctcttaaagatgaaaaagagcttggtactcattctaaggtatgacatctgttgtgtgcccggtccaattcttgttaccgagaagtgatttaattttaataag

SEQ ID NO: 7564 - DNA, 6000 bp, Homo sapiens
gcatgctctctctctctatatatattttttgagacggagtctccctctgttgccaggctggagtgcagtggcgcgatctcagctcactgtaacctccgcctcctgggttcaagtgattctcctgcctcagcctcccgagtagctgggactacaggcgtggaccaccacagccagctaatttttgtatttgtaggagagacggggtttcaacatgttggccaagatggttttgatctcttgacctcatgatctgcccgcctcggcctcccaaagtgctcggattacaggcatgagccaccatgcccggcctatattttttatttgaaaaaattttcaattctggtcccaaatttttatgaacctattgaaaataagggtaagtttattaaacagctatacctataatgttttgcaaataaaatccaggcttcttttgaagaccttgtaacaaatttgcttataatttgactcctatagttgtaatataaaatacaaatacaactaaaagctggccagccgggtgtggtggctcacacctgtaatcccagcactttgggaggccgaggtgggtggatcacttgtcaggagttcgagactagcctggctatcccagcaaaacctcagctctaccaaaaatacaaaaattagcccaacatgtggtgcacactgtagtcccagctactcgagaggctgaggtaagagaattgcttaaactcaggaggcgtaggttgcagtgaactgagattgcgcccctgcactccagcctgggtgacagagtgagactccatctcaaaaagaaaactaaacaaaaaaccccccaccaaacctagaagctaagaaaaaatggtggcattacttgtaactatttgcaattaatattcttaacagagcataaattttagaagaaaagtgcttgggctccaattcttaataaatatgtaaaatggtttacttttactggtaacaaaggtttttgggggagaagatactaaacaaattaagaaatttataaaaaatggccaggtgtggtggcttacgcctgtaatcccagcactttgggaggctgaggcgggcagatcaaaagttcaggagatcaagaccatcctggctaacacagtgaaaccccgtctctactaaaaactaaaaacaaataaaaaaattagctgggcatggtggcgggcgggcgcctgtagtcccagaaagaagggcgtgaacccaggaggcagaacttacagtgagccgagattgcgccactgcactccagcctaggcgatagagcaagactccgtctcaaaaaaaaaaaaaaaaaaatttataaaaaatgtcagtcaatgctacagaaagtagtatattaagacagatactctcattagtgccagtaagaatgtaaataggtaggccaggcatggtggctcacacttgtaatcccaagcactttgggaggccaaggcaggtggatcactagaggtcaggagtttgagaccagcctggctaacatggtgaaacctcatctctactaaaaatacaaaaattagccaggtgtggtggcatgcgcttgtaaacccagctacttggcaggctgacgcaggagaatcacttgaacccgggtggtggaggttgcagtgagccgagatcacgccacggcactccagcctgggcaacagagcgagactatctcagaaaaaaaaaaaaaaaaaaagagtaagttggcattttgtttttgggaatgtgttttgcaatgcaaagcctaaaaacagccaattttaaaaattaatactcatgaaataatataaaatacataaagatgttctctgctctttgcaataaactaggaaaaaaccctctgaatgtacaaacaataagggatgattaaggtttatcccgatgaagccatttaacaggctatacatttagatctaattaatataggtagatgtttaaagtttcatgaggacactgctcttatctagctttccacttttgtatccctagggcatagaataaggcctagcacataaatgtttaataagtatttggtaaataaatgaaaaagtaatgtcgagtaaaaacgatataaaattttataaaatgtgatttctgtgaagaagctgtatagaaaaagaattggaaagacacacaaacaaatgggaaaagaggtcatgggcaatttaaaaaaatagctttattgaggtatactttgacatgccataaaattcacccattgtatgtgtacaattcaattacttcatttatacaactgttcaattatcaccatattccagcttaatggtcaatatttgctttgtcatttgatcttttctctatggtaagcaaaaatctattatttgaaaggttccttcactgaaagctgggtggagttgaactctaaaattacctacaaaattactttctatctagtcatctatgtctaattcttcaatttgacacatgcatgttactagcacaagctgcattttaaaggcagcaggaaggtcttttactatcattagaagttaactttaaggattgagcaggcacgatacagcatagattgtttcgtgtgctatatagtaaggtcaatattcttgctccttctacaaataaaaaaaagttccacagaataacaagtacaggtggagttcccaacggaaatgcaggtactgaatacaaccaactgcaactgtttctctgctcctcaatcctgctggcgtagtacgcgagctgccgacgtcccccaacccaccaggtaagccggccgctcctgtccctaggctgtgaggggttcagaggtaagaccttcggtgtattcacttagctccctacggaaaacttcgagaagaaggcgactgagatcggttagcacttaaatccctttcaaagccccggctcccatcgcccctcctatggcctcctacctgcagagaagcaaagcaggtacacccagtgccttaggcgggccaagcctagcactgtgggagcaaaaaacatggcttcatcgtcagggtgcgctatgaccagcagggtccggctttcggctcccagccgtcctccctgctcccgactcttcattcgttctgaggagtcccaaacccagaggaagccccatgccaagaccgccaacgccacacacaggagccacattgcttccatgatgggtaagcagcactgagcctgcgcagtaggaaaggctgcctctgaccctgactccggctggaaaacttcaccggggaatgttgggttccgctgttaagtccctcccgccgacatgctccggaagcttgaggttttaacgttaagggttctcttgtgttttaacacagaagtctccatgccgtccagtttcctaccctagtcctaccacactgtacaatcggtttaaaaggaagcgtcttatatataagctcccacttataggaagagttccttcctcttcattttcgaattcatttcttaaaactcgggcctttctcgtaattatagggttagacagcccgttatccgtatgacagttttccaaaatagccagttacaccaactttgttattccttctcacttttggatggctttctttacctttttttttttttttgagaggctctgtcgcccaggctggagtgcagtggagcgatctcggctcactgcaacctctgtctcccgggttcaagcgactcttctgcctcagcctcccgagtagctgggactataggcgcgcgccaccacgcccagctaatttttgtatttttagtagagagggggtttcaccatgttaactaggctggtctcgaactcctgacttcgtgatccgctcgcctcggcctcccaaagtgctgggattacaggcctgagccaccgcgcccggccctttcttttttttttttgaaacggtctggctccgtcgcccaggctggagtgcagtggcgcgacctaggttcgctgctacctcagcctcccgcgttcaagcaattctcccacttcggtctccccagtagctgggattactggcgcgcgccaccacgcccgcttaatttttgtatttttagtagtgacggggtttctccatgttcgtcaggctggtctcgaactcctgaccttaagtgatggcccgcctcggcctccctaagtgctgggattacaagcgtgacccactgcgtccggtcgggcctggcttttctaaaggaacgtatgcgtgcggttacgaggaaccgtcgtttccccagcagggtgaggctgagcgtgcacttaacagtcgcgagggccacaggctcctcttgcaagtaacttaaggttaaggagcaacatcgtggacaaatcggcctcgcccagcatttcagtgagggcttggtgcgaattccagccagagccctagaaagtatcttgggcaggtcgaaatgcacccctccagctcccagccacgaggggaccggcttccctgtacgcagctccggccagaggaggccgccgccgccccaccacgccgcggaggggtttgcagggtcccttccacggcctggagtttttccttttcccacgcctgaggaaggcctcgggcgcgcggaacagacgggcaggcggggggcgcacaagcccagggcacgatggcagcagcgctggatccggctgggcgctgctcggccccgtatccgtccgagaggaccgccgctgccaggcctagaggagacatgaagagaccgggcgcagcgcgacccgggaagctccgccgaggtaggagaggcgcccggccagcggagggagttggtctcccaactctccggaaggaggaggagccggcgctggagccgccttagccgcggctccgcgggctggggggagggagaggggttgagtcaagatggcggccaaggtggcgaagcagcagccgcggcggcggcggcggctggagtgagcgtccgactcgccgcgccgaacgaggtcccggtgtagggccgcgcgccgtggccgcgtcccactcctcaggccggggcgcacgtcggctcccacgcttagccagctcccggtgagtaggccctggcgcctgcaaccccggcctccgggctcctgctagtccgggggcttccgagggctcccggggcagcagccgctgggacggtttctccgccgggcggggggtgtcgcaggcctgggcaggtcgggacccgtcctggccgcctggcctcttccactcggcagcccaggagagagccgggcgcggcggggagctcgggctgggctagcggaggcttatggagtttggaggaagaatgggctgtggccgggccggggctggccccgaggtgtcctgtgcggaggggcgtgcggagcctacagggcctgcgagggagagcgggcagccggtgccccgggtggggccggcgcaggtggcgggcctgggctcactgaggcggagttggtggccgacttggaagtgtagaaggggctgcggaggttgacagccatggacaagtgcgtgcagagtaaattagttcacctttctaacagaccgcttcagggtgtaatggcgaaggctgggtactggtggagatggcaaagatccgaacactataccttctgccgtttattgttggtgttttcttaagcgaagtccgtaagtgcacccctttttggggagagaggaatttgagaaactgtagttgtgaaatcagcctttatggagaggagactgaattcttcaaattaactggatcaggaatagtcatgtattaaaggaatggatgggaataagtgatatggacgaaaactatttgctcaggaagtgtcagttttctttatgtgatgttgcatgctgcggtgcctcttccacagagttaaccttggagagtagtagtataggtaattctaatctttgggattagtatgtaaacctgcatcagatttgcttctctaattatatcctaattatattgaaatttacattccttgtgtgcaccctggtgaggcagtgatggaaggctgaacatggcactgtgcaaggagcaacaggc

SEQ ID NO: 7565 - DNA, 6000 bp, Homo sapiens
agctcaagcaatcctccagcctcagcctctcctggctgggattacaggtgtaagccacagagcctggctaattttttttttattttttgtaaagacggggtcttgctatgttgcccaggctgctcttgaagtcctcggctcaagggatcctcccacctggactcccaagatgctcggaatacaggcatgggccactgtgtctggccttgaatgttttacatgatgacagatggcatgagacttcctgggctgattaaatgtagtgaccagtcagccatagtaagtgttggcatgggtttgttgtcatgagttcaataaaattcaccctgatttttctgtcttttaaatgagatcaggtttttatttttaatttctttttttgagatggagtcttgctccgttgccaggctggagtgcggtggcactatcttggctcactgcaacctctgcctctctgattcaagcgatcctcctgcctcagccttcttagtagctgggattacaggcacacgccaccatgcctggctaatttttgtatgtttagtagagacggggtttcaccatgttgatcaggctggtcttgaactcctgacctcatgatccacccgccttggcctcccaaagggctgggattacaggtgtgagccaccatgcctggccttttttttgggatggagtctccctctgttgcctaggctggagtgcaatggcttcatctcggctcactgcaacctccgcctcccaggttcaagcaattctctgcctcagccttctcagtagctgggattacaggcgcctgccaccatgttcagatgatttttttttaatttttaatagagacgtggtttcaccatcttggccaggctggtcttgaactcctgaccttgtgatcaccccccgccttggcctcacaaagtgctgggattacaggtgcaagccactgtgcctggctgagatcaagtttttaattcacgatgtacccacagtagaatggaaaagtgaagacgacagaaggcatcggtgatgtgtcaaaatctggaagaattaaattgattatccagattaaacaccagcagaaactttttttctttttttgagacggagtctcactctgtcacctaggttggagtgcagtggtgcgatctcgtctcgctgcaagcttcgcctcgatctcggctcactgcaagctccgcctcccggattcacaccattctcctatctcagcctcccaaatggctgggattacgggtgcctgccaccatgcccggctaattttttgtatttgtagtagagaccgggtttcactgtgttggccaggatggtcttgatctcctgacctcgtgatctgctcgccccggcctcccaaagtgtttgtattacaggcgtgagccactgcacctggctgaacctttcaaaattatctgttactgcctcttgaagccaattagagaccagtaactaatgaaagaatgaagctttatccctgaaactttgaacttataatatcttgaatttctatagcactttaaaatttttcacggaactcttttaatcccgtcaataaatttcaattgaataaataaactaatgaaattatgttatttttattactatttttatttttttttttgagactaagtctccctctgtcgcccaggctggagtgcagtggcacgattacaggcatgagccaccacaccgcaccaggcctattattattattatgcttattgagaacagtttcaatctgtggcctaggctggagtgcactggcaggatcttggctcactgcaacctccacctcccaggttcaagcaattctcctgcctcagcctcccaaatagctgggattacaggcatgcgccaccatgcccggctaatttttttgtattattttgtattttgtattattagtagagacagactttggccatgttggctaggctgttctcgaactcctgaccttaagtgatccacccacctcagcctcccaaagggctgggattataggcgtgagccacttattatcgacatctaatataggttaaactgacactgagaaggagttagattggaccatgttgacacttaagtgtagaaagtgcctggagccgggacacctcacttctacatactaaaccagtactttgtattgaactacccttccttcctccctccctcccttccttccttcttttcctttctttctctctctctctttcttttagataatctccctaacatggtattcctctttttggtgaataaaattctgcagcagaaaatctcaggctgtatctaaattttaaaatacaatatctactgtaaactgcaggtattgatccaatctgtgcttttgtaaaataagggttgcttcattatacagaaaaactttgaactcagaaattccaggactgctccatttgctttatttgcataaccttcaagggcagagagtcagggcaactctgtgaaccccaagtgatcagtcaggtgatggcaatacttagcctgcaaatctactaaaacaagtcagaaagtttccatttaggctgtacacaagaagaaatatttaactaaagtttcaatagctctttttccccaacaaaccaatttgttagtttagattttaggtttagagtcctctgggccgggcacagtggctcatgcctgtaatcgtaacactttgggaggccaacgtgggtggattgcctgagctcaagttcgagaccagcctgggcaacatagtgaaactctgtctctactaaaatacaaaaaaattagctgggtggtgtggcatacacctgtagtcccagctacttgggaggctgaggcagaagaattgcttgaacccaggaggcgggggttgcagtgagccgagattgtgccactgcactccagccttggcgacagagcgagacactgtctcaaaaaaaaaaaaaaaaaaaaaaaaaaaaaaagagtcctttggcgcctccttcaaagcttagtcacttacaatttgcccattgtacccattttcctatgtatactgttcctatatgtaccttgaatacttttcttgtttaatgacatggctttctttttttttttcagactccgtcttgctcttattgcccagactggagtgcgatgacacgatcttggctcactgcaacctccacttcccggattgaagcgattctcctgcctcagcctccccagtagctgggattacaggcatgtgtcaccacacccggctaattttttgtatttttagtagaaatggggtttcaccattttggccaggctggtctcgacctcctgatctcaagtacctgcctcagcctcccaaaggacattgctctcttatcttctagagtagaacttttccaatggtgtctctcatctgcattttcagatgacaaatgataacttctcattccattctgtaaccagaagttagtaaagtttatttataagctttataaagttaaaaatttcctagcaacacttagtacagacttttttttttatttgtatagagtttccatgataaagtgtagttgggtatctggcattggtacttagggcataataattaatgaaaaaattttgagcccctatgattatagtgaccaatcatattttcggaactctaaataagattagcctatcaagcgctagggttgtgttttcatgtttgtttatttgtctgagacagagtcttgctctgccacccaggctggagtgcagtagcatgatctcggctcactgcaacctctgcctcccaggttcaagcgcttctcctgcttcagcctcctgagtagctccgcgaccagccgtgttttcatgtttgtattagcagctccaaatatacacatattaggactccacagatgcttactaagtgaagaacacttagtttgaggatagtaaaggatacagttttttctttttgagacagtctcactctgtcacccaggttggagtgcagtgacgcgatctctgctcactgcaactttcgcttcacgggttccagagattctcctgcttcagcctcccgagtagctgggattacaggagcgcaccaccacacctggctaatttttgtatttttcgtagagacggagttttaccatgttagccaggctggtctcaaactcctgacctgatgatccacctaccttggcctcccaaagtgctgggattacaggcatgagccactgcgcctagccagaaatagttttgaaactaaaaaaatgagaaaaggggaattaactgtgctataggctcgctttgaacgtcatgttacaatgcgccactatctttcttaggatgtaattattgcatctagtatctcaggttaaacttatctttcataagacactcctgataccaatagcctttgaaaatctagtcatggccgggtgtggtggctcatgcctgtaatcccagcactttgggaggccgaggcgggcggacagcgaggtcaggagttcgagaccagcctggccaacacggcgaaaccccgtctctactaaaaatagctgggcgtggtggcgggtgcctgtaatcccagctactcgggaggctgaggcaggagaatcgcttgaacccgggaggcggaggttgcagtgagccgacatcgtgccattgcactccagcctgggcgacaagagcaagactccatctcaaaaaaaaaaaaaaaaaaattaaaaaaaaaagaaaagctagtctttcagtacagggatctggagattttaatttgcgagctgtttaactgctaaaataaaaaaaaaatggcggtttccgcaggggagccgaaagctaccggccggcaggtttaatatccagcggcgcgaggcctgagacagctcagatcaaagggaagactgcgctgaaagaaatctcgcgaggccgacgcattgaccaatattcgcgagatttcgatgccctgtcctcttcctctctctggcaggaccacggtttatctcgcgaattttgggaagttccgttggggaagatggcggcggcctcgagcacccttctcttcttgccgccggggacttcagattgatccttcccgggaagagtagggactgctggtgccctgcgtcccgggatcccgagccaacttgtttcctccgttagtggtggggaagggcttatccttttgtggcggatctagcttctcctcgccttcaggatgaaagctcagggggaaaccgagggtaagtgactgtaggggaaaggagggggcgggacacaactgggggagccagtttgtgagaggaggttcttgcagatgtcccatgggggccactttaggggcatagagtccaggagagggaatgtgtattagttttagattgtcactataccctccttggtgattatagagcttcgactttagggcgatggggactctcaacttctgtgaagatttcatgctcgactagggcacttttggcctaaagtggtgggagacggggcaaatgaatacaaaatcagcttacatctcgttccagaagagacgcctgaataaatttagggctgtgtgtaaacgtactggagactattttggcatcaatgaaatgattaggtccttatatttattagcagccagcagttctctacaatgtcaagtgttcagatcctgtgccattgtgtatttttaaagtgcgctgaatttcgttcttttattgaccgaactacgaactgcagaaaaacaacttttctgtggaactttactaagattttctaaagttccacactccggctaagatgctgccttagcattttgggcatagttctgttgatacagtgaactgtgttattgtttatcttctccagtttcctctgagctttgcagattagagtccttgcctgattatttttgtatagtttctggcacgtaatagtcgctcaaaaagtgttggagcatcgaagtacagatatttatcagcaggtttctcaagaaaaacaaagagtgtgttttggagcagaggtcgaaaggtg

SEQ ID NO: 7566 - DNA, 6000 bp, Homo sapiens
caaggtggctgactgacatcaccagtattttgggaggctgaggtgggaggatctcttcaggtcatgagttcaagaccatcctgggcaacatagtgagacctccatctcaaaaaaaaaaaaaaccaaaaacaaaaacccacaaattatctgggtgttgtggtgcagaccttcagttctggctacttgggaggctgatgcaggagatgagagactggcaaattagcaattacctggtaagagaaagtggccacttaattctcccctttgtcccatcaggcgctattgctatgggtcacaaaagagggagccagggaagggaccaggcctggctgagtcttgcttttggtagctgaggtgagaaatggaaaaggaagctgacaccttttccaggctgtctttcagggtttctcctaattttattcattaatctgacactgttttttttttttgtttgtttgttttttcctgatggagtcttgctctgtcacccaggctggagtgcagtggtgtgatcttggctcactgaaagcttgcctcccgggttaacaccattctcctgcctaagcctcccgagtagcggggactacaggcacccaccacaatgcctggctaatttttgtatttttagtagagacgggctttcactgtgttaaccaggatggtctcgatctcctgacctcatgatccgcctgcctcggcctcccaaagtgctggaattacaggcgtgagccaccgcacccagcctgacactttttttttttaagcatttaatatgtgccaagtattagattccccaaatgctcccagcttctggtttcactttcccttagagtcttctcatcctatctttgccagcaggagagaggagaggagggggagcagggaagtctcctttaccatcagagtttggggcttacctttccgcagttctcccactccagttaaaggaggggatagggtagtatgatatggaagccaaaagtataaagcagagcagctctcagggcctggagggaggggccatacaaaggaaatggcaggctgccctcccttcccagccactgtcggcctcaggatcacagcacttctctttgtgctgggagtatggagagggaaggcatcctccagggtgttagaggggaagctattccaagagttgattcaaattctgcctttcactctcctggggcagtgggaagacagagacaggcaactgtgggggatccaggggtagtccctgagtccctgaggtgcagccaccttgcagacctctttcccatcattccctcccccagatagacagaaagcagggattttgatttggtgactggtatgaggaggagactggtttggagccagctgtgtataagtgtttgggagtgactgtctttcttttcccatccacctgctgcccatagtggggggacccaggcaagcttccagaggaaaatgttccacttagggaaaaggaatgactcagtttccctatggagagaagggaagctgacaccctctgtgccttgtatgctttaccaacgatttcagtgtttctgggtttttgggtctggactcttgccacttttctttatactgttttctagcctagatagataaggaatgttcccttccctttgggtacccagaaccctgttccttgccacctcttaccccactctggcctagctgcttttctgacacttctccagggttgccatatcactctgactggttgacttccaccttcccctcttctctctctagccaaggtaggcaacaagatgaagaaagaggttggggctcaggactaggagggcagagatgggagttcggcccctgtccctgttgagaggaaatgaacagcaaaagaaagtggggtaagtaggacggggctttgagatgggctggagggcttttttttttttttttgagacgaagtttcgctcttgttgcccaggctggagtgcaatggtgcaatctcagcttaccgcaaccttcgcctcctgggttcaagcaattctcctacctccatctcccgagcagctgggattacaggcatgcgccaccatgcccggctaattttgttttttagtagagatggggtttctccatgttggtcaggctggtctcgaactcctaaccccaggtgatctgcctgccttggcttcccaaagtgcagggattagaggtgtgagccaccgcgcccggttggggggctgtttttttgtacacccaaaggaaatgttagcatctctcttcaccctttggaggattatcatggggtcccggtcctgtgcttgcagtgagccagagagcccaagggggtccctaggaagatattgtggtgtggaaggaagaggtgatataggaaaggctgcctctgatgtttacagactagagaggcagggaggtcaaagtggataaactaaaaatggtccttgcccagagctaagggagcctttgtacataggagtccagcctttggggaaaccttgccaagcctagagaaagggctgctggtgggaggtggggagacagagaaggcagatggcctgactacaaaagccgcctccctgtcactgcgaagtggggaggaggcacctccctagaaatctgccaggctccctgccagagggaatggtttgagctcaaaatatcaccatcctcagggcccaaatagtccccagtcctgtgtggaccggacacacagttgacagcttctctccaagagaggcagtttgggctctgaggtatgcgacaggggctccaggatgatccaggaatggctccaggtggagggccttaggctgtggctacaggcacagaatgacagcaggggagcaggcaaaggtagagtgaggggcctgggagaacaggggaagtcagatatgtgagagactgaggagaagcagggtttgtggcagtctcaagtatgagtggagtggccgggggtcatctggaaggtgaggtgaggaatccgtatttccctccttcctgctttagaagctttggcaacatatatttggcagctgttttgtatacacactattccccaatggtgtcacttgggcaggcacaaagggagcctaagagaggggtgtggattgaatgtatggggaggaagaaaggccataggcagtaccaaccgcaggaggacatgatctgaccctccttcagccacactctcccctttggaacagaagttcttgactccctgtttagaccattctccagacacccagggcgctgtaattctctgcccaaatggccacagttttgcttccagagccttaagtgggctgctctcccagatttatcctcccgaggactgattttgccactcaaagggtgagcaaagaatggttgttggaggctaggcacggtggctcatgcctacagtcctagcactctgggaggccaaggtgggtggctgaggtcaggattttgagaccaccctggccgacatggcgaaaccctgtctctactaaaaatacaaaaattagtcggatgtggtggcacacgcctgtaatcccagctacttgggaggctgaggcaggagaattgcttaaacctgggaggcagaggttgcagtgagctgagactgcgccattgcactccagcctgggcaacagagcaagcctccatctcaaaaaaaaaaaaaaaaagaatctttgttgaggaatacagattgagcttgaacttgtgaactaggatattgggccctggctaaaggcctccatgtttatttatttatgtattttggtagagctgagagtctcattatgttgcccaggctggatttgaactcccgagctcaagtgatcctcctttctcagcctcccgagtaatttactcttattcctggttgtaaatgttagggatgaccagtccatagcatggggagggatgagggctatgcataagaaggctcagacattggagcctccagaggtgggtaacatttgctttcgggtttctcactgggggaaggaaaggctatggccaaagccctgggcataatttatatatggatctttgggataagcaagatttaaacaacaacaacaacaacaacaacaagaaacttaaaaaaacaagtttttaatttacaggaaaaaaatggaaggtaatagagggtccccacatattctgcacccaatttctctttttattaacatcttagcattagtattatgcatttgtaacaactaatgaactaatattgatacattattattaattaaagtccaccctttatttagatttccttagtttttacccagtattctttttctcttccatgatcgcattcagaaaaccacattacatttagtcatcaggtctccttagccctcttagttgtgacagtttctcagaattcctttgattttgatcaccttcaccttagtttcctctttactttcccttgtatccaagctgtatggagggcctggagattctgataggactgtaagattcggggacggtgatatgtgtgcaactaaggcacctcggtgtcgcttttagaatatagttgtggaaatgagaatagctctggtagctccaggggcttaggagaacagaaagagcccaggaaaggagaaagaccttattgctgaacgccacacccttgcccccacgccacacccttgccgcacctactaactaggggctaacgaatgaaagggtgtcggaatatgatggagaagcccggtcgacagtgacgtcgtgggcgacgccgggttgtgagcggcctttcgagctccctcgagtccctgagtctctgtagtgcctcagctcctggatgtcctcccttaaaggagaagaacaatgcgggccgactagacgagtcccttagtttcctcgccggcgcagacaaatacggtttcagtccaaggaactaccattcccagaagacagcggggcgttccttgctgcatttctattggttggcgtttgttactcccagccaatagaaagtgagcttcttgacaagtgccaaaatggcgatgcctaccacctagaactggattgtgcggtaggcttaaatttggggaggtggtggatgaaaaggaaattgggaggtatagttacagggctggagaaggtggaggaaatgagggagcaaatctggacttggaatggtggtggccaagggacgcttttagagctaagggcgtaattaggcaaccaggactgccttaactccttgatgccctgtttaatctattagtccctttgatacttctttattcatttatttgagagacggagttttgctcttgttgcccaggctggagtgcaatggtgcgatctcggctcaccccaacaacctccgcctcccgggttcaagcgattctactgcctcagcctcccgagtagctgggattacaggcatgcaccaccaagcccggctaattttgtatttttagtggagacgaggtttctccatgttggtcaggctagtctcgaactcctgacctccggtgattcgcccgcctctgcctcccgaagtgctgggattacaggtgcgagccactgcgctcggccgatactttcttagtgccccagtttaaggaagggcggttcaggaggagagagtctgacaggatcttactttatccctttagctctttttctttcaaattcctctgtctcgcttaaatcttcccgcatcttctcctttctatttaattctgccttccccggttctccttagaacctcatgtccttttctttagctccatttctttcacctcaaagctggccgccaccgctgccacctgctcagagtgaaataatgaaggtggtcaacctgaagcaagccattttgcaagcctggaaggagcgctggagtgactaccaatgggcaatcaacatgaagaaattctttcctaaaggagccacctgggatattctcaacctggcaggtctcaagtgaactgggaaagaaagatgggagggataaacccagagaagttgtaatcactcagttgtgttttg

SEQ ID NO: 7567 - DNA, 6000 bp, Homo sapiens
aatattaaatgagataatgtgtacaaaacactttgcacagtgcctggcatacggttggtacttaatacatatttatggtttcctttccttggaaaaagcagtagtgaggtaaagatagaatctgaggcaaaacacatccatggaacccagccctggctcatgcctcgcccttgctttctccatccccctccccccaccacactgagaaacaagttagctcagactctgtccttcctgtggcatgttcttaaagttctccccaaaacatccaggctttgggtggggttgggaaagatagctggccttttagagacaaagaaaaggatttaggagggcagggagtgagtctctcccaggcacatggctggttccctgattcaggggcatccccagcatttctataccaggtttgcatcacctgggcagacaggtttctactctgggcaatggtttcttggtgagaaaggagggggatgggaaggcatctacagaagcctgacctgtttccagcaaggacccaccctcagtcagtcagtcagtcagtcagtcagtcagtcaagcagttggcccaagatttaggccacccagaatttgcacagggtgttgccctgttacccagaacaacctactgacagggagaacagatctcagatcaaacatgcacacccacacacacagcattcacactcacacacaaacatgcagtctcactcatagtcatagaatcacacacacacacacacacacgtgcacacatacataactgaccagagcttagtgttctcaatacctttccttcttctcctctgtgtctgctgtcctctgcagtccaaataaatcaaggaaaattaaagacatatttggaaacacacaggcaggatccaacactgcccctaatgggaaggttcgtccccagaatcccagacttgggaatccaagtggaagtgtatgcagaaccagggcagtgccttgctgtaccaggttgtgaatatgcatcttttctacctggatccaatctgagtactatttatgaagagttaagtgctttcttgagttgaactgggctatgggagaaatggggtgtgtgtgtgtgtgtgtagaagtgaacagcaggccgggcatggtggctcacgcctgctatcccagcactttgggaggctgaggtgggtggatcaccttaggtcaggagttcaagaccagcctgactaatatggtgaaaccccatctctactaaaaatataaaaaaaattagccaggcattgtggcgtgctcctgcagtcccagcaacttgggacgctgagacaggagaatggcttaaacccggaaggtggaggttgcagtgagccactgcactccagcctgggcgatagagtgggactctgtctcaaaaaaaaaaagaagtgaacagcaatgtccagctggagggataggtgaggaaggttgtgttgagatacacctgttgtcttaaggtcttacagccaaggttgaggtcaaagagaaaccaagattctactccgaatcacccagagccagacaacccagcctttcccccctccctttggtggctttgggtctcagagtttctgcccttctcccagcagctgctgacagagaaaggagcagggtacacagactgactagaagcttctggggccaagagagaaccctgccttttcattctgtactcctctcaccagctgtagaagaaagacacccgaattacttgtgagggagaaaaggaagggccctataagaaatggaaaggaaggaaggaaggagcaagggggtaacccctctcctttgccccctccctcccagcctctgccttcacaccacacacagactgcagaaccacccaggttttgccaagaggagagtcaggctgactgaatttcagctctctctacctctgctccctcctccttctcactgattgcagcaggcgaggagtcttgacccaccccagctcccactcctagaagaacaaacatccagcaagtatacagggggtgggtaggacctccacagcagcaaacagagctgtgggccttggggaggaccccggccaagtaaagggagggtgctagtggtggtgctgtgctgtggggagctagatgcacgccaggggtcctgattttgagtccagccctgacagacacctgggctctggccctggctctgacttggagtcaaggtcacagagagcaggcaagggcaggacagggcaattcacctcctagctttccctccagagcccagagggtggagggagagggggtggaggctgagaaccaagttttcctgaaaagcctctttccttgtttgttttagcccctcccagttgctcccacactctgctgcagcttcccaactctgggccaaagggccagagaagagcccactgccctctctctcccacttttcttgggagcaggagaacaaagctaaagcctagcccattccaggaagctcatcttctacaaggagtcagagggtgagtggtcaagctcctgcagtcaacctcactgtcctcactacccagtttactcctgtgctcatattattattctttttttttttttctttttttgagatggagtttcggtcttgttgcccatgctggagtgcactggcgcgatctcaggtcactgcaacctctgcctcccgggttcaagcaattctcctgcctcagcctcccgagtagagtagctgggactacaggcgtgcgccaccacgcccagctaatttttgtatttttagtagagacgaggtttctccatgttggccaggctggtctcaaactcctgacctcgggtgatccacctgcctcggcctccccaagtgctgggattacaggtgtgagccaccaccacacttggccttttttttttttctttgagatggactctcaccctgttgcccaggctgttgtgcagtggcatgatctcggctcactgcaatctccatctcctgggttcaagcaattctcctgcctcagcctcccgagtggctgggactacaggcgtgcgccaccacgcccagctaatttttgtatttttagtagagatggggtttcaccatgttggccaggctggtctcgaactcctgacctcaggtgatctgcccacttcagcctcccaaaatgctgggattacaggtgtcagccaccacccccggactcccatattctttttctctaccttttcggtggctttcatgtttcccaggcatccatcaataccatcccaggagctgcctgtggagaagggcttcctatgtgaagaaaaccctctctagaagcactgggactggggaggaattagcgggagcagcaggtggctcaggctccctctcccttcgctgcctaagaagcttccatcccctccatgacccaagccctctaacatgatagatctcctctacttgagatctgttattactcatgggacagttgctgctctgaagcgaaatactggctgttttttgtttgtttgttttggagacagagtctcactctatcccccaggccggagtgcaatggcgatctcggctcactgcaacctccacctcccgggttctagcgattctcctgcctcagcctcctgactagctgggattacaggcacccaccaccacatccggctaatttttgtatttttagtagagacgtggtttcaccgtgttggtcaggctggtctcaaactcctgacctcaggtgatcaacccacctcagcctcacaaagtgctgggattacaggcatgagccaaagcacccggcaatgctggctgtttctaacccctgttcagtatttcacttgtacatctacccaccttcccattcggggtgggcagatgaaactagcaatggacgtctgaccttgggtcggtcacttctcctaagcttcctgttccccactagtaaaaagagggaggcttaagatgatctacatgttcccctctgagtagtaatcttctgtggaattcatattttatcctccagcaccgaggggcaggggtgtcactctgcccccaccccctgcctcacctcttccccattactttaggacctcaaagcactttcactattagttcccctctgttgtcctttttatttcccagacaaagggaaatgactcaccccaaagtcaactggagtgggtggaatggtgtcatacaagcaaacagggagtccctacagacatccctacctctgtgggaactccttcccctggaggtgttctccctaaggcgagtagaagggaaagggggtcacatttcctttccttctctggactttgccctgaagcagagggcagcctaagctcctgactccagggaaatctccctccccggcttctctctctcccggtcaccagtaacctcaggacgaggtcagtcctgcaatcacgtgaagccctcacgtttgcaaggtttgcagaaagggcctcttagctttgatctcccagacagcaaacaagcttgccagtccctccccagaaattcacatgcccctgccatacaggctttctaaacacgccaccctgactcttcagcgcaccccaccccaccccactctcagctcctcccaggtcccggcaagcgctttgccaggcagaaaggggaaaggcacgcagtccgcccactttgtcggtggactacaaatcccgacagtcttgtcgttgcgcaggcgcgcaagagctcaacgtgccggctgttggaaaagtgtgtcactggggcacgaggcgctccctgggatcacatggtacctgctccagtgccgcgtgcggcccgggaaccctgggctgctggcgcctgcgcagagccctctgtcccagggaaaggctcgggcaaaaggcggctgagattggcagagtgaaatattactgccgagggaacgtagcagggcacacgtctcgcctctttgcgactcggtgccccgtttctccccatcacctacttacttcctggttgcaacctctcttcctctgggacttttgcaccgggagctccagattcgccaccccgcagcgctgcggagccggcaggcagaggcaccccgtacactgcagagacccgaccctccttgctaccttctagccagaactactgcaggctgattccccctacacactctctctgctcttcccatgcaaagcagaactccgttgcctcaacgtccaacccttctgcagggctgcagtccggccaccccaagaccttgctgcagggtgcttcggatcctgatcgtgagtcgcggggtccactccccgcccttagccagtgcccagggggcaacagcggcgatcgcaacctctagtttgagtcaaggtccagtttgaatgaccgctctcagctggtgaagacatgacgaccctggactccaacaacaacacaggtactgagatttctttactatcatcttttccctgtcactgtctccccacctccatctacgccttataaaaagaggaactttgtaagggactggggtgtccctcggcccggagatttgctaacgtgctgcggtgctttagtgtgggatttccagagcggcttgttcgggctggaaatgctctcagaaacgccccatcaccacccctcagagtcccaaagctcccttgagcctcgaatccctgggcaggaggaaatggagaggaggtacgggtggtgaagcgaagaatttagggggactgggagctttggaacagtgccccgaaacggccccatctgtccactacctgcagctgtagtatgcctggcctcagaaaacggaccccctcccctcttgtcttccccctcctctagttcctgcaggcgcgagggaatctgagaagagtggcgcgatggggttcagggaaggaggggctgggagaatcgttcggatctcactggggaatcctcagtgacaggagggagcgacacttgaggagtccagagcgtggtgcccggcccgagggagggcacctacagggctccggccgccgggagggctcacatggc

SEQ ID NO: 7568 - DNA, 6000 bp, Homo sapiens
aagaaaatcaatattgtccccaggctcaagaccactcactccacagcttaattggtccttagctttcagcgtttgactctagacttgtactctccaacacagtagtcactagttgcaaatggctaatggccacttgaaatctgctaggtaaaactgaaatgtgctataagtgcaaataagtgtggattttgaaggtttggttaaaaaaaggaatgcaaactatctcaacaatttttatattgactacatgtaaaatgataatgattctgacatactgagataaataaaatatgtacttcacattaatttttaccttttttttttttttttttgagacaaagtcttacttcgttgcccaggttgaagtgcagtggcatgatctcggctcactgcaacctccgcctcccaggttcaagcgattctcctgcctcagcctcctaagtagctagctgggactacaggcatgcaccaccacacccagctaatttttgtattttcagtagagacggggcttcgccatgttggccaggctggtcttgaactcctgaccccgtgatctgcccacctcggcctcccaaagtgctgggattacaggcataagccactgcgccaggccctaatttttacttctttaacagggctactgaaaaatttcaagttacttatttagctctcattgtaccttttttaaaaatttatttttctatttcaataggttttagctctcattgcatttctattggacagtgctgctctagaccttgcagatttttcagaatcatctgattctgaatcacaatatggagcatcaggggccctttcctggacttgtctgtctcaggtgatgtaactctgtcaccttcctggaggctaagtggtagtttgtaagccagtgcctctaccatctcattcagaatggagaccctacaagacagaaggggttacaaaacagttttaaatgcagatcattgagtgaatccatatttcaaagaacagaagacagtcggtgattattgacccagattattgacccaaagtaacctctaaaattaaccttaaaattcctgattggctcctattttacttggattatctcttttaatcattgcaacaactctgacatttaggtgctattattacatacacattcaacaaaggggtaaattgaagttagggagctagcaagcatggagttctgcttgtttgcttgctttttgagacagggtctcactctgtcacccaggctggagtgcagtggtgcaatcttaacttcccaggcttaatcaacctccccacctctacctcccaagtagctaggactacaggcacgtgtcaccacgcccggctaatttttttattttttttgcagcggggggtttcgtcatgctgcccaggttggtctcaaactcctgggttcaagcaatctgcccacctcagcctcccaaagtgctgggattacaggcatgagccaccgtgctgggccaagtatggagttttgaccccagttggtctaactgttcaagtgccattataagcaagattatgagctgcttgtatatgctgtattttgtcaatacatgacctgacacatactagatggttaatacatgtgggtagttaagtggtcatatagtatgatctcaaccatgtaggaaaaagatacatagggaaaagtcaatacatcaaaatgttaaaaagtgattaattatgaatggtaatgatacggacttttttgggtaatgtacatttaaaattttcatctttacgcttttatgtatctgccaaacttttgacaatgtgtgtgtaatgtttttatttatttattttgagatagagtctcaccctgtcacccaggctggagtgcagtggcgtgatcttggctcactgcaacctctgcctcccgggttcaagcaattctcctgtctcagcctcccaagtagctgggactataggcatgtgccaccacgcctggctaatttttgtatttttagtagagatggggtttcaccatgttggccaggctggttttgaactcctgacctcaggtgatccacctgcctcggcttcccaaagtgctgggattacaagcgtgacacagcacacctggccgacaatatgtgtgtaatgtttttagttatttccattactttttaaaaatcccatataactcctgcccccacacatacacagcctccctcattatcaacatcccccaccaggatggtatacccaaagtccgtatttccattactctctttttcttttttttgagaacggagtctcactctgtcgcccaggctggtgtgcagtggcgcgatctcagctcactgcaagctccgcctcccgggttcacgccattctcctgcctcagcctcccgagtagctgagactacaggcgcccgcctttttgtgtttttagtagagacagggtttcaccgtgttagccaggatggtcttgatctcctggcctcatgatctgcccgcctcggcctcccaaagtgctgggattacaggcgtgagccactgcacccggcctccattactctttaaatcacacaaaatgtcatttttaccgaatgtaagtggttactgatacgttctttgtgggctgaaaatatttatttcttctctttcccttctcccaatgattccattcccctcacaactgggatcccccccattctaatctgcttctccattctctcagtcctgtctttctctctctctcctgctcccttctgcgatcctccatcagactttttcttctgggtcttcctcccttcttcgcttctgtctccttgtctccctcttctttttgaaaagattgacattcaaacagaaaggtcaatcaaatgttacctcctactggtaggtttcaggtatattctacctgccattggaatcctgaggatggtgctcaagtcagggggtgggggcaatgggagggcaagacttctaaggagaatggagacccctttagatgtgaggagggcatttcagcctgaggaaagcagcggaacaaagatctgaggagtttttcagggaacgggaaatgggcagaggagcgcttacctcattggatctggggattgctgtctcctggtgctggcactcggttataaaggatgccaaccttagttgatttgagctcctggattgaattagtcctggttgcataattgactttgatatgtggactttgggttcgaattaggtttaataagatttaactgcttcaaagggctttataagaattcattttatccttcaaatctgatttcaaatgctacctactttatgacaacttctctaagtttgatgctcttcttctagtgcacttactatgccatagtaggtacatactttattcaagcaattacccccattgtattttaccttattctgtaggaaatgtttcctttagtgcctctcttcaggaatcttgagggacaggcaggtatcttattcctatttgtatcctaggcctagcacagagcaggaacacactcaattgagccagcaggttctcaatgatttttaaaattacattaataattaacattaagtaagcactgtggcaagcactgtatctacattgtttcattcaccagtcattttagaagaaaagtacttttattacccccattttacaataaccgagagaaagcaaaattaatttgatctaaggtcaaatatgatctaagactaactagtgaggggcagaactttttctccaggctttgggcttcagatctgggctcttcaccaccacagatgaacaagtggataaatgaggacttcttttcattccgtggctgaagaagtgacatggaagagtctaccattcattttacagatacaattatgtatctgtaatacataatacataattatgtatctgtaatacataaaattacagtaagtcctaactcactgatgtttctaacttctgaatcatctttttcttcttctttctttcttgcaatcctaaaaccgtcagagaaactgttttgaactcatattgaagtgtaacccatccaagcactgggtgttttatgggaaagagaataaaccttttgtttggttcttacttcttaccacccattcatttgtaactatacaaatatcaagcacctactgtgtgctaggaacctttttttaggcactagagagacagaagtaaacaacaaaaaaatagtgagacctttacatacactagttctcctgctcgtcacaataactatatgaggtaatgatgacaacaataatagttaactcttaacagtgcttatctgtgcggggcactgggctacctgcttaatttgtattaactcattacaataagcttgtggggtaagggatatgttttccccattttacagatgagtaaagacacagagcaggaagtgatttgctcaagcttggaacccaggcagtgtggctctaattcccagtctattaactacagggcaatattttgtttcttaaatttatatcttcatatcacaacttttaggttgaggagtcttatccccatccagatcatctgactcccaaatccagaggtttgcacctgcaccccagcggcctcgcgaaataaatgagaatgtcttggaatttttgccaatactttctcttccaaagaactcaaactgatttccacgtaattctcactgatttgtgaaatgaaccttcctggactgtaaatttccccgcaaagagagggccagggccccgggtcgttttatactggccggggcacccagcagatggcgctatgttagtggccaccagctggctgccccgtcccccgagctcaccgcctccgccgaaagcttcccggccctccctcgctcacttctctctccccctcccaaccgagcccgggcccacgtgacctcaaggcggccaatgggtgagcagagagggcgagctggtccctgtggccgccattaaagcgaagggaaaacccgtgaattcggattaaagggggaaaaacaccgcccgctgggcccacaaaatgggggagactacggcgtccagccggtgaggccacaggagggcaaactttaggccggcttggcccaggaacgacacgaagacagagccagagaatggtctgagcccgcagacgccgccaccacctccgccgctgaggagactctgggcttaaggacatcgccgctgccgcgccgggggcctgggcttctctcccggttctcgcccttcccgctcctgtgcgggcgcctctccgcccgggagaaccgtcctgggcttgggctctgccgtctcggacttgattttgattatttattgtgtaatttattatttttcttgtggtaggggcacacatcccctccgtcccccagagagggacgagcgtctgcgggatccgcagtccggcccgccaggcgagcgcggcgcggccctcccgcctccggccctcggccccgggcggctgggtgccggccgggcggcgggggctgctcgcggcggcggcggcggcggcggcggcgggggggtgggtggggagggcgggcgcccggcggcctcctcttccaccgcccccccaaccactaccccccccccggccctccccggtgtctgtgtttctctctctggtcggaggcggcggtaatggcggatggtgggttgtggcgccggcggcggctgctgtgagggacgatgagtgcctccttcgtgccgaacggggccagcctggaagattgtcactgtaacctcttctgcctggtgagtgccggggccggcgggcgccgagggaggggggccgcgaggtgcgcccttgggccgtgggggagggggccgggtctggtccagatgcccgagttcccgggcgaggcccagccggagccggcgccctgcgaagctccgcggccagccccgggaggcggcgttcgctctcctacggtcccgggctctgtttaggggagtgttggcattttttctcgtcttgtttcggactctccttctcaccgtagt

SEQ ID NO: 7569 - DNA, 6000 bp, Homo sapiens
ggtttctatttagtgtttatcattgtcttcattttgtagtggtttcttttgcttgtttttgagcctgagttggattataatgttttgaggagagagacattatctactttttaccacgcctaccccttcctcgtatcttgtgtcttgtgtcattctctcacctaggggttgctaaaaactacagctttttggccaaatcctgttgccacttgtgtttgtaaataaagttttattaggatacagccacaccatttattctttttttccgtagctctttttgtgctacagtgacagagttgagtagctgtgacaaatgcgaaatggcccacaaagcctaaaatatatttaccatttggccctttatgtcaaaagtttgccaatctctgctccaaacacatggactaattaaatgcttatagtctataatcattttcaccccctggagagtaaagttactgattgccacaaagtattttcgtatacatttctgttggttgtactggatgatcagtactataaagacaattttattttcaaacacaactcttgcagatgccaggtaaaaatatgataaagttacatgtcaaagattgaaagtaaaactacttgagaagtttttagctactgttatccttccccttttccattacatcttagacattagaattgctattgctaatacatcaaggtctaaaataaatccaccttaatccttgtagctaagtaaaagttccatgtgcactagctcagcatgtgatttttctctactcttttgtacgtggtgtttagcaaatgtatttcagccaggacaaaactcagtgcctttctttcattctctcaatcagcagcggctgcttacctgtttcagagacagctttcaccaactccaggttacccaagtcagtatcagctttacgcaatggagaacacaagacagacaatcttaaatgattacattacctcacaacagatgcaagtgaacttgcgtccagatgtggccagaggactctccccaagagagcagccactgggtctcccatacccagcaacgagaggtgtgtgtctttgcatttcagatttcgtagaatttattatgtttacctagtgtttcttaggtactcagtaaatacttgttgaatgaatgatggaaagaaagaaagaaaagaatactatatccttcctcccgtagactttttagcccagagacatacattgagacaaggtgttttggtgaatactgaaattaactaaaccaaatccttgtgctgagtatttgtaatccatggcttacaaatttgctctctttaatctgcccatactttgaggttactgatgtgaagtacagtctttaatatccttctttaaagaatgtcttaaaaagtaatgatgatagtaaacatttttatttatattatgtacaaattacccttgattcacagagatagacaaaatccaaagtcatgtatggttctgtacctttagaataacacttaacataaattgtattgtcttttggataggaatcattgacctgaccaatatgcctccaacaattttagtgcctcatccagggggaacaagcactcctcccatggacagaatcacttatattcctggtacacagattactttccctcccaggccgtacaactctgcttccatgtctccaggtgagattgtacagttacacacctctctaatagaaccatcatgtttacatttttacaacatagccttttaaggtatcttgggcaatttttcctcatttggtttcttgtttttcttttaacatttaatagtagttcttatgtgccagctgtcactagataccttaggaatgccttaaaagcttatgttatgcttcagttcttatccaggactcttaataaaacaaacttctttttctcttttcttgttttttttttgtttttgttttggagacagagtctggctctgttgcccaggctggagcgcagtggtgtgatctcagctcactgcaacctccatctcccaggttcaagagattctcgtgcctcagcctctggagtagctgggattacaggtgcgcgccaccacacctggctaattttttgtgtgtttttagtagagacagggtctcactatgttgcccaggctggtcgtaaactcctggcctccggtgatccacctgccttggcctcccgaagtgctgggattacaggtgtcagccactgcacccagccaaaacaaacttcttatatcccaaatttgaagctttttgaaaaattttcagtcacttagaatttcggaattgtttgatatactcagtcagttgatatttttatctttaagctgcaggtttatgttttacaggacacccaacacaccttgcagctgctgcaagtgctgagagggaacgggaacgggagcgggagaaggagcgggagcgggaacggattgctgcagcttcctccgacctctacctgcggccaggtcagtgaaaggcactgctcttccattctctggacacatcttagtaatcttgtacactgtgcttaatgctgcgcacaaaaagttttgatggaaacaaaaattctaagacaacgttattacaggccccaagtgaaaaacaggtgaaagtgctgtagcagctgagatggtggaaacgtgaattttacacggaaaaatgttttcatgatgaaggtatcatttttatttggtgcaaacagtggactgcagttgggcctgaagatattggtcacagagctttcaaggctgaaagaacagccctagcaaaaactcctagatataaaggtgttgttgagcttgagtttagaggaggaatggaaaatacagttagcagcttgtgtagcatcttgaattacagtgaaatgttgtgtccaggaggcaggtgacatgatcagagggacatttacacgagtggaatagatggattaaaaccctgaagagtgggtatggctggtcccggatgtagcctctgtggagataaaaattttaaatactcttttgtctagtaattccacgtctaggaatatatcccatagaaatactcagataagctgggcatggtggctcatgcctataatcccagctactcaggaggccaaggcaggaggattgcttgaggccaggaattcaagaccagcctcagcaacatggtgagaccctgtctctaaaatatatatataaaaaattagccagcagccgtggtgtgcacctgtagtcctagctactcaggaggatgaagtaggatgatcccttgaagccaggagtttgaggctgcagtgagctatggagtgtcactgcactccatcctgggtgacagagtgtgatgctgtctcttaaaaattttttaatttaattaaaaaaataaatattcatataagctgatgaatggttagaagggagaaaactgctgagaagcctggctgaggtggtggtgtctgtgagaagaggggtgtgtgctaaaacataaaacagctagctgttatgaagccagtgagcacgttagaaggttggagtgaggacacagaacaagatgaggtcaagaagaaagtgactggggagggatttgagagttcagaatcctctgcgtgaagtagttcttaccaagtccaagctctgacttggttatgggagagttagggttaagtgaacaaaaacataccaaatattgtagaagtgtaattgtgggagccaagtgttttgtgggaagataatgtgaatgatttcatttcaaaagagagagcttgctgagagaaagagtcacctgtgaaggggacagtgaagaagtgaagcagggcaaactgtggttgaatgaaacagtctcaaaccctagtgtagcagtggtatattattttcattatgatgcttagaaagttgtgcctgattagattttggaaatcatatacacactagagtttgaggaaaaatcagaaagatgaacttatatgatttgtagtagtacttcttgttggtgctgttttatttatggaatcaagattgaaatttatcagagaaatggaaatgacagtaaatgatggctgatgttttgtttcaagttactgctgcggttttattgcatctttatttggacacttttagaacatatttctggaaaggccagaaagtagactatcaagtttcttatcttgtttttcttttttctatttaggtatgttaggaaataaacaatccataagcattgcttccttttgtctctggcttcctccttatgtctttgtttctttctctttttcacctctgcaggctcagaacagcctggccgacctggcagtcatggatatgttcgctccccttccccttcagtaagaactcaggagaccatgttgcaacagagacccagtgttttccaaggaaccaatggaaccagtgtaatcacacctttggatccaactgctcagctacgaatcatgtcagtctcttgtacatattttgacaaaaaatgtctcttgcatatacattttaaaatttgtgactgcaatagtctaagtatagtcatgcttttctgcccatgccatgaaggctttttttgttgttgttgcagtttgtccttccatctccccaccacattcccagcaaatggtcttcccttcacagagctgtgatttggttttatttacaggccactgcctgctgggggcccttcaataagccaaggcctgccagcctcccgttacaacactgctgcggatgccctggctgctcttgtggatgctgcagcttctgcaccccagatggatgtgtccaaaacaaaagagagtaagcatgaagctgccaggttagaagaaaatttgagaagcaggtcagcagcagttagtgaacagcagcagctagagcagaaaaccctggaggtggagaagagatctgttcagtgtttatacacttcttcagcctttccaagtggcaagccccagcctcattcttcagtagtttattctgaggctgggaaagataaagggcctcctccaaaatccagatatgaggaagagctaaggaccagagggaagactaccattactgcagctaacttcatagacgtgatcatcacccggcaaattgcctcggacaaggatgcgagggaacgtggctctcaaagttcagactcttctagtagctgtatgtatctcaatccgagtttcacaatgtgatgtctgagtaaagaattactttattctttaggtcaagtagaactatatggtatttaaaaatcctaacggttgatagtaaatgtaatgcaaaaatgtatcttctgctgtttttatgattatttaaatatcccagtttcctacatataagcctatcaatgtatcttccacaagaaaactgtatcattcatgtaattaaatttggaaagtagaaggcagaccttattaacatatttaggcatctgaaaggtaatggatatatcgccaggctctgggctactgaggtgtaatttctcaggaagcatttgctaggacatggttctatatttatgccaataccccaaagcctctaatatcctttttctaagacacaggtttttaaaagtgagactacctattattggtgattggtatttatattgcatcgtttttgcaagttggattttgttcaagtctggttagtcattaggatggctacactgcaaatgtgttagaattcacaggtctacattaaaatgctagaaaagttactttttaaattttcttttaaactattgccttaattctatgtggaattgcagaaagaacaagcaagtatttaaataagcatctgctaatactggaagtaatttaatcatatataatcatctttctgttatctccattgaataaattcagtagagttagacatcatgaaaaaaaaaatgatttctcatgctccagaatgcaatgtgcagttcttttgatctctgagtatccactagcttaattataatttgtttacgtcatatctaccgcattgctgaggcttttagagagagagttagtgttg

SEQ ID NO: 7570 - DNA, 6000 bp, Homo sapiens
ctgaaagcttgcctcccgggttaacaccattctcctgcctaagcctcccgagtagcggggactacaggcacccaccacaatgcctggctaatttttgtatttttagtagagacgggctttcactgtgttaaccaggatggtctcgatctcctgacctcatgatccgcctgcctcggcctcccaaagtgctggaattacaggcgtgagccaccgcacccagcctgacactttttttttttaagcatttaatatgtgccaagtattagattccccaaatgctcccagcttctggtttcactttcccttagagtcttctcatcctatctttgccagcaggagagaggagaggagggggagcagggaagtctcctttaccatcagagtttggggcttacctttccgcagttctcccactccagttaaaggaggggatagggtagtatgatatggaagccaaaagtataaagcagagcagctctcagggcctggagggaggggccatacaaaggaaatggcaggctgccctcccttcccagccactgtcggcctcaggatcacagcacttctctttgtgctgggagtatggagagggaaggcatcctccagggtgttagaggggaagctattccaagagttgattcaaattctgcctttcactctcctggggcagtgggaagacagagacaggcaactgtgggggatccaggggtagtccctgagtccctgaggtgcagccaccttgcagacctctttcccatcattccctcccccagatagacagaaagcagggattttgatttggtgactggtatgaggaggagactggtttggagccagctgtgtataagtgtttgggagtgactgtctttcttttcccatccacctgctgcccatagtggggggacccaggcaagcttccagaggaaaatgttccacttagggaaaaggaatgactcagtttccctatggagagaagggaagctgacaccctctgtgccttgtatgctttaccaacgatttcagtgtttctgggtttttgggtctggactcttgccacttttctttatactgttttctagcctagatagataaggaatgttcccttccctttgggtacccagaaccctgttccttgccacctcttaccccactctggcctagctgcttttctgacacttctccagggttgccatatcactctgactggttgacttccaccttcccctcttctctctctagccaaggtaggcaacaagatgaagaaagaggttggggctcaggactaggagggcagagatgggagttcggcccctgtccctgttgagaggaaatgaacagcaaaagaaagtggggtaagtaggacggggctttgagatgggctggagggcttttttttttttttttgagacgaagtttcgctcttgttgcccaggctggagtgcaatggtgcaatctcagcttaccgcaaccttcgcctcctgggttcaagcaattctcctacctccatctcccgagcagctgggattacaggcatgcgccaccatgcccggctaattttgttttttagtagagatggggtttctccatgttggtcaggctggtctcgaactcctaaccccaggtgatctgcctgccttggcttcccaaagtgcagggattagaggtgtgagccaccgcgcccggttggggggctgtttttttgtacacccaaaggaaatgttagcatctctcttcaccctttggaggattatcatggggtcccggtcctgtgcttgcagtgagccagagagcccaagggggtccctaggaagatattgtggtgtggaaggaagaggtgatataggaaaggctgcctctgatgtttacagactagagaggcagggaggtcaaagtggataaactaaaaatggtccttgcccagagctaagggagcctttgtacataggagtccagcctttggggaaaccttgccaagcctagagaaagggctgctggtgggaggtggggagacagagaaggcagatggcctgactacaaaagccgcctccctgtcactgcgaagtggggaggaggcacctccctagaaatctgccaggctccctgccagagggaatggtttgagctcaaaatatcaccatcctcagggcccaaatagtccccagtcctgtgtggaccggacacacagttgacagcttctctccaagagaggcagtttgggctctgaggtatgcgacaggggctccaggatgatccaggaatggctccaggtggagggccttaggctgtggctacaggcacagaatgacagcaggggagcaggcaaaggtagagtgaggggcctgggagaacaggggaagtcagatatgtgagagactgaggagaagcagggtttgtggcagtctcaagtatgagtggagtggccgggggtcatctggaaggtgaggtgaggaatccgtatttccctccttcctgctttagaagctttggcaacatatatttggcagctgttttgtatacacactattccccaatggtgtcacttgggcaggcacaaagggagcctaagagaggggtgtggattgaatgtatggggaggaagaaaggccataggcagtaccaaccgcaggaggacatgatctgaccctccttcagccacactctcccctttggaacagaagttcttgactccctgtttagaccattctccagacacccagggcgctgtaattctctgcccaaatggccacagttttgcttccagagccttaagtgggctgctctcccagatttatcctcccgaggactgattttgccactcaaagggtgagcaaagaatggttgttggaggctaggcacggtggctcatgcctacagtcctagcactctgggaggccaaggtgggtggctgaggtcaggattttgagaccaccctggccgacatggcgaaaccctgtctctactaaaaatacaaaaattagtcggatgtggtggcacacgcctgtaatcccagctacttgggaggctgaggcaggagaattgcttaaacctgggaggcagaggttgcagtgagctgagactgcgccattgcactccagcctgggcaacagagcaagcctccatctcaaaaaaaaaaaaaaaaagaatctttgttgaggaatacagattgagcttgaacttgtgaactaggatattgggccctggctaaaggcctccatgtttatttatttatgtattttggtagagctgagagtctcattatgttgcccaggctggatttgaactcccgagctcaagtgatcctcctttctcagcctcccgagtaatttactcttattcctggttgtaaatgttagggatgaccagtccatagcatggggagggatgagggctatgcataagaaggctcagacattggagcctccagaggtgggtaacatttgctttcgggtttctcactgggggaaggaaaggctatggccaaagccctgggcataatttatatatggatctttgggataagcaagatttaaacaacaacaacaacaacaacaacaagaaacttaaaaaaacaagtttttaatttacaggaaaaaaatggaaggtaatagagggtccccacatattctgcacccaatttctctttttattaacatcttagcattagtattatgcatttgtaacaactaatgaactaatattgatacattattattaattaaagtccaccctttatttagatttccttagtttttacccagtattctttttctcttccatgatcgcattcagaaaaccacattacatttagtcatcaggtctccttagccctcttagttgtgacagtttctcagaattcctttgattttgatcaccttcaccttagtttcctctttactttcccttgtatccaagctgtatggagggcctggagattctgataggactgtaagattcggggacggtgatatgtgtgcaactaaggcacctcggtgtcgcttttagaatatagttgtggaaatgagaatagctctggtagctccaggggcttaggagaacagaaagagcccaggaaaggagaaagaccttattgctgaacgccacacccttgcccccacgccacacccttgccgcacctactaactaggggctaacgaatgaaagggtgtcggaatatgatggagaagcccggtcgacagtgacgtcgtgggcgacgccgggttgtgagcggcctttcgagctccctcgagtccctgagtctctgtagtgcctcagctcctggatgtcctcccttaaaggagaagaacaatgcgggccgactagacgagtcccttagtttcctcgccggcgcagacaaatacggtttcagtccaaggaactaccattcccagaagacagcggggcgttccttgctgcatttctattggttggcgtttgttactcccagccaatagaaagtgagcttcttgacaagtgccaaaatggcgatgcctaccacctagaactggattgtgcggtaggcttaaatttggggaggtggtggatgaaaaggaaattgggaggtatagttacagggctggagaaggtggaggaaatgagggagcaaatctggacttggaatggtggtggccaagggacgcttttagagctaagggcgtaattaggcaaccaggactgccttaactccttgatgccctgtttaatctattagtccctttgatacttctttattcatttatttgagagacggagttttgctcttgttgcccaggctggagtgcaatggtgcgatctcggctcaccccaacaacctccgcctcccgggttcaagcgattctactgcctcagcctcccgagtagctgggattacaggcatgcaccaccaagcccggctaattttgtatttttagtggagacgaggtttctccatgttggtcaggctagtctcgaactcctgacctccggtgattcgcccgcctctgcctcccgaagtgctgggattacaggtgcgagccactgcgctcggccgatactttcttagtgccccagtttaaggaagggcggttcaggaggagagagtctgacaggatcttactttatccctttagctctttttctttcaaattcctctgtctcgcttaaatcttcccgcatcttctcctttctatttaattctgccttccccggttctccttagaacctcatgtccttttctttagctccatttctttcacctcaaagctggccgccaccgctgccacctgctcagagtgaaataatgaaggtggtcaacctgaagcaagccattttgcaagcctggaaggagcgctggagtgactaccaatgggcaatcaacatgaagaaattctttcctaaaggagccacctgggatattctcaacctggcaggtctcaagtgaactgggaaagaaagatgggagggataaacccagagaagttgtaatcactcagttgtgttttgctattcctcttgcagatgcgttactagagcaggccatgattggaccatcccccaatcctctcatcttgtcctacctgaagtatgccattagttcccaggtaagcttcccgcaaacccccaccaagaagtgagagttctgggggtaaaaaacttggagtgcatttgggccccggtggttcatggctgtaatcccagcattgtgggaggctgaggcaggcggattgcttgagcccaggagttcaagaccagcctgcgtaacatggcaaaacccagtctctacccaaaaatacaaagagttacccctgcgtggtggtgcccctgtagtcccagctacttggaaggctgaggtgggaggatcacctgagccctgggaggtcgagactgcaatgagccatgatcctgccactgccctccagccagagcaacagagtgagaccctgtctcaggaaagaaacaaacaaacacaatttggggtgcagttgtacaattgtcagcttactctttctagatgaaagagtaaga

SEQ ID NO: 7571 - DNA, 6000 bp, Homo sapiens
cctttcctggacttgtctgtctcaggtgatgtaactctgtcaccttcctggaggctaagtggtagtttgtaagccagtgcctctaccatctcattcagaatggagaccctacaagacagaaggggttacaaaacagttttaaatgcagatcattgagtgaatccatatttcaaagaacagaagacagtcggtgattattgacccagattattgacccaaagtaacctctaaaattaaccttaaaattcctgattggctcctattttacttggattatctcttttaatcattgcaacaactctgacatttaggtgctattattacatacacattcaacaaaggggtaaattgaagttagggagctagcaagcatggagttctgcttgtttgcttgctttttgagacagggtctcactctgtcacccaggctggagtgcagtggtgcaatcttaacttcccaggcttaatcaacctccccacctctacctcccaagtagctaggactacaggcacgtgtcaccacgcccggctaatttttttattttttttgcagcggggggtttcgtcatgctgcccaggttggtctcaaactcctgggttcaagcaatctgcccacctcagcctcccaaagtgctgggattacaggcatgagccaccgtgctgggccaagtatggagttttgaccccagttggtctaactgttcaagtgccattataagcaagattatgagctgcttgtatatgctgtattttgtcaatacatgacctgacacatactagatggttaatacatgtgggtagttaagtggtcatatagtatgatctcaaccatgtaggaaaaagatacatagggaaaagtcaatacatcaaaatgttaaaaagtgattaattatgaatggtaatgatacggacttttttgggtaatgtacatttaaaattttcatctttacgcttttatgtatctgccaaacttttgacaatgtgtgtgtaatgtttttatttatttattttgagatagagtctcaccctgtcacccaggctggagtgcagtggcgtgatcttggctcactgcaacctctgcctcccgggttcaagcaattctcctgtctcagcctcccaagtagctgggactataggcatgtgccaccacgcctggctaatttttgtatttttagtagagatggggtttcaccatgttggccaggctggttttgaactcctgacctcaggtgatccacctgcctcggcttcccaaagtgctgggattacaagcgtgacacagcacacctggccgacaatatgtgtgtaatgtttttagttatttccattactttttaaaaatcccatataactcctgcccccacacatacacagcctccctcattatcaacatcccccaccaggatggtatacccaaagtccgtatttccattactctctttttcttttttttgagaacggagtctcactctgtcgcccaggctggtgtgcagtggcgcgatctcagctcactgcaagctccgcctcccgggttcacgccattctcctgcctcagcctcccgagtagctgagactacaggcgcccgcctttttgtgtttttagtagagacagggtttcaccgtgttagccaggatggtcttgatctcctggcctcatgatctgcccgcctcggcctcccaaagtgctgggattacaggcgtgagccactgcacccggcctccattactctttaaatcacacaaaatgtcatttttaccgaatgtaagtggttactgatacgttctttgtgggctgaaaatatttatttcttctctttcccttctcccaatgattccattcccctcacaactgggatcccccccattctaatctgcttctccattctctcagtcctgtctttctctctctctcctgctcccttctgcgatcctccatcagactttttcttctgggtcttcctcccttcttcgcttctgtctccttgtctccctcttctttttgaaaagattgacattcaaacagaaaggtcaatcaaatgttacctcctactggtaggtttcaggtatattctacctgccattggaatcctgaggatggtgctcaagtcagggggtgggggcaatgggagggcaagacttctaaggagaatggagacccctttagatgtgaggagggcatttcagcctgaggaaagcagcggaacaaagatctgaggagtttttcagggaacgggaaatgggcagaggagcgcttacctcattggatctggggattgctgtctcctggtgctggcactcggttataaaggatgccaaccttagttgatttgagctcctggattgaattagtcctggttgcataattgactttgatatgtggactttgggttcgaattaggtttaataagatttaactgcttcaaagggctttataagaattcattttatccttcaaatctgatttcaaatgctacctactttatgacaacttctctaagtttgatgctcttcttctagtgcacttactatgccatagtaggtacatactttattcaagcaattacccccattgtattttaccttattctgtaggaaatgtttcctttagtgcctctcttcaggaatcttgagggacaggcaggtatcttattcctatttgtatcctaggcctagcacagagcaggaacacactcaattgagccagcaggttctcaatgatttttaaaattacattaataattaacattaagtaagcactgtggcaagcactgtatctacattgtttcattcaccagtcattttagaagaaaagtacttttattacccccattttacaataaccgagagaaagcaaaattaatttgatctaaggtcaaatatgatctaagactaactagtgaggggcagaactttttctccaggctttgggcttcagatctgggctcttcaccaccacagatgaacaagtggataaatgaggacttcttttcattccgtggctgaagaagtgacatggaagagtctaccattcattttacagatacaattatgtatctgtaatacataatacataattatgtatctgtaatacataaaattacagtaagtcctaactcactgatgtttctaacttctgaatcatctttttcttcttctttctttcttgcaatcctaaaaccgtcagagaaactgttttgaactcatattgaagtgtaacccatccaagcactgggtgttttatgggaaagagaataaaccttttgtttggttcttacttcttaccacccattcatttgtaactatacaaatatcaagcacctactgtgtgctaggaacctttttttaggcactagagagacagaagtaaacaacaaaaaaatagtgagacctttacatacactagttctcctgctcgtcacaataactatatgaggtaatgatgacaacaataatagttaactcttaacagtgcttatctgtgcggggcactgggctacctgcttaatttgtattaactcattacaataagcttgtggggtaagggatatgttttccccattttacagatgagtaaagacacagagcaggaagtgatttgctcaagcttggaacccaggcagtgtggctctaattcccagtctattaactacagggcaatattttgtttcttaaatttatatcttcatatcacaacttttaggttgaggagtcttatccccatccagatcatctgactcccaaatccagaggtttgcacctgcaccccagcggcctcgcgaaataaatgagaatgtcttggaatttttgccaatactttctcttccaaagaactcaaactgatttccacgtaattctcactgatttgtgaaatgaaccttcctggactgtaaatttccccgcaaagagagggccagggccccgggtcgttttatactggccggggcacccagcagatggcgctatgttagtggccaccagctggctgccccgtcccccgagctcaccgcctccgccgaaagcttcccggccctccctcgctcacttctctctccccctcccaaccgagcccgggcccacgtgacctcaaggcggccaatgggtgagcagagagggcgagctggtccctgtggccgccattaaagcgaagggaaaacccgtgaattcggattaaagggggaaaaacaccgcccgctgggcccacaaaatgggggagactacggcgtccagccggtgaggccacaggagggcaaactttaggccggcttggcccaggaacgacacgaagacagagccagagaatggtctgagcccgcagacgccgccaccacctccgccgctgaggagactctgggcttaaggacatcgccgctgccgcgccgggggcctgggcttctctcccggttctcgcccttcccgctcctgtgcgggcgcctctccgcccgggagaaccgtcctgggcttgggctctgccgtctcggacttgattttgattatttattgtgtaatttattatttttcttgtggtaggggcacacatcccctccgtcccccagagagggacgagcgtctgcgggatccgcagtccggcccgccaggcgagcgcggcgcggccctcccgcctccggccctcggccccgggcggctgggtgccggccgggcggcgggggctgctcgcggcggcggcggcggcggcggcggcgggggggtgggtggggagggcgggcgcccggcggcctcctcttccaccgcccccccaaccactaccccccccccggccctccccggtgtctgtgtttctctctctggtcggaggcggcggtaatggcggatggtgggttgtggcgccggcggcggctgctgtgagggacgatgagtgcctccttcgtgccgaacggggccagcctggaagattgtcactgtaacctcttctgcctggtgagtgccggggccggcgggcgccgagggaggggggccgcgaggtgcgcccttgggccgtgggggagggggccgggtctggtccagatgcccgagttcccgggcgaggcccagccggagccggcgccctgcgaagctccgcggccagccccgggaggcggcgttcgctctcctacggtcccgggctctgtttaggggagtgttggcattttttctcgtcttgtttcggactctccttctcaccgtagtctcgtcctcaacttgagctccttatctggcaggacagtaacctttccctcttgtcttgcttaactgttgcttttctccttattggccctgtatccctgcttcacactttacattattgcccctgctccccaccgcctttatgtcttacccttttaatttggtttccccatgtaaacaggaccccagaacttaagccctagaaacctgtcttggttttacattttttttgtatgagtcaaactaacgccaggttagtttctttcttgggtgacttaagatctctctgtaaaagccagtaggtgccatttcatatgttttctttttaaactttgaaaacagtttgccatttttgacaatttctagccatcttgcttttattagaacatgatgtttttgtgagagtgaagggggctagtggacgaggtgctgtggttttgcactgtttctatatttattgtgttttggttgctttttcagaatgttttgagcaggctgctcccttgtttgattgaaatggaaagtcgagagaagcgggatgtagggatgatcattgtgtaggttagcccaggtctggtaacatccaacagttaaggctttcagaagtaccaactgttgcaaataacttgtcctgtatgggacagtagctgagcttcatcaatgactttaagtttgggtgactttactttttcattttctcctttgtgctatgagaaatattaagagtatatgataggtaagtgagttaagtgggaggagcacaactagttggcaagtgtaaactgccagtcatgtatcagcagtttcatttttggcacc

SEQ ID NO: 7572 - DNA, 6000 bp, Homo sapiens
ggtaaagagcctttgttgaactttaatggaatacttttattttgaagagattcatgttttatgaattaagaattagagggtagataggctgggcgcggtggttcacgcctatctactatctaatcccagtactttgggaggccgaggcaggcggatcacaaggtcaggagatcgagaccatcctggctaacacggtgaaaccctgtctctactaaaaataccaaaaaattagccgggcatggtggcgggcgcctgtagtcccagctactcgggaggctgagccaggagaatggcgtgaacccgggaggcagaacttgcagtgagctgagattgggccactgcactccagcctgggcgacagagcgagagtctgtctcaaacaaacaaacaaaaagaattagaaggtagataatattctgataatcttgataatattaaatactccttaataaaactattttaatgtctatgtacatttttttagatgtattcttgttatattttctcagtagtagtattttataagaatgactcaaatgtgatagaaatattagccaaagttttgagtgaatttgagttcttatttgcacctgactctgtgaccttggagtagtcatgagctatgctttctcttccaatacaaagaaataaagtatgtgcgtacatagtgccagatgctgcaaaatgcttgatagcattcttatttcactctcctttacacgtctggcatattatgattcacattttgtttttggggttaagaaattaataatgtacgttgtccatatcagaagtctacacacctctgtttctttccacatccaccaaatcactaagccatttctgtttattttcctaaagtgtctagaatccatccattactctgtattcaccactgtcaccatcatctttaacccagcagccacctaactcatctccctaccttcagtctcacccatattcaaagtgtgtaccacgtcactccttgactgatttttccatcaccctggatataactgcaaacccctaccttagctttataacccctccaggagctgctttcagcttagctcttcacatttttcccttctcacttttccctttagtcccctatatttacctcccccacactcttcctcccaactccactctacacattagccggttaccacgcttacgttcttttattgtacctttctctgtctcaccttggggtcttcgtgttcactgttcacactgcctgtactttttcctcctattacctttgacttgaacaactcttattcatccttcattctcagcttacacattgcttcctctgagcaggcttatctgaacctggaggtgttaggtttctctcctagcattttcatagcacattatacttctcctttcatagcttattttactacataatctgtacctacattattgtgtaagtttcatgcagaaagggacttaatttgttaatcttacctgcaagcctagcttatgcctagcacacagtaggcatcaataaacacatttgaatgagtgaaaatattttcatgaatcatctacacatattttattgtaggttaagacaagttttaatattattatttttataagatagactatgaaactaacctatttactgtacattgtataccatgtgctccgtctgagcaagtcttgtttgtgtattctgtagatattaagaatgcccgagaagggactaggagtccaagaacagctcatgaaatcagtttaaagagaagctatgaatcagtggaaggaaatataaagcaagggatgtcaatgagggagtctcctgtatcagcaccgttagagggtaaagcattgttttcagaatgttattttgatacatgttattttatatagtaattttgcattgttgaattaagttgtatgcaatttctgtcatttccacctgaaatgtatatttatattaagttgtatgcaatttctgtcatttccacctgaaatatatatttatattaagtttatatctgtatataaagtggcacataacaatggaaggaagtcaaatttaagcgtaattggtcatatcataggttactattagaatgttcatatttgaatgctcatacaatttgcagattattcctgtttcagctaagtgagttaaaaaaggtaaagtttattatgagaacttctttttgaattgtgagacagataaagtggtgtaatggataaagacatgaatttaaatttcagcttcacccttccctggtaaaattcctttgagcctgtttcttcctctgtaaattaagggatcgtacctaacactgtgtgagggttagaggcaggtgtctgaactggtgctgctcatgtgatatggcttcagtacatgatcagtatgattttgttttgttaatggcccactttgtttaaatcttaacctgcctcaaccaattttaagctagatgaaatactaaaagcagggtaagtcctgtgtaattttctaagagctgtatttttctctatgttaaaaacacacacttttactgtaaatatgtgtggttatttctaacccttgatttatatttatcagcaacaataatgtgaagcttcttaggaggttatttacaactctttcgtttcaatttgcatgtttcatttaatacattttccctatttttatggtatccatatttcccgttttccctttatcacaagtatatttcaaagctaagcaatggtttccaatcctgtatcttctttcctcttgataaagaagtgttgggattttagatttaactttgaaggtatctttccttttcaacctttcattagatgcctttggtggccattttttatttaggaaaatatttacaaaggactgtgtgatgtcatattaggtacttctggatagttcacaaacttaaattgacattccttccttcatagagcatttatcaaaaacatagactttaagaacagcattcagtatatgtgagttgacatatacattatgttgaataattgaattgctttcttgttttggaagggctgatatgccgagcattacccagggggagtcctcattctgacctcaaagaaaggactgtattgtctggctccataatgcagggtaaactttctgcttgttttgcatttttatttataactgcctccctggcaaaatagtttgacattaatttacagtgtatttctgcttttcaagttattttcccttttgaaatattaaagtcttggttattacttttctgcctctgagctacataatttattggaagatgatagttgcttaatcttttaatatagagatatctttattatgcaagaaccattctgtgactattatgaatgatgcattaatatcatatctcaagcaaccctaaagaaataatgattgataaatactgatttgaggatctactgtaaacagaaagttaattagaaactacaagatgtcaaggcattattttaaattatgttaaaatatatgtaacaaaatttaccattttaaccatttttaagtgcacagttccgtggcattgttgtgcaaccatcagcattattttaatgtttcctgaattctttttcaagggacaccaagagcaacaactgaaagctttgaagatggccttaaatatcccaaacaaattaaaagggaaagtcctcccatacgagcatttgaaggtgccattaccaaaggaaaaccatatgatggcatcaccaccatcaaagaaatggggcgttccattcatgagattccaaggcaagatattttaactcaggaaagtcggaaaactccagaagtggtccagagcacacggccgataattgagggttccatttcccaggtaactaagttttggctctttttgtcagtaactgatatttatggaacatttaaaaaagtgtgacttaataattataagtggttcttatgatgtcagacctcctggaagtaaacatgaaagtttcctgtaccttttttttttttcctctgtggaccaggctggagtgcggtgtgtgatcacagctcactatatagccttgacctcctgggctcaagcgatcctcccacctcagcctcccgagtagctaggactacaggcatgtacctccacacccagaatttttgtatttttatagagacagggctttgccatgttgccaaggctggtctcgaactcctgagctcaagtgatctgcccatctcagcatcccaaagtgctgggatcacaggcgtgagccactgtgcttggcctttgtgtaatggcacgatcttggctcactgcaacgtccgcctcctgggttcaagcgattctcctgccccagcctcccgagtagctgagattacaggtacctgccaccacgcctggctaattttgtatttttaggagagacagggtttctccatgttggtcaggctggtttcgaactcctgacctcaggtgatctgcccacctcagcctcccaaagcgctgggattacaggtgtgaaccaccatgcctggccttgtgtacttcttatcatcaggttttcttatgtctatagcatagagtgtggaatgtgggaaagtatgcagcttgggatcagtggggttgtgattgagatttgtaaacagaccaaaaaagatcaccacagtgaactgtaactgccatgggccagacatagacctgagatagaaaagtagccagatgactttgctacctgtaatgtttgtttctttccctttagggcacaccaataaagtttgacaacaactcaggtcaatctgccatcaaacacaatgtcaaatccttaatcacggggcctagcaaactatcccgtggaatgcctccgctggaaattgtgccagagaacataaaagtggtagaacggggaaaatatgaggatgtgaaagcaggcgagaccgtgcgttcccggcacacgtcagtggtaagctctggcccctccgttcttaggtccacactgcatgaagctcccaaagcacaactgagccctgggatttatgatgacaccagtgcacggaggacccctgtgagttatcaaaacaccatgtccagaggctcacccatgatgaacagaacttctgatggtatgttacttttgttgcttggtctgatactttttattgcatttaaaaaaaaaaaaaaaaacctttgtcaagtagtaaatatcaaattgtcagctttagagtatcccaagatctacaggtcttgcttgagtctaggagtatggaaggctactaatttaaaagtaggcataatttaagtaaaatacctgatatttaaatcaagtgcagattatgatgcagtccagaaatgctatagagtaagtatatttttagagtggattttcagccaattgcataaggttttctggaagtcagttttgacattgttccttcagcggcagtgtggtgtgaaagctgtaagtagcctctggaacaagactgcataagcttgaattaacattcttactgcatcaactcagatgagttacttagtttttttgtagcttagtttcctgatctgtaaaatcataatgtaacattaagacctacctctctggattgttatgaagatcaaataaggtagtacatgtaaagaacttagaatggtgccgagtatttacgaagggctcgataaatgtgaattattcctgttggtgttactgttgttattattgttgtcactataaccccatgctactggcagctacatcagttgagaagtgatttttaccaagtggtccctatcaacctgaggcccttaaaaatgcatccacttaccattttttattataatacaaatttattgatggctcacatggtacgtcctgggctgggcactgtgagctgtacaagtgtgttttggcgggtgtgaggggcgtagcacagagtgaggagaaggggaagtccttgttagggatggggaggtgagtccaaatgcttgtagctttagttttgatggcgaattgccctgcagagggaagggc

SEQ ID NO: 7573 - DNA, 6000 bp, Homo sapiens
cttggccaacgtagtgagaccctatctgtgtaaaaacaataaataggccaggtgcagtggctcatgcctgtaatccgagcactttgggaggccaaggtgggcagatcacctgaggtcaggagtttgagaccagcctggtcaacatggcaaaactccgtttctactaaaaatacaaaattagccaggtgtggtggcgtgcacctgtaatcccatctatttgggaggctgaggcagaattgcttgaatctaggagtcggaggttgcagtgagccaggatcgctccattgcactccagcctgggtgacaagagtgaaactccatctccaatcaatcaatcaatcaaatgttaaatattttaaaaattaaaatatatggctgggcgtggtggctcacgcctgtaatcccaacactttgggaggccaaggcaggtggatcatgaggtcaggagattgagaccatcctggctaacacagtgaaaccccgtctctactaataatacaaaaaatcagccgggtgtggtggcacacacctgtagtcccagctacttgggagctgaggcaggagaatcgcttgaatccgggagacagaggttgcagtgagccgagatcacgccactgcactccagcctgggcgacagagcgagactctgtctcaaaaaaaaaaaaaaagctggattcatggaagtagaaagtaaagtggtgattaccagagactgggggtaggggaatggggatggccaggggacacaaaatttcagttgggaggaataagttcaagagatctattgtaaattgtggttactacaattaataatagattgtatatttgaaaattcagagtagattttaagtgttcccaacataaaaaaaagtacctgtatatgaggtaatgaatatgttcagtagcttgatttagtcatttcacaatacatacattaaaaaaaaaaacgaaaaaactcggaaacaaattgggttgtttgggctacttacctatgctaggatgttccctgggatataggaaacatgtaagccccttcttgtgcctgtagttcagctttctcaaaatgtgagacatatgctacattctggagtatctccaaggtggagcttcaaaatcttggtttttagtaagtatcttagatgatttttacttttaaaatttcaaaggcacaactctagtgaatctttagaactgacacaccagagacactggggaagtgacttttatctttctgaaaacgaggactctcaagtcagttaacagagaatgatttggaaggttatgtatcaaattgtttttcttgtgcaggaatatattgggagtttaattttcattgtaattggtatcatgtttttgttaccctaaaacagggcgagagggtaggaaaataaaattgtagtacggtaactaagcggtaatatttatctagtacttaagcacctagtactgggcgaagcacattaccaacattctattacattttattcttggtattgaggcacagagacattaagtaatttgtcgagggtcatactgttagtggtggagctgggattcagattaaagtctgtctggcccaagagtcagctcttgatcattgttctgttcttcgtttacatttcagaaagatagaaaaatacaggccaggtgaggtggctcacacctgtaatcccagcacttcagaaacagaggtgggcagattgcttgagcccagaagctcaagaccagtctgggcaatatggcaaaaccccaactcgaggaaaaaaaaaaaaattaactgggcatagggtcacgtgcctgtagtcccagctactggggtgggaggattgcttgaacccgagaggtcaaggctacagtgaggtgtgattgcaccactgcatttcagcctggtggtgacagagcgagaccccgtctcaaaaaaaagaaaaaaaaattacaagtatgtgtatgtgtatttaattgtttttctaatagtatttatatttttatttgatgcattaattattcatgtagagtacttagctattttatggattacctgaccttatagtgagcttcctgggaaagatataatcatttatttataacttttttttctataaaaacactttctcgattttaaacaataaagtacaatttcttgttgcataatccccttatgaccttaaagttatatgtctaatttaaaaagaatagtacttatgtggtcattagtagcaggtttttttttgttttttgtttttgtttttaagatggagtctcgctctgtctcccaggctggagtgcaatggtgctatctcggctcactgcaacctctgcctcctgggttcaagcagttctccgtctcatcctcccaagtagctgggattacatgcgcctgccaccacactcagctgatttttgtagttttagtagagacggggtttcaccatcttggccaggctggtcctgaactcctgacctcgtgatccaccctcctcggcctcccaaagtgctgggattacaggcatagtagtagcagttttaattttatttttctgattgacttttgtagatgctccacgccctactagtcatgcccgtcctccatcaacaagtttgatttatgactcagacctggctgtctcttatactgaccttgataatctcttcaattctgatgaagatgaactaacagtgagtatctcattaatgaataggattataatttgttttccttgattttattatttttttattttttagaagtgatttgtgagtttaatactatgttttagccctgaacaataggaaatatagtaaaacctcattcattgatttcttttttaaatctcatgtttgagtagtcttgccatagtgtcatctataaactttgagggttttgtttctccttttgtttttacatttgggggacacatgattaaccttaatttgagctctgccgtatgttctgttttgtagttttaggaagcagaattattttcctatttgattctgtagtttgagaaatgactctggaatttactcattcagagaacacatacataattgacattaaagttatttgctttgtcaatttattaaggaataccagctcttttgaatttgttttgcatcacagctattataagacagatacatgatataacaataaaagaggaaaaaaataatatttaatctttaacacccatttgcagagaaaggtgaagataaaagaaattaaagcttaaaatgagattccctagaatgtcaagtctctgtcaaattaatgaattgggtgctgcattatcataaaagggaattccttttcatctgcataaaggtagcttggaaacttctatggtacatttgatctttcctttcctatataatatgcatttagtcctctctcaacatatatatctctatatgtgtgtatatgtgtgtgtgtacatatacatatatatatattgcagatacataaacttttactgtgtatcccataatgtagtacattttagggcaccctttactaggcaactatatccttgaatgctttggcacattcatactttctctctactaccattcctgtatcagctgtggttcctctgaaataaaagattgtagtcagaacgtggtctacatattaatatttatcacagactgtctaacagaagacatggaacaaatgttagctctgaaaacactggtaagagcttggagatagtaaaacttgtttgttcaatctactaaaagttaggaactctattgctttgtcattagatcttctgaagtttgtacttagttttacctgttaacagtatttttgcaggaatagggagactattaaaacaaggtgaaagtataaataagaatttagataggtgagtgattgattatataggaaactttaatgtgttcaacttaaggagacaaatgctttctctgcaagtatcttttaccaagaagcatttctaatgttaattacaaccccttcttattgcaggttttcttatttttatttattttaagacaagagtctcattgtattgcccatgctggagtgcagtggtgcagtcctggctcactgcaacctctgcctcccaggctcaagcaattcttgtgcctcagcctcccgagtagctggaattacaggcatgccccacccagctaattttttgtatttttagtagagatgaggtttcaccatgttggccaggctggtctcaaactcctggcctcaaattgatctgcctgcctcagcctcccaaagtgctgggattacaggtgtgagctaccatgtccggcctcttattactgggttttaagttaaggttaaccttacttctgtgtattttgaaagtattggtcattttctttggaggaactttttccttttaatttggaggcttaccaaataaattaatctggagtcagtgattaagaaatattttatatctttcaacactagtatgtatttggctgtatcacagattcaaaatactacttttaatgaatgggctttactgttaagttatatctgaatgattactattttgagatcacattggatgtaaaattttagataaatatgtgctttttttaaatagcctggatctaaaaaatcagcaaatggatcagatgataaagccagctgcaaggaatcaaagacaggaaatctggacccgttatcttgcataagtaagcttccctcatctgtgctcgagataaatttgcgaacttttaatctcaacaaagctccccactccttttggtttaaacacagattcgcctatttttagtcatgttaaaatgtatgtttttattaaatataggcactgcagatcttcataaaatgtatcctacaccaccatcattggaacaacatattatgggattttccccaatgaatatgaataataaagaatatggtagtatggatacaacacctggaggaactgttctagaaggaaatagttctagtataggagcgcagttcaaaattgaggttgatgagggattctgtagccccaaaccttctgaaattaaagtaagtatgttttttctagaaaaataattcacttcctatattttcttatagaattaatttgttgctatagtcaaaaattattttatagtggttgcggttttgtagctaagttgaggactgaattattgttgtcactattaagaatgcatttaagaaaataatagaattgtatttagattttattctgtttaaagaaaggaaaaaaggtccagagcctgtttgtttatttattttttcctcctagaagataagatactgaaaacctaccatctttatattgtaggatttttcttatgtctataagcctgaaaattgtcaaattctagtgggatgttccatgtttgcacctctaaaaactctaccaagccaatatctgccccctatcaaattgccagaagagtgtatttaccgtcagagttggactgttggaaaattggaattgctttcttcagggccttcaatgccattcatcaaagaggggtatgatttatgttgttacaatagtatgtgactgcttatacagctttaatttttttttcatagatttacctggtatgctggaaaaataaaattggtttttgaaaattctaaaaattatttctggttaatcaattatagtgattggctgggagcagtgaatcacgcctgtaattcccatactttgggaggccaaggcaggcgtatcccttgaggtcaggagtttgagatcagcctggccaacatacgaaacctcgtctctactaaaaatacaaaaattagccaagcgtggtggcgcatgcttgtagtcccagctacttgggaggctgaggcacaagaatggcttgaacctgggagtcaggcattgcagggagccgagatcgcaccagtgcactccagcctgggcaagagtgagactttgtctcaaaaaaaaaaaaaaaaaggttaattgggtatggataaactattaggaaacttaagactattatgct

SEQ ID NO: 7574 - DNA, 6000 bp, Homo sapiens
gggatcgtacctaacactgtgtgagggttagaggcaggtgtctgaactggtgctgctcatgtgatatggcttcagtacatgatcagtatgattttgttttgttaatggcccactttgtttaaatcttaacctgcctcaaccaattttaagctagatgaaatactaaaagcagggtaagtcctgtgtaattttctaagagctgtatttttctctatgttaaaaacacacacttttactgtaaatatgtgtggttatttctaacccttgatttatatttatcagcaacaataatgtgaagcttcttaggaggttatttacaactctttcgtttcaatttgcatgtttcatttaatacattttccctatttttatggtatccatatttcccgttttccctttatcacaagtatatttcaaagctaagcaatggtttccaatcctgtatcttctttcctcttgataaagaagtgttgggattttagatttaactttgaaggtatctttccttttcaacctttcattagatgcctttggtggccattttttatttaggaaaatatttacaaaggactgtgtgatgtcatattaggtacttctggatagttcacaaacttaaattgacattccttccttcatagagcatttatcaaaaacatagactttaagaacagcattcagtatatgtgagttgacatatacattatgttgaataattgaattgctttcttgttttggaagggctgatatgccgagcattacccagggggagtcctcattctgacctcaaagaaaggactgtattgtctggctccataatgcagggtaaactttctgcttgttttgcatttttatttataactgcctccctggcaaaatagtttgacattaatttacagtgtatttctgcttttcaagttattttcccttttgaaatattaaagtcttggttattacttttctgcctctgagctacataatttattggaagatgatagttgcttaatcttttaatatagagatatctttattatgcaagaaccattctgtgactattatgaatgatgcattaatatcatatctcaagcaaccctaaagaaataatgattgataaatactgatttgaggatctactgtaaacagaaagttaattagaaactacaagatgtcaaggcattattttaaattatgttaaaatatatgtaacaaaatttaccattttaaccatttttaagtgcacagttccgtggcattgttgtgcaaccatcagcattattttaatgtttcctgaattctttttcaagggacaccaagagcaacaactgaaagctttgaagatggccttaaatatcccaaacaaattaaaagggaaagtcctcccatacgagcatttgaaggtgccattaccaaaggaaaaccatatgatggcatcaccaccatcaaagaaatggggcgttccattcatgagattccaaggcaagatattttaactcaggaaagtcggaaaactccagaagtggtccagagcacacggccgataattgagggttccatttcccaggtaactaagttttggctctttttgtcagtaactgatatttatggaacatttaaaaaagtgtgacttaataattataagtggttcttatgatgtcagacctcctggaagtaaacatgaaagtttcctgtaccttttttttttttcctctgtggaccaggctggagtgcggtgtgtgatcacagctcactatatagccttgacctcctgggctcaagcgatcctcccacctcagcctcccgagtagctaggactacaggcatgtacctccacacccagaatttttgtatttttatagagacagggctttgccatgttgccaaggctggtctcgaactcctgagctcaagtgatctgcccatctcagcatcccaaagtgctgggatcacaggcgtgagccactgtgcttggcctttgtgtaatggcacgatcttggctcactgcaacgtccgcctcctgggttcaagcgattctcctgccccagcctcccgagtagctgagattacaggtacctgccaccacgcctggctaattttgtatttttaggagagacagggtttctccatgttggtcaggctggtttcgaactcctgacctcaggtgatctgcccacctcagcctcccaaagcgctgggattacaggtgtgaaccaccatgcctggccttgtgtacttcttatcatcaggttttcttatgtctatagcatagagtgtggaatgtgggaaagtatgcagcttgggatcagtggggttgtgattgagatttgtaaacagaccaaaaaagatcaccacagtgaactgtaactgccatgggccagacatagacctgagatagaaaagtagccagatgactttgctacctgtaatgtttgtttctttccctttagggcacaccaataaagtttgacaacaactcaggtcaatctgccatcaaacacaatgtcaaatccttaatcacggggcctagcaaactatcccgtggaatgcctccgctggaaattgtgccagagaacataaaagtggtagaacggggaaaatatgaggatgtgaaagcaggcgagaccgtgcgttcccggcacacgtcagtggtaagctctggcccctccgttcttaggtccacactgcatgaagctcccaaagcacaactgagccctgggatttatgatgacaccagtgcacggaggacccctgtgagttatcaaaacaccatgtccagaggctcacccatgatgaacagaacttctgatggtatgttacttttgttgcttggtctgatactttttattgcatttaaaaaaaaaaaaaaaaacctttgtcaagtagtaaatatcaaattgtcagctttagagtatcccaagatctacaggtcttgcttgagtctaggagtatggaaggctactaatttaaaagtaggcataatttaagtaaaatacctgatatttaaatcaagtgcagattatgatgcagtccagaaatgctatagagtaagtatatttttagagtggattttcagccaattgcataaggttttctggaagtcagttttgacattgttccttcagcggcagtgtggtgtgaaagctgtaagtagcctctggaacaagactgcataagcttgaattaacattcttactgcatcaactcagatgagttacttagtttttttgtagcttagtttcctgatctgtaaaatcataatgtaacattaagacctacctctctggattgttatgaagatcaaataaggtagtacatgtaaagaacttagaatggtgccgagtatttacgaagggctcgataaatgtgaattattcctgttggtgttactgttgttattattgttgtcactataaccccatgctactggcagctacatcagttgagaagtgatttttaccaagtggtccctatcaacctgaggcccttaaaaatgcatccacttaccattttttattataatacaaatttattgatggctcacatggtacgtcctgggctgggcactgtgagctgtacaagtgtgttttggcgggtgtgaggggcgtagcacagagtgaggagaaggggaagtccttgttagggatggggaggtgagtccaaatgcttgtagctttagttttgatggcgaattgccctgcagagggaagggcactccatatttgagcacgctgggacttggaaggggatgtgataaaccagtgtgatttctttctttgggcaggcagatttgtttgattgtggtaaagtttatagtatcaaaatattagtaattagatgtgatggttacacagccatcatgcttgtacttaatgccactgtgaattgtaccctttaaaatggctaaaattgtaaattttatgttatgtatatttcaccacagttaaaaaaaattgagggtggctgggtgcagcagctcatacccataatcccagcactttgggaggccaaggcgggcggatcatgaggtcaggagattgagcccatcctggccaacatggtgaaatcctgtctctactaaaaatacaaaaacaattagccgtgcatggtggcgcgctcctgtagtcccagctacttgggaggctgagacaggagaatcgcttgaacccaggaggtagagactgcagtgagccaagatcacgccactgcactccagcctgggtgacagcgagactctatctcaaaaaaaaaaaaaaaaaattgaggatgatggctaataagtgtttgaatatatatttattggtgggacaatctgaccatcctgaataacatcatttaagagaagagaggctggagtagggaggtgatagatattggtgaagtaatgagaaagtcattgtggaagaacagagcaaggaaaaaattagtgaaactagtgattaatgggtaggaaggaggttgcataacacaggcaatgagagaaaactgaagtttactacatgtggggacaaaagaatttagaatgttaaagtcatacaaaaaacaaaatgattcataatgagatttaaagaagagtattgaattttatttttaatgttacataaggtggtaaaatactggtgctatgatccaaaaggtgacagtactctccaaatctcagtttctactagttgtttacattttcatatgttgtttacattttcatattttgcaatattgaatgttaaatgttgagtggaaagagaagatccaaatacatgaatatagtctttatttgaatggttgagaaatggacaaatattatcatacttgcaagtttcttaagaacttgtggcattggctctttttttccagttacaatttcttctaacaagtctaccaatcatgaaaggaaatcgacactgacccctacccagagggaaagtatcccagcgaagtctccagtgcctggggtggaccctgtcgtgagccacagtccgtttgatccccatcacagaggcagcactgcaggcgaggtttatcggagccacctgcccacgcacttggatccagccatgccttttcacagggctttggatcctggtaaacacaaaatatagtgataatttatggcaaataaatatgccaccagtatgacttttcagctttctgttgttgtacaatatagtacaattgcaaatatcattaatgtacagctcagtgaattttcacaaactaaattctcccatgttaccagcacccagatcaagaaataaaatcttatcagcacccggtaaagaactaaaaagaatagtatatgaaaagctctcttatctgatggcacttggtgaaactagttgaaaaagtggattaatgtgaataattattttaaaatgacagaggcatacctaaacatgttaacttacagcataaatagacgttcatttaccagaactctgatctaatgccaaggctttttcataaacaagtgattaagtctcactgtcttatataaaagaaattcttttttttaagtaaagctagaacttccaagtaaagacacttccaagcaatctaaatacagaatccttctagattttttttccagcctttgaagttgtctagtccgcacctgattcaacttctgtatcaactctttccaaagctgttagttttcagagaaaccactcttcattcttccttgatttacaaattatgtcattaagttacataattctagtaacaagtacagctggaagaaacttcagaacaccactgacattggtagacagaatctgataggtgcagatgtgcaggtttctagagagcagtctgctgggcagagggcattgtgttttacacagggaggggagaggagcagtcacatcggttggtacagagaggcttggctgggctgttataatctgcaggaccaccggctgcaccttgtcctcccagggtgcagtccttgctcttccttgccgctattggctgagcccagtcacacatgtgttttctgctgagacctct

SEQ ID NO: 7575 - DNA, 6000 bp, Homo sapiens
ccgtggtgtgcacctgtagtcctagctactcaggaggatgaagtaggatgatcccttgaagccaggagtttgaggctgcagtgagctatggagtgtcactgcactccatcctgggtgacagagtgtgatgctgtctcttaaaaattttttaatttaattaaaaaaataaatattcatataagctgatgaatggttagaagggagaaaactgctgagaagcctggctgaggtggtggtgtctgtgagaagaggggtgtgtgctaaaacataaaacagctagctgttatgaagccagtgagcacgttagaaggttggagtgaggacacagaacaagatgaggtcaagaagaaagtgactggggagggatttgagagttcagaatcctctgcgtgaagtagttcttaccaagtccaagctctgacttggttatgggagagttagggttaagtgaacaaaaacataccaaatattgtagaagtgtaattgtgggagccaagtgttttgtgggaagataatgtgaatgatttcatttcaaaagagagagcttgctgagagaaagagtcacctgtgaaggggacagtgaagaagtgaagcagggcaaactgtggttgaatgaaacagtctcaaaccctagtgtagcagtggtatattattttcattatgatgcttagaaagttgtgcctgattagattttggaaatcatatacacactagagtttgaggaaaaatcagaaagatgaacttatatgatttgtagtagtacttcttgttggtgctgttttatttatggaatcaagattgaaatttatcagagaaatggaaatgacagtaaatgatggctgatgttttgtttcaagttactgctgcggttttattgcatctttatttggacacttttagaacatatttctggaaaggccagaaagtagactatcaagtttcttatcttgtttttcttttttctatttaggtatgttaggaaataaacaatccataagcattgcttccttttgtctctggcttcctccttatgtctttgtttctttctctttttcacctctgcaggctcagaacagcctggccgacctggcagtcatggatatgttcgctccccttccccttcagtaagaactcaggagaccatgttgcaacagagacccagtgttttccaaggaaccaatggaaccagtgtaatcacacctttggatccaactgctcagctacgaatcatgtcagtctcttgtacatattttgacaaaaaatgtctcttgcatatacattttaaaatttgtgactgcaatagtctaagtatagtcatgcttttctgcccatgccatgaaggctttttttgttgttgttgcagtttgtccttccatctccccaccacattcccagcaaatggtcttcccttcacagagctgtgatttggttttatttacaggccactgcctgctgggggcccttcaataagccaaggcctgccagcctcccgttacaacactgctgcggatgccctggctgctcttgtggatgctgcagcttctgcaccccagatggatgtgtccaaaacaaaagagagtaagcatgaagctgccaggttagaagaaaatttgagaagcaggtcagcagcagttagtgaacagcagcagctagagcagaaaaccctggaggtggagaagagatctgttcagtgtttatacacttcttcagcctttccaagtggcaagccccagcctcattcttcagtagtttattctgaggctgggaaagataaagggcctcctccaaaatccagatatgaggaagagctaaggaccagagggaagactaccattactgcagctaacttcatagacgtgatcatcacccggcaaattgcctcggacaaggatgcgagggaacgtggctctcaaagttcagactcttctagtagctgtatgtatctcaatccgagtttcacaatgtgatgtctgagtaaagaattactttattctttaggtcaagtagaactatatggtatttaaaaatcctaacggttgatagtaaatgtaatgcaaaaatgtatcttctgctgtttttatgattatttaaatatcccagtttcctacatataagcctatcaatgtatcttccacaagaaaactgtatcattcatgtaattaaatttggaaagtagaaggcagaccttattaacatatttaggcatctgaaaggtaatggatatatcgccaggctctgggctactgaggtgtaatttctcaggaagcatttgctaggacatggttctatatttatgccaataccccaaagcctctaatatcctttttctaagacacaggtttttaaaagtgagactacctattattggtgattggtatttatattgcatcgtttttgcaagttggattttgttcaagtctggttagtcattaggatggctacactgcaaatgtgttagaattcacaggtctacattaaaatgctagaaaagttactttttaaattttcttttaaactattgccttaattctatgtggaattgcagaaagaacaagcaagtatttaaataagcatctgctaatactggaagtaatttaatcatatataatcatctttctgttatctccattgaataaattcagtagagttagacatcatgaaaaaaaaaatgatttctcatgctccagaatgcaatgtgcagttcttttgatctctgagtatccactagcttaattataatttgtttacgtcatatctaccgcattgctgaggcttttagagagagagttagtgttgtgtagacaaaagacttcttttaacctgagattaggaaaatctgcaatatagattttctgcatgcagaaaattgctagctgagaaagagatattctatagttgtatgaataggtcttttgaagggaagtcaccggcacactgggagatcccacctgggcttattgaatggtatagcacatgggttccttaatcattggattaaacatttcttttcagtttgcatcacaaaccaaaccttgctttaggaatttgattttcagaaggtgtgaaaatagaaagctcatcttttctgagtgtccatgtctctgtgtgtggttatcttttttatcactggtcagtgaattccatgatgtccaaaggctatgtacagttcttcagtgtggttttcagtttgactcttgagaaccttcctcatcctgaaggggaggtccattgccatagtcttgccccttaaggcttcaagaacaatgtgaacacggtttggattccgactttctactgagtgaatattggaagttgtaaccagatttaggatgttgaatacataaacagtgatgagtaacagtggatacaaaagtcacaaattactgtaaacttcttagaatatagtgatttattttagtttctcaatgatcatttctgttccatttatcaagtttccaatctcctaagtgtactagaacccaggtagctgcagtttccatgacctggtggggataggaaggactgttgagtaccagaggagcaggtggtggctagggagcagagttcattcccacctgctgcatctgtgtccagcccagggccatgcaccctttggagctctgacagtgctctcagattctgtagtgcagtttgtggatgtgaagagccctctgaattcagaggttcctgagcaggcggttacatctgctcccaactgtcagctctgaggctatggcaggactgtgaaaagctgcctgttagccccactgcatagccctctgtttacttgggaactgtgtcttagaggaggtccttttctgatgtgggtatcctccagagttggttgacatcctccctttctgggaatatacttcccttcagacattctctaccatttctggttattttcacaatgtaacacagtgctaaaaaattattaatgtttggagtaagttttgttagcaatactccatttatttgagaaaatcattatatagtgttatataatccatagctttaaaatcatcatggtggtgaatgaagcagctttatagcctcagcgtttttctaagaacagagtgtcccacagaattggaatcattggaatcagttattgagatctactccctcatttgtttattaacctcttccataaatgtttccctggtgatttcttttccagctcccaggaaaatatcataaatctgttctctgttctgcctcattccagtgtttattattgggctttaaaacatgtctttttttttttttttttttttttttttgagacggagtttcgctcttgttgcccagaatggagtgcaatgacacaatctcagctcaccacaacctccgcctcccgggttcaagcgattctccggcctcagcctcccgagtagctgggattacaggcatgagctaccacgccctactaattttgtattttttttagtagagacagggtttctccacgttggtcaggctggtctcaaacccctgacctcaggtgatccacctgcctcggccttccaaagtgctgggattacagccatgagccactgcacccagcctaaaacatgtcttaaagcccataaaacttcagaaaaccctcattaacctggaatacctttgaacatggtggatcagaattgaaaaaatgctacaggtgtgaagaacttagacttcagaaacttttcctgggattagttttgaaataagattttcttttcttaaagtatcttctcacaggtatgaaacacctagcgatgctattgaggtgataagtcctgccagctcacctgcgccaccccaggagaaactgcagacctatcagccagaggttgttaaggcaaatcaagcggaaagtatgtcttcttaagctaccatttacatgttttcatatttgcatttatcatttgcttctaattatctgtctagaccatagtaagaattaacttgttttgtttgttttagggtaatcttacatgagccttctttagaaacagcaatcgattcttttttattttttaatgatacagaaaattgtttatattaattttgtttgcttacttctgcatttatattttgttccactagtcctcagacttcttcagtgaataattttttttttctccaaaattaagataagttctttgtttggagctatgtaccacatcctttcaggtgttcttctgaattatatttaatctttgataatgagtgaaaagcacagacattcctggagtaagacatctatgtgttctctcctagatgatcctaccagacaatatgaaggaccattacatcactatcgaccacagcaggaatcaccatctccccaacaacagctgcccccttcttcacaggcagagggaatggggcaagtgcccaggacccatcggctgatcacacttgctgatcacatctgtgtaagtttttcattattcttattagttaatttttcttttttgatcatggggaaagcagatttcatatagaaaaagaaatttataataaagatatctagatttcttaatactattttttttttgcaagtactcaatgaattttaccacttccttcatttctcattcacagcaaattatcacacaagattttgctagaaatcaagtttcctcgcagactccccagcagcctcctacttctacattccagaactcaccttctgctttggtatctacacctgtgaggactaaaacatcaaaccgttacagcccagaatcccaggctcagtctgtccatcatcaaagaccaggttcaagggtctctccagaaaatcttgtggacaaatccaggggaaggtatgatctttattccaaattatatataaattgcccaacagtaaaacaaatggaatatatctacaggataaggaatttgtttctcacaactaaagttcatttgcctttattcccaggaaagtgtaaatgagctttcttccccctgcatattattcttagaatgtccactgtcttggca

SEQ ID NO: 7576 - DNA, 6000 bp, Homo sapiens
ttggagaccaacctgggcaacatagtgagacctcatctctgataaacatttaaaagaattagccaggcatggtggcacacgcctgtagtcccagcactcaggaggctgaggcaggaggattgcttgagcccaggaatttgaggctgcagtgagctataattgggtcactgcactccagcctgggtgacagagtgagactgtctcaaaaaagaagaagaaaaaaaacggtttggattttattcagtggaaaagttttaaggcagagagtgacatgaccagccttttttccttcaactttttttattatggaaaatttcaaacaaacacagtagagaaaatagtatcatgaaccccatgtacccttttcagtcagcttcaataattatcattgtatggataatcttttcatctctatacccatctagccccctatttctcaaattcttttgaagtacatctcaaaccttatattatttcgtatgatcatctctcacagttctgtgcagaatatattgttgggggatgggaatggaagcagagacggggggaagagaccattgcaacagtccaggaaggggaagatgacctgaaatatatggtggtaggagtgggaatgatgaggagtggtcaaattcaggtacacagtattttagatgtaaaactgacaggaactgctgatggattagatgtgggaggtgagggaaagtgagacataccatgtttttggtcttagcaactgggcatttgagtgcttttcattgagaggaggaaggttggggaggagatgttgagtggagcccagagaggaaccagggctggatatatagatttgggagtcatcagcttattgacagcatggtactgggtgagatcacctaagaagagatgaagacagagaagataaagggccccaggcctaagccctaacatactccatttcttagagatcaggagggcaatcatcattcagcctgtggggtttggaagtgacgagcagtgttctcaaacagctctgcacactcctatttacaaggatattagtccttttgagatggggagacaaatgaagtaaacagaggttctctcccctggatccttgcattgacctaaatgaatcctatctgtcatataacctgagtagccaaggccttcctctttaacaactctgcttgctaaatattaccttctctaactatgaggtataaagcaagcttgtccaacctgcggcctaggatggctttgaagcagtccaacacaaattcataaactttcttaaaacgttgagattaggccgggcacaatggctcacacctgtaatcccagcactttgggaggccgaggcgggtggatcacctgaggtcaggagttcaagaccagcctggctaacatggcaaaaccccgtctctactaaaaatacaaaattggccgggcgtggtagtgggtgcctgtaatcccagctactcgggaggctgaggcaggagaatcacttgaacccgggaggtggaggttgcagtgagccgagatcgtgccattgcactccagcctgggtgacaagagtgaaacggtctcaataaatacataaataaaataaaatattatgagattttttgcaattttttttttgagacggagtttctctcttgtcacccaagctggagtgcaatggcgcgatttcgactcactgcaacctcctcctcccgggttcaagtgattctcctgcctcagcctcccgagtagctgggattacaggtgcccgccaccacgcctggctaattttttgtgattttagtagagacggggtttcaacatgttggccaggctggtcttggactccagacctcaggtgatccacccacatcagcctcccaaagtgctgggattacaggcatgagccaccacgcccggccagtgttagtgtactttatgtgtggcccaagacaatttttcttcttccaatgtggcccaggaagccaaaagattggacatccccgatatagagcttaaactcagtgagatctgagggtcaaactatagccaatctccaccctcaacccagcttcaatttcctttcaaagcagaggccttaccaccttcttcagctaaagtggttaagagaggacatggcccgagggaacctgggcagctttatagtcccatggaaagatggcccctgaatccttgggatgagtagactgctgtaagggaagagccagacccgagcctaccttgtcctcacctcaggtgttccagggtggtcagccgatctccacccccaaggttgccttcccagagcctcagacccatgccccagcgttatggagatgtcttctggaagaaccttaatcaaaggcccacgtgagtagaggagaaaatggaaactaactggatgtggtcttaactggattaaactaccataaacccatatagcaataggccctagtctgcggttaatttcccactggctggtggacattgtagctcctaatgacagaaaggaggtcgggagagattattaaagaagcaatatggatggacatgtcccctctgcacttatagccccctttttgttcttcacagccccacttggctggaggagcagcacattccacccatgctggtaagacagaccctctgccgtttaacatttctctgttaaaattgcacccactgctgtcctgtcccaagctctccttattaccgcttccctctgttattccccaaccagtgcactgaccaggccttcctttctatgaatcagtcatcatgttttcgagatcacaggggtcttcccaagaccccagactccctacctagttcaatccaagctcccttgagagagccagttcttctttctagctctttttccccattctctggcacagagagccactggttgctcccagcttggtctgtatcctcctgagcagctcccaccccctgaaatgctttggagaagaaagaagaggaggccatgtttggaaggaatgcagcagcagggccttgggggagtccccgcccgggtgagggctgtcacttaccacctggaggacctaagaaggcgtcagagcatcatcaacgagtaaggaagggagacatctgggttctgggagtcatgcaggatttgggggcagaacagtttgagctaaggaaggggttgacagctttgaggggaggtttgaggggagctttgaggggaggttgcttggaaggaagctgtgggctttggtgtgattgaaacagatttctgtaatatggaaagaaggagggaactgcagtaaggaggatgagccacatgagctggaaggagtggaaactagatcactgaagacaggaaagcaaaccatagaactggaggacagtggggaggttggggtcacctctgggttcctagacaatatgcttcagtctgaggggagcagaaaattgggagtggagggttaaaggtcaaatgacaactccctggagtcccagcaggaagtatttcagaacagaaaggtgaagaatggagagacaggaagcctggcctccaggcacttctctcctcagcctaaagtctccacagactgaagaaggcccagtggggcagctctggggctgcatctgagccagtggtgcttggcgaagagggctgtggattccccagcaccaatgaataccctgatctggaagaggagagagcaacctatccacaggaagaggaccgttttctcactcctggcagggcccaggtattgttggagtggaactgggtggagtgagggagtgatgtgggtctctggtcttgcatggagatgcagaagctgagagccaggctggagagctggatttgagagaaacaaaaataacgtaggtgagaaccagagacttcgaggtacctaagcttgggtactaggaaatctggaaagaagacctacttttccattttctttttcaatttctctcatcttgacagctgctttggtctccctggagccccctggatcaggaggaggcttgtgcctccaggcagctgcactctctggcctcgttcagcactgtcacagccagaaggaacccccttcacaatccctgggggatggagttggcagcgtctgaagagtaaggagaaaccaccgatgccgagaggctagtggtgccccagggacccaagactagttccgtcactagagtcaccctcattgctgacatgaaggcgtttccccttccttcgtctctccaactgcctttcccatcctctgaactaggcattaacagcccccgtgggctcccatctcaacccaccgctctcacaggagcaccccaagtcctgttttcctccaggccccgctcctggccttgtattctctctgctctgttattaaaaagcaagcaagtggagcccgagttgtctttcttcttgggatgcagcgatggagaggccaatggggaaggagggctcctttcgctttctcgaggacccagctacaatgaagtcgggctgggtccccagacaaggagtcttgtccgaggcgagaagggtcctgctcccagtccagcgttcctcgcccggcccctcgggttccagcactggtgggctgcccccgccccgttctctcgaactgggagtcagtcggccgagcttccgcctccaggaccctggaatcctgcccctcagtgctgctgcccttttggggacttcccagcagtctgtccctcggcctggctcagagccctagaagccgagtccctctgcccagcgccccacccagaactccacgtgtgctgaccccaggttcccttcctgaccctcatccccttaattgggaggccccgccccgtgcgcagtgacgttagacgccgctgtcagccggcgctggggggggtcggtgtggggtagaatggccgctgccgccgtcacccgcgggaccccgggaggtaagagccagggcctctcgcccgcctctccgcccccgcgccagagggcgcagctcctccaggtcccgacgcggagcgccgcgccagggaccaccgtccctcttcccggttcgccctcacctcccgcttccgtcctcctcccccgcgccagggggcgccgctcaccgcagggccccacggcggaccagcgcgtgccggggactgtcccggagacccccgcacccggcacctgcactgtccctcgcccaccgcgtgcccgcggactctgctcccggcttctccagaacatccctctatgcgggcgggaccctcccacctcggaggttctcctgggaccaccactccgccggggggccgcccagagtgccaagcgtccgatccggcgccgcccaagtgcagcccaaggacccgctcccgctccgcaccctggcaggctgcctagccaggactgcgcacctgcgccctggggcggagtccttaccccaaccccagcttcactgcacatagccgagcccgacgggcctcctcccatctccatcctggacacctggcggagcccgtgctgagagcctccgccagctcccatctgttccccgaggagggcggggggctcaggctggagccagagcggtagatggggtaggctaggcctggaggccaggggaggcagaggcgtttggggagagggagctacgtagagagggctgtcagccggagggtgggttgtcctgagggtgggaatctgggtgtctggcccagattctatcaggtcctaaccaacctggaggagagaataggttaggttcagttatcagatctgcccttccccttggaaaaatcaaacagagaaggaactcagggcgtgtcttctaaaggcctagcttctaccggaggtagaatctcctgccctgcccccaggatccaggctctcttgccaaaccatcctccaaggaccggatggcctgagtcccaacccccaggacctgacccaaccatagccccagtctgtgcaaaagctcaaggtttagggcctctgaggcccaagccctgccagtcttctccccgctcccccaccccaacccattt

SEQ ID NO: 7577 - DNA, 6000 bp, Homo sapiens
gtattattattatttttttgagacaggatctcactctgtcacccaggctggagtgcagtagcgtgatcactgctcactggagcctccacatccctggctcaagagatcctcccacctcaacttcccaatttgctgggacaacacgttcgccataatgcccggctaatttttgtattttctgtagagacagggttttgccatgttgcccaggctggtctggaacttcctgggctcaagcaatcctccctccttggccttccaaagtgctgggactacaggtgagccacctgtatccatttccttactgatgaatatttaaattgtctccaattttctgttattcaaatgctgaggcaatgaacagtcttgtccatgttttcttcaacacgtgtaatgtttctctaggattcacatctagaaatgggattgttgggttatatacggtgttctctagtgctttttattcttctgagttacaaagcatttaaactgcattaagttgttaagcatttccactgagtagttttagatacatagtattttaccaacccttatttaggagctcatggcttttatcaattttaatctaaatgaactctcacatggtaaagcaattcacagtttacagagtgcccatgtcatttcagattatcttccccatgtgtctaacacctacttttaaaaatcgttattgttgtctgggcggggtggctcacgcctgtaatcccagcactttgggaggccaaggcaggtggatcaccttaggtcatgagttcaagaccagcctgaccaacatagtgaaaaactcatctctactaaaaatacaaaattagccgggtgtggtggcgcacgcctgtaatcctagctactcaggaggctgagaatcacttaaacccgggagacagaggtcgcagttagctgatatcgcgccactgcactccagcctggatgacataagagtgagactctgtctcaaaaaaattaaagaaaggaagaaaataaagaaaaaatatgggtggggcatggtggctcaggcctgtaatcagagcactttggaagaccaaggcagggaactgcttgagcccaggagttctagatcagcctgggaaacatacagagaccctgcctctacaaaaaaaaaaaaaatgtaaggctgaggccgggagcagtggctcacaactataatcccagcactttgggagactgaggcaggtggatcatctggagtcaggagttcaagatcagcctggccaacatggggaaacccagtcgctactaaaactacaaaaattaacgggagtggtggctcacagctgtagtccttgctacttgggaggctgaggcaggagaattgcttgaacccgggaggcggaggttgcagtgagccgagatcgtgccactgtactccagcctggttagcagagcaagactccatctcaaaaaaaaaaaaaaaaaaaaaattaagactaggtgcagtggctcacacctgtaatcccaacacttggaggccaaagtggatggattgcttgaggttaggagttcaagaccagcctggccaacttggtgaaatcccatgtctaataaaatacaaaaattagagccaggtgtggtggctcacgcccataattccagcactttgggaggctgaggccggcggatcacaaggtcaggagttcaaggccagcctgaccaacatagtgaaaccccgtctctactaaaaatacaaaaaattagctgagcgtggtggccagtgcctgtgatcccagctactcaggagaatggggcaggagaatcgcttgaaccagggaggcggaggttgcaacgagccgagatcatgtcactgtactccaggctgggtgacagtgcaggactccatctcaaaaaaacaaaaacaaaaaaagaaaacacaaaaattagctgggtgtggtagtgggcgcctgtaatcccagctactctggaggctgtggcaggagaattgcttgaatccaggaggtggaggttgcagtgagccgagatggtgccactacactccagcctgggcgacagagggagactctgtctcaaacaaacaaaaaaattaaagaagtgtctgggtctactggcaggtgtctataatcctacctactaggcagactgaggtgggagaatcgtttgagcccaggagatcaagggtgcagtgagccctgattgtgtcactgcactccagcctgtgtgacaggtgacaggcaagcccctgtctcaaaaaaaaaaagctggaatgaaaggtggagtcagagagcaaaaaattgtcaactatgtgtccagtacagttaggagcgttctttttttttttttttttttttttttttttgagacgtagtcttgctgtgtcgctcagactggagtgcagtggcactatctcagctcactgcaacctctgcctcctgggttcaagcaattctcctgcctcagcctcctgagtagctgggattacaggtgcgcgccaccaccaagcccggctaattttttgtgtttttagtagagatgaggtttcaccctgttagtcaggttgttcttgaactcctgacctcgtgatccacccacctaggcctcccaaagtgctgggattacaagcatgagccaccacacccagcccagttaggagctttctgagaagaggttggagacaggagagggaaaaagcctttgctgaccagatgaccaacgtattctgatctgaatccaactctctggttataacttgattttccagctattgtgatttttttcaacaattatattcctgttgtaaataaataaattggcaagctgcttagtttgtttcttgtgagtcttattagcaagagtctgttccctggaatcctctgggtacacttgaaaagtcagttctggaccaatgtgatgccatggagatatctctgtaaaactctgtctgatggctagctgacatctacttctaaaccagtttcctcgagaacatttactctttaggaattcatgctctaaatttaaaaacaatgcatctaaaaatgtcaagtctaggggtaagcagttttagaatatttccttcaattttcttatttgttttgtttttgggtatagtgtagatatgttagatacacacttcttgccttccatcagactaagaaaacaaagttgaatgagaccaagattcatgtcctggttttatggaagttttccttgtaattttacttatttatttatttatttttatttttatagacatagggtcttgctatgttacccaggttggtctctaactcctaggctcaaggaatcctcccacctcagcctcctgaattgctgggaccacaggagggcgccaccacccgcggctaattttttttttaaatctttttgtagagaggaggtctcctcatgttgcaaaggctggtctcaaactcctgggctcaagcaatcctcctgccttagcttcccaagattactggtgtgagccaccatgccctgcccataaggttttattacatacagtcacacctattgtgacagataccttccggtctggcaagcccaagcccagcttattcactacggtccttacagataacacttgccaacacccttcttggacttgtgccagaattgctgtcctgctggtcatctcttgggcctctctcttggatcccccattcgtccacgagcttctgggtggtgacacctgggttttgttgttgttttttgagaccgagtctcgctttgttgcccaggttggagtgcagtggcacaatcttggctcactgcaacctctgcctcccggttcaagcaattatcctgcctcagccctcgagtagctgggattacaggcgcccaccaccacacccggctaatttttgtatttttagtagagatgaggtttcaccaggttggccatggctgctcttgaacttctgacctcagtgatccacccgtctcggcctcccaaagtgctgggattacaggcgtgagccactgctccccgctgacacctgggtcttagtaaattcccctaaggcctgctctgctcttaaggaccagggcttttgtcatcagatctgggctcaaattctgcggcttggaaaagtcgattcgctattttttaaaatttttaatttaaaaaaaagtattttttatttagagacagggtctcgctctgtcgcccaggctggagtgcagtggctccattacagctcactgcagcctcggcccccgggctcaagcgatccactgggaccacaggcgtgctccactacgtgttgctagtagtagcagtagtagtagtagtaatagtaatagtagtagtatttttggtgagagagggtttcgccgtgttgcccaggctgggtctcgaactccagagctcaagggatccgcccgcctcggcctcccaaagtgctgggactgcaggcgtgagccaccgcgcccggccgattcccccctttatccctcaatttcctcatctgagcaatggagatacaggtagggctgaaggtcaggcaagaatgcgatgagctgtgagaagcacttggcaaggtgcgggttatcaaccttgccaggcctcagcacgtttcccaaggaggcccaaccagcggcgctgtgccgcagcacggaagaggcggggtgagccgcggggcgggcggcgctgggacccggacgccacccgcgcgaggcgccgccgtgcgcccgtcaatcaaggtcgtcgtggggcatggggcggcggggctgggcggtgcttccgcctgcgcgaggccgcgccgggccgcttggaggcgcccggtgcagtcgggaacccgcgctaggtttcgccggccgcgcggccagatgaggggggcgatggagctggagcctgagctgctgttgcaggaggcccgcgagaacgtggaggcagcgcagagctaccggcgggagctgggtcaccggcttgaggggctgcgtgaggcgcggaggcaggtcggagggccacacccacaggggcgctgtgggcccgggggtggcgcggatgccgggcgaaggctgggagggctttgaggggtgggactgtccgaaaactctggagtagggaagaggcattcatttgaaaggagacctaatggagtctgggaacggggaaggtgggagttggggaggtcgtaaggggaagttttgggggtggagggagggtgtgaggagcgttcactaaactgtggggcagcgatgggagtagcggtggcctccgaagtttgggagagtgagggaccagagcagaatccgagggggtcatgcgggtagtgatgagtcgggggaggaggagactggtaaaaaacctgcggtgggtaggcggggaggcattgattttagagagcctgaggaagaggtgggacagtgacctgggagagctgaaagtggagacaaaatggatattggaaggggaggactaaggggcgagagtgagggagaggtagggattgagaagcagtagcatttgacaataaatgcggttaatgcctgaataatatgtcatacgatcttgaatgctttttaaaaaatcatttagagtaatcctgttctagaaggtttaaaatttaaggtgaaggtgaagctatgttggaagagcagaaggaaaatgatttccttttccttgagagagggaatacaaaggtatagagaaatggaaaaatagattttaagagaggagtgctgaaaggaaaagctaaatataatttcaagtggtgcagttatctgtttcacagggcaagagttatcaaagatacaggaaagccatatggtttctctataccctcgaatatatatagaaaaagatataacccgctgccaattggcgataggacggataatcttcagagtactattaacgcaactgcttaataagtgctttttgagtgagtgggattccatctgaatttctctgggtcatacttgatattaatctagttggtcgtcttagcacttccttgctgcatataacctgaaaatggtagaaaa

SEQ ID NO: 7578 - DNA, 6000 bp, Homo sapiens
acaacagtctccatggacgcccttcatgcatcagcacctccatggccctcgggagcacacgcagaggagccagggcctggcctgagtgttgggaagggaagggagttttctgggctgaggtcagcagcggtggggctcagagagaaggtccttttcttgtgctggaattctggactccccgttttgggcactcaccgagggccctgtcgaggagccctggtcttctggggtcaccctcaatgccctgagtcagtcccaggctcttgagccatcccttggagctggtgccacggggggaagggcagctggggccggaagccacctgcccagggcatgagagagggtccccagccctcccgcgggcccacccccttctgtttcctgtcagtctgtcctccccagggagggagggagggagggcgctcatcccctgcgggcgggggcggggcgcgctctgagaccgttgggcgccctgagatctggcccacgtggcctcggggttataagccctgccctccctgaagggaaccccacttcggagcctggagcacagggcgagctctcctccgccctgcagcctcaggtaaggatccggaccttcactgctgccccaactggggctcctcagctcggggcctctaggggcttgggctgctggtctgggtggaggcgcgttgggggtgtcgaggagcttgggtgcaagccccatgcgggaagctcagggcaaagcgccttgaaaccctctctagtgaaggaaggtaaaatggctccgggaccccaggcggggaaagaggtgtccaaggaggagggctggagagtaaggcggggatggcagagggtacgcagaggctgagaagtgggaccagtgtctcaaggggcgccagcctcttcctccgcccaacatggccaccatttttgttgggatagccttgggctcctgccaggggaacagcagggcagtgagggagtcaggactttgggctggtggggaggccgagaatcaaggctctggggagtcaggactttggggctggtggagtggctggggactgaggccctggggggtcaggaccttgggctgctatggaggctgggactgaggctctgggggagtcaggaccttgagctggtggggaggctgggaattgaggccctggtgtgttcaagaccttgggctggtggggaggccagggcctgaggccctggggggtcaggaccctgggctgttggggaggctggggacttaggccctggggggtcaggatcttgggctggtggggaggctgaagggtggggactgaggctctgggcagtcaggacctcacggttggggtggactggagaccaagaccttggcaggggagctgtggctgcctcatttggacgctggagggtggctagcgtggctggaagcggccagccaggggttcacagaactgaaggtgaggcctccagaggccctagtctctacctgagtgtctctgaaactggggggatggggtggagcctttagggggaagggaagagggaactgaagaggaagtgggggagggaggtagaggaggcaagtctggcgccatgctgagtcaccgcccacaaggcccagggcgggccctcggggggccctggcagggttggggggatcttaggaagccacaaggagggctggggggctcttggagcaggagtcaggaggcctgggcagcctgaagagtacacgccgacggacagacagacagtgcagtcacccataaagtagaaagcactactaacagcactggagggtgtagtgtttcctactttatggatgagtgtactgtgggcttcggagatcacgccactgctgccgcccgctgcccgccaccatcttcctcggcgctcggggacctcgtgtgacaggtgagcaccttacggcccctccctaccctgcccagatgcctgaaaggcctccatggctttcctgcccttcctggttccggacagctggggaaaggccacagcagctcctctgctgccctgcagtctttgggggcggggagggctggacatgtggaaccctgatgcagccgcagcgtcaaggacgaggaaggggtgggaagggatggtacgtggaggggaatgggtggtgggaccagggacccaatgctaataaagactggactgtgcttctcttttgtctgagactctgttgctggggtggggagctgaatgcgggcggcaggcacatggacagtatgggcgcacagaagggctgggagggagaacctctgtcgctcctccagaagatacgggtttggccctgcctatgagatcagaagagggctctgggcctggccaggccacagccggaggagagaagggcctgggccatctgcagaaaggggcagggatgtaaggcatcctctcaccttctaccctagctctggccctatcctgcccccctacatacccaaactgaaagctgcctacatccagttttaatctaagaaagtctagggggtcctaggtcatataaaaattgggcaaaatccactgtggcacatacacagcatcttagacaagggcacagacactcatatacaaagcacacactgagatgcaaatgcatttacacacagaggccccattcagtgtgccagtaacacacacacagacacatgtgacatgactggcatgacacacacagggattacacacacccagggcacatacatattcagtagtacacacatgcaatgatagaaacatagggcgtgtcttacacatagaagagcacacacatacagtgacatttgcataataaacacggtggctccatacacatacatagatagagacatgttcatatatcatgataaatatagaatacatagatacatggtgatatatatatataaatcaaaccatgtcattatgcatatttacatgacgatatgagcatgtcatatattgtgtaatcaattactacattgtgccatatagtagcatccatatctatatatatcatgatgtgttgtaatttataaactcatgcaatgatagcctcccatgcacataacagcacacacatagacacagtggcaaacaaacatagatgcaatgacacagaaacatacatacagatacacccaatgtgtttttgttacgttttattatgtgactcatagacacataatagcacacacatatatacacacaatggccccttcacatatacagaaatagataatgtctattctatagatgcatactatacacacgcatgcgcataatggcatgcatatatactctgacctaaacagcaacacatcatgcagtggcgtgcgtgttgacctacacactgctttagggaagtgaagatgtccactcctccccatgcaccccctacctccagttccattggctcttgcctgggtggagcccacagtcaggggctctagggttcagtatcaccgctgctattctgtgggggtgccacacgagggcccccgaccttggctgaaactggcttgcctaatgagtcccgggttcagagtggagaggggctgcctctcggggcttctcccaacacccctggctctggggactctgtctagacccctgccactgcatatagactgactcctggctgaggggattctcacgtccttgtcccccaaattatttagcaacaagatctaaggctagacagaagatgaacttccaggcaattcgggacaaagccaacccaacaggccatgtgggcttccctggtggcctgggacagccaggttgccccccaagtgcaatctgccaggaggaagcagaaggaattctccgtctatttctacctgtctctttgcttgtcttcccggtttctttctcttggtttctgtctctctctttgtttcatctcaagtcccatcttttctagttctgcccttctctgtggctggatctctgtcataccctcccccgttctgtctctatcagtctcacccgatgtagggaggaccatctgcaccccactcgcctctgtactccggaaggtgtgagaatgtgtgaagatgagggtgggaggccacatgtgggagccctgggctgacatgccgtgagaaacctgctcttccttctgtccccgaccctgtcagccggttcagcccaccagtccagcgccatcaccatggaaaccagcagccgacttcctattggtgggtgggaggggaggaggaggaggaggaggggagggctggctcttcccggctcacccccccacccaattctgaggctcagccctcctcggagcccaccatctcgaggctcctggactgtaagggacccctgcagtccccagagcagaggccagcaggggctgagactatgaggcaagcagcccatcgacccaggcctccttaggaccagcccagccacccagcaagcgaaagagcagcagcagagagcagagccggagataaaggaccacagcggaccactggggatcacccccagcagctcctgaagcctctggccgggctgaggggttgcgacagacggccagacccacagacactgacagacacacaacgacaccgatgcacacagctgcacgacactgacacactcagatacaaccagggacagcatcacatactgccacagccctgcaatacagacacccacacacacacacacaaacaactggcaactctgaaatgggcagacagtgacacacagcaccacccccctcaacacacagaagtgggggcacccatcttcccaacacatgagacagcattgacctgcacggacagacctggagacacacacacgcaccctcacccaggcgcagctgtcggtggcctctgcacatcctccctacccccacagggacaccctcgctcctccacatactcgcgcacacacacagctaccagcaaacatagctcacatacccctggctccagctccagcagccctggcgccttctgcagcctcctttgtgggtggggaagagctcagccaaccttggatggagcgtcggtgaagcaagagctcagaggggagaggggctggcctggcatgaccctcgccagtccccccacctggctgggtgatgtcccccggcccgggttctggggccccttggcagtaccatggagcaactgacaaccctcccacggcctggggaccctggagccatggagccatgggcactgcccacctggcatagctggactccaggtcgagggggtgaacctagcagtgcagccccaagcatcgctgatactcctccggcagctctgcagcttcaagaactgaggtctgaggagagttccaagcccaaaggagacgggagctccaggcccgtggggggaactgaccctgaaggagcagaggcttgtctgcccagcctgggccagcaagcatccagctctggacccgcctgccagaggccagaggatgaggaagtggaggctttcctgaaggtaagggatctgtggagggctggggtctgcaaggtgggggtctctcaccatgtcctccagcctggccaggaggtgaggcgaggtatgcatccccaatgcccacctgtcctctcttggcctgtctgtgggtccatctctgtggctatctgtcctctcttcatcgagcagaaatctgaggggctccatttctttcgtcatttgtctgtccttctgaccctctttgcctgtctgtctagatctggccctgctgctgccccgtccctctctgtgcctcctcctgacagtgtgtctgtctgtgtctcttcttccatgagtctgtctgtccttaggggctgggggatacagggggagtgtggaggtgcacagagaatcagtgcagaggaagtagattgaggggagggggcttggtgctgggctgaggcagggttggggtgggtgtgagcaggctcctgtagaagagggaaggaacaggactttgggggagggcaggggagtctggagggatgggagtgggagctcgagctcgcatgtccct

SEQ ID NO: 7579 - DNA, 6000 bp, Homo sapiens
tgtgcctggcctatctctggtatttttagtacgatgtcaagaacttcatatattttttggatcactttaattgtaaggtcgtatccagactgatgaaatgctcttggaggtaactatcctgagaagcaacttcactgatgcattaaaagcagtgactggcatggaataaggattaaagtatattaatccaaaacatgtaaaattgcattaatgttataacaacctaaagcaaaactaataaatcacataaaaaactctcacgttattttccttagtagtttacattgtgctagatacttttgcatgtacatgcttacaacttttcttctgtttttaaactttgcattacatataaattctaccatattatatgatcctcataaaaatcgtcggttaaatggctgcataaaaaaccatgcggttggccgggcgcaggggctcacgcctgtaatcctagcactttgggaggccgaggtgggcggatcatgaaatcaagagattgagaccatcttggccaacatggtgaaaccctgtctctactaaaaacacaaaaaattagctgggcattgtggcgcgcgcctgtagtcccagctactcggaggctgaggtaggagaattgcttgaacctgggaggcggaggttgcagtgagccgagatggcgccactgcactccagcctggcgacagagggagactccgtctcaaaaaacaaacaacaacaacaacaacaacaacaaaaccccaaaagaccatgcagtttacggatcattatgctgttccctcatttcttttttgttattaatggaatttagcaaagaacatcttctgtactattacttatttttcaagaatagggccgggcgcggtggctcacgcctgttatcctagcactttgggacacctaggcaggcggatcacctgaggtcaagagtttgagaccagcctggccaacatggtgaaaccccacctctactaaaaatacaaacattagctgggggtggtggcaggtgcctataatcccagctactccggaggctgaggcaggagaatcacgtgaacttggaaggcagaggttgcaatgagccaaggtcgcaccactgcactccagcctgggtgacagagtgagactccaactcaaaaaataaaataaaataaaataaaataaaataaaataaaaatggtggctgaatgaatctcatagtaatattttgatatgtaaagaatggtcctgctgggcacagtggctcacgcctgtaatcccagcactttgggaggccgaggagggtggatcacaaggtcaggagttcgagaccagcctgaccagcatggggaaacccccgtctctactaaaaaaaaaaaaaaaaatacaaaaattagccaggtgtggtggtgggtgcctgtaatcccagctactcaggaggctgcggcaggagaatcacttgaacccaggaggtggaggttgcagtgagccgagattgcaccactgcactccagcctgggcaacagagtgagactccgtctaaaaaaaaaaaaagaatggttctgttttcatgtccaatgctattttcctttcctcaaagacttttacacctgaatgtatataattgattttacctaagattcccatcccttaattttccgtcttatctttcccaagttccggctattaatttggtaattccctacatgttgtcattataatgtatatatatccccctttggggacataaacatatccccaagggaagagaaacacataaacttttttgtttttttaaactttctaacccaatcgtctctgaaatctgagcctggactagatgaggccactcacttaagagaggccttcaaaatgactttcctattatgagtattctgtttttgagtgcatttgttttttgaggtagggtcttactctgttgcccaggctggagtgcaatggcataatcatggctcactgcagcctcaacctcctgggctccagtgatcctcccaccttggtctcccgaagtgtggggattacaggtgttagccaccacgctctgcccctgttctatgttttcatttattttacttcattttaaacatttagttacttttaaataaatgtttacagtcaatgtcaatatttaagatggcaaggaaaacaataaaatgaacatccatgtacctgcttaaaaaaatcattaccagtacattgattttctttttatttttgtgatagtctcagtatgctgcccaggatggaatgcagtggcactggaatgcagtggtgtgatcacggctcactgcaaccttgacctccacaggctcaggtgatcctatctcagcctcctgagtagctgggcctataggtgcaggccaccactcctggctaatgttttgtagatacggggttttgccatgttgcccaggctggtttcaaactcctgggctcaagtgactcctctgcctcggcctcccaaagtgctaggattacaggcatgagtcaccatgcccagcccttgaatggttttagtgttattcttatctgaatatttgttttaaacaacaggatttaaccttacaagaaagcctaaatacaaacctctgcacgttaaccctatatacatttttctatgctgtcacttacattttttaatttactgctttcaacttcaaaacaagcagtctcccccaggtctcccatgacgttctgaaatcctaacttctattacctaatacaaggctacaaattatgttagttgggtggttgggaacaaagcgtgctgtaaaaataaggcaaatgtgtatgtgtacattagtttgctaagttttttgccactgtctgccctcttaaattgtggtagcagctattgttcacattgatttctatatatttgtagtacaaggaagcatttctaaaggaccttgttcattgctttgcacaaaatggccacttaatatttgttgaatgaattgctggcactatctctggtattttaatttttatttatttatgtatttatttttgatatggagtctcgctctgtcacccaggctgaagtgcagtggcgtgatctcggctcactgcaacctcccgtgttcaagcgattctcttgcctcagcctccctaattgctgggaccacaggcatgcgccaccaggcccggctaatttttttgtatttttttttagtacagacggggtttcaccatgttggccaggctggtctcaaactcctgacctcaaatgatccgcccacctcggcctcccaaagtgttggaattacaggcgtgagccactgtgcccggcctatctgtggtatttttagtgtgatgtctagaacttcatatacttttttggattacttttaattgtagggctgtatccaaactgatgaaatgttctcgcaggtaactatctggagaagtgagttcactgatgtattaaaagaaatgactggcatggaataaggattaaaatatattaatccaaaacatttaaaattgcattaatgttataatagcctaaagcaaaactaacgaatcacataaaaaatcccccacgctattgtccttagtagtttacattgtgctagatactttcgcatgtatatgcatacaacttctattctgtttttaaactttgcattacatatacattcttccatattatatgatcttcataaaaatagttacatggctgcataaaaaaccatgcggttcctggactattatgctattccctcattccccttttgttattaatggaatatagcaaagaacatcttctgtacgattatttgtcaagaatagggccggtgcggtggctcaggtctgtaatcccagcactttgggaggccgaggcgggctgatcgcttgaggtcaggagttcgtgaccagcctgggcaacatgggaaaacctaaacgtctctactaaacatgtctctactaaaaatacaaaaattagtggggcgtagtggtgcacactgtggtctcagctactccagaggctcaggtgggaggatcacctgagccccggaagttgagactgcagtgagccgtgttcgcaccactgcactccagcctgggcgacagagggagaccctgtctaaaaacaaaaaaataaaaaataaatttctagcagtacagttacaatgtcaaaggataaggtacacattttttaaaaacttttctctttctcctcctgagataacgaaatacagtagcgtatgaacaactcttcatacattactctccaaggtttatcttgttaatcctttaagacgtatcatctccccatccttggctgcacctgaaaagagcgggagtcggcaggtaacctgatctcctccaccaggtgagtcccggatggaggtgtcaactacaagaccaggagcagagcattcctggggttttgctggaaccatcggcgtgggaatgctttctcttccctcgcccgaaagacgccaagttcccggcaggcagcggactcggttctaaccttcctcgccccagcctctcggagcgccctgcacgcagtgggcgtctaataaaatgcagttggccctgcttggacaaaagttctcccttaagtggcccggacagtaaacccctccaggtgccacagagctgccgcgcccgccgccgctttgctccctgcctgctccctcccagcgttccgcgtgggaccctcggcggcagctcacaccctccctgactgccggtgcccgccagggcaccctgcgcgcgcccgccggccccgccccggccccgccccgccccgccggccccgcctcccgtctcctccccgccccccggagccgacgagtggcggcggcggccccaggtcccgggtccctcagacaagagggcgggtggaggaggaagcggccgagcccagagttctgctccggcgcccccgagcaccgcccgcttcagccgaccagccccgtcggctactgggcctcgccgagacgagaggagggaaaggcctcggcggccgcgaggaggcggcgggggcgcgggcggaggcggcgcgggcggccgcggctgccgctttgttgtgcggcccgggccgaggaaggagaagtgggaggaggggggagctcggcgtcccgctccctccgcggctcatggcgacgactctcggcacatccgggaccctccggccgtggcggccgaggcgccggctgctcgggccccagccccggccgctgtggtgactccgccgcgcctcgccgtcgcccccgtgccgcccgccgcccccgccgcccccgccgccggggacatgtctaaccccggaggccggaggaacgggcccgtcaagctgcgcctgacaggtgagggggggcggcgggccgggctgggcagccgcggggtgggcgagctggcggggggtgcctgtggccttgggaagggccagggtcgcgatcaatgatgagttgggggtcggaggaatgggaaggcctagttcagggagagtaattggaaaaccacttgctctggtttggacattgtttaaaaagccgaggatgactcggggcggggggtggtgttttgtggaggggagaatacaccggttcgcatcgcaggcggatttcaggtcggaaagtcttggtcaaggagccagacgctgcctcccggggctcggggaacagcccctgggctaccgcccaggtgagatcgtgaaggggatgaagagctcccgtggcgaggattattgaatccggttgctgactgcgcgcagtaaacactccttaaagatggagcgcttaacgggagggtgtgcgtgtgtgttcccgggttgttaccttgcacacacccagttatgcccgcatgaaaaacctttactccccgccgccggccaccgctgcccgggccacacaccttaaactcatgtctctgaggtgaggagacaggttgacttttccggtgtgcctgtctgatccgacggcttgggctcattgtacactgtgttttggaagtgtctgattgtagggtggcatgtttggggttgtt

SEQ ID NO: 7580 - DNA, 6000 bp, Homo sapiens
ctcatgattagtgcccttataaaatgccctggagagttgctttgcttcttaaggtacaagacacttaagaacacagaggacactgtctgaaccagaattctggccctcaccagacactgaacctgtaaggactttcatcctgggacttcactgcctccagaactgatacccaaatttctttattcttttgagatgcagtctcgctctgttgcccaggctggagtgcagtggcacaatctcagctgactgcagcctccacctcctgggttcaggcgattctcctacctcagcctcctgagtagctgggactacaggcatgtgccaccaggcctggctaattttatcttttttttttttgagatggagtctcgctctgtcgcccaggctggagtgcagtggtgcgatctcggctcactgcaagctccgcctcccgggttcacccaccattctcctgcctcagcctcccgagtagctgggactacaggcgcccgccaccaggcccggctaattttttttgtatttttagtagagacggggtttcaccgtgttagccaggatggtctcgatctcctgacctcgtgatccgcccgcctcagcctcccaaagtgctgggattacaggcatgagccaccacgcccagccaattttttctatttatagtagagacggggtttcaccatgttggccaggctggtcttgaactcctgacctcaggcaatccgcccgccttggcctcccaaagtgctgggattacaggcatgggccacagcgcccggcaagagacataaatttctgttatttgtaagccacccagtttatggtattttgttacagcaacctgaatataaaaaggctgcatgacactgctgggacacctaaaacaatggccttaaagactgccacggccgtggaaggcagttcaggggcttcatctagaatagcggtcagcaaactaaagggctagagagtcaatattttaggctttgtggtccacctatcatctctgtcacacttttcttttttcttagagacagcgtctcactatgttgaccaggctggtatcaaactcctgggctcaagtcatcttcccacctcgaccttccaaagtactgggattacaggtgtgagccatcacacccagtatcttctttaaaaaaccacttttttttttttttgagatggagtctcgctctgttgcccaggctggagggcaatggtgcgatctttgctcactgtaacctccgcctccagggttcaagcaattctgtttcagcctcccgagtagctgggattacaggcgtgcaccaccaggcccggctactttttgtatttttagtagagatggggtttcaccacattggccaggctggtctcgaactcctgacctcaaatgatgcacccgcctcagcctcccaaaatgctgggattacaggcgtgagccaccatgcccagccgaaaaaccactttttaaatgaaaaaaagttccaggataatctctgtaccttaagacaaaaacaaaacaacattcttagctcacagaccttacaaactagctaaattacccgatttaaaaatatttaacaaaagctaaaaacaagcaatatacacatgtcaacttaacacatctgaacataacctagaactctggaaacttcaggggcatttgtacctctaagatggccttgcctggcagagatcttctgtgaaaccaaaggtactgggccaggaccacagcacagggccaaacatacattccatactggagatgcaggacctgaaaagaatgtttttgtgtgccataaataatttagctgctggaagttggaatcattcatacagcaatttctgtcaggcattggcatccattacaaaaatggcagccctgttcaccaatccacgacctttggggatataaaactgcaatgcaatgtgatagaaactcttgatagcactgtttattcaacaagtgcttctagtgtcacagtatcagggatcattctcagactggggatatagctctccctgagcacatatcctactgtagagaggcaacgagcaagcaaataagatatttctagtcaggggccgggcacggtgactcaggcctgtcatcccagcactttgggaggatgaggcgggcggatcacctgaggtcaggagtttgagaccagcctggctaacatggtgaaacccctgtctctactaaaaatacaaaaaattagccgggcatggtggcacgtgcctgtaatcccagctgaggcgggaaaatcgcttgaacacgggaggcggaggttgcagtgagccgagactgcgccactgcactccagcctgggcaacatagtgagactacgtttcaaaaaaaaatggccgggcgtggtgggtcacgcctgtaatcccagcactttgggaggccgaggtgggtggatcatcaggtcaggagatcgagaccatcctggctaacgcggtgaaaccccgtctctactccactaaaaatacaaaaaaattagccggacatggtggtgggcacctgtagtcccagctactccggaggctgagacaggaaaatggcgtgaacccgggaggcagagcttgcagtgagcagagatctcgcgactgcactccagcctgggcgacagagcaagactccaactccaaaaaaaaaaaaaaaaaaggaaagaggcttctattctcacaggcaatatcatcaccccctacatttaggaagaaatgcaagtgtatttaaacgtgaagccagccgggagcggtggcttacacctgtaatcccagcactttggtaggccgaggcaggtgcatcacctgaggtcaggagttcaagatcagcttggccaacatggcaaaaccccgtctctactaaaaatacaaaaattagccaggcatggtggtgggcgcctataatcccagctacttgggaggctgaggcaggagaatcacttgaacccacgaggcggaggttgcagtgagctgagattgtgccactgcactcgtctgggtgacagagcgagactccatctccaaaaaaaaaaaaaaaaatccgtgaagccagattgggtgtggtggccaatgcctgtagtctcagttacttgaaaggctgaggtgggaggatcacttgagcccagaggttgaggttgcagttagcaaaaaaaagtgaagctgtttggaaacaatcagaaatagcctccactccagtctttttttttttttttcttcttgacaatgtcttgctctgttgctcatgcctgagtgcagtggcctgatcatagctcacagcagcctcgacctctcgggctcaagcaatcctcccacctcaccctccggagtagctggggctacaggcacaagccacgatgcctaatttttctactttttgtagagacgtagtatcactatattgcccaggctggtctggaactcctggtcccaagcgatcctcccgcctccgcctcccatttaacttctctaaagctgtttctttagcatgggacatgcctcacaggctggtgttaaaaccaaatgaaatactgcaaagtgaaagtgctttgaaaaaccgaagacaggcagggcatggtggctcactcctgcaatcccagcacttaggcaggcgggaggatcacttgaatccgggagttggaggttgcagtgagctgtgatcgcgccactgcgctccagcctgggcgccagagcgagacagtgtctcaaaaaaaagaaaagaaaaagaattattattgagagttttgttgtagctgtgagcttagaggaagaagcgaggtccaacccaagaaacactttgggcaccaaataaaactggaaaccctgatcccaaaactcacacaaaagtgagagataaggatgaatcaagaaacccttggacaagatcaaaagaagcattagaggtcagtcaagaatgtcactttcctggcaggaaagattcgatgtggagaaagccggcccggcgcagtggctcatgcctgtaatcctagcactttgggaggccgaggcaggaggatcacttaagcttacagttcgagaccagcctgaccaacatagtgaccagggtcacttcttggcagggtctccaaaattcttactgagagacatttaatgcaccgaagggcttcatatccgacgtttttgctccgggggtcaacctaaagcaggaagctgcgcagctgagcgtccgcacccccggtccctcaggaacccagccaagtcagccgacatccgctcctgacctcaggcgcctcctggcgggtgctgctgcacgcacctgcgggacgtggacctccaggacagccccgtcggcccccggacccggctcctccgagaatcgaaagcgctgggcccggaccccctgtcctcggaaatcgtgctcgcccagtagggcgtcgttgggccccgggcgggcgggggaccgcggaaggctccgggctgccagactgcgcgagcgggaagccgcgggccacgtggccgtagcacctgacggcaagaaggggaaagcccagatctggtgataaccctgccgcgctgcgagcgaagaaagcccggagcaaggcgaaagagactcacacgcgcagaactggcaacgggcggctggcgcgaccggaagtgatgggcacagcggcagcgcgggaggggaggggcggggcggggcggggcggtgacgcagccgacgtgaccttcccaacatggcggaggcccgccgtatgtgaaggagtaccccaggggagccaaagccaatggaaaaccgcgagaggcgtcggggcggggaagacggcggccgcttgcccaacccgaggctcgggaggtggctggggagtgaattttctggaaggcgactttaaaggcgccgggactgagcgaagggcgtttgggtactgccgtcgccgccgcccaggccggggaggggtgcgttagtgtcaggaagcgggctgcgccgaggtcgtagcggaaccagctggcgaccccgcagaatgaaccacaagagcaagaagcgcatccgcgaggccaagcggagtgcgcggccggagctcaaggactcgctggattggacccggcacaactactacgagagcttctcgctgagcccggcggccgtggcggtgagcgggtcgggcgggggtggccaggccgggcatcggcacctccagccgctacgcacctttctctgggcccgaggctgccctcgccccgagcgcccgggacctcgtagaggctcacccgcaccccgcggagtttggggtccccgaggcgcggattccggggcgggtctgcttcctcccgtgctgtggccgcccgtctgctctggcggacgacgggagtcccacgcctgtggcgctctcaactagaaggcccgtcgtccctgactcctttgggcggcgggtcccctaggggacctggctgtcaaggctcatggggggtggctctaggaacgacgtggcctcacgcacgcgccctgcccccaccccggaggagccagacgagagtcaacttccttcggtttgtcattaccagttggccttggggacacccttatctgccactggactttttttttttttttaactggacaggtcttttttaattccctcaggataacgtggaaagggcagatgctttacagctgtctgtggaagaatttgtggagcggtatgaaagaccttacaagcccgtggttttgttgaatgcgcaagagggctggtctgcgcaggagaaatggactctggagcgcctaaaaaggaaatatcggaaccagaagttcaagtgtggtgaggataacgatggctactcagtgaagatgaagatgaaatactacatcgagtacatggagagcactcgagatgatagtcccctttacatctttgacagcagctatggtgaacaccctaaaagaaggaaacttttggaagactacaaggtgccaaagtttttcactgatgaccttttccagtatgctggggagaagcgcaggcccccttacaggta

SEQ ID NO: 7581 - DNA, 6000 bp, Homo sapiens; identical to SEQ ID NO: 2878

SEQ ID NO: 7582 - DNA, 6000 bp, Homo sapiens
aggcatcacgctacctgacttcaaactatattacaaggctacagtaaccaaaacagcatggtattggtaccaaaacagagatatagaccagtggaacagaacagagccctcagaagtaatgccgcatatctacaaccatctgatctttgacaaacctgacaaaaacaagcaatggggaaaggattccctatttaataaatggtgctgggaaaactggctagctatatgtagaaagctgaaactggatccttccttacagcttatacaaaaattaattcaagatggattaaagacttaaacattagacctaaaaccataaaaaccctagaagaaaacctaggcaataccattcaggacataggcatgggcaaggacttcatgtctaaaaccatgaacattattaaatgatcatcagaccaatgatttcccaatgtttttgataaatttttgagcacaactcctcaattgtgtattcttatttattcataaatgttatacatttgtgctactctgtaatattatgtacattataaaacattgacaaaatggatatttttaaaagatgaaatttaaaaaatgaaatagaaattgtactaatttcttccaggagcctagtgggtcactttgtgcaccccccaccatggtgtgcacacaccattttggaaattcttgcaccagagagacttagagctcctgggggcagagactttaatacagatgatccctgacttaggatggtttgacttatgatttttctagtttaccatgatttgaaagtgatgcccattcagtagaaagtgtactttgagtcccctttcaatcactctgctttttttttttttttttttttttgagacagagtctggctcagtcgcccaggctgaagtgcagtgacgtgatctcggctcactgcaagctccgcgtcctgggttcacgccattctcctgcctcagcctcccaggccggctaatgttttgaatttttagtagagacgaggtttcaccacattagccaggatggtctctatctcctgacctcgtgatctgcctgcctcagcctcccaaagtactgggattacaggtgtgagccactgcacccggcctcaaccattcagcctttcattttcactacagtattcaataaattatgagatattcaacattttattataaaatagactgtgctagatgatcttgcagaactgtaggctaatgtcagtgttctgagcacgttaaggtaggttaggctacgatgttcagtaggttagggtattaaatgcattttcaacatacgatgggcttatcgggacacaaactcggccaggcgcggtagctcacgcctgtaatcccagtactttgggaggtcgaggcgggcggatcacaaggtcaggaaatcgagaccatcccggctaacatggtgaaaccccatctctactaaaaatacaaaaaattagctgggcgtggtggcgggcgcctgtagtcccagctactcaggaggctgaggcaggagaatggcatgaacctgggaggcgaagcttgcagtgagccgagattgcgccactgcactccagcctgagcgacagagcgagactccgtctcaaaaagaaaaaaagaagggacacaaactcatcatgagtccagaagcatctgtacatctatctcctctcccccacagttgaagttagcaccatgcctagatataattggtgcttaatacatgtttgtggaaggaataaataactcttaatgtacaattgttttctcgtggattagattaatttatttatttcacatgtatcaagcactttctatgtattattatagtactatactaagcgctgaaaaagaaagtttacaaagactaagctcctttactctaggcctgtgcttcttaagctctagcgtttgtaagaatgacctggagagcttgttaaacagattcctcctctcctcctccaattcttattcagtaggtctgaggtgaaaccagataatttgctgaacatctaagaagcttttaggaaactacactttggaggagagtgctgtgcattggaaaattggaaacatctcaaatattacatgagggtgagtgttgaagagaatttatattgcattttcactatttgccaagcacgtttaaatacatcacctcatttaaccctcatatagacctcatgagtcatgtattatttcagttgaggcaactgagattgagaaaggttagttaagttgcctaaactatagagtaagtaaatggcagagcttgggtttgtacccacttctgcactcagtaattcaggcaaatctgtagcaagtgtcttcttttttttcaggcactgtcctaaggaactgggcatacaacattgagtgagacagacaagctctctgtccccggtcaaactcaacaagcacttaaaatatcgatatgagggaggcagtgtcatggagatatacaacagaaacgtatactctagaacagagttagaactttccaggaaaaaaagtaaaatttacacgaagacctgagggatgaattagagcagtgaaggatgagcgggaaatgttttgggctgaagatatacatgaaggcttgaaagcattcaaggagctgcaggaagttcagaatgtctgaagtgtggagtggaagggagagataagacccttgaggtaggtaggcaggaaccagatcatgccaggctatttaggggtacagccagcctttttttttttttgacaggatctcactgtcacccaggctggagtgcactggtgggatctcagctcactacagcatctacctccctggctcaagctatcctcccacctcagcctcttcagtagctgggtctagagacatgtgtaccactaatttttgtattttttgtagacacggggttttgccacattgcccagactgatcttctgaactcaagggatccacgtaccttggcctcaccaagtgctgggattacaggtgtgagccactgcccctggtctcagatttgtatttttaaaaatttactatgcccccagagggggatggatcaaaggagagctagcttgcaggcagggaaatggttaaagatgttagtggtgtaaatttgggtaaatgctgtgtgactgggaagtagcagaagtgagggggatttaaaattgtttaagacttgatgattcagcctgggcaacatggcaaaaccccatctctacaaaaaaatacaaaaattagccaggtgtggtggcatgtgcctgtagtcccacctacttgggaggctgaggtgggaggatcatctgagcccaagaggtggaggctgcagtgggctgtaatcatgccactgcactccagcctgggcaacagagaccatgtctcaaaaaaaaaaaaaaaaaaaagaagacttgatgactgatagattggaagggacaatgtggacaggcaaaggagggatcgaagatgacttccaagtttttgagtaaactatacagtttcagtagggataaggttctgtaagcttattatttcacattttaaaggaagggtaaattcagataaatgaagtgatggaaagatgctattttagtaagatttcaatgacagaaacttacttgatagaaaatatgggagaggctggaggcggtggctcacgcctgtaatctcagcactttgggaggccaaggtgggaggtgggaggatctcttgagcctaggaatttgagaccaacctgggcaacatattaagaccctgtttctaaaaaattaaagaatcagccgggcatggtgatgcacatctgtaatcccagctactcgggaagctgaggcgggaagattgcttgagccgggagttggaggttgcagtgagctaggactgtgccactgcagtctagcctgggtgacagaatgtgaccctgttaagaaagaaagatagaggaaaattattatttttgtggtcaagtttactttttttgttttaatttgcaccaacagctttatcatttgtcgacagtggagttctgaatgccagagattcctcctctttttgccaagatcaggattaactatggagaggaccggccgtagactacgaactgtcagtctactgagtttctgtcagtcttttgagtttcctttgtcttcttgttgagtgaccttggaccttgagtttctgaagctcaacattccctttttcttcccctattttttaccccacactttacatcttaagtgggatattggacatctcggatcagtggaccagtgatgatttggactccgccttcttcgtctaggtcccgcccactttaagaccccaccccttccctaagccccgccccttgaagaggttgtctcgatatgacagcaaattctccacaatcctgtcctataggagatctaaagggtgggacttacatcaaccttttttttccatttgttttttcaagtgtctatttggcccaggttccatcccacttcattttcaacccaaggattggttactctgttctttgtctctggctcatgattggttctttcgttccgcccctctcttccagcttttgcaggcgggattaccacgcagcttcctgctcctgccaaaaaaaaaaaaataaataataaaagaagaagaagaaaagaggagagaggcgaaagaaaaatgtcacaaagatctttgctttttaattggctttaagccttgtcggtcaagccaaactctgcctttgattggtctttctatctgcccatcccggatcgggggcgggatttccccggaagacccacaccttgttgccactggccgaacagtgcgcctgtctgaagctcctggcccaggattggaggcggtggcggacaggtgggcgtggattggctagggcagccggtccgtgcaaggcgggggcggggcctcggcggctggttgcgcgtgtccgacgctggctccgctctatccggctttgctaggggaggtgagtccggccgcggcggaaccggcggctgaggaggcggcggctgaggagaaggcggccgcggcggctgaggagaaagcggccgcggggacggaagccgggtgggggggagggggggagacggagcagccttgagccctgcggggccgttgcgcgggggacccacccgctctcccccccaaccctcctcagcagaagcagccggcggcgggggcaggagtcagcccgcttccgaccgtaccccgcccgcctcccggggctcctgttctttggccccgggaccctaaccttctcccggggcggttccctccgtctgggcgtccgagcgctgcccacatctttcattcctccctgcacctccttcccttcacttttgccccggctctctttctcctctctgtcctgctgtcgcctcctctcctcactccagcctccttccctggcttattctgcccaggaaagtttggaacccccgccccccctccccaatcaggtcaacctgactaggagtagggggagatgtaggaaggcctgagagttcggggggggggaagctggaagctggtttcccagaaaatttccccccatcttctccatttagggtggtgggaattttttttaatcctgtttttgaggaggtggtaggtgtttagaaaaggatgtgggaatggaaggggtagatgagtcaaccctctttcaagattccaagggtggtgtgttacctgatccttttcgtgtgtggagttcagggggtcgggaggtttggcctttattcccacattcaaagttggaacctcccccaaattaagaatggagttttagtacccacttgtggcaggaatcctggggggaaggggtccttttttcctttttcttttcttttttcccttttttttccttttggcaacccacacccttccacacacgctcaccccaaaattaaacaccaagatcctctaacttgtttggattgactgatgaagacataaagctctatgttttttgaggtggagtgagtggtttttcttcatttttaaatggcc

SEQ ID NO: 7583 - DNA, 6000 bp, Homo sapiens
ttatctaatgactatgtcgtgtatcttttcatgtagttattagccattcatatacatattatttgaagaaacatctattcaagtcttttgcccatttttatttgtctctttattattgatttgtaaaagttctttatatattttggataccaaccaaaatatatacaaccatatatacaaccatatatagttgtatatgatttgcaactattttctcccagtcttcggctagttttttttcttttttctttctttctttctttttttgagacaggggtctcactgtgtcacccaggctggagtgcagtggcacaatcttggctcacttcaacctccacttcctgggttcaagagattcttgtgcctcagcctcccaagcagctgaaattacaggcgtgcaccaccatagcccagataattttttgtgtttttagtagcaatggccaggctgttttcgctatgttggcaaggctggtctggaactctggcctcaagtgatctggctacctcagcctcccaaagtgctgggatcacaggcatgagccacttcatctggcttcattttttctttcttttctttgagacagtgtctttctctgtcacccagactggagcgcagtagcacaatcacagctcactgcagccccaacttctcaggctcaagtgattgtcacacctcagccccaccaagtagctaggactataggcccgcaccaccatgcctggatagattttatatcttttgtagagatgaggtcttgccaggttgcctaggctggtctcaaactcctgggctcaagcgattcacctgcctcagcctcccaaaatgctgggattacaggtatgagccaccatgcctgaccccttctttttttttttttttttttttttttttttcgtatggagttttgctcttcttgcccaggctggagtgcaatggcaccatcttggctcactgcaacttccgcctcctgggtttaagcgattctcctgcctcagactcccgagtagctgggattacaggcatgcaccaccatgtctggctaattttgtattttttttttttttttttttttttttttagtagagatggggtttctccatgttggccaggctggtcttgaactcccgacctcaggtgacccatccgcctcggcctcccaaagtgctgggattacaggtgtgagccactgcgcgcggcctcctggcctcttattaatggtggcttttgaagtgcaaaaattttaaattttgacaaagtctaacatcaatttttttctcttgtcagttgtctttttgctgttatattcaagttctctgcctaacccaaggtcatgaagactatctcccatggtttcttctagaagttttatggttttagctcttacattcaggtatctgatctatttcaagttttttttttcttatgcatcctgtgagcaaaagatctaaattcaccttttggcatgtggctatccaattgatcacagcagcatttattgaatgcctatcctttcctccatgaaattgtcttggcaccttgtaaaatcaattgaccagaaatgtaagggtttctacttggactctggattctgttccattgacctataaacgcattcttatttattattattattattttcccccgagacggagtcttgctctgtcaccctggctggagtgcagtggcacgatctcagctcactgcaacccccgcctcctgggttcaagcaattctcctgcctcagcctcctgtgtagctggaattataggtgcacaccaccatgcccagctaatttttgcatttttagcagaggcggggtttcaccatgttggccaggctggtctcgaactcctgacctcatgatccacctgcctcggcctctcaaagtgttgggattacaggtgttagccaccgtacctggccttatagttgttgttgtttttaaattcagatacaacttatacacagtaaaattcatcctcttgagtgtacctttcttttttttttcttttcttgagatggagtctcgctcttgtctcccaggctggagtgcaatggctcgaactcagcacactgaaacctccgtctcgtgggttcaagagattctcctgcttcagcctcctgagtagctgagattacaggcgtacgccaccacgcccggctaatttttgtatttttagtagagacggggttttgccatgttggtcaggctggtcttgaactcctgacctcgtgatccacctgcctcagcctcccaaagtcctggaattacaggggtgaaccacgcacccagccttgagtgtgcctttctatgagtcctaagaaacacacacatttgtgcatccaaccccaaaaccaagatacagtatggtcccatcacctctcacaagtccctgtgccccctactgtggacccctctccctcctccccaaccccagacctggtttttgttcacacagttccacccgctccagaaagccatataagttgattcctacagcactccgccctctgactgtggctttgtttccatcccatccttcaatatccaggatgatctttccaaaatgtaaatgtgccctctcctctgtgcttctacttaagtctaaatacaacttgcagggtctggtctttgaccgctactcctgcccatctggacaaacaggatggatggctctcaaacctggtttgcagaacagccacctgagggcttgtcaataccacaccttcctgggtcttagccctagagactgagattcagttgctggagaggagcccaagaatctattttccacacaaggttagggaggtctagaggccacatttgcagaagcacagcttcctctctccacaccttccacacctgtccaggttcacccacgtggcctctgcttcctcccttctcctccaaccccactctctgtctccgcatgctgcatctcctcctgcccagagctctggcattgatttcctcactggggaaagtggcctccttccccaattcccatccaccgattccaacccccttcccatgtcagccagcttctcctctgctcagctgtcacctccactgagaagtctttcctgactccctatgtgagtcattttcccagcatagttgtctcctgtcatttcttatttgtgtgattctttggttaacatcaatcttcctgattggctgtgtgaggatgggcggggtctgtttttgttgtttacgcctgtatccccagcacaaaacatggggctggcatatggtaggtactaaacagatagttgaataaatgaatgagtgaattgtctactctgcctttgcacaagctgctccatcaccaaagagaccttgcctcctcccccacttctttgctgggcccactcataccggttttcctaggaaaactctggagaaaattgaggcaggagccactcattcgtgccccttccagggtggacctcttatcaccctaaggattgtttgttttcctgtcacccacatcaagctgggtggtggccgcagcctttgatctccacctcctaacccctctcccaagtaccctgtgtttgcccagcactgaatgagacagctaaagtgatccctgagagaactaaagtgttccctcaggccgggcgtggtggcttatgcctgtaatcctaacactttgggaggccgaggtgggcagatcacctgaggtcaggagttcaagaccaacttggttaacatggagaaaccccatctttactaaaaatacaaaaattagctgggtgtggtggcaggcgcctgtaatcccagctactccggaggctgaggtaggagaattgcttgaacctgggaggcagagtttgcagtgcgccaagatggcaccactacactccagcctgggtgacagagcgggactctggctcaaaaaaaaataaaataaagtgatccctctaagaggaatccccaggggcccaggccagagctttctccaggtcaccatggctcctcccactgtgccaccctgcctaaccccctcgattttaaaggagaagccaagactctggactttgctcagaaggtggggggcgggggagggagggcttaccctgggtacctctgaggggccagggcgcagccaccacggtaagggtgactgcagatcgaggggcaggccatgttgctggacaccaccctggctggcgtccctctcggcagggtgctctttgccccatggggtgggatccagagctgcagacaggcccccaggcttggccaatgaacagaccaggttcggggagggtgttggaaaagagtggatggggtggttccccttaccttgcagcccccaggccctcccccctccctcccaggtggtcgggactcttgatcttcgctcgtggtactgtctgttcggctgtcttccccgcctctccccaggcacctgcatcctcccttggcacctgctgccaggctaggaagggcaaaaacaatcccagttggcgtagtcagggagtctccgccctcctcccaggtttcctcctcccaggcgcctcccctggacccgcccccatctgcccaagataattttagtttccttgggcctggaatctggacacacagggctcccccccgcctctgacttctctgtccgaagtcgggacaccctcctaccacctgtagagaagcgggagtggatctgaaataaaatccaggaatctgggggttcctagacggagccagacttcggaacgggtgtcctgctactcctgctggggctcctccaggtaaggggaccgagatcggtctcagacgacagcctgccaggcaacccccagccgcaccagggccccaggctgtgccagtctccggctgaactggccggcggcccaggtgggaggattggagccacctggctctccccctcccccgctcggtgatgtcaggccaggggcgggggctggagggggacaggtagttaagggcctggcgtctccctccctgaagacgtggtcccagccgggtgtcctgacgctcggggttcaggtaagaacccaagcgggcatttatcctttgggggcaggcacggccggtctggaggccggtagggaaaggctgggtctcctgatgggttgcttggcctcccacttttctcttttctgtccatttcccaccctgccccctcctccccacccgccctcttttcgtccccatcctggtttccagcgctccttgttccctccctgtacacctccctgcaggcagcagctgagaatgggaaggaagacctgattctctcctccgacttggctttcccgctgaaactagcccctccccgcacacccggggagagccgccctcactctctggctcgcccagtttaccccagtttgggtttccccaagtctctaagacagacgtctctgcgggctgcggggagatgtggggagggccccctccactttggagggcagtgaaggagagggatcctctaaattgtcgaggcttcatctctccagattgtatgcccttctcagcaacaccgcctccggccctccgatgggaaagtggaggccgggtgagacggggtccctcctggcttcagcatgaaatgggcaggaaggctggaggggtgtatgaggggctctgcagtgcggtggggcctggggagagtggggtgggggatagcagatggtttcttctgcttgatgaggctagggagagacccaggttcccggtctgggtctccctggcagattgaggacagagaatgaatgcatctgccggcaaggtggaacgccccccaccccgccccccaactagccgcaccgccccccaggaatgccctcttttggtccgccggtcttggactctgctctcccctctcctgatatcctactgtatgcttggtggggggacctcatggaggcgggcagcctgtaatgattaactgcagagacactccagcattcttcccgaattaaactttaaaagagctgccccgccttctcccattgggtat

SEQ ID NO: 7584 - DNA, 6000 bp, Homo sapiens; identical to SEQ ID NO: 3281

SEQ ID NO: 7585 - DNA, 6000 bp, Homo sapiens
gcagggctgaggagtggggagattactactggcttctgatcgctagtcagaaggaggccccctctgaggcctggaggcagggaaagttggggcaagttggggtgtgtatggggagaaaactcaatggagaattgtggtccctcagaattcagtctgctttctgtcttctgcctcaggctctccccacaggccaccatgctgcacagctgcagggggaaccattccatagactatgatgtgaatggcaccccctggggttgttcaaggccctgcctgtgtagccacacgtggtgcatctgtctcccaccttcttccttcaaattagttcagacccacctggaaggaggtgttccagacaggccttaatccaacaccctctcccctaccctgcctcatgccactcaacatctcctattcctctgctgcccacccccaacgcaccaagcaagtcatggtgcaccaccaattgtggttcagaagcccctccccttctctctacgcagtttctgtgtctcttgggggctgatttatcataccccccatcaagcctactgcagtgtgtgagaaatcaatagtgcaaatggattgaggctgtttagcctgtcaactctccttgggccccaccaactcttctgggacttgcggagttgctcagtccccttctggctcaacatacacatatttagtggttgtagccagagcactgagcacaggaattattctttctgttggtctctgtctcattctctctcatatactaggctggtcttaacatgacaaatactcttgaacatttattttctagcttgggtggacgggcttaaagggcagtaggctgccagccagaggtagggagggaggcaggtgggtgagggatatggcgggtggaggggtggggtgggggtggggacgagctggggaagggattgggtgacagcccaccccatcagctctggtaactcaatccctgcaccccaccctcccaatttccctcctgctcaacaacttcagcagctgctggcagaagcaaggctggcagaagtgtgtttgagtgcatgtgtatatgaggggagagggtgagaggggctgtgggggcagggagtgctgccaggacatgttaaaggagactcacagcctgggtacaacttgggtggcaggaggaggtggggcaggtgggagagtgggtggtgagtgatgggcaggctgcagtgggggcagggcagcacaggggtctcacaaaacttgttggcactggagcggggcctggtgtggtgggggtgggcagtggtgagggggcaggggctggcacagacattgctggccccagaatgctgaggcccattctttgccagggggcgcatgtaaccatggagggacagtctgcccctgtctgcaatccttgggctgtgcctgctgggcatcacagtcttggtggtgactaagtcacttctgtcctggggctggcaaggtgccaggctcagctcttctcggtaggtgagtcactgccctggcatctcccccggatgcagctgagtcacccagccatgcctgctaggcaggtgggcaccaggcttgtggtgggggtggagggctatgtgtgcagcccccagtgtcttctctgatctctctctggcatgtcctggccccacccataaacctgcagagccaggcaaggatggcgcttctcccttgtgatccactaaggggtgaaggaaaaggtagcagggcacagagtggagtcatacatgtttgatttggagtaagtaggggaggaaagagttgaggagggaacattgattgggttatatgtatatatatatatatatatatgcttatatgtgtatatatatatatatatatatatatatatatatatatatacacacacacacacacacacacacgtatatatttatttattttaacaaaaaagacacagggtcttgctatgttgcccagacaggtcttgaactcctggagtcaagcaactcctggcgtcccatcttggcctcccaaagtgctagaattaaaggtgtgagccaccatacctggcctgggtttgaatcccagccctgccattgacaagctgtatgacgttgaggaaggcaattttctttttgagcctcagttttttcatctctacaatggcaacaggagcctgccccttcaggactgtgagaatcaaatggagtgggactattaaggtacttgtgggaggagctccttttgggatgagctaggaggcttgggaggggaagaggagtcagctggagctggttccaacaaactcccgcaccatggtcttggagggccaattgcttctcatcatctcttcggagtatcacttaatgctgttcttcaggagtttccacaggctgtgagaagacagccttgttgtactagaagtgtgggccctcctagggtgtctcagagctatattttatctcttttgactactgagaactgccactggccctggtacctgtccagactctcttccttcacttcctctagtttgaagagggatggggctcagactcctcccccagcctatctcctgtgtgcagggaaacagtaggccccaaggagtgtccttcttagagtgaggcgccccgagcctgtggcttttctctctctgctagtttcctgctgctccctgggtacccttctctcctcctgcatcagagtccctggtgggagggggtggtggaagccctgttatgagcccagcatagctggagttcaactgctgctgcagattgaagactcctggtcccccacctggggacctctcctgccttctgcagtcaagcttgggtagggctgggccttggacaggtggtactggtttccctggacaggaaggaaatgccccaaagatgtgcatgctttgtgtttgtacacacgggtgctggtcttgtttgagtgtctgacccctgcggggggtgggtttgtgtgtatgaatttcttccctcatccacacatggggctacttctgtgtctgtgcagaagtgtgccccaccctctgcttcatgcccttgtctgtgcacaaatgtgtttggatgtacttgttcatgcgtggatgtgcatacatgcgtcggggatgtacacatccctgccctgaatgtgcacgtggaaatgcatttgtaccaggatgcctgaccctatgatggcaggtgtacctgaaggtcgtcccacttgggaggcagtgtagctgtgtgcatgcatgcttgcattcttgtgtccatgagccttcccctccagcctcaaggaaggaagacaggtaggatctaggttgggaggtgtccgtgggcactaggggcgggctggcgctgactccagtcctgggctggttctcacctgggcagagctccctgctgttggcggggctcaggctggaaggcccttgggggagcgcggctggggggtaaggggttaagcggtggcgtccacatctgggagccattggcgcattcctgccggctgagcgcatgtttgcggatgaatctggacaggacagggcgggaggggctgggcgggaggttcgcaccggcggacggaaatccagacgggagcgggagacagctccggcccagcaggcgggaaggggcctggggaagcgcggcccagcactgctggggcagtttcccgtgcgccggccctcagggcaaagggtcccgccatcctggcttgtcctaccttaccatggctcttgggctaaagccagggacaatcagatacttcaattctagacccggctctgcaaccggtgcgactgtgcacaaaacccagtgcctgctcttggactctctttccttgtttgtaaagcggggtccgtcggaccagtgggtttgagagctctgccaccgggtcaggctgagagtctcctcactgggctggaggcctgggagtgcagcacttccccttccagtgggaagttctgtgggggcacttgtggccacttctctgcctgggaacagggcgagaggggagtattctaagcaattctgcttccccctaagcccgccagtggactgctagcgatggggacaggatcctcccaaacagagctgcaggctgggaggggggtcatgactgtattggggactgggggtctctcagatggagggtgattcagatcctgtccagctggaacatgaaaaagagctttcctggcttctccagacttgttcgggagagagaagcttgagtgtgagtctttgagcacggaggggtgctcctgggcgcccctactggaagatccaaaagtcttgccctttgaggagaagagtactttaagggggctgggagggttgggttgagccagggttcctaggacccactggagctgcagaggtgtttggggaaagaagagatatacttgcgggagatctactcctggactctttttttttttttctttttcttgcagctgagataattaagatccagggaagggaagtgacttggtcaaggtcacacagctctcagttccagctggtccctagaagaggattataattataggattcaggggcttgacagctagggcaggagtcaccgcactcacttccatattacgccgccgcctcacttctcagatttaggtgtgggtgtgtgtgtggttggggggaaaggagtgtaggataccacacgctgcggtcttctccaccgagcgctattttcattctttccgcagaacctcaccccgttcttgctctgaatcttcggttctgggtctgagggagggattctcccggattcccacggtccagtcttcaactaggagtggctcctttaagactcgcccttcccgaggtctattaaggagaggcgggggcgggcgtgagcctgtagatccgcccctgactggtgattggtcggtgggcgggcaggggcgggcctgagggacagggcctccccctacctctgctccgtaccctccgccccttcagtctggggctccgggtaaagtttcagcctccgcacgtgactcgctatggccgctgccatcgccccgcgcccctgagccgcggccccctggacggctcctctcccgggaccccgcaccctgatgccgagcagcaccagggcgccgggttagggcagacgctgtgctcgctggcaccccgaacgggttgcttcccccgctgcgaggtaattcctcccctggggattttggggagcccctggttcccgcaggcgtcggggccccatgtcctgccccagattggtgctgcgggaggggactgggtaccgggaggcttccgacgggaacccggggtttcctgggcttcccaactcgctgccgccgtgtccagggtgggggagccccgtctgtgagtctgcctgcgccgtgtcttcgcgcgcagccttgaggcgtctggggccgtctgctgcgcgtgtcccccgcgctcgagctgttgcagaaccgccgctgggaacttctgttctttttctctttaatgataagcaaaacaaaaagacttgaattcaaacctgtttggggagagatcggatgctcaacggactagccccctctctttttccctcctgttatctgagctgccctgtggtttggggagaatcagccagggggcccactcccaccagagggagccggccgggggccgggccggttcagctggtgtcccccgtggagtgaggggaaccgtcagaattgggtgcgggagccaatgcagtatgtgtgtaggggtgttcctgggtcttgtgccaccatggggtgtgggaactttttggggtgaggggaagacggaatagactgacttgtcgactttgctctgctgagggtgtctgggacctggtgccacccacgaggcttggaagctgctggccagatgtgtgtgtgagcctgttgtggggttggggggacggctgggaaatgagcttggctatgtcccctcatctcctctctgggcactggcctattgtcaggctgctccttgcgaaaggaaagacaggcctccagtgtgctagggt

SEQ ID NO: 7586 - DNA, 6000 bp, Homo sapiens
tcctggagggaaggatgtggggccatctccctccccactgcccccatgccagtcctcttctaggccctgaatctgacagctccctaaggtctgtgtgggcctaaacggaggacccagagaagaggtccatggccttctgggaaggagtcactgggtggttttctctctaccgctcctacctccccaaacccattcctcttgcttccagagccaagcccatggagaggcttggagaacgctgggggaagatggtatgggctgggctcagccgacgctgtcccctgcccacccccacaccctactcccctcccccagccaggggccctgggctgggcagcttcctgccttccccatggggaaatcgggggtggcatgcaggtgggtgggccccatgcccacatccggtggccgccagaaccttccctcgagcctctttcccgccactcctccaagcccccttctctccgcatagcacctgtgccccaccttaggacctgatcctcacccagctctgccctgccctcttgtccccacaggtcccaaagagagcgtgaacacctagcctagtgccatcagtccaccgggcctgagagtgtcccccgcactgtgccctgcaggctgaggctgcaggaggggtggctttgtggggtgctgaggacaacagtctccatggacgcccttcatgcatcagcacctccatggccctcgggagcacacgcagaggagccagggcctggcctgagtgttgggaagggaagggagttttctgggctgaggtcagcagcggtggggctcagagagaaggtccttttcttgtgctggaattctggactccccgttttgggcactcaccgagggccctgtcgaggagccctggtcttctggggtcaccctcaatgccctgagtcagtcccaggctcttgagccatcccttggagctggtgccacggggggaagggcagctggggccggaagccacctgcccagggcatgagagagggtccccagccctcccgcgggcccacccccttctgtttcctgtcagtctgtcctccccagggagggagggagggagggcgctcatcccctgcgggcgggggcggggcgcgctctgagaccgttgggcgccctgagatctggcccacgtggcctcggggttataagccctgccctccctgaagggaaccccacttcggagcctggagcacagggcgagctctcctccgccctgcagcctcaggtaaggatccggaccttcactgctgccccaactggggctcctcagctcggggcctctaggggcttgggctgctggtctgggtggaggcgcgttgggggtgtcgaggagcttgggtgcaagccccatgcgggaagctcagggcaaagcgccttgaaaccctctctagtgaaggaaggtaaaatggctccgggaccccaggcggggaaagaggtgtccaaggaggagggctggagagtaaggcggggatggcagagggtacgcagaggctgagaagtgggaccagtgtctcaaggggcgccagcctcttcctccgcccaacatggccaccatttttgttgggatagccttgggctcctgccaggggaacagcagggcagtgagggagtcaggactttgggctggtggggaggccgagaatcaaggctctggggagtcaggactttggggctggtggagtggctggggactgaggccctggggggtcaggaccttgggctgctatggaggctgggactgaggctctgggggagtcaggaccttgagctggtggggaggctgggaattgaggccctggtgtgttcaagaccttgggctggtggggaggccagggcctgaggccctggggggtcaggaccctgggctgttggggaggctggggacttaggccctggggggtcaggatcttgggctggtggggaggctgaagggtggggactgaggctctgggcagtcaggacctcacggttggggtggactggagaccaagaccttggcaggggagctgtggctgcctcatttggacgctggagggtggctagcgtggctggaagcggccagccaggggttcacagaactgaaggtgaggcctccagaggccctagtctctacctgagtgtctctgaaactggggggatggggtggagcctttagggggaagggaagagggaactgaagaggaagtgggggagggaggtagaggaggcaagtctggcgccatgctgagtcaccgcccacaaggcccagggcgggccctcggggggccctggcagggttggggggatcttaggaagccacaaggagggctggggggctcttggagcaggagtcaggaggcctgggcagcctgaagagtacacgccgacggacagacagacagtgcagtcacccataaagtagaaagcactactaacagcactggagggtgtagtgtttcctactttatggatgagtgtactgtgggcttcggagatcacgccactgctgccgcccgctgcccgccaccatcttcctcggcgctcggggacctcgtgtgacaggtgagcaccttacggcccctccctaccctgcccagatgcctgaaaggcctccatggctttcctgcccttcctggttccggacagctggggaaaggccacagcagctcctctgctgccctgcagtctttgggggcggggagggctggacatgtggaaccctgatgcagccgcagcgtcaaggacgaggaaggggtgggaagggatggtacgtggaggggaatgggtggtgggaccagggacccaatgctaataaagactggactgtgcttctcttttgtctgagactctgttgctggggtggggagctgaatgcgggcggcaggcacatggacagtatgggcgcacagaagggctgggagggagaacctctgtcgctcctccagaagatacgggtttggccctgcctatgagatcagaagagggctctgggcctggccaggccacagccggaggagagaagggcctgggccatctgcagaaaggggcagggatgtaaggcatcctctcaccttctaccctagctctggccctatcctgcccccctacatacccaaactgaaagctgcctacatccagttttaatctaagaaagtctagggggtcctaggtcatataaaaattgggcaaaatccactgtggcacatacacagcatcttagacaagggcacagacactcatatacaaagcacacactgagatgcaaatgcatttacacacagaggccccattcagtgtgccagtaacacacacacagacacatgtgacatgactggcatgacacacacagggattacacacacccagggcacatacatattcagtagtacacacatgcaatgatagaaacatagggcgtgtcttacacatagaagagcacacacatacagtgacatttgcataataaacacggtggctccatacacatacatagatagagacatgttcatatatcatgataaatatagaatacatagatacatggtgatatatatatataaatcaaaccatgtcattatgcatatttacatgacgatatgagcatgtcatatattgtgtaatcaattactacattgtgccatatagtagcatccatatctatatatatcatgatgtgttgtaatttataaactcatgcaatgatagcctcccatgcacataacagcacacacatagacacagtggcaaacaaacatagatgcaatgacacagaaacatacatacagatacacccaatgtgtttttgttacgttttattatgtgactcatagacacataatagcacacacatatatacacacaatggccccttcacatatacagaaatagataatgtctattctatagatgcatactatacacacgcatgcgcataatggcatgcatatatactctgacctaaacagcaacacatcatgcagtggcgtgcgtgttgacctacacactgctttagggaagtgaagatgtccactcctccccatgcaccccctacctccagttccattggctcttgcctgggtggagcccacagtcaggggctctagggttcagtatcaccgctgctattctgtgggggtgccacacgagggcccccgaccttggctgaaactggcttgcctaatgagtcccgggttcagagtggagaggggctgcctctcggggcttctcccaacacccctggctctggggactctgtctagacccctgccactgcatatagactgactcctggctgaggggattctcacgtccttgtcccccaaattatttagcaacaagatctaaggctagacagaagatgaacttccaggcaattcgggacaaagccaacccaacaggccatgtgggcttccctggtggcctgggacagccaggttgccccccaagtgcaatctgccaggaggaagcagaaggaattctccgtctatttctacctgtctctttgcttgtcttcccggtttctttctcttggtttctgtctctctctttgtttcatctcaagtcccatcttttctagttctgcccttctctgtggctggatctctgtcataccctcccccgttctgtctctatcagtctcacccgatgtagggaggaccatctgcaccccactcgcctctgtactccggaaggtgtgagaatgtgtgaagatgagggtgggaggccacatgtgggagccctgggctgacatgccgtgagaaacctgctcttccttctgtccccgaccctgtcagccggttcagcccaccagtccagcgccatcaccatggaaaccagcagccgacttcctattggtgggtgggaggggaggaggaggaggaggaggggagggctggctcttcccggctcacccccccacccaattctgaggctcagccctcctcggagcccaccatctcgaggctcctggactgtaagggacccctgcagtccccagagcagaggccagcaggggctgagactatgaggcaagcagcccatcgacccaggcctccttaggaccagcccagccacccagcaagcgaaagagcagcagcagagagcagagccggagataaaggaccacagcggaccactggggatcacccccagcagctcctgaagcctctggccgggctgaggggttgcgacagacggccagacccacagacactgacagacacacaacgacaccgatgcacacagctgcacgacactgacacactcagatacaaccagggacagcatcacatactgccacagccctgcaatacagacacccacacacacacacacaaacaactggcaactctgaaatgggcagacagtgacacacagcaccacccccctcaacacacagaagtgggggcacccatcttcccaacacatgagacagcattgacctgcacggacagacctggagacacacacacgcaccctcacccaggcgcagctgtcggtggcctctgcacatcctccctacccccacagggacaccctcgctcctccacatactcgcgcacacacacagctaccagcaaacatagctcacatacccctggctccagctccagcagccctggcgccttctgcagcctcctttgtgggtggggaagagctcagccaaccttggatggagcgtcggtgaagcaagagctcagaggggagaggggctggcctggcatgaccctcgccagtccccccacctggctgggtgatgtcccccggcccgggttctggggccccttggcagtaccatggagcaactgacaaccctcccacggcctggggaccctggagccatggagccatgggcactgcccacctggcatagctggactccaggtcgagggggtgaacctagcagtgcagccccaagcatcgctgatactcctccggcagctctgcagcttcaagaactgaggtctgaggagagttccaagcccaaaggagacgggagctccaggc

SEQ ID NO: 7587 - DNA, 6000 bp, Homo sapiens
gacataaatttctgttatttgtaagccacccagtttatggtattttgttacagcaacctgaatataaaaaggctgcatgacactgctgggacacctaaaacaatggccttaaagactgccacggccgtggaaggcagttcaggggcttcatctagaatagcggtcagcaaactaaagggctagagagtcaatattttaggctttgtggtccacctatcatctctgtcacacttttcttttttcttagagacagcgtctcactatgttgaccaggctggtatcaaactcctgggctcaagtcatcttcccacctcgaccttccaaagtactgggattacaggtgtgagccatcacacccagtatcttctttaaaaaaccacttttttttttttttgagatggagtctcgctctgttgcccaggctggagggcaatggtgcgatctttgctcactgtaacctccgcctccagggttcaagcaattctgtttcagcctcccgagtagctgggattacaggcgtgcaccaccaggcccggctactttttgtatttttagtagagatggggtttcaccacattggccaggctggtctcgaactcctgacctcaaatgatgcacccgcctcagcctcccaaaatgctgggattacaggcgtgagccaccatgcccagccgaaaaaccactttttaaatgaaaaaaagttccaggataatctctgtaccttaagacaaaaacaaaacaacattcttagctcacagaccttacaaactagctaaattacccgatttaaaaatatttaacaaaagctaaaaacaagcaatatacacatgtcaacttaacacatctgaacataacctagaactctggaaacttcaggggcatttgtacctctaagatggccttgcctggcagagatcttctgtgaaaccaaaggtactgggccaggaccacagcacagggccaaacatacattccatactggagatgcaggacctgaaaagaatgtttttgtgtgccataaataatttagctgctggaagttggaatcattcatacagcaatttctgtcaggcattggcatccattacaaaaatggcagccctgttcaccaatccacgacctttggggatataaaactgcaatgcaatgtgatagaaactcttgatagcactgtttattcaacaagtgcttctagtgtcacagtatcagggatcattctcagactggggatatagctctccctgagcacatatcctactgtagagaggcaacgagcaagcaaataagatatttctagtcaggggccgggcacggtgactcaggcctgtcatcccagcactttgggaggatgaggcgggcggatcacctgaggtcaggagtttgagaccagcctggctaacatggtgaaacccctgtctctactaaaaatacaaaaaattagccgggcatggtggcacgtgcctgtaatcccagctgaggcgggaaaatcgcttgaacacgggaggcggaggttgcagtgagccgagactgcgccactgcactccagcctgggcaacatagtgagactacgtttcaaaaaaaaatggccgggcgtggtgggtcacgcctgtaatcccagcactttgggaggccgaggtgggtggatcatcaggtcaggagatcgagaccatcctggctaacgcggtgaaaccccgtctctactccactaaaaatacaaaaaaattagccggacatggtggtgggcacctgtagtcccagctactccggaggctgagacaggaaaatggcgtgaacccgggaggcagagcttgcagtgagcagagatctcgcgactgcactccagcctgggcgacagagcaagactccaactccaaaaaaaaaaaaaaaaaaggaaagaggcttctattctcacaggcaatatcatcaccccctacatttaggaagaaatgcaagtgtatttaaacgtgaagccagccgggagcggtggcttacacctgtaatcccagcactttggtaggccgaggcaggtgcatcacctgaggtcaggagttcaagatcagcttggccaacatggcaaaaccccgtctctactaaaaatacaaaaattagccaggcatggtggtgggcgcctataatcccagctacttgggaggctgaggcaggagaatcacttgaacccacgaggcggaggttgcagtgagctgagattgtgccactgcactcgtctgggtgacagagcgagactccatctccaaaaaaaaaaaaaaaaatccgtgaagccagattgggtgtggtggccaatgcctgtagtctcagttacttgaaaggctgaggtgggaggatcacttgagcccagaggttgaggttgcagttagcaaaaaaaagtgaagctgtttggaaacaatcagaaatagcctccactccagtctttttttttttttttcttcttgacaatgtcttgctctgttgctcatgcctgagtgcagtggcctgatcatagctcacagcagcctcgacctctcgggctcaagcaatcctcccacctcaccctccggagtagctggggctacaggcacaagccacgatgcctaatttttctactttttgtagagacgtagtatcactatattgcccaggctggtctggaactcctggtcccaagcgatcctcccgcctccgcctcccatttaacttctctaaagctgtttctttagcatgggacatgcctcacaggctggtgttaaaaccaaatgaaatactgcaaagtgaaagtgctttgaaaaaccgaagacaggcagggcatggtggctcactcctgcaatcccagcacttaggcaggcgggaggatcacttgaatccgggagttggaggttgcagtgagctgtgatcgcgccactgcgctccagcctgggcgccagagcgagacagtgtctcaaaaaaaagaaaagaaaaagaattattattgagagttttgttgtagctgtgagcttagaggaagaagcgaggtccaacccaagaaacactttgggcaccaaataaaactggaaaccctgatcccaaaactcacacaaaagtgagagataaggatgaatcaagaaacccttggacaagatcaaaagaagcattagaggtcagtcaagaatgtcactttcctggcaggaaagattcgatgtggagaaagccggcccggcgcagtggctcatgcctgtaatcctagcactttgggaggccgaggcaggaggatcacttaagcttacagttcgagaccagcctgaccaacatagtgaccagggtcacttcttggcagggtctccaaaattcttactgagagacatttaatgcaccgaagggcttcatatccgacgtttttgctccgggggtcaacctaaagcaggaagctgcgcagctgagcgtccgcacccccggtccctcaggaacccagccaagtcagccgacatccgctcctgacctcaggcgcctcctggcgggtgctgctgcacgcacctgcgggacgtggacctccaggacagccccgtcggcccccggacccggctcctccgagaatcgaaagcgctgggcccggaccccctgtcctcggaaatcgtgctcgcccagtagggcgtcgttgggccccgggcgggcgggggaccgcggaaggctccgggctgccagactgcgcgagcgggaagccgcgggccacgtggccgtagcacctgacggcaagaaggggaaagcccagatctggtgataaccctgccgcgctgcgagcgaagaaagcccggagcaaggcgaaagagactcacacgcgcagaactggcaacgggcggctggcgcgaccggaagtgatgggcacagcggcagcgcgggaggggaggggcggggcggggcggggcggtgacgcagccgacgtgaccttcccaacatggcggaggcccgccgtatgtgaaggagtaccccaggggagccaaagccaatggaaaaccgcgagaggcgtcggggcggggaagacggcggccgcttgcccaacccgaggctcgggaggtggctggggagtgaattttctggaaggcgactttaaaggcgccgggactgagcgaagggcgtttgggtactgccgtcgccgccgcccaggccggggaggggtgcgttagtgtcaggaagcgggctgcgccgaggtcgtagcggaaccagctggcgaccccgcagaatgaaccacaagagcaagaagcgcatccgcgaggccaagcggagtgcgcggccggagctcaaggactcgctggattggacccggcacaactactacgagagcttctcgctgagcccggcggccgtggcggtgagcgggtcgggcgggggtggccaggccgggcatcggcacctccagccgctacgcacctttctctgggcccgaggctgccctcgccccgagcgcccgggacctcgtagaggctcacccgcaccccgcggagtttggggtccccgaggcgcggattccggggcgggtctgcttcctcccgtgctgtggccgcccgtctgctctggcggacgacgggagtcccacgcctgtggcgctctcaactagaaggcccgtcgtccctgactcctttgggcggcgggtcccctaggggacctggctgtcaaggctcatggggggtggctctaggaacgacgtggcctcacgcacgcgccctgcccccaccccggaggagccagacgagagtcaacttccttcggtttgtcattaccagttggccttggggacacccttatctgccactggactttttttttttttttaactggacaggtcttttttaattccctcaggataacgtggaaagggcagatgctttacagctgtctgtggaagaatttgtggagcggtatgaaagaccttacaagcccgtggttttgttgaatgcgcaagagggctggtctgcgcaggagaaatggactctggagcgcctaaaaaggaaatatcggaaccagaagttcaagtgtggtgaggataacgatggctactcagtgaagatgaagatgaaatactacatcgagtacatggagagcactcgagatgatagtcccctttacatctttgacagcagctatggtgaacaccctaaaagaaggaaacttttggaagactacaaggtgccaaagtttttcactgatgaccttttccagtatgctggggagaagcgcaggcccccttacaggtaaagtattctgcagctaagtggttaaaatccttttcttttttttttttttttttttttgagacagagcgtcactcttgtagcccaggctgcagtgccgtggtgcgatctcggctcacagcaacctccatctcccgagttcaagcgcttctcctgcctcagcctcctgtaactgggattacaggcatgcgccaccacacccagctaattttgtatttttagtagagacggggtttcaccatgttggtcaggctggtctcgaactcccgacttcaggtgatctgcccgcctcggcctcccaaagtgctgcgattgcaggtgtgagccaccgcgcccggcctgtggttaaaatcttatctacaacagcatttgctcgctgagttcagttgctaatcttttttggaaacagtgagtactccctcggctgtacattgaactcatttagggggctcctgaggcctgcctgggccctactggggagactgatttaattcgggtgatgcctgcgcatcagaatttctgaaagctcttcaggtgacttgaatgtgcagctatggttgaagcactgatctctaagggaggttttaataaagtccagcaataaaccacattagtgatttttctttttttttcttttttttttcttcattgagatggagtctccctctgtcgtccaagctggagtgcagtggcgcaatctcagctcactgcagcctccgcctcccgggttcaagcaatcctcctgtctcagcctcctgagtagctgggattacaggtgcccacc

SEQ ID NO: 7588 - DNA, 6000 bp, Homo sapiens; identical to SEQ ID NO: 2877

SEQ ID NO: 7589 - DNA, 6000 bp, Homo sapiens
gctaatgtcagtgttctgagcacgttaaggtaggttaggctacgatgttcagtaggttagggtattaaatgcattttcaacatacgatgggcttatcgggacacaaactcggccaggcgcggtagctcacgcctgtaatcccagtactttgggaggtcgaggcgggcggatcacaaggtcaggaaatcgagaccatcccggctaacatggtgaaaccccatctctactaaaaatacaaaaaattagctgggcgtggtggcgggcgcctgtagtcccagctactcaggaggctgaggcaggagaatggcatgaacctgggaggcgaagcttgcagtgagccgagattgcgccactgcactccagcctgagcgacagagcgagactccgtctcaaaaagaaaaaaagaagggacacaaactcatcatgagtccagaagcatctgtacatctatctcctctcccccacagttgaagttagcaccatgcctagatataattggtgcttaatacatgtttgtggaaggaataaataactcttaatgtacaattgttttctcgtggattagattaatttatttatttcacatgtatcaagcactttctatgtattattatagtactatactaagcgctgaaaaagaaagtttacaaagactaagctcctttactctaggcctgtgcttcttaagctctagcgtttgtaagaatgacctggagagcttgttaaacagattcctcctctcctcctccaattcttattcagtaggtctgaggtgaaaccagataatttgctgaacatctaagaagcttttaggaaactacactttggaggagagtgctgtgcattggaaaattggaaacatctcaaatattacatgagggtgagtgttgaagagaatttatattgcattttcactatttgccaagcacgtttaaatacatcacctcatttaaccctcatatagacctcatgagtcatgtattatttcagttgaggcaactgagattgagaaaggttagttaagttgcctaaactatagagtaagtaaatggcagagcttgggtttgtacccacttctgcactcagtaattcaggcaaatctgtagcaagtgtcttcttttttttcaggcactgtcctaaggaactgggcatacaacattgagtgagacagacaagctctctgtccccggtcaaactcaacaagcacttaaaatatcgatatgagggaggcagtgtcatggagatatacaacagaaacgtatactctagaacagagttagaactttccaggaaaaaaagtaaaatttacacgaagacctgagggatgaattagagcagtgaaggatgagcgggaaatgttttgggctgaagatatacatgaaggcttgaaagcattcaaggagctgcaggaagttcagaatgtctgaagtgtggagtggaagggagagataagacccttgaggtaggtaggcaggaaccagatcatgccaggctatttaggggtacagccagcctttttttttttttgacaggatctcactgtcacccaggctggagtgcactggtgggatctcagctcactacagcatctacctccctggctcaagctatcctcccacctcagcctcttcagtagctgggtctagagacatgtgtaccactaatttttgtattttttgtagacacggggttttgccacattgcccagactgatcttctgaactcaagggatccacgtaccttggcctcaccaagtgctgggattacaggtgtgagccactgcccctggtctcagatttgtatttttaaaaatttactatgcccccagagggggatggatcaaaggagagctagcttgcaggcagggaaatggttaaagatgttagtggtgtaaatttgggtaaatgctgtgtgactgggaagtagcagaagtgagggggatttaaaattgtttaagacttgatgattcagcctgggcaacatggcaaaaccccatctctacaaaaaaatacaaaaattagccaggtgtggtggcatgtgcctgtagtcccacctacttgggaggctgaggtgggaggatcatctgagcccaagaggtggaggctgcagtgggctgtaatcatgccactgcactccagcctgggcaacagagaccatgtctcaaaaaaaaaaaaaaaaaaaagaagacttgatgactgatagattggaagggacaatgtggacaggcaaaggagggatcgaagatgacttccaagtttttgagtaaactatacagtttcagtagggataaggttctgtaagcttattatttcacattttaaaggaagggtaaattcagataaatgaagtgatggaaagatgctattttagtaagatttcaatgacagaaacttacttgatagaaaatatgggagaggctggaggcggtggctcacgcctgtaatctcagcactttgggaggccaaggtgggaggtgggaggatctcttgagcctaggaatttgagaccaacctgggcaacatattaagaccctgtttctaaaaaattaaagaatcagccgggcatggtgatgcacatctgtaatcccagctactcgggaagctgaggcgggaagattgcttgagccgggagttggaggttgcagtgagctaggactgtgccactgcagtctagcctgggtgacagaatgtgaccctgttaagaaagaaagatagaggaaaattattatttttgtggtcaagtttactttttttgttttaatttgcaccaacagctttatcatttgtcgacagtggagttctgaatgccagagattcctcctctttttgccaagatcaggattaactatggagaggaccggccgtagactacgaactgtcagtctactgagtttctgtcagtcttttgagtttcctttgtcttcttgttgagtgaccttggaccttgagtttctgaagctcaacattccctttttcttcccctattttttaccccacactttacatcttaagtgggatattggacatctcggatcagtggaccagtgatgatttggactccgccttcttcgtctaggtcccgcccactttaagaccccaccccttccctaagccccgccccttgaagaggttgtctcgatatgacagcaaattctccacaatcctgtcctataggagatctaaagggtgggacttacatcaaccttttttttccatttgttttttcaagtgtctatttggcccaggttccatcccacttcattttcaacccaaggattggttactctgttctttgtctctggctcatgattggttctttcgttccgcccctctcttccagcttttgcaggcgggattaccacgcagcttcctgctcctgccaaaaaaaaaaaaataaataataaaagaagaagaagaaaagaggagagaggcgaaagaaaaatgtcacaaagatctttgctttttaattggctttaagccttgtcggtcaagccaaactctgcctttgattggtctttctatctgcccatcccggatcgggggcgggatttccccggaagacccacaccttgttgccactggccgaacagtgcgcctgtctgaagctcctggcccaggattggaggcggtggcggacaggtgggcgtggattggctagggcagccggtccgtgcaaggcgggggcggggcctcggcggctggttgcgcgtgtccgacgctggctccgctctatccggctttgctaggggaggtgagtccggccgcggcggaaccggcggctgaggaggcggcggctgaggagaaggcggccgcggcggctgaggagaaagcggccgcggggacggaagccgggtgggggggagggggggagacggagcagccttgagccctgcggggccgttgcgcgggggacccacccgctctcccccccaaccctcctcagcagaagcagccggcggcgggggcaggagtcagcccgcttccgaccgtaccccgcccgcctcccggggctcctgttctttggccccgggaccctaaccttctcccggggcggttccctccgtctgggcgtccgagcgctgcccacatctttcattcctccctgcacctccttcccttcacttttgccccggctctctttctcctctctgtcctgctgtcgcctcctctcctcactccagcctccttccctggcttattctgcccaggaaagtttggaacccccgccccccctccccaatcaggtcaacctgactaggagtagggggagatgtaggaaggcctgagagttcggggggggggaagctggaagctggtttcccagaaaatttccccccatcttctccatttagggtggtgggaattttttttaatcctgtttttgaggaggtggtaggtgtttagaaaaggatgtgggaatggaaggggtagatgagtcaaccctctttcaagattccaagggtggtgtgttacctgatccttttcgtgtgtggagttcagggggtcgggaggtttggcctttattcccacattcaaagttggaacctcccccaaattaagaatggagttttagtacccacttgtggcaggaatcctggggggaaggggtccttttttcctttttcttttcttttttcccttttttttccttttggcaacccacacccttccacacacgctcaccccaaaattaaacaccaagatcctctaacttgtttggattgactgatgaagacataaagctctatgttttttgaggtggagtgagtggtttttcttcatttttaaatggccaaatgacagcttgacccagtttgctttccaatcaaagggcatttattttgaatgtctctttgtggcgcaagagccaacgcaaaaatgatggcggcttacaatggcggtacatctgcagcagcagcaggtcaccaccaccaccatcaccaccaccttccacacctccctcctcctcacctgcaccaccaccaccaccctcaacaccatcttcatccggggtcggctgccgctgtacaccctgtacagcagcacacctcttcggcagctgcggcagccgcagcagcggctgcagctgcagccatgttaaaccctgggcaacaacagccatatttcccatcaccggcaccggggcaggctcctggaccagctgcagcagccccagctcaggtacaggctgccgcagctgctacagttaaggcgcaccatcatcagcactcgcatcatccacagcagcagctggatattgagccggatagacctattggatatggagcctttggtgttgtctggtgagtatccaaagaaaaacacaacctctcatggtttcttctgttggttgtcattggatgagtccatctctaatggttgtctccatgttgaccaaggtgcagcaagcttctcaacccaactgtaggaagccaccctcacttatgtggtaaagaggcctaatgcattggctgtctaggctcatggcaagttttggtggagcgccttctcatgagcaacacacataagtgtgctgtctaccaaacttttctattagaacctaagcaagccactgaacacaggatcagtagatgaatgtatgcaatactaattcctacgaagaccttggtcatctcgtgtgtttgattcagtggccctgtggcattaagtgttagcacctgatccagactgaattcctttataatactcttgtcattaggatatactttgcataactactttcctgtcctttctgtcttttcacttattttgtgatcttgatctccagaagaaagataggattcatagttgaaccagttaagatcattgcttgagtggtttattttaaaccataaagctacagttgagaagtatgtagctgtagccttttgataagaatgcattaaatatagcatcacacatgagtaccacaaatgaggttagtagactagctatgcagtggcccacattcagtgtaatgttttagtgtcatttagtgcct

SEQ ID NO: 7590 - DNA, 6000 bp, Homo sapiens
tcctgtgtttaatttatgattatcttttttttttttgagacagggtctcgctctgttgcccacgctggaatgcagcagtgcaaacatggctcactgcagcctcgacctgctaaactcaagctatcctcttgcctcagcctcctgaatagctgggacgacagacacgcaccaccatgcccagctaatttttttttgtattttttgtagagacaaggttttgccattttgcccaggctagcatttaacattttaagaaatggccagactgtttttcaaagttttcccaccagcaatatatgaggatttgtctctccatatcctcaccaatacttgttttctgtctctttgattataaccatcctagtggacatgacatggtatgtaactgtggttttaattctcatttatctaatgactatgtcgtgtatcttttcatgtagttattagccattcatatacatattatttgaagaaacatctattcaagtcttttgcccatttttatttgtctctttattattgatttgtaaaagttctttatatattttggataccaaccaaaatatatacaaccatatatacaaccatatatagttgtatatgatttgcaactattttctcccagtcttcggctagttttttttcttttttctttctttctttctttttttgagacaggggtctcactgtgtcacccaggctggagtgcagtggcacaatcttggctcacttcaacctccacttcctgggttcaagagattcttgtgcctcagcctcccaagcagctgaaattacaggcgtgcaccaccatagcccagataattttttgtgtttttagtagcaatggccaggctgttttcgctatgttggcaaggctggtctggaactctggcctcaagtgatctggctacctcagcctcccaaagtgctgggatcacaggcatgagccacttcatctggcttcattttttctttcttttctttgagacagtgtctttctctgtcacccagactggagcgcagtagcacaatcacagctcactgcagccccaacttctcaggctcaagtgattgtcacacctcagccccaccaagtagctaggactataggcccgcaccaccatgcctggatagattttatatcttttgtagagatgaggtcttgccaggttgcctaggctggtctcaaactcctgggctcaagcgattcacctgcctcagcctcccaaaatgctgggattacaggtatgagccaccatgcctgaccccttctttttttttttttttttttttttttttttcgtatggagttttgctcttcttgcccaggctggagtgcaatggcaccatcttggctcactgcaacttccgcctcctgggtttaagcgattctcctgcctcagactcccgagtagctgggattacaggcatgcaccaccatgtctggctaattttgtattttttttttttttttttttttttttttagtagagatggggtttctccatgttggccaggctggtcttgaactcccgacctcaggtgacccatccgcctcggcctcccaaagtgctgggattacaggtgtgagccactgcgcgcggcctcctggcctcttattaatggtggcttttgaagtgcaaaaattttaaattttgacaaagtctaacatcaatttttttctcttgtcagttgtctttttgctgttatattcaagttctctgcctaacccaaggtcatgaagactatctcccatggtttcttctagaagttttatggttttagctcttacattcaggtatctgatctatttcaagttttttttttcttatgcatcctgtgagcaaaagatctaaattcaccttttggcatgtggctatccaattgatcacagcagcatttattgaatgcctatcctttcctccatgaaattgtcttggcaccttgtaaaatcaattgaccagaaatgtaagggtttctacttggactctggattctgttccattgacctataaacgcattcttatttattattattattattttcccccgagacggagtcttgctctgtcaccctggctggagtgcagtggcacgatctcagctcactgcaacccccgcctcctgggttcaagcaattctcctgcctcagcctcctgtgtagctggaattataggtgcacaccaccatgcccagctaatttttgcatttttagcagaggcggggtttcaccatgttggccaggctggtctcgaactcctgacctcatgatccacctgcctcggcctctcaaagtgttgggattacaggtgttagccaccgtacctggccttatagttgttgttgtttttaaattcagatacaacttatacacagtaaaattcatcctcttgagtgtacctttcttttttttttcttttcttgagatggagtctcgctcttgtctcccaggctggagtgcaatggctcgaactcagcacactgaaacctccgtctcgtgggttcaagagattctcctgcttcagcctcctgagtagctgagattacaggcgtacgccaccacgcccggctaatttttgtatttttagtagagacggggttttgccatgttggtcaggctggtcttgaactcctgacctcgtgatccacctgcctcagcctcccaaagtcctggaattacaggggtgaaccacgcacccagccttgagtgtgcctttctatgagtcctaagaaacacacacatttgtgcatccaaccccaaaaccaagatacagtatggtcccatcacctctcacaagtccctgtgccccctactgtggacccctctccctcctccccaaccccagacctggtttttgttcacacagttccacccgctccagaaagccatataagttgattcctacagcactccgccctctgactgtggctttgtttccatcccatccttcaatatccaggatgatctttccaaaatgtaaatgtgccctctcctctgtgcttctacttaagtctaaatacaacttgcagggtctggtctttgaccgctactcctgcccatctggacaaacaggatggatggctctcaaacctggtttgcagaacagccacctgagggcttgtcaataccacaccttcctgggtcttagccctagagactgagattcagttgctggagaggagcccaagaatctattttccacacaaggttagggaggtctagaggccacatttgcagaagcacagcttcctctctccacaccttccacacctgtccaggttcacccacgtggcctctgcttcctcccttctcctccaaccccactctctgtctccgcatgctgcatctcctcctgcccagagctctggcattgatttcctcactggggaaagtggcctccttccccaattcccatccaccgattccaacccccttcccatgtcagccagcttctcctctgctcagctgtcacctccactgagaagtctttcctgactccctatgtgagtcattttcccagcatagttgtctcctgtcatttcttatttgtgtgattctttggttaacatcaatcttcctgattggctgtgtgaggatgggcggggtctgtttttgttgtttacgcctgtatccccagcacaaaacatggggctggcatatggtaggtactaaacagatagttgaataaatgaatgagtgaattgtctactctgcctttgcacaagctgctccatcaccaaagagaccttgcctcctcccccacttctttgctgggcccactcataccggttttcctaggaaaactctggagaaaattgaggcaggagccactcattcgtgccccttccagggtggacctcttatcaccctaaggattgtttgttttcctgtcacccacatcaagctgggtggtggccgcagcctttgatctccacctcctaacccctctcccaagtaccctgtgtttgcccagcactgaatgagacagctaaagtgatccctgagagaactaaagtgttccctcaggccgggcgtggtggcttatgcctgtaatcctaacactttgggaggccgaggtgggcagatcacctgaggtcaggagttcaagaccaacttggttaacatggagaaaccccatctttactaaaaatacaaaaattagctgggtgtggtggcaggcgcctgtaatcccagctactccggaggctgaggtaggagaattgcttgaacctgggaggcagagtttgcagtgcgccaagatggcaccactacactccagcctgggtgacagagcgggactctggctcaaaaaaaaataaaataaagtgatccctctaagaggaatccccaggggcccaggccagagctttctccaggtcaccatggctcctcccactgtgccaccctgcctaaccccctcgattttaaaggagaagccaagactctggactttgctcagaaggtggggggcgggggagggagggcttaccctgggtacctctgaggggccagggcgcagccaccacggtaagggtgactgcagatcgaggggcaggccatgttgctggacaccaccctggctggcgtccctctcggcagggtgctctttgccccatggggtgggatccagagctgcagacaggcccccaggcttggccaatgaacagaccaggttcggggagggtgttggaaaagagtggatggggtggttccccttaccttgcagcccccaggccctcccccctccctcccaggtggtcgggactcttgatcttcgctcgtggtactgtctgttcggctgtcttccccgcctctccccaggcacctgcatcctcccttggcacctgctgccaggctaggaagggcaaaaacaatcccagttggcgtagtcagggagtctccgccctcctcccaggtttcctcctcccaggcgcctcccctggacccgcccccatctgcccaagataattttagtttccttgggcctggaatctggacacacagggctcccccccgcctctgacttctctgtccgaagtcgggacaccctcctaccacctgtagagaagcgggagtggatctgaaataaaatccaggaatctgggggttcctagacggagccagacttcggaacgggtgtcctgctactcctgctggggctcctccaggtaaggggaccgagatcggtctcagacgacagcctgccaggcaacccccagccgcaccagggccccaggctgtgccagtctccggctgaactggccggcggcccaggtgggaggattggagccacctggctctccccctcccccgctcggtgatgtcaggccaggggcgggggctggagggggacaggtagttaagggcctggcgtctccctccctgaagacgtggtcccagccgggtgtcctgacgctcggggttcaggtaagaacccaagcgggcatttatcctttgggggcaggcacggccggtctggaggccggtagggaaaggctgggtctcctgatgggttgcttggcctcccacttttctcttttctgtccatttcccaccctgccccctcctccccacccgccctcttttcgtccccatcctggtttccagcgctccttgttccctccctgtacacctccctgcaggcagcagctgagaatgggaaggaagacctgattctctcctccgacttggctttcccgctgaaactagcccctccccgcacacccggggagagccgccctcactctctggctcgcccagtttaccccagtttgggtttccccaagtctctaagacagacgtctctgcgggctgcggggagatgtggggagggccccctccactttggagggcagtgaaggagagggatcctctaaattgtcgaggcttcatctctccagattgtatgcccttctcagcaacaccgcctccggccctccgatgggaaagtggaggccgggtgagacggggtccctcctggcttcagcatgaaatgggca

SEQ ID NO: 7591 - DNA, 6000 bp, Homo sapiens; identical to SEQ ID NO: 3280

SEQ ID NO: 7592 - DNA, 6000 bp, Homo sapiens
ctgaaggctggagagaaagaaagataaggggcctgggccagatctccatcctgtcctggaagctgtggatacaatctgttcacaccatccccacccccaaatctgcccgctgtagcccacgggagtttgcagaactcagcgggcaccctccccccgatctccagacactgaaggaacagaatgtaaaagccacagttcttattcttaatttgtttcaatttgtggatggaggcaaagaagttgcaagccatcaacagaggagccggggatgggagccccaaaagggtggctgcatgtttgcttcgtgtgcctagagactggggaatgcccgagggtctgggtgagccccagcagaaggcagaaaggaggaggttgtgtccttcccttcttcctatcctctgccacttcctcgctgttgcagtctgtgcatactgcctccttccctgcttcccactctttccctggacaataggagggacagcccaggcggagggacagcccaggcagagggacagcccaggtggagggagtgctgcctagcaatgcctttcttggagtccgaaatgtagagtcagacaaaagaacatgacatggagtttttaatgaaaatggggtccctcaccttttatctcccagcaaggataatgcacaggttccctctggacaagatcccagcatagacgcggggagggaactcagggaaggaagcccgtcttccttttaggtgggtcagggccgaggtattgtgtctaccccatgccaagggatgtgttgcttatggggctgtaccagtgcaggcctgcctgccctttgagggagtagtgtctgtgggaagaggaagtggtttccatctctaagtcattttggggcagtgccttcttcctcctcctcctctgtggagttggggcacagcgagggattgggcctcccagggttgactggaggccactcaacctttggctgtcagaaatagaggtgctcccctccccattttgacttctgggttgctggaaacctcaaccagcccacagaccaagggccttccatgggcaggagtcttaaaggacagttcttcctgtgtggccttgggcaggtcacccaagctctctccaaatctgtttcctcctccttaaagcaagacttctggctgggcacggtggctcacacctataatcccagctactcgggaggctgaggcaggagaatcacttgaacccggaggtggaggttgtagtgagccgagatcgcgccattgcactccagcccgggtaacagagcaagacttggactcaaaaaaaaaaaaaaaaaaaaagcgtgggcacggtggctcatgcctgtaatcccagcactttgggaggccgaggtgggaggattgcttgagctcaggagttcaagaccagccttggcaagatagcgaaatagcgaaaccccatctctacagaatataccaaaattagctgggcatgctggtgcacacctgtaatcccagctacttgggaggctgaggcatgagaattgcttgaatccgggaggtggaggctgcagtgggctgagatcacaccactgcactctagcctgggtgacagaacgagactctgtctcaaataaataaataaaaataaaaaaatagagcaaaacttctaatctctccttggctgggcgagttgccgttaggccacggtcgcctgcttcctgctgaggcccttggtgagtttcacgtacccagcaaggctgtgatagtgaggggcagggtagagctgggtactgtcttgggggatggtgccactctatactgggagccagtgtccacctggcactgggcctcatgatttcctgtttgttgtcccctccagatggggttggggacaggagggggccctgcctggcacaagtgggggccagtttggcctgcacctgctgagggcttactaaacgcaaagccctgagaaggagctgagggagggataaggctgagcaggatggggccccaggcctgcagacagctgccgctggaggccccccagccccagctgcgggccagagccttccttgtttcccacttctcccactgccccaggacactgtgttctgctctgacctgccccatgaccttgctgttgcccagaacgggcctcttgccctagcttctcctctccagctccggaaatcctatctatccttcaaggaacatcttgaatgccgcctcttcccagaaatcttcacagatgttcccccttgcttgccacactctgcctccctacttagaatgcctgtgggtccttatttattttttaacaacactcatctcgctacccagaagttgcttctcccctgttcctgccatgagctgtaaccatttgggacatcttttcctgaccacaaggtctttgatggcagggacagagtctcaggtcccttagcgccttgcagctgtgagcgcagagccttgctccatcatttgaaagatcccgaaggcatggaagcactctgtcctcttcgccattagtctcatccactgtcaagatttgcatacctgcccccagaccccagcattccatctgtagccctgactgcacttcagggccccacatccacctgtccagcagcccagtggacttctctgctttgcagtctcaggaacttcactgatgcgtaagtcacacacaagtctctttgctacctcttttcccataccccttacccccacccccccacgttatttgtacctttaaaatgtttattgaatccaccttcctctgtccatcagcacttccagtttcctaggccaagccacccttgtctgatgcctggactgctgcagtagcttttacctggtctctcttgccctcctataatccattcttcacacaactactggaaagatctttttacactgtaaatctgatctttcctttgcttggaacctttctatggcttttccttgcatttaggataaaatccaaaagccttactgaggcctataagcccccctggtctggcctgagcccacctctctagcctggtcttgtgtaccttttccttttgaattttgtgccccatgattctagccttctgccagttccttcaatgaactcatcaactgctgtaaccccagggcctttgcacagactcgccctttaactggaactacactcctttctactctttgcctgattaacttacaaactttctcttatggtaggtctgttttatttgagttcttccctaatttagttaaacctaaattaggtacctatgttaattcttcagagcataatagcatttatctcagtttgcaattgtgtgtgcatacagtgattatttgcttaatggctgttgctccctaaggtctacaagggcaggttccccagggtgtccacatagaaggtgctcagaaaaataccttgaattggcctagcttggtaagaacatgggctttggcagcaggaagttcaaatacctgctctactctttattattagtaatgtgatcttggacaacccacatagccttgctgagacctgttttatttgtaaaacatctcttggagttgctgtgaggataaaatgacaacatatataaagagccaggcttcttctagaagaatgtccttgggtagcatgtacatttccatccttccttttagagagtgggggtaataggataccccctcctccaggggtatcccctctttctagggacctacccaagctaggcctttcttccagtgaaacgtgcatcccgagggcttctaggatgaagtagtccactggaaggcaccagctcttccttttatctctccagagctggacagtgcaccaggggccggtactggttccccagctaggagacaccttgggcggggctttgctcgccggaagcacgcagagcgtggggaggagggccccctctgcctgtgtttgtgccaacagcacccgcgctgccgcgtcgggttccggcggccggagtcacacatgatgtcacagacaatgacacaagccggtgtctcattccgacacagcgtccgagctgcacaatgtcacacccgggtgccaaacacttggccccgcgcgacccggccctacgcctcctgccgccgctctccgcgtctccgggggaggtggcccggttcggccgggcagggggctggcgggcgagccccgcgggcgggctggcgagcgggtgatgtcacgggcagcggtgggtgggtcactcggaggtgaggcgccgccaggcgagttcagcgagagttcagccgcattgcattaggcaaatgaggcccggcctgggtgggggtgtgtgttaaggggaggacaccgggaccacccccctcttccccgccccaccacctcctccaccacggcttcgctcggccagggactgaccaaaccttgggggagcctgggagccggaactggtacaagggaggacgcccgcccctcttccgtccttgtcccctcgcagccccctcctctccctgtactcggcgtccctctgtactctgtgtactcctcatctggagcctttcccccttcctgcttctctcctctcctcccccttcccaggctgcccccacttgcctgtccacatgccgcctctccctctcggttccctgcgtttctcccgctgcagccggacgcgccgggaatgggttaagccaggggcggtgcctggacggggcggggcggtggaaagggggtggtgcccggaggggagggggcgcgcagagctggggtgggggggccgtggcgcgtaccaccagagaccgagcgagtcgccagctgcccctggcctggcgggggcggaaccgcgcgggatccccacccccacccggaatcctcgccacggagaatccctggagaagccccggatccccggctgggaggaggaagtgctcgttgacccccagccccgcgctgatcccgcccccggcctgcggacttggggagccgctgtactctgcctcggacgccacgagactctagacgggagtcccctcgaggtgaagccgctgagttcccgggccccgccaggcttccctgggagagccgacggaccccccctcccagcacacacaacttccctgcttttcaccgggactggcggagcggccggcggacttagacgcggggacttcagggcagggggcgccccctgcccgggtcaccagtcggggcgaggggacgtctcctctcccccagctgctctgctcggatggcgccgccggctgagtgacgggggcggcgcgcaggacttcccagctcggacctcttgccttcgaggggaaagatgtacgagagtgtagaagtggggggtcccacccctaatcccttcctagtggtggatttttataaccagaaccgggcctgtttgctcccagagaaggggctccccgccccgggtccgtactccaccccgctccggactccgctttggaatggctcaaaccactgtacgtaccggcctctcagtctgctgttgtagggggtgggagtgggcggtagggcttccactactactcgggggtgagagtcccggggtgtagtggaggtcctgtctctacctttcacttaacccgtgttgcccttgctggacaattgaaccctcccggccgcaccctccccccagtaaccctaagtgcaatttgtgttagattagggctgaggaactttgagagttccttctttcaagcaacattccttcatctcttgtttcacttcttccaggagaaatgaagcccaagccccttgcccccagtttatatcttcttgcctggaatccaacagcttcacagcaggctggagggtggggtaaaggtcctgtctgtgtgggtttgtctgctcccgggggaaggcccccccgccagatcccacttgccaaagcccgagggagagccccttcctgtgcgacagctgctgcccccagcccttgctcttgcgtcattagagtgggtgtcaggggagcactcagtgtctttggtattgacagtggggtgtggca

SEQ ID NO: 7593 - DNA, 6000 bp, Homo sapiens
ctaggcaataccattcaggacataggcatgggcaaggacttcatgtctaaaaccatgaacattattaaatgatcatcagaccaatgatttcccaatgtttttgataaatttttgagcacaactcctcaattgtgtattcttatttattcataaatgttatacatttgtgctactctgtaatattatgtacattataaaacattgacaaaatggatatttttaaaagatgaaatttaaaaaatgaaatagaaattgtactaatttcttccaggagcctagtgggtcactttgtgcaccccccaccatggtgtgcacacaccattttggaaattcttgcaccagagagacttagagctcctgggggcagagactttaatacagatgatccctgacttaggatggtttgacttatgatttttctagtttaccatgatttgaaagtgatgcccattcagtagaaagtgtactttgagtcccctttcaatcactctgctttttttttttttttttttttttgagacagagtctggctcagtcgcccaggctgaagtgcagtgacgtgatctcggctcactgcaagctccgcgtcctgggttcacgccattctcctgcctcagcctcccaggccggctaatgttttgaatttttagtagagacgaggtttcaccacattagccaggatggtctctatctcctgacctcgtgatctgcctgcctcagcctcccaaagtactgggattacaggtgtgagccactgcacccggcctcaaccattcagcctttcattttcactacagtattcaataaattatgagatattcaacattttattataaaatagactgtgctagatgatcttgcagaactgtaggctaatgtcagtgttctgagcacgttaaggtaggttaggctacgatgttcagtaggttagggtattaaatgcattttcaacatacgatgggcttatcgggacacaaactcggccaggcgcggtagctcacgcctgtaatcccagtactttgggaggtcgaggcgggcggatcacaaggtcaggaaatcgagaccatcccggctaacatggtgaaaccccatctctactaaaaatacaaaaaattagctgggcgtggtggcgggcgcctgtagtcccagctactcaggaggctgaggcaggagaatggcatgaacctgggaggcgaagcttgcagtgagccgagattgcgccactgcactccagcctgagcgacagagcgagactccgtctcaaaaagaaaaaaagaagggacacaaactcatcatgagtccagaagcatctgtacatctatctcctctcccccacagttgaagttagcaccatgcctagatataattggtgcttaatacatgtttgtggaaggaataaataactcttaatgtacaattgttttctcgtggattagattaatttatttatttcacatgtatcaagcactttctatgtattattatagtactatactaagcgctgaaaaagaaagtttacaaagactaagctcctttactctaggcctgtgcttcttaagctctagcgtttgtaagaatgacctggagagcttgttaaacagattcctcctctcctcctccaattcttattcagtaggtctgaggtgaaaccagataatttgctgaacatctaagaagcttttaggaaactacactttggaggagagtgctgtgcattggaaaattggaaacatctcaaatattacatgagggtgagtgttgaagagaatttatattgcattttcactatttgccaagcacgtttaaatacatcacctcatttaaccctcatatagacctcatgagtcatgtattatttcagttgaggcaactgagattgagaaaggttagttaagttgcctaaactatagagtaagtaaatggcagagcttgggtttgtacccacttctgcactcagtaattcaggcaaatctgtagcaagtgtcttcttttttttcaggcactgtcctaaggaactgggcatacaacattgagtgagacagacaagctctctgtccccggtcaaactcaacaagcacttaaaatatcgatatgagggaggcagtgtcatggagatatacaacagaaacgtatactctagaacagagttagaactttccaggaaaaaaagtaaaatttacacgaagacctgagggatgaattagagcagtgaaggatgagcgggaaatgttttgggctgaagatatacatgaaggcttgaaagcattcaaggagctgcaggaagttcagaatgtctgaagtgtggagtggaagggagagataagacccttgaggtaggtaggcaggaaccagatcatgccaggctatttaggggtacagccagcctttttttttttttgacaggatctcactgtcacccaggctggagtgcactggtgggatctcagctcactacagcatctacctccctggctcaagctatcctcccacctcagcctcttcagtagctgggtctagagacatgtgtaccactaatttttgtattttttgtagacacggggttttgccacattgcccagactgatcttctgaactcaagggatccacgtaccttggcctcaccaagtgctgggattacaggtgtgagccactgcccctggtctcagatttgtatttttaaaaatttactatgcccccagagggggatggatcaaaggagagctagcttgcaggcagggaaatggttaaagatgttagtggtgtaaatttgggtaaatgctgtgtgactgggaagtagcagaagtgagggggatttaaaattgtttaagacttgatgattcagcctgggcaacatggcaaaaccccatctctacaaaaaaatacaaaaattagccaggtgtggtggcatgtgcctgtagtcccacctacttgggaggctgaggtgggaggatcatctgagcccaagaggtggaggctgcagtgggctgtaatcatgccactgcactccagcctgggcaacagagaccatgtctcaaaaaaaaaaaaaaaaaaaagaagacttgatgactgatagattggaagggacaatgtggacaggcaaaggagggatcgaagatgacttccaagtttttgagtaaactatacagtttcagtagggataaggttctgtaagcttattatttcacattttaaaggaagggtaaattcagataaatgaagtgatggaaagatgctattttagtaagatttcaatgacagaaacttacttgatagaaaatatgggagaggctggaggcggtggctcacgcctgtaatctcagcactttgggaggccaaggtgggaggtgggaggatctcttgagcctaggaatttgagaccaacctgggcaacatattaagaccctgtttctaaaaaattaaagaatcagccgggcatggtgatgcacatctgtaatcccagctactcgggaagctgaggcgggaagattgcttgagccgggagttggaggttgcagtgagctaggactgtgccactgcagtctagcctgggtgacagaatgtgaccctgttaagaaagaaagatagaggaaaattattatttttgtggtcaagtttactttttttgttttaatttgcaccaacagctttatcatttgtcgacagtggagttctgaatgccagagattcctcctctttttgccaagatcaggattaactatggagaggaccggccgtagactacgaactgtcagtctactgagtttctgtcagtcttttgagtttcctttgtcttcttgttgagtgaccttggaccttgagtttctgaagctcaacattccctttttcttcccctattttttaccccacactttacatcttaagtgggatattggacatctcggatcagtggaccagtgatgatttggactccgccttcttcgtctaggtcccgcccactttaagaccccaccccttccctaagccccgccccttgaagaggttgtctcgatatgacagcaaattctccacaatcctgtcctataggagatctaaagggtgggacttacatcaaccttttttttccatttgttttttcaagtgtctatttggcccaggttccatcccacttcattttcaacccaaggattggttactctgttctttgtctctggctcatgattggttctttcgttccgcccctctcttccagcttttgcaggcgggattaccacgcagcttcctgctcctgccaaaaaaaaaaaaataaataataaaagaagaagaagaaaagaggagagaggcgaaagaaaaatgtcacaaagatctttgctttttaattggctttaagccttgtcggtcaagccaaactctgcctttgattggtctttctatctgcccatcccggatcgggggcgggatttccccggaagacccacaccttgttgccactggccgaacagtgcgcctgtctgaagctcctggcccaggattggaggcggtggcggacaggtgggcgtggattggctagggcagccggtccgtgcaaggcgggggcggggcctcggcggctggttgcgcgtgtccgacgctggctccgctctatccggctttgctaggggaggtgagtccggccgcggcggaaccggcggctgaggaggcggcggctgaggagaaggcggccgcggcggctgaggagaaagcggccgcggggacggaagccgggtgggggggagggggggagacggagcagccttgagccctgcggggccgttgcgcgggggacccacccgctctcccccccaaccctcctcagcagaagcagccggcggcgggggcaggagtcagcccgcttccgaccgtaccccgcccgcctcccggggctcctgttctttggccccgggaccctaaccttctcccggggcggttccctccgtctgggcgtccgagcgctgcccacatctttcattcctccctgcacctccttcccttcacttttgccccggctctctttctcctctctgtcctgctgtcgcctcctctcctcactccagcctccttccctggcttattctgcccaggaaagtttggaacccccgccccccctccccaatcaggtcaacctgactaggagtagggggagatgtaggaaggcctgagagttcggggggggggaagctggaagctggtttcccagaaaatttccccccatcttctccatttagggtggtgggaattttttttaatcctgtttttgaggaggtggtaggtgtttagaaaaggatgtgggaatggaaggggtagatgagtcaaccctctttcaagattccaagggtggtgtgttacctgatccttttcgtgtgtggagttcagggggtcgggaggtttggcctttattcccacattcaaagttggaacctcccccaaattaagaatggagttttagtacccacttgtggcaggaatcctggggggaaggggtccttttttcctttttcttttcttttttcccttttttttccttttggcaacccacacccttccacacacgctcaccccaaaattaaacaccaagatcctctaacttgtttggattgactgatgaagacataaagctctatgttttttgaggtggagtgagtggtttttcttcatttttaaatggccaaatgacagcttgacccagtttgctttccaatcaaagggcatttattttgaatgtctctttgtggcgcaagagccaacgcaaaaatgatggcggcttacaatggcggtacatctgcagcagcagcaggtcaccaccaccaccatcaccaccaccttccacacctccctcctcctcacctgcaccaccaccaccaccctcaacaccatcttcatccggggtcggctgccgctgtacaccctgtacagcagcacacctcttcggcagctgcggcagccgcagcagcggctgcagctgcagccatgttaaaccctgggcaacaacagccatatttccca

SEQ ID NO: 7594 - DNA, 6000 bp, Homo sapiens
accatagcccagataattttttgtgtttttagtagcaatggccaggctgttttcgctatgttggcaaggctggtctggaactctggcctcaagtgatctggctacctcagcctcccaaagtgctgggatcacaggcatgagccacttcatctggcttcattttttctttcttttctttgagacagtgtctttctctgtcacccagactggagcgcagtagcacaatcacagctcactgcagccccaacttctcaggctcaagtgattgtcacacctcagccccaccaagtagctaggactataggcccgcaccaccatgcctggatagattttatatcttttgtagagatgaggtcttgccaggttgcctaggctggtctcaaactcctgggctcaagcgattcacctgcctcagcctcccaaaatgctgggattacaggtatgagccaccatgcctgaccccttctttttttttttttttttttttttttttttcgtatggagttttgctcttcttgcccaggctggagtgcaatggcaccatcttggctcactgcaacttccgcctcctgggtttaagcgattctcctgcctcagactcccgagtagctgggattacaggcatgcaccaccatgtctggctaattttgtattttttttttttttttttttttttttttagtagagatggggtttctccatgttggccaggctggtcttgaactcccgacctcaggtgacccatccgcctcggcctcccaaagtgctgggattacaggtgtgagccactgcgcgcggcctcctggcctcttattaatggtggcttttgaagtgcaaaaattttaaattttgacaaagtctaacatcaatttttttctcttgtcagttgtctttttgctgttatattcaagttctctgcctaacccaaggtcatgaagactatctcccatggtttcttctagaagttttatggttttagctcttacattcaggtatctgatctatttcaagttttttttttcttatgcatcctgtgagcaaaagatctaaattcaccttttggcatgtggctatccaattgatcacagcagcatttattgaatgcctatcctttcctccatgaaattgtcttggcaccttgtaaaatcaattgaccagaaatgtaagggtttctacttggactctggattctgttccattgacctataaacgcattcttatttattattattattattttcccccgagacggagtcttgctctgtcaccctggctggagtgcagtggcacgatctcagctcactgcaacccccgcctcctgggttcaagcaattctcctgcctcagcctcctgtgtagctggaattataggtgcacaccaccatgcccagctaatttttgcatttttagcagaggcggggtttcaccatgttggccaggctggtctcgaactcctgacctcatgatccacctgcctcggcctctcaaagtgttgggattacaggtgttagccaccgtacctggccttatagttgttgttgtttttaaattcagatacaacttatacacagtaaaattcatcctcttgagtgtacctttcttttttttttcttttcttgagatggagtctcgctcttgtctcccaggctggagtgcaatggctcgaactcagcacactgaaacctccgtctcgtgggttcaagagattctcctgcttcagcctcctgagtagctgagattacaggcgtacgccaccacgcccggctaatttttgtatttttagtagagacggggttttgccatgttggtcaggctggtcttgaactcctgacctcgtgatccacctgcctcagcctcccaaagtcctggaattacaggggtgaaccacgcacccagccttgagtgtgcctttctatgagtcctaagaaacacacacatttgtgcatccaaccccaaaaccaagatacagtatggtcccatcacctctcacaagtccctgtgccccctactgtggacccctctccctcctccccaaccccagacctggtttttgttcacacagttccacccgctccagaaagccatataagttgattcctacagcactccgccctctgactgtggctttgtttccatcccatccttcaatatccaggatgatctttccaaaatgtaaatgtgccctctcctctgtgcttctacttaagtctaaatacaacttgcagggtctggtctttgaccgctactcctgcccatctggacaaacaggatggatggctctcaaacctggtttgcagaacagccacctgagggcttgtcaataccacaccttcctgggtcttagccctagagactgagattcagttgctggagaggagcccaagaatctattttccacacaaggttagggaggtctagaggccacatttgcagaagcacagcttcctctctccacaccttccacacctgtccaggttcacccacgtggcctctgcttcctcccttctcctccaaccccactctctgtctccgcatgctgcatctcctcctgcccagagctctggcattgatttcctcactggggaaagtggcctccttccccaattcccatccaccgattccaacccccttcccatgtcagccagcttctcctctgctcagctgtcacctccactgagaagtctttcctgactccctatgtgagtcattttcccagcatagttgtctcctgtcatttcttatttgtgtgattctttggttaacatcaatcttcctgattggctgtgtgaggatgggcggggtctgtttttgttgtttacgcctgtatccccagcacaaaacatggggctggcatatggtaggtactaaacagatagttgaataaatgaatgagtgaattgtctactctgcctttgcacaagctgctccatcaccaaagagaccttgcctcctcccccacttctttgctgggcccactcataccggttttcctaggaaaactctggagaaaattgaggcaggagccactcattcgtgccccttccagggtggacctcttatcaccctaaggattgtttgttttcctgtcacccacatcaagctgggtggtggccgcagcctttgatctccacctcctaacccctctcccaagtaccctgtgtttgcccagcactgaatgagacagctaaagtgatccctgagagaactaaagtgttccctcaggccgggcgtggtggcttatgcctgtaatcctaacactttgggaggccgaggtgggcagatcacctgaggtcaggagttcaagaccaacttggttaacatggagaaaccccatctttactaaaaatacaaaaattagctgggtgtggtggcaggcgcctgtaatcccagctactccggaggctgaggtaggagaattgcttgaacctgggaggcagagtttgcagtgcgccaagatggcaccactacactccagcctgggtgacagagcgggactctggctcaaaaaaaaataaaataaagtgatccctctaagaggaatccccaggggcccaggccagagctttctccaggtcaccatggctcctcccactgtgccaccctgcctaaccccctcgattttaaaggagaagccaagactctggactttgctcagaaggtggggggcgggggagggagggcttaccctgggtacctctgaggggccagggcgcagccaccacggtaagggtgactgcagatcgaggggcaggccatgttgctggacaccaccctggctggcgtccctctcggcagggtgctctttgccccatggggtgggatccagagctgcagacaggcccccaggcttggccaatgaacagaccaggttcggggagggtgttggaaaagagtggatggggtggttccccttaccttgcagcccccaggccctcccccctccctcccaggtggtcgggactcttgatcttcgctcgtggtactgtctgttcggctgtcttccccgcctctccccaggcacctgcatcctcccttggcacctgctgccaggctaggaagggcaaaaacaatcccagttggcgtagtcagggagtctccgccctcctcccaggtttcctcctcccaggcgcctcccctggacccgcccccatctgcccaagataattttagtttccttgggcctggaatctggacacacagggctcccccccgcctctgacttctctgtccgaagtcgggacaccctcctaccacctgtagagaagcgggagtggatctgaaataaaatccaggaatctgggggttcctagacggagccagacttcggaacgggtgtcctgctactcctgctggggctcctccaggtaaggggaccgagatcggtctcagacgacagcctgccaggcaacccccagccgcaccagggccccaggctgtgccagtctccggctgaactggccggcggcccaggtgggaggattggagccacctggctctccccctcccccgctcggtgatgtcaggccaggggcgggggctggagggggacaggtagttaagggcctggcgtctccctccctgaagacgtggtcccagccgggtgtcctgacgctcggggttcaggtaagaacccaagcgggcatttatcctttgggggcaggcacggccggtctggaggccggtagggaaaggctgggtctcctgatgggttgcttggcctcccacttttctcttttctgtccatttcccaccctgccccctcctccccacccgccctcttttcgtccccatcctggtttccagcgctccttgttccctccctgtacacctccctgcaggcagcagctgagaatgggaaggaagacctgattctctcctccgacttggctttcccgctgaaactagcccctccccgcacacccggggagagccgccctcactctctggctcgcccagtttaccccagtttgggtttccccaagtctctaagacagacgtctctgcgggctgcggggagatgtggggagggccccctccactttggagggcagtgaaggagagggatcctctaaattgtcgaggcttcatctctccagattgtatgcccttctcagcaacaccgcctccggccctccgatgggaaagtggaggccgggtgagacggggtccctcctggcttcagcatgaaatgggcaggaaggctggaggggtgtatgaggggctctgcagtgcggtggggcctggggagagtggggtgggggatagcagatggtttcttctgcttgatgaggctagggagagacccaggttcccggtctgggtctccctggcagattgaggacagagaatgaatgcatctgccggcaaggtggaacgccccccaccccgccccccaactagccgcaccgccccccaggaatgccctcttttggtccgccggtcttggactctgctctcccctctcctgatatcctactgtatgcttggtggggggacctcatggaggcgggcagcctgtaatgattaactgcagagacactccagcattcttcccgaattaaactttaaaagagctgccccgccttctcccattgggtatttttcctgagtgagagtgggcggggcctcagagtcctgggtcctcccttatactaggagtcatccaggggtttctcaccttctcacctgggccctgcaccctaaaaaattataagcctctcccgtgggggcggggcgtggagtactgggcggacgggggctctcccgccacatccaggcccctggcccaggcctcagtcccgcaagcccttccccctgctctgggaagcagagttgttttctgttggccctgaacaccgggccccgccacctgcccttagggccagccaggtggggcgtgattcaggaagtaaacaaggaggttgggaggacgggaacgcgggtggggctggaaccactgggggaggaggcagctgggaagccacggacggagttacctcgt

SEQ ID NO: 7595 - DNA, 6000 bp, Homo sapiens; identical to SEQ ID NO: 3282

SEQ ID NO: 7596 - DNA, 6000 bp, Homo sapiens
gaacagggttggttctgtcaatgatgcatgaagcagacttagtgtccctgcttggcttctgctgcccttgtgggagcaaaagctgatatatgtttgtcagtaaagtcttaagtgtaattcagactgctgaggaagaaagccctttccttgctggcttttctccctgaagctgagagcttcaggaaggtggtaggagttttagtgggatgggatgggatgggcttgtggttagcagtttttgccaggatcataggctgcttcacttagagtagtggcaaagatgctgacctacattcttccttttgaaggtgatggagtgtgtgtctatatcctggtttatctctctcccccaccccaaggaagctgattaagcttccatagagtgttgggtgttgccatggaaagagcatagacaaaataaattgtgtgtttcaaccccagagctgccacagatgtttctggctcaatggagacttgcctgtggctagctaactctgcaagaatgtgtgaggtccaggctgggggtggtggctcacgcctgtaatccagcactttgggaggccgaggcgggcggatcacctgaggtcaggagtttgagaccagtctggccaacatggcgaaaccctgtctctactaaaataaattagccaggcattgtggtgtgttcctgtaattccagctactgggaggctgaggcaggagaatcgcttcaacctgggaggcagaggttgcagtgagccgagatcgtgccattgcactccagcttgggcagcagaatgagactgtctcaaaaaggaaaaaaaaaaatgctgggtgtgatggctcatgcctgtaatcccagcactttgtggggccaaggcgggctgatcacttaagggtcaggagtgcaagaccagtctggccaacatggcgaaaccctgtctctactaaaagtacaaaaattcactgggtgccatggtacacacctataatcacagctacttgggaggctgagacaggagaattgcttgagcctgggaggtggaggttgcagtgagatgagatcatgccactgtactccagcctgggtgacagagtgagactctgtctcaaaaaaaaaaaaaaaatgtgtgaggtctaagctacccagagatcaaaaagttggcagagccttattctctctgcgccccctcttttgcattgctccctacctttactaagtgtccctttgaatatacatcaagccaggtgtggtggctcatgcctgtaatgccaacactttgggaggaggcagcagcgggaggattacttgaagtcaggagcttgagaccagcttgggcaatatagtgagacccccttacccttctctaccaaaaaaatcttaaaaatcagctgggcatggtggcatgcacctgtagtcctagctacttgggaagctgagatgggaggatgctttgagcccaggagttcaactcggcatgggctatgatcacaccactgcattacatcctgggtgacagagcgagaccctgtctctataaaagacagaaagcagatacaccaataagaatgagaagttgggaataagatgtgatttaggttttatatatatattatatacatattatatatattttatatatataatgtatattatatataatatacatattatatattatatacatattatttatatatatatatatatatattttttttttagatggtgtcttgctctgtcacccaggctggagcagtggcgcgatctctgttcactgcaagctccgcctcccgggttcacaccattctcctgcctcatcctgagtagctgggattacaggcacccgccaccatgcccggctaatttttttgtatttttagtaaagatggggtttcactgtgttagccaggatgatctcgatctcttgacctcgtgatccgcccgcctcggcctcccaaagtgctgggattagaggcttgagccaccatgcctggccggttatatattttttaaatatcttgagacgtgttaccttgactgctgagggaggacaaaagagatccaagattgaaattttatttacatttgtatctgtgcctagcaattagtatagtgcctaatacctggtaggtactcaatagttgtttaacagataagtgaaccaaataagatactgcctttccctcagtggtgagaacagttctaagctgaaggtaaacgttggtggtacttttgcacagaggtggagcaggcccctgcataagaagggtgctctgtcttacaaaatgtgtcttggcacagttttggagcatttattagcctcacagatgcattccaatcactccctctgatgtagtggcattttgcttgaggcaacttccatgttgctggtgggacgctttggctatgaggggaagagtcttatctacaggctgtgaagagggctgcctgtctggatgtcactcagtgtggctagattggccagaagctgggtctgtaggcaagggtttagggaggagcccacctttgatgtccctctttttaacttggggcaagttgtgatctcaggttcttcctgaaaagataaggtactttctaagataccttctcttaagctacaaacagtgcaggtcttcctcttagaagaggtgtgttccgtaaggggagaaggtgtgccctctggcctccccttgattttcaaccccagccccaaggcactggtagtggaagttaattgggtgcaaggggcttgggtaaaggctgaagactggtgaaaggagagagccagcttcgttttttaaaaagctctaattgagttctgaatcagcctcactccctttgatccctcctctgtttcccacactgcctgaaagagctagatcagcactttataacaagggtgcgcctgctccccgcaccgccccccgctcctgacgctctctgctgccgccatccactgcttgtctccttcagttaagataatgaagatgctgagagataaaatgtgtatttaataagggtgggggtagggaggcggaaaggggcaaccagggccttccctagtttggggcctcgccaagacttaagctgaaagcaaagctagagtaagacttggccccagggtgtgggggtttctgggcctcaatccagctgacttcactgcctgctgtttgccctaaattcccccacctccaccctctcacccccacactgctttcttcttgctcccaatgggaaaaaggactcttgcttcaactttcttttcagctggtaacttggcctttggtgcggtgccccccaccccagtgtcagctgcaaggtcgggctagggcagccccctctagcctaggcctgtagaagctgtgggttcacagtggggggtgaaaaagctggagttaatgaagaccagctgctagtctgggttctgcctacagctagctggaggccagcctttggtggtggttgatgggggggtggggtgacctccatccatgggcacaaggatatcctgtggcagctaggcttgtgcttctctctgagcttagttttatccttagtttataagagagtatctgtttccttcccctactcctctcctccccaaataacactcagctcttattgaactttataactgtagtggtggcccagctgagatctgaggatctccaaacccttttgtaaacactcattaactgcctgggaagaacgaagagccctgtttaacagctgggagagaactgaggcacattagggtgaaaggtttgacctaaactcaccccatggactccaccctggggccttccatccttagtccagctcctttactcagttcttcctgcaagacagaggtggaggcattgctggtgtcttctccccttctagggagaggccatgccctctcccctcaagtctgtcgctgacttcctctggcccttcccctcatgacgttttccctgctctgctgctagagatatgtgcaactctccttgcaaaatgttctcaatccacaacttcagaattcttatccagctttctcttgcccatctagcccaccaaacctgaattctcccttttgagctactgagaagactggctatactaaactgaatcagtgaccttgaagttgatctgttgtattgaggtccctctgcccctatatttatcctaaatggtatctaggaaaatattctctctttaacttgtttattctggtcataaagattcgggacattactgagggctgggtaggggcactagttgacctctaggttctacgtcctgttcttccactgacaattaccatttccagtaataggtgtaacccaaagttcttttttgtttttttctccttccctaaccccacctgtttatactcttgcctatatatgtgtatttgcagaccccacacattcccagatacacatacattggtcctacatgtttcccctgtttccagctgccatctaagtgagcctgcactttttacatgctgaaaatcttttttcaccctctatggcctcctaggtccttgggaataattgggagggatgaagggactcctgcagtccatgaggaagaggacagaagtgagcgcccaaccaaaatgaatgctccctttccaaaatctctagctgaatgccttagcaggagtggcagggaaagagatcttaaccccacctccagcaccaaaacctaaatccatctgctcagggcaggcaggaagaaatgtctattttctcctgtttcaggtcatcctatcctcgagttatccatatgctgtgtatttgagacagggaactgttcctgtccccagccgatgaccagacgcccatctttcttccagtgggttacttctcccccatcagtccttcgctctgcgcccgctgacccagtcggggctggctggtggaagagggcggggagagccttctagttggcgagtgggctttaggacccaacgggaacccgtgcctcttgcagcagcctaacccagaagcaggggggaatcctgaatcgagctgagagggcttccccggttctcctgggaaccccatcggccccctgccagcacacacctgagcaggtaggaccatgcacaccccttcccaattctttggccgcctttgaccccggcctctgcttctgatctagccatttccttctcgccagttctggctttccccatccctcctctcccgtcgctcactgtagtcctgggaggtgggagcctgggaacagtggggtgtctgaaagctcagagccctctgcaccctccagcacccttcctgcatttctcctgaggcagttcccgttctctagataagagtggggagtagggggaaggtctgcccaggccccacgcccttgcaccctcctttgcggtattgcctaataccccttcccccacctcacctagactggagaattggcaagtgctgaggtaacagagagaggagagagccagagagggacctgagctttcccaagggatttctttcttgcttcctcacccaaagagctcaggactttgcccctactccctacacaccttgtaggggaactaatgtccccttccaggttcatctcacacttgggtggctaaaggctttgctagagggtagtggaggttgtgagcattttggtgagcttttcctctaggaaagttctttcagcttagagcccccatccatgtcaacatttcaacacctgctgcagaagccccccgaccccacctgtgtgtgtgtgtgtgtagggacaatgtggttgtaagatctagaagctttggatagaggtggctgcatgcattgaaggggagggataccagagtgtggcccaggccagaacaggctcagtccagatggctagggaagggggtgtggaccagattgaggaggtcacccagccttgccagctccctgagcttcttggctttcagaatctcaggctcctggtgtttctctagagctacaaggtccccaagcttctgccccgctacaggctctctgggagagggc

SEQ ID NO: 7597 - DNA, 6000 bp, Homo sapiens
tcatttatttatttatttgttttagacagagtctagctctgttagccaggctggagtgcagtggcacgatcttggctcaccgcaacctctgcctcccaggttcaagccattctcctgtagcctcccaagtagctgggactacagatgcatgccaccatgcccggctaattttttgtatttttagtggagatggagtttcaccatgttagccaggatggtctcgatctcctgacctcccaatccgcctgcctcggcctcccaaagtgctgggattacaggcatgagccaccgcgcccggcttgttgttatttttttgttttgtttttgagacggagtctcattctgtcacccgggctggagtgcagtggctcgatctcggttcactgcaacctttgcctcccgggctcaagcgattctcctgcctcagcctcccaagtagctgggactacaggcgtgtgccgctacgcccagctaatttttgtatttttagtagaggtggggtttcaccatgttggttggccaggatggtctccatctcttgaccttgtgatccgcccgcctcggcctcctaaagtgctgggattacaggcatcagccactgtgcctggccgtgacccagaccctttgtaggtgggagctggagagaatgggatgctaacatctatagagcacctactgtgtgtcaggggctttgtctgtgttttacaaattttaatccctgcaatcctggaagagggacattatccccacttacacagaggacacagtgctgggggaggttaaagtactgcagaatcatgactgtaggattgtaaagctgggctgttttccaccatctacataggcagctttgagagtggattgtggggcacactcttgggtgtgggaagtgtggggggtggggcttagtgctgactgaaacccccttccccactgtagaggccctttctctgccttagaacctacctttccccggtagggggtgtagggaaggcccaagccataccccctcctctctgttttggatcctgaaggctggagagaaagaaagataaggggcctgggccagatctccatcctgtcctggaagctgtggatacaatctgttcacaccatccccacccccaaatctgcccgctgtagcccacgggagtttgcagaactcagcgggcaccctccccccgatctccagacactgaaggaacagaatgtaaaagccacagttcttattcttaatttgtttcaatttgtggatggaggcaaagaagttgcaagccatcaacagaggagccggggatgggagccccaaaagggtggctgcatgtttgcttcgtgtgcctagagactggggaatgcccgagggtctgggtgagccccagcagaaggcagaaaggaggaggttgtgtccttcccttcttcctatcctctgccacttcctcgctgttgcagtctgtgcatactgcctccttccctgcttcccactctttccctggacaataggagggacagcccaggcggagggacagcccaggcagagggacagcccaggtggagggagtgctgcctagcaatgcctttcttggagtccgaaatgtagagtcagacaaaagaacatgacatggagtttttaatgaaaatggggtccctcaccttttatctcccagcaaggataatgcacaggttccctctggacaagatcccagcatagacgcggggagggaactcagggaaggaagcccgtcttccttttaggtgggtcagggccgaggtattgtgtctaccccatgccaagggatgtgttgcttatggggctgtaccagtgcaggcctgcctgccctttgagggagtagtgtctgtgggaagaggaagtggtttccatctctaagtcattttggggcagtgccttcttcctcctcctcctctgtggagttggggcacagcgagggattgggcctcccagggttgactggaggccactcaacctttggctgtcagaaatagaggtgctcccctccccattttgacttctgggttgctggaaacctcaaccagcccacagaccaagggccttccatgggcaggagtcttaaaggacagttcttcctgtgtggccttgggcaggtcacccaagctctctccaaatctgtttcctcctccttaaagcaagacttctggctgggcacggtggctcacacctataatcccagctactcgggaggctgaggcaggagaatcacttgaacccggaggtggaggttgtagtgagccgagatcgcgccattgcactccagcccgggtaacagagcaagacttggactcaaaaaaaaaaaaaaaaaaaaagcgtgggcacggtggctcatgcctgtaatcccagcactttgggaggccgaggtgggaggattgcttgagctcaggagttcaagaccagccttggcaagatagcgaaatagcgaaaccccatctctacagaatataccaaaattagctgggcatgctggtgcacacctgtaatcccagctacttgggaggctgaggcatgagaattgcttgaatccgggaggtggaggctgcagtgggctgagatcacaccactgcactctagcctgggtgacagaacgagactctgtctcaaataaataaataaaaataaaaaaatagagcaaaacttctaatctctccttggctgggcgagttgccgttaggccacggtcgcctgcttcctgctgaggcccttggtgagtttcacgtacccagcaaggctgtgatagtgaggggcagggtagagctgggtactgtcttgggggatggtgccactctatactgggagccagtgtccacctggcactgggcctcatgatttcctgtttgttgtcccctccagatggggttggggacaggagggggccctgcctggcacaagtgggggccagtttggcctgcacctgctgagggcttactaaacgcaaagccctgagaaggagctgagggagggataaggctgagcaggatggggccccaggcctgcagacagctgccgctggaggccccccagccccagctgcgggccagagccttccttgtttcccacttctcccactgccccaggacactgtgttctgctctgacctgccccatgaccttgctgttgcccagaacgggcctcttgccctagcttctcctctccagctccggaaatcctatctatccttcaaggaacatcttgaatgccgcctcttcccagaaatcttcacagatgttcccccttgcttgccacactctgcctccctacttagaatgcctgtgggtccttatttattttttaacaacactcatctcgctacccagaagttgcttctcccctgttcctgccatgagctgtaaccatttgggacatcttttcctgaccacaaggtctttgatggcagggacagagtctcaggtcccttagcgccttgcagctgtgagcgcagagccttgctccatcatttgaaagatcccgaaggcatggaagcactctgtcctcttcgccattagtctcatccactgtcaagatttgcatacctgcccccagaccccagcattccatctgtagccctgactgcacttcagggccccacatccacctgtccagcagcccagtggacttctctgctttgcagtctcaggaacttcactgatgcgtaagtcacacacaagtctctttgctacctcttttcccataccccttacccccacccccccacgttatttgtacctttaaaatgtttattgaatccaccttcctctgtccatcagcacttccagtttcctaggccaagccacccttgtctgatgcctggactgctgcagtagcttttacctggtctctcttgccctcctataatccattcttcacacaactactggaaagatctttttacactgtaaatctgatctttcctttgcttggaacctttctatggcttttccttgcatttaggataaaatccaaaagccttactgaggcctataagcccccctggtctggcctgagcccacctctctagcctggtcttgtgtaccttttccttttgaattttgtgccccatgattctagccttctgccagttccttcaatgaactcatcaactgctgtaaccccagggcctttgcacagactcgccctttaactggaactacactcctttctactctttgcctgattaacttacaaactttctcttatggtaggtctgttttatttgagttcttccctaatttagttaaacctaaattaggtacctatgttaattcttcagagcataatagcatttatctcagtttgcaattgtgtgtgcatacagtgattatttgcttaatggctgttgctccctaaggtctacaagggcaggttccccagggtgtccacatagaaggtgctcagaaaaataccttgaattggcctagcttggtaagaacatgggctttggcagcaggaagttcaaatacctgctctactctttattattagtaatgtgatcttggacaacccacatagccttgctgagacctgttttatttgtaaaacatctcttggagttgctgtgaggataaaatgacaacatatataaagagccaggcttcttctagaagaatgtccttgggtagcatgtacatttccatccttccttttagagagtgggggtaataggataccccctcctccaggggtatcccctctttctagggacctacccaagctaggcctttcttccagtgaaacgtgcatcccgagggcttctaggatgaagtagtccactggaaggcaccagctcttccttttatctctccagagctggacagtgcaccaggggccggtactggttccccagctaggagacaccttgggcggggctttgctcgccggaagcacgcagagcgtggggaggagggccccctctgcctgtgtttgtgccaacagcacccgcgctgccgcgtcgggttccggcggccggagtcacacatgatgtcacagacaatgacacaagccggtgtctcattccgacacagcgtccgagctgcacaatgtcacacccgggtgccaaacacttggccccgcgcgacccggccctacgcctcctgccgccgctctccgcgtctccgggggaggtggcccggttcggccgggcagggggctggcgggcgagccccgcgggcgggctggcgagcgggtgatgtcacgggcagcggtgggtgggtcactcggaggtgaggcgccgccaggcgagttcagcgagagttcagccgcattgcattaggcaaatgaggcccggcctgggtgggggtgtgtgttaaggggaggacaccgggaccacccccctcttccccgccccaccacctcctccaccacggcttcgctcggccagggactgaccaaaccttgggggagcctgggagccggaactggtacaagggaggacgcccgcccctcttccgtccttgtcccctcgcagccccctcctctccctgtactcggcgtccctctgtactctgtgtactcctcatctggagcctttcccccttcctgcttctctcctctcctcccccttcccaggctgcccccacttgcctgtccacatgccgcctctccctctcggttccctgcgtttctcccgctgcagccggacgcgccgggaatgggttaagccaggggcggtgcctggacggggcggggcggtggaaagggggtggtgcccggaggggagggggcgcgcagagctggggtgggggggccgtggcgcgtaccaccagagaccgagcgagtcgccagctgcccctggcctggcgggggcggaaccgcgcgggatccccacccccacccggaatcctcgccacggagaatccctggagaagccccggatccccggctgggaggaggaagtgctcgttgacccccagccccgcgctgatcccgcccccggcctgcggacttggggagccgctgtactctgcctcggacgc

SEQ ID NO: 7598 - DNA, 6000 bp, Homo sapiens
aatattcccaaatagttttatgtagatcagtaacatactgtaagttagggaataatttatttttgtgttcgagaagtatattctaatgtttggatttatatttttagaaatactgttgtaagacctgagaaattcagaagacaatctgacaatagtgtagccggacaagccgcagacaaaacacctcagacaccgagttaaagaaggaaggggtttattcggccaggagcattggcaagactcctgtctcaagagccgagctccccgagtgagcaattcctgtccctcttaagggctcacagctctaagggggtgcgcgtgagagggtcgtgatcgattgagcaagcagggggtatgtgactgggggctgcatgcaccggtaatcagaacaaaacagaacaggacagggatttttacaatccctggaatctatagacaacataaccggttaggtcaggggtggatctttaactaccaggcccagggcatggcgctggtatgtctgcctgtggatttcatttctgccttttagtttttacttctttctttggaggcagaaattgggcataagacaatatgaggggtggtctcctcccttaataggttactaaaagtagccacatcaagacaaaattatcgtgatctaatatactttatgcattttatggtaagttaccaatacaagatctaaattcggatgcactttctttttcattacttcattttttatagtgcaatgaaatatgtggctaaaattttaagttatctgtgaagtagaagtatgacaacaggcagggcttttctttcgtaaaaaaatctgtgtgcataaattgaactcatgttcagctcttgggaataattaaataagactcataaattaaaaaatcggaaataggttgggcgcggtggctcatgcctgtaatcccagcactttgggaggccgaggtgggcagatcatgaggtcaggaattcgagattagcctggccaatatggtgaaacaccatctctactaaaaatacaaaaaaaaaaaaaaaaaaaattagccaggcgtggtggcacgcacctgtagtcccagctactcgggaggctgaggcagaagaattgcttgaatccgggaggcggaggttgcagtgagccgagattgtgccactgcactccagcctgggtgacagagtgagactccatctcaaaaaaaaaaaaaaaaatcagaaataaccttattattagaaattatgctcaaacttctcctacatgtatttagcatacttagtgaaagaaaaatgtctatattgctaaaaactaattgatccagcaactgagagtacactttggatagatcactcaatctctgttgtaaataaagtttccatgcaaccatgggtctatttctaggctctattctactctttttctaacctcatgtcaatagttaatgattacatcaactattacaagttagtcattcttgaagtctaaatggcaatttcccccgtgtttttccagaagtgtcgtaattattcttggcttacctgctattctacctgaattttaggcttgttaactaaaaatcctgttgggattttaattggaattgaattgaatttataggttaatttgagagaaatggatagtcctacaatgtgtggtctccctatccgtgaacttggtataatctctccatttatttagcttgttgttgttgtagcactttggccttggaatttttcttaacaatcttaatattctttttcatttggtgctaactttgactatcctccactgctgcctggcaaattattacttagccattaagtttttttttttttttttttttttgcagggggacggagtctggctctgtcacccaggctggagtgcagtggtgcgatcatggctcactgcaagctctgccacctcctctgtgaaaccttccttcattacttaggcagagttggtggatccttctcttaaggcctcaccaaccagggtattttgcatacaattgcaagaatggatatttactaacagctgactatatgccaacgcactgagttaagctctgaccatgaactcatataatctccaaaacagccatttaaaatcaaagttggtgctattatctccatttatgacaggataagctcatagagagcaacttgtctgaggcacacagccaggatgagctagggcaagatataagcccaggaactctagcctcagagtccatgctctggtgaatccctttggaagcagttgtattaagaacagaagttgtacttttacattgttggtgggagtgtaaattagttcaaccattgtggaagacactgtggcgattcctcaaggatctagaaccagaaatatcatttgacccagcaattttattactgggtatatacccaaaggattataaatcatgctgctataaagacacatgcacactatttacaatagcaaagacttaaaaccaacccaaatgtccatcaatgatagactggataaagaaaatgtggcacatacataccatggaatactatgcagccattaaaaataatgaggtcatgtcctttgcagggacatggatgaagctggaagccatcattctcagcaaactaacacaggaacagaaaaccaaacaccacatgttctcagtcataagtgggagttgaacagtgagaacgcattgacacagggaggggaacatcacacacgggggcctgtcagggggttggagggcaaggggagggagagcattaggacaaatacctaatgcatgtgggtcttaaaacctaaatgtccggttgatagctgcagcaaaccaccatggcacatgtatacctatgtaacaaacctgcacattctgcacatgtatcccagaacttaaagtaaaattaaaaaaaaagaaaagaaaaaagaactgaagttgtttacttgctctcattcatgcatcccggagaaaaaggtttgagtgcacatcctggattaggcactgagaaaggcactagctggacaggtggtgatgaataaaacagacagtaaatagaaattacatcataataatgtgtcatatattttaaaatagctacaagatattttaaatgttctcaccacaaagaaatgacaaatatttgggccagacgcggtggctcacgcctgtaatcccagcactttgggagaccgaggtgggcggatcacctgaggtcaggagttcgagaccagcctggctaacatggtgaaaccccatttctactaaaaatgcaaaaaattagccgggcgtggtggtgcacacctgtaatcccagctacttgggaggctgaagcaggagatttgcttgaacctaggtggcagaggttgcagtgagccgagatcgtgccactgcactccagcctgggtgacaggagcacaactctgtctcaaacaaacaaacaaaaaacaaaaacaagagaaatgataaatattcgagtgataaatatgctcattagcctgatttgaacacaccacaattatacacacattgaaaaatcacatggtaccccgtaaatatagacaatgatttgtcaattaaaaatgaaataacacttaaaaaataaaaaagtaaaaagtaaaaattacaccaataaatataagaggtacaaattgtgctaagtgccctggggacacaggaaaggcgggaaaacccagggctatatgcatgagagttacaaagggaaaaggacaggagggaggcaattgcaggaggggcttgggagaatgcatgtccttgggtgcaggtcacaggaaggaactcatgagcttgattcaggatgtgttgaattttcgggccgagacacgtccagtctgcggaaggctggacatctgggactctggcatcatggctgggttgaaggcagaggatggtaatcactaaggagccggctgtggttaggccaccagcatggatgagactccccaaaaggaagctgcagaatgagaggcaggcagaggagaggaaagaagaaaatcacagaggtggggatgtctttgcatccgtgtgtctccagtgcccaaaacagggcctcgcggagaagaggtgctcggcacctgtctgttgcctggcgggctgaatgaatacatgggcgactgtctcagtgtcgccttagttgtgtcccttcctctctagagctccgtttccctctgacctgggtcgggcgggcagctgcggctgctgaggctcggtggggcccctccaagacgcgtgtccgcatctgcccgccgggcgtctgcggggtgcagcgtccactggagcgcgacagcccctgggacagaggaggacagtggcctcgcttccctgtgcgatcgcccaggagctccgggccggagagtgcgagcggggaaaaggggtcctgcacctagagtggggcggacgtggcgaggaagccaggggggaccgggaagcgaggcccgcggtgcggagggcgcggggcgtggggggacacctctcggagagacaccggaggggcggaagtaaggagatggaaaggagagggagatcggggagatagacctgagagacccagaggcctgcagagagtttcatccgggacccttcagagcccaggaaagagcagatgcggacgcgggagggcgccttacgccaaagcgggcagcaccagtgaccaaaacacgccccgcttggcagccccgggacgcacctctgcctcggcagcgcaggagaggcttggacagcgcgagatgctagggcccaggctgcccctagagggctggcccgaagcgttggagtccaaagacgcctcccaccgccgccgggtggcagaattgggggcaggcgcgtcccacagaccccgaggggtggccccgccccagggccgcggggaggcgcccccgtgcggggcggagttgtcaccgccccctccccaatccccggggactgtggccccttcttaagcccgcggcgcctctagctgcccctcactcgtctcgcccgccagtctccctcccgcgcgatggcctcggcgctgagctatgtctccaagttcaagtccttcgtgatcttgttcgtcaccccgctcctgctgctgccactcgtcattctgatgcccgccaaggtcagttgcatctccaggcagcccttcggacacccggcgtcctgtgcccactaacgggcaccgatcccgggagccctgagctggagcgcacggatttcgcggggagcacagctctcccggggcgcgcgcactcaggagctccaggtgccggatgggaggtgccctgtaaagaatctgaggggcatggcgaccccagggcgcaccacccttggggtttacagatcccagggcgcaagagccgtccaggcaagcacggaaacctcgaagtgagcacagatctcagccacacagatcccagccttaggctcagcccctggctccgaatcgaatctcccacagtgcataaccctgtttccccccaaaatgccacctgcgccaacagggaacctgggagcttgcctttccctctctctctcctgtcttttcccttcgccaaagaagacttcaagctgtaggtggcttctgccgtcaggagggacctacaggaaaaaaatcatcacccacgtggatcctgcgctgtctttgccactctctggcccttccttgggccttagtgtctctatctatgatccacattccttccaacctggagagccacatctgattcataatcctgctccaggctgcaggcaggttggggttggcctgctttgcctcctgcctgctggggctgtagcaggaggcgggacacattcccagagctcgcgccttgggtggcaggacctggagttgcagggaagcttcctcccaggccctagtctcctaatgcttctgtgagggagagagagaatgaatggccttggccgcagggtgggcgcaggctccactgggctgtgcacagccagtttggcggaggcccaagccctttgaagccttttgtggctgctggctgct

SEQ ID NO: 7599 - DNA, 6000 bp, Homo sapiens
cgaaccctaagcatagcagctggcacgcggtagctgtctataaatattttgtatgaaggactgaatgaataaaacttattttgacttttttcttctctattattttttatttatttttatttttgagatggagttttgctcttgttgcccaggctggagtgcaatggcgcgatctcggctcacggcaacctctgcctcccaggttcaagcaattctcctgcctcagcctcccgagtagctgggattacaggcgcctgccactacgcctggctaattttggatttttagtagagacggggtttcttcatgttggtcaggctggtcttgaactcccgacctcaggtaatccacctgccttggcgtcccaaagtgttgggattacaggtgtgagccactgcgcccggccttctcttttgtttttagagttaaggcagggagaccagcattttcacacaaactttggaaaatgctaagggaaaagaaagaagaaaagcagaaatttccattgaatctctttatagccattcacattttctaacccatgtggctctactgagaacttaccagggcaatgtggtgccttgaccttgaggcatgggcagaggtagccaggtgggaaagggctgccgtgctgttaggtccagccaggttcctcaactcacagcaatagcggcaatggaggctgagcgcggtggctcacacctgtaatcccagcactaagggaggctgaggtaggtggattacttaaggtcaggagatcaaaaccagcctggcaaatatggtgaaaccccgtctctaataaaaatacaaaaaaattagctgagtgtggtggcgggcacctgtaatctcagctacctgggaggctgaggctggagaattcacttgaacctgggaggcagaggttgtggtgaacctagattgtaccactgcactccagcctgggcaatagagcaagactctgtctcaaaaaaaaaagaaaaaaaaaaaaaaagaaagaaaatagcggcaatgagctctaacacgtatactttggcactgttctaagttccttacttatatgtgtattcacagtgactcatttaattcttataacaacccatcaggtagctactgttattacccccattgtagagatgaggaaaccgaggcacagagaggttgagtcacacttgctcataatcatatagttactaagtggtagagtgtgggcgaaagattacgtagatgccgaggcaagagactgaaggcacaaactgtttcagtgtaataaagaaaatagaataaaaatagtcataatacaaatgagatatagagatgatcatggacaattatcaatcattattatagacattattaatcattagcttttaatattactttttgttgcattactaatataacctacgaataaccggcaggtatagggtcaggtgatgaagggacattgtgagaagtgacctagaaggcaagaggtgaaccttctgtcacgctcgcataagggccgcttgagggctccttggtcaagcggtaacgctagtgcctgggaagacacccatcacttagcagatcgcgaaaaggagtgtcctttccttggaggagtcagggaacactctgctccagcagcttcttgtggaaggctggatattatccaggcctccccgcagtcatccggaggcctaaacccctccctgtggggctgtgcttcaatgctcacgctccttgtccactttcatgttcctcccgtactcctggttcctctttgaagttcgtagtacagagcggtagatgaaatagtgaaagtctaaagtctttgatctttcttatcagtgcatagaagaaaacgctgacgtatgctgccttctgtctctacttcggctacctaaaagggaagggccctcccgtcctgtgatcacgtgacttgctgcaccttgtcaatcacttagaagattcaccctccttaccctgcccccttgtcttgtatgcaataaatatcagcgcaaccagccgttcggggccactaccggtctccgcgtcttgatggtagtggttcccagggcccagcgtcttttcttctatctctttggcttgtgtctttatttgttacaatctctcatctccgcacacggggaaaacacccgccaagccccgtagggctagaccctacagtagagctggcattcaacctcaagaaatctagcttgggagtccattctcctaatctctgtgctattttacctccgtgagcaaaagatgacaagttttgctaagaatatagggagcctgaggtagaagaggaatgtgctctttcacagccctagtcccaggctctgggatacccttctggcttcgtaagcatcctgcgaaggtgcgcagcatcacttagcacaactcccagatgcggagggcccggtcttcgctctgactgtcctgcatttctgcgtcaccatggggagacagtgattcgtttagcttggagcagagtcttcagcagccttctcaggaagcgggatccctgccctccccggtagctgaggacctgctggctccgcctccctggtggctttcataacagcactccaggctggggaaaccggtggggccactttcctaaggtgtgtctgtcaggaccttcatgaacaacaggacgtttcaagcagagagcatgacatatgcaaaaattaaggagtgagaaaaagctaggcatgtccacagagcagagaagacagtggctgatgggaggctggcaaaagggagagaggggagatggtttggaacggtaacctaggtctacctttgattattgtaaaagacctgtacaaatagagaaatgtaatttttcccgtctataggcaatggagagccattgcctatagtcatgctgtgtcttttatgtttacagttttgctccttaagaagctgtttttcttgtctttacgtgcagattctttcccaataattaggaaacactgccatcatgtggctcaatggatgcatgctccaaacttaagttgctgaatgttctatcatattgtttaataattaaaccaaagaacacatctctgaattcaaagagctgaggtaaagaatgtcaacctatcaaaaaaggacattttctataaagtttttcaaaaaatcaatacctggcttcaatgacctgattttttactttgcttttaaaattgtaacctggccaggcatggtagactgtaatcccagcactttgggagtccgaggtggaaggattgcttaagtccaggagcttgagaccagcctgtgcaacatgctgtgaccccctctctacaaaaaaaatgaacaaatttagccaggcatggtggtgtggagcctgtagtcctcgctactcgggaggctgaggtggagtattgcttgagcctgggaggtggaggctgcagtgagccataatggcagtactacacttcagcctggacaagaccctgtctctataaataaatacacacacacatacatacatacatacatacatacatacatacatacatacataataaaaaataaaattctaacctaagtgtttagagattctgatctcaagaatcctttctattcccagtgaccccttattttagactcataagttttctgtccctgcaatggttccaccctttccagggcagtttgcttcaagctgtatccaggatctttcccttaactgtgccagattttgtttcagtcctgggattgttctccttgtaggtccacagttggacagacctaaattcaaatatccataccattttttccctgagagcttcagttactgcatctataaaagaggcacgacatcggccaggcgcgttggctcactcctgtaatcccagcactttgggaggccgaggtgggcggatcatctgaggtcaggagttccagaccagcctggccaacatggcgaaaccccatctctactaaaaaatacaaaaattagctgggagtggtggcaggcgcccgtaatcccagctactcaggaggctgaggcaggagaatggcttgaacttaggaggcagaggttgcaatgagccgagatctcgccactgtactccagcctgggctacagagtgaaactccatctaaaaaaaaaaaaaaagaaaagcgacaccttcttcatagggttatcataagatgaagtgatagcatgtgtaaacggtgcctggtacactgcaggtcttcacattgagggagtcgtgtttcatccctctgtccttgaggacctgttattttattttatttattttatttttgtttatttatttatttttgagacagagtctttctctgtcacccaggctggagtgcagtggcatgatcttggctcactgcaacttctgcctcccgggttcaagcgattccccgcctcagcctcccaagtagctgggactacaggcgcccgccaccacacccggctaattttttttgtatttttagtagatatggtgtttcgccatgttggtcaggctggcctcgaactcctgacgtcaggtgattcacccacatcggcctcccaaagtgctgggattacaggcttgcaccgcgcccggcctgggggtctgttattctaagcacagagctggcacttggtggaggtctgtgatctgattgatatccgagatttacctggtcctcggcaacgttcctgagaacaaaactactcatcccctcaggttttggggaccatccctatttccacgcgttggcggtggaccctgggctcgctggggtttgcaatccacgtgtctcccctgcgcgcagcaggcggcaggtgcatgcgtgtgagtagggcagggcccctctgcattcatttctcgccgctcccccctcccccgggcctgggggttgtgtgtgtacataattcaatccccgtgggactggcgtctggcctcacgcgcggcttgccggattggctgtttcagctcgcccccgccctccgtacaccccgcgtcccaggtggctcaggcccctgtggtgatctctgtttaccgagagagcccgtccaagttgggctccatcgctgccctcgctccccttcggggcccccgcccgcctgggaagcagagagaaagccgggcccagcccttcctcacccttcccctccccgcaccgcccggagaggtcgggtaagggggaaggagtgtgcgtgggacggggaacctcgggcctggggatctggctgtccccgtccccgtacctcgcgcggacccgggagttccagccctaggccaggctccggctccctccgccccgcgccatcgcgctcggagtgacgggcccaccccgggcgagcagccagaggctggatctcagggatgccagctccccagcggaagcacaggcgtggaggcttctctcacagatgtttccccaccccgcagacggcgatgaccccccagcccgccggacccccggatgggggctggggctgggtggtggcggccgcagccttcgcgataaacgggctgtcctacgggctgctgcgctcgctgggccttgccttccctgaccttgccgagcactttgaccgaagcgcccaggacactgcgtggatcagcgccctggccctggccgtgcagcaggcagccagtgaggggggccctgaggcgggagacaggaacggggaggaggagccgtgagtggagggatgggagacccacctgattacccgacaacctgagaaagggcaaccggctctagaaaagagtgcatcttgaggtcaaggagaagaaccattagttcgagggaggcaaacagccaatgagaagtgttggagagagtttgggggcccgggggcgtgtcttccgttgactccgccccctttcaggccccgtgggcagcgccctgagcacgcgctggggggcccgccccgtggtgatggttgggggcgtcctcgcctcgctgggcttcgtcttctcggctttcgccagcgatctgctgcatctctacctcggcctgggcctcctcgctggtgaggga

SEQ ID NO: 7600 - DNA, 6000 bp, Homo sapiens
gccttggtctggtgaccagtctcatcctgaagctacctagaggatgctaaccctcagccagctcattagcatacaaaaggacaacacttttgaaatggtaagggttttaggagttgtatgtcaggaaacaggttgaagaccaaatatgtatttcacagtatcacagttacagctggaatttcatagcattccagagacctgtcttctatgaatatccaaacatttaaatgtaggtttaatctcccttccattattcacaagggatgaattttgaaatattttaaataaggaatgaaaacaaaatgaaaaacacactaaaaaacagggctcagacaagtggttttgtttttattttcatttttattgcagaattttctcaaacatacacaagaatagagagactggtacaatgaacatctacatacccatcactcagcacactaacagtcatccactcttgcccatcttatttaatttgccatttactttctttggctttgcttgttttggggggtcctgtagtattctgaagatcttgctgtttttacttaaatatatattgtgatcattacgcatatagatttgcctcattagtttagagacatcgaatttccattatatggatattccatattttaatcagtctccctttgatcagcatttagattgtttccagattcttgacattataagccatgtcaccaggcacattcagttttataccattatattaccttttttattttttgagacagagtctcgctttgtcacccaggctggagtgcagtggcgcagtctcggctcactgcaacctccgcctcccgggttcacgcgattctcctgcttctgccccctgagtagctgggactgccggtgcctgccaccacgcctggctaatttttgtatttttagtagagatggggtttcaccgtgttagccaggatggtctcaatctcctgacctcgtgatcagcccacctgggcctcctaaagtgctggaattacaggtgtgagccactgcacctggcctataccattatattactatttgaggtgtccattctcctgcctgggctttcagccatctggtagaattagcatttctcgccaatacctacaagttctagtaaaggctcatataatccattttcattcattttgataggtctaaatggttgtgttcttgtctttaattcagaaaatgtttatcgagcatatactataagctggatatccctgtaggctctggagatgtgagagtgactgggatataaactgtgttcaaggaacacctagttcagtggagaaaagattgcattgcattttgcctcttttcctcctttacctgtgttgtatcagctaggattaaatttagttgtgagtggcagaaaatccaatagctgccttaaaccagttcactacaaaaatcctcaataactttagctacttttggagtttgcgaatatccaatatattcttttgaaaacctgccaataaaggagaaaatattcaacatttgtgttgcctttctcataaactgcaaggaaatcaaacagttgatgagaagtgtctcctttagaggtgttccaaataaaaaatgaaaaagaaatgatagcttgagaatattaccaatctgcaactgttaattaaatagtgtttctagtcaataaatcattaatagctgctaacaccgcaaaaggagagacaaccctgtattctgtacctccaaatatttacaccatcatttatggaaagcaaacctagagctgatcaaggctctagatatgacagctgctttatagggggtagaggcgcttgctaaaggacactatgaagatgtaatcggttcagtccagaccatgggaaactcagttccttctgcagataaggacacattattggagagggaggggcaaactgtacaggcaaagagacttaagaagtttatagaccaatttgcatcgaagtttggtttgtcaagacctctcgtggcctttgtgttcctcagagcatcctctgtgctttggcttctgaggccaattgcctgttcgtttcctacctccttttgcgttcctgagagataattggattggcccaggtcctcttttttgttctaggctgtaggtcagaggtcagccggtggactacctggtttgatcatatgtcctcctttgacttactcagctggaggtaaagggccaaggggacctcatgaggaaggggtgatgtgtgcagctgctcaacaccctgaaaggcaatttggggaccaagagggagagttaataaactgacctaacgcattgagttttttctgtgtttttttattttttcatataaaacttgagcgtggaggccaaagggatacacctgagtccatttggccagttatttggggttctggggcaaaaggaagagcagccaatgtaagttgggtaggggtgggggctctgggcaggctcaccatggatttcagggggattctcaggtggggagagctgcctcgtggccccttcttagtggtgtacgttctggaatttgcactttgatttttctacttatgaattgtgtatccgtgggcaacttactgaactgtgtgcctcagtttcatcactttgtaaaatggggattagagtagtggaaactgcctcgaaggtattcctgggagttttgagcccagaataagctagtgtgtgaagagttgagagcagtacctggcatggggtgtgtgcatgggtgacctggagccaactctggaaccccagctttttaattcattctgccttgaatgaaggggctggctgcacttagtacctgcctgtggggaggttaccaagcagcccagtgctgaggccagcaagatacactgagggaccccagaagcactgaggtcaagtccctgagtcccatggggcatctctgggttggtcagcactggggtcacattgcatgtttgctcagcttgccccttctcagtgccagtagaagcccatggtgagcccagatacaggatctgttgactcacggggaatttgctgcccacagaggagggagaaatgcacctccccaaagccaacaatcaaaggccaggcaagccctgtgggaggaaaataacttgggctacagattttcttttctgggcttggagtcttgccatggacaacacagaaacagacatgattagcatcatggcttccggaaacactgtgagtgcgcactagcaggtggtgggctgatgtcactctcaaatggctttctcgagtccgagggtctggctccctgccgggccctggcccattgcacatcagcgctaggtataagcagctcagagagtcacttcaagctgcagaagacttctggggtgagtctttggaggttcttgtggaaccacaggggaggtcccctgctcatccgctacacttcacacctggcctgtgcactcaaagatgtccactgtcttccccagacttgctgggagagagagcagaaccttgtcagactggcccaccccaactcccccccatccccctcacctgtgcatttcccgtagcatttccagacgcccaggctgtcccgcacctccgtgactttgctcagatccttcccttgtctagaacttgtttgaagaactgaatggagatactcagggctcagggacactgagccacaaaataggggcccatggaaaggttgaaggcatggctccgctgacacgggagctccagagcgagaatgaattcagggagtttagggctggagttgaagaggaactagagcctggagagaggggaggatagagaaaggctttttgagaaccgcagcaatgagggctctgcctgaggctctaggtactgactcgtgggcagtgaggagaggtagatttttgttggggatccacttgatgtatgttttcttacaactaaatgataaaactgaggctgaaacacaggtgttttctgcctggcctttttctagaatgcacctctctctgaagattatagagaactatgaagaaaaggagatcgtgggaaatatatgattgagtcagtatgatttggaggaagctcaagtgcttgctgtggttgcagagaagtgaggggactttacattcctggctggacaggttgaactctgggattggagaggtggtgggggagtggagaggagcagaaggaacagacacagggagagacatttcaaaggattgtcaacagggcatgatgataacacagggagagcaagtccagcctgtctcctggtgctgccccgagttgatgactgcaattaaactgccagactttacagcctgctctgcactgtgtcctcctggcatcttggggactttttcacggttggggccacaggggaggttagaagctgctcgctctctccattgccaagcactggccggtcaatggagttggggagaaggaggctaattctcaacagcctgttagtgacagccattctctctccagcttatctaaagaggattttatttcagaagaaggctgagagcttgttagaaaggcaagttcttgggccccaccccacatatactgaatcagagaccctgggagtgggacccagcaatctgtcttaatagaccttctaggagattctggcactaaggaaagagaccacaggtcttgtctatctctgtagttggctgcgtctgggccagagtaactgcttgttgaaatgatcagagatctcaaatgaggtcatgcatgttggggtgtgtgtgtgtgcatgtgtgtgtgttgtgtatctttatgtgtgtatgtgtttggtctagggtccagcacatagtaggtgttcactcttgggggtgggaataatcactctaatgtccgtgtttgaggactgcattgctggtgaccgctgagcctgcagaggaggaagagagcagggcagaagattcaggagggggtgcatggcaacttctgatgtcacagtgccccccttcactcctgacttctggctcatgggtcactttggggcaggggcaagaggatggttagctgcagcaaagagagagccaaagagaagtgggattgagagcacaggggacagctggagacaaaatataaacgccgggcaggggaacagccaagatagtgcaggaaggatggggaatcacagaaacttctcaggtaacagtctgggccagaacactgggtgtccccagagagggaagtcgagggtgaaagtgaaaaggctcacactcaacttccaggagaaggtcaggtccttcatcaaagaataatcctgccattaaagggtccccagagtccccagcattacttcccttaagtggatcccaatcctggtcacccaatcccctcaggactttgtaaaacgtactgatgcccaacccttgccaacaagctcgtcccattcctaggattctgatttactttgtctgcagagggcttgagctcaggtatgtctataatgacagccaggtgattctattgtacactcagggctgaccactctacttaagcaaaacacacacacacaaaatatacccccgttcccccccatcccctgggggtgatgggttggggatgagggtgatgatgttcccacagatgcattacctctccacagagctcaggaccaaaggaatgtttagccagaactggtaaatacctttaaaaaattattaagcacctatagaaacctatagggacaaaggtgactaagaggatttttacaaaacaataataatcaagtcacttatttaaaaataattaatcatgcttgtaatcccaccacttaaggaggctgaggcaggaggattgtttgaggccgagaactcaagaccagcctaggcaacatagcaagaccccgtttctacaaaaataaaaataaaaataaattagctgggcattggtgtgcacctgtagtcccagctactctggaggctgaggcaggagggccccttgagtccaggtgtgtgtctgtattgagtgtgtgtctgtgtgagcccaggagt

SEQ ID NO: 7601 - DNA, 6000 bp, Homo sapiens; identical to SEQ ID NO: 1939

SEQ ID NO: 7602 - DNA, 6000 bp, Homo sapiens
ttgggattacaggcgccttccatcacgcctggctaatttttgtatttttagtagagacggggtttcgccatattggccagactggtctcaaactcctgacttcaagtgatccgcctgcctcgacctctcaaagtgctgggatgacatgtgtgagccaccatgcctggcctctgttacagttttgcaatggtggtttcaagaggtgttgggcaatgcatccgtgagaacccacatgccaagctaggctttcttctgtgtggtcagattctgaggctagcaatcaactgctatattaccttttaagagaaacaggatgagagagagggagagggagagagagagagagggagagggagaaaaacaaaggtgagatccaggactcattggggtggacaactttatgcccgtctccattctttctgcaaagctgctgtccatgatccctctgcttgcccccccgccaccacagtcttccaggaggaggtgccagcagggcatttagccagatcaaaccacagtgactcctctggaaagggccgcccaccatcttgttgccttgcagttcctttgcggatggttggcatcagtcttagggccctgtgacgcatgggaagcagccttcactgcctgcaaatccccctgccactgcttctggagccactgttctggtctgttcctgcatatcccatccctttgccctgggggcgtcaggccaccttaggtcccatgggagagaataggaatggactgtgggtggggtggaggtcagagccagtgtatttagctttcaggaaacattttcttctttcttctttttttgagatggagttttgctcttgtcgtctaggctggagcacaatggcatgatctcggctcactgcgacctccgtctcccaggttcaagcgattctcctgcctcagcatcccgagtagctaggcttacaggcgcctgccaccatggccagcttatttttgtatttttagtagagatggggtttcaccatgttggccaggctgatctcgaactcctgacctcacgtgatccacccacctcagcctcccgaagttttgggattacagacgtgagccaccgcacctggcccaggaaacattttcttctggccaatactctggcccttttgactgtaaggaagtatgtgaaagggggcagtttgcatgtttgcggagtgggcatatgtgtgggagtttattgagaaagatggggaaatggtaagatttgtctcctgggggttagcacccctcccgcttatgggcttggtgtggtttaaagaaagtgagatgcagaaatgctgatcaaggtggctctgggtctcatcctgtgagccctgaatgccccatgcaggaagggcaccatctcaggagtcagctgggcttggtgtcccacactgccccatggaccttgggtcactccagagctttcctgagcctcaatttccttatctgtagaatggggataatgataccttcccctcagagttgtgagttttacataagaagaggatataaagataaagtggcccaggttgggcattcaacaaatgttagttgcttccccacttttcctttcccacatcaagtttacctatgcattgcatgcaagcatctcttgaggacatgctataatatgaggtgctatcctggctgggatgaggggaagaagctcagtaaggagcttgattctaatcctgggtctgtatgccgaatatagcagtgaagttagatcctacagtataagacagaaggaggcaagtgccttagaatccagatggagttctatgggaccttagaggatagagactcgatttgtaaccagggctgggacaggtgggagatgaggtcagatggggtgcccaaggagaatgcattaaacctgggtcttgcaggatggtggggcttagatttgggaggcgaagggcagttcagcagaaatggtataagggagataggagtggcagggagggaaggctgtgtggaggacagcgagctgtccagcctggcttggccagagggcacagggaggagaaccctgggagacagacttgagaacgtttagttggaatcataccacagcaaaactcaaattccaggctgaagcatttgaactttatgccaaaggcactggggagctatcggagctttttgagcaggagagtgtgatgtgctgtgctttaggcaggctgatcttggcggtgctacatggaacagactagacagggtggagtggaaggaggtgactccatgacctagatgagggatgggcaggttgaatcctcacagcagcagtgagaaaggagagaaaggattgggcaggagaggcactttgtggatcgttgtaaacatttctgtttatttttcattataaagaatttaagcggctgggcgcagtgtctcactcctgtaatcctagcattttgggaggctgaggcaggtggattgcttgagctcaggaggttgagaccagcctggccaacatggcaaaaccccgtctctactaaaaatacaaaaaattagctgggtgtggtggcacgcacctgtagtcccagctaattgggaggccagctgaggcaggagaatcacttgaacctgggaggtggagggtgcagcgagccgagattgcaccactgcactccagcctgggtgacagggcgagactccgtctcaaaaaaaaagaaaagaatttaagcatccacaaaagtagaaacagaaacatttaatgaacctctacgtgcccgttccccaggttcaacaatggttaattttttatttttaagagacagggtctttcactggagtgcagtggcaccattacggctcactgcagcctcaaactcctgggctcaagtgatcctccccactcagcctccctagtagctgggactacaggcccagctaccatctgccaccatgtccagctactttttaaaaactttttgtagcgacgagatcttgcttttttgcccaggccggtctcaaactcttgggctcaaacaatctgcccaccttgtcctcccaaagtgctgggattacaggtgtgaaccaccatgcccagcctaagaatggttaattcatggccaattttgtttaatctctactccatccacttttctcttccatcatattttgaagtgagtctaagatattgtgtcattttatggctattgcagcgtgcaggaagaggtatgacattttggaagatgagttgatgggccgtgccacatgggtattgtgtctctgtgtgcctgtacatactctcttatgtggaattgcaatggctgatttgactcttccaagttgggggtcttttaagggcaaagaccaccctccagtggccaggctgtcttctcctccccatggagtgcttggtatatggtgcgaccgtcagtgtgaacaacctagttccactggaagaaagaggcctgttattggaccctttgggctatggccatcgagaccacgggtagcttttctgctcaggtcacgctctgatatgttgtcaaataaaacacaggacactcagctgggtttcagtttcagatcaacaacaaatatgcctgtaacataagtatgtcccacacattgcccggggcatatttatagtaataaatgacgttatttttctgaaattcaaatttaatcaggcttttttttttttttttgagatggagttttgctctgttgcccaggctggagtgcagtggcgtgatcttggctcactgcaagctcggcctctcgggttcacgccattctcctgcctcagactcccgagtagctgggactacaggcgcctgccaccacgcccagctaattttttgtatttttagtagagacggggtttcaccgtattagccaggatggtctcgatctccagacgttgtgatctgcccgcctcggcctcccaaagtgctgggattataggcgtgagccacagcgcccagcccaggcatcttgtttctatctatttatttattttgttttgtttttggctaaatctagtcaatcctatcctctggtcttttcacagaaatcctgcagatcaaagcctttgacctagggcagtgcttttcaaagggtggtcccaggacagcagcatcagcaactcctagctcaaaacaagatctcaggccaggcgcggtggctcatgcctataatccagcactttgggaggcccacacgagtggatcatttgaggtcaggggttcgaggccagcctgggcaacgtggtgaaaccccgtccctactaaaaaaaaaaaaaaaaaaaaaaaaaaacaaaaattagcggggcttggcagcatgcacctgtgatcccagctactcgggaggctgaagcaggagaatcgcttgaacataggaggcagaggctgcaatcacccgagattgggccacggcactccagcctgggcgaaagagcgagactccatctcaaaaaaacaaaagcaaaaacaaaaaaatcccaaaatgtcagccccacccagaatgacggaaccagagcctctgggggtgctggcattttgtgtttgaccccctccagtgattcttttgagggtcattgactggagaatgatgccgatgccatcacattacccgcccccagcctctcccgcaacacacacacagcacatcctgctctgctgcgcacccagtggcatggacctggctgccaaaggtgtagaagcataagtaacatcaggggtgttacaaagggctctttccttgggtgtttgtagcttcccttagggctgcagtcactcgcagactgctgggctcttggcctcagggctctgttctgcccgcccagatctgttcctgagcctgcagacggctgtgaaccagagaatctattcttcaggcgggagttgccagttgcggccaagggggcggggcccggaggcgggagggccacgtgtgcgggagggaagcaggaagtgactgcgggagtggagccggcgagagagtggcagcgggggctgatggaagtgcagtgggggctggagagggcaccctagtgagttggcttttctctccttcggtgcctttggttgggctcgaggcccggggtcggaggccatcaggacaagagtgtgggacttggaagggcagccacctggagcttggaagggggtacgcctggagagaggaggggtttggaggagaaattggaggctttggcaggtgtcggggcggggtgggagggtgaggggcggtgggaaggaagtccccggaccccggctatgtccctctccagggtgatctggaaggcaatgacatgccttccttttacagtcctaacccaaatcctcttcgttcgtcccttcctaggcggtgtgtgggggtacccgggattcctgggagcagaggcagctacaaatccagctgctcccaggcccctcccacttgctctggctgttagctggacctctggaacttgactgggaatctggttaacttgcagcaggtctgggtggggcgtgacagtgtgcatttctaactaattcccaggttgggtggtccgcggaccacgctttgagtagcgaggcattagagaacttttccacagtcctctccgcccagacctgaatccttctgctggattccccctcgtggagttagggcatgtgtgtgcagctccactaaggcccagcagccctagtgctgtttccacttctgcaacttcaccagcctcttgaactgactcttggaagcggaacaacaggtttaaaagggggagaaaggaaataaagaaaacaaacctgtatcaatcagccgggaatgcccatgtgctgctgtggcaggtgtgtacaagtctacaggctgttggcatgttaaaagttggaacggtcagagaatgattctccctgctgctaacgaatcagggttgatggaattaatatccccatcgtgaggaattctgagccccattgtgtaagctgtgatggagatgctgtgtcctaaagttgttactggtctgccggttagagaaaa

SEQ ID NO: 7603 - DNA, 6000 bp, Homo sapiens
gcgatctcgctcactgcaacctccgcctcccaggttcaagcgattctcctgcctcagcctcccaagcatctgggattacaggtgcccaccaacacacccagctaatttttgtatttttagtagagatggggtttcactgtgttggccaggctcgtcttgaactcctgacctcgtgatctgcccgcctcgacctcccaaagtgctgggattacaagcgtaagccaccgcacccggccaacattgcgacttaaaggtagagaataatcttttttgactacatgtggcacctcctggacacagggtgggagttggatccccaaggcttcaggcaacccagccctgtggctttggtgggtgggctggagtctggtgcctgaagtttcctggggggaggggggcgctgcctgctgcctgtgattccaaagttctgggggcctggtggtggtcctgcttccacggctgtactaggcattgccctactggggactgtgtgcattggccttgttcctatggctccaccaaggactaccccagtgggggctctgcagtggccttgcttccacaattccaataggcattgtcctggcaggcactctctgaggcaacttcaacatcacattgctgctgggtattgctctggtgggggctctctgcagtggctctgcccctgtgacaagtccctgcctgggcccctaggctttcaacaacatcctttgaaatccatgtggagactgccaagccttcacagctcttactttctgcaagactgcagaattagcaccacaaggatgcagcaaaggtctatgatttgcaccttctggagcttcaatacaagcaacacacacacacacacacacacacacacacacacacacacaaggaacacctggggccacttaagccaccaccaggctggggtggccacagagtgctacactggggtgtggggtgcagagtcctgaggttgccctgggcggtgagcccatggagagcacccagggcctgtaccctgaaaccctctgtcctccaaggcctctgggcctgtgatgggaggggcagcctcaaagacctctgaaatgagttcagggactttcttccattttcttgaggaagagcacctggctcctttttagccatgttaatctttttagcaagaagtggcttggccacgcccttggattcatctcctgaaaatgctctttcattctctaccacatggccaggctgagaattttccaaatgtttccactctgtttcttttctctgtgagatcatcttaagcagttagaagcaaccacacagcagcctcagcattttgctgcttagaaatgtcttctgcctgccagataccctagttcatcactctcaacttcagccttccacaaagcccttgggcatggatacagtttagccaagctctttgccagttcgtaacaaggatggcctttactccagttttcaataccttgctcctcagttccatctgaaagctcatcagaatggcttttgcttccatatttcttttttttttttttttttttgagatggagtctcgctctttcgcccaggctggagtgcagtggcacgatctcggctcactgcaacctccgactccctggttcaagcgattctcctgcctcaccctcccgagtagctgggattacaggcgagtgctaccatgcccagctaatttttgtatttttagtagagacaggtttcaccatgttggccaggatggtctcaatctcctgacctcatgatccgcccacctcagctttccaaagtgctgggattacaggcgtgagccaccccgcccagctgcttccatatttctatcaacattctagtcataaacacttaaccaatctctaaagaattccaaacttttcttagtcttcttgtcttctaagacctctccagaatctaggctttttctagcctactcctccaaatgcttccagcctctgcccatcacccacttccaaagccacttcatcattttccgttattcattatcagcaacaccccacttcttggtaccagttttctgtctcattcagttcattttctgttgcttacaacagattatctgaaactgggtaatttataaagaaaatgaatttatttcttatagtatggaggctgagaaatccaaggtccaggggcctcaccctctagtgagggttttcttgctgatatggactctctgtggcacagggtgtcacatggcaaagggggctaagcatgctaatgttctagcttggatctgtctgaaaaagccgacaattcccctcccatgataacccattaatctattaaccttttagtcctttatgatggggttaatctgttaacctattaatccattatggtgggctaattcatggggattaattaatccattaatcccatccaatcaccttttaaagtttccacctctcagtaccgccaagttggggattaagtttcaatatgagtttttggaggtaacattcaaaccatcgcagtggtcgtttctcaatctttttaaacccatgacctggattagattttttttttttttaatcaaaaaacaaaaactaggcagggcatggtggctcacgcctataatcccagcactttgggaggcccaggcaggcagatcacctgaggtcaggagttcgagaccagcctgaccaaaatggtgaaaccctgtctctactaaaaatacaaaaaatttagccaggcatagtggcaaacacctgtagtcccacctattcgggagactgaggcaggagaatcacttgaacccaggaggtggaggtcgcagtgagccgagatcatgccattgcactccagcctgggagacaagagcaaaactccatctcaaaacaaaaaacaaaaaacaaaaaaaaaaacactaaactaaaaccttccttcacttcccactacagcagcttatcccctgttgaaaataacaccaataagaccagctaagctaatattacttggctcctgctgcatgtcagcacataaactaagcatttttagtgcatggattttctaactgaaccccttgggcaacgcttaatagtaggtactattatccccagtttacagatggggaaaccaactgagagattcagcatcttgatcgagttaagtaataaagtcaagattggaactgggccaggcacggtggctcacgcctgtaatcccagaactttgggaggccaaggctggtggatcacttgaggtcaggagttcgagaccagcgtggccaacatggtgagacctcgtctctactaaaaataccaaaattaactgggcgttgtggtgggagcctgtaatcccagaaactcaggagactgaggcaggagaatcacttgaacccgggaggtggaggttgcagtgagccaagatcatgccactgcactccagcctgggccacagagcaagactccatctcaaaataaataaataaataaataaataaataaataaataaataaataaaagactggaactgtgatctgattctaaagacccgagttcttaatcactatgtaatacagccacagcaatttctgtatctttggcatattccccaccagccgacattttgactcttagaaagtatatatgtgtattattgatgattacttttatttcccacatataaaattatttaaggctcaatatgtcttttaagactacacacctccctccctgcctccacttcttgtttgctgctttccccagtaatctgggagtgaacattgagtccacggtttcaaggtcagggtcctgggaagtatggcttataatgaaggaacaggaaatccaagccattggtgttatggagactgggaaggactggggagtgtttgctaggggcctgaggactacttgggtaagagggggctgactgctccagtggccagggtcatagtttgtctctttagtctaccccaccatcagatcaaaaaaggtggttaggaagtggttgttactagagggcagaggaaaaggttccagccccagtgaggaagaggtaggtggtgttggtggggccctgtgtgagcttacagccgcccttcctctcctcagttatttttggtctctgtgacctgtaggtttcctgttagtgggaacagaagtgacaggaacgagttcccactacagaaatgaacgccaggagtccaactcattccccttctctcttcccttagccgttgaacttctcagggatccaggcttctaggtctgcgtgcctagggctgcgtgttagtggcttcaggcgctgcgccaaacacttcgtttgagtctcatctcctaacccctcccctacccccaacagggccttgcaattcctggacccctcattaaagcaagagagtcctctcctctccagacccagtttacccaccactaacccttccgtgtggctctgggtgctgaaacggggatgacttggcccgctaggtgaagaggagacggaagcttcctggcagtccccgcgtcacgtggggccctacctagtcagcctcctaacgcccctccttacgcatgcgcccattcactgctggtccccaacaatgcctaaatcccgccctgcccttctcgttccgcccctgcccgggagccccgcgtcctcattggcgagctccagggtggcccggcccggacaccccagtgataaaatagatcatctacacggaaactggcgcgctccaggggtggggcccaaactcagttccaccctctggctcccagccgaacaccgaaccgggaccgatccggccccggcttgaactagctcagctccgagctcgcggaaccacgcccccgggagactctggcccggccagcgcgggccaggtcttcagtcctatatcgccccgccttgggaaaaggtgcaggggcctctcgccgcctcgtcgggcccttcctctctacctgcctctccaacccctctcggccccgagccacccggcagcgggggtgggtgtgcagaggtgcggcgtccagaacccggctcctgcagaggctctgggtggcagcagccctgttaccgcttagatggcgcgcaggacagagccccccgacgggggctggggatgggtggtggtgctctcagcgttcttccagtcggcgcttgtgtttggggtgctccgctcctttggggtcttcttcgtggagtttgtggcggcgtttgaggagcaggcagcgcgcgtctcctggatcgcctccataggaatcgcggtgcagcagtttgggagtgagtgcggcgcctggatctggcggactgcgaccctcggaagggagagggaatgcggcgactgggaagtggaagggcgaggggcgggagatgctgggggggagacccctgagatcttctcgcagcgccccttccacttcctcaggcccggtaggcagtgccctgagcacgaagttcgggcccaggcccgtggtgatgactggaggcatcttggctgcgctggggatgctgctcgcctcttttgctacttccttgacccacctatacctgagtattgggttgctgtcaggtgagagcctgcacaagggcaggagagtcaaatgcttagatcgttggatgttcacctccttcctgctccttccaaagggttcggggagaagctgagggaaagtttagctagcacctgtacccagaagggaattcttaataggaatgactaaagcgacaaacatggtgaggaattaggaaattcaaggatgatgaaacctggccgggcacggtggctcacgcctgtaatcccagcactttgggaagccgaggcgggtggatcacgaggtcaggagtttgagaccagcctggccaacatggtgaaaccccgtctctacaaaaatacaaaaattagccgggcctggtggcgctaatcccagttactcgggaggctgaggcaggagaatcgcttgaacccgggaggcggaggttgcagtgagccaagatcgcaccactgcactccagcctgggcg

SEQ ID NO: 7604 - DNA, 6000 bp, Homo sapiens
ttaaccttgtgtctcgtcctctttcctagtgggtctgcttgactcctccaggaacgcacagtgtacattggtgacgcacgccacctactgcttctaagtttagagaatcaaaagttaccgaggactttgtgcgccatatgggaagaatgagcactcttaaatccacgatttgcagatgaagacatgaaacaagaggggacagggaccaggattgggagcaggaggagtaatttatgagcgacattgtttagaattgctatcacttgatgatagtaagaagcaaactaatttttagctaatattattgttttaaaattctctccaatgcgccctctcattgtctgcccctggaggcatcattctgatggcctgcccagggtacaccccgacaccaagccccaaggaagttagtggctgccaaaggccagacagtggctgacagtgggcgccaatcatatctgtctggtgtcaaagcctgggcttccagtcacgctgctgttccgcctttagttcagcggctgtcaaccagcattgaccctttctcctgccctcaccctgccccacaacaggggaactttggcaaagtacagagacattttttgctgtccaacctggagacagtcttactggcatctcataggtggaggccagcggtgctctaaacaccctgcagtgcacagctcccacaacaaagcatcatttagcccaaaatgtcagtgtgccgaggctgagggaccctgcctcccagtagggaggtgccctggtttgctcgtgggatgctgaaaaaagatttatttttttgtggctgataacacaaccctgacaaagaatttccaagtcttcctgcactgttttgtgcaaataatacatacgctcttctgggtgatgagaagcagggattgtgtacaggtgcatctgttcttcagcagcattgtcagagttaaactcagatgaatgctattgattcctttaataaacatttgcaaagatggccgggcacagtggctcatgcctgtaatcccagcactttgggaggccgagacaggtggatcacgaggccaggagatcaagaccatcctggccaacatggtgaaatcccctctctactaaaaatacaaaaattagccgggcgtggtggcgcttgtctgtagtcccagctactcaggagactgaggcaggagaatcgcttgaacctgggaggtagaggctgcagtgagccaagattgcaccactgcactccagcctggggacagagcaaggctctgtctcaaaaataagtaagtaagtaaataaataaataaataaataaataagcaagaatttgcaaagatatcctaagtgttgggcctgttctggatgctgaggacggtgatctacaaatacagcaggttcttgaataatgttgattcattcaatatcatttcattataatgttgatgagggagggaaaaaaaaggaaggatcccttgagcccaggagatggaggttacagtgagctgtgaccgtgccacttcactcccacctgggcaacagagccagaccctgtctcaaaaaaaaaaaaaaagaaataaaagagcgagagagaaagaaaagaaaatgattactggctggggccactgtctgtgtggagcgtgcacattaccctcatgtccacatggcttttctttggctagtatggtttccttccacatcccaaacccgtgcacgttaggtgaattggagtgtctgtatggtccctgtctgagtgagcgtgggcgtgcgtgtcagtgtgcattctgcaatgggatggcatcttgtccagggctggtttccaccttgtaccctgagctgccgggacaggatctggtcacccaagaccctgacctgctgtaactgggtaaataattatctaacttgttttcaatgtttcttaagtatatgtatagctcacattcccttcagtgtttaatattggaagtgttttggtctttatttaagatctccgtgatgtttttgtgaccagaaatatgctgtagaaatttaactgttgtttctagcaatttgcctatgggaatattggcttatgttgtttcgcttacgcattgcaatttccaaaaaccaatcaatgatgttaagtgaggactcactgtactgtttgtgctttcgagtcacgcactggttgtggtggtagaaggacagttgaggaaacagtgacaactccatatgctaatggctggggagggtactcagaggaagggcacaaaccagactatagaagaggcgcagggagacatctaagaaggaactctgaggttgggcgcggtggctcacgcctgtaatcccagcactttagggtgctgaggtgggcggatcatgaggtcaggagttcgagatcagcctggccaatgtggcaaaaccccgtctctactaaaaatacaaaaattagcagggcgtggtggcaggtgcctgcaatcccaactccggaggttgaggcaggagaatcgcttgaacccgggaggtggaggttgcagtgagctgagattgtgccattgcactccagcctgggcaacaggatcgaaactctgtcacacacacacacacaaaaaatactgatgaaacataaaacaacctagggaggtggctagttttatcacataattattattacttttatttcaatagctttaggggtacacgtagttttcggttacatgaatgaattggatagtggtgaagtctgagattttaatccctccctcctatcccaccctgtctgcttctaagtctccagtatccattcgaccacgctatatacctctggatacccatagcttagctcccacttataagggagaacatgcactatttggctttccattgctgagtcacttctcttagaacaatggcctcctaggcggcaagagcgacactccatctcaaaaataaaataataataaaaccaaaaaaaccaggtattttattcttcttctccttctcctcttcctcctttcttttcttccttctccatcccccttcctctctttcttctatcccctcctcctccttctcctccttctccttctttctccttttcttccttgtcctattcttgatcttttcttttgagaggcagctaatccaaggtttgagaagatgaaagaacgtgcctagaaccacacagctgggaaggagggaggcagggaggaggggtgggaatggggcaggagtcctttgcgaatagatccctggcctgacccgggaaagctgtgctgaccagggctggggaacaagatgactttgaggggaatccctctgagatcagcactgtgtcttgacaatccatgccagccgccgtccggagtgttctgggggtggggagagggaggcggcaacacgctgaggcctcaggactgtctcttcagtttgtcaggtgtgcctacgtcatcatcctcatggccatttactggtgcacagaagtcatccctctggctgtcacctctctcatgcctgtcttgcttttcccactcttccagattctggactccaggcaggtgagcagacccaagggatcctggtgactttctggttctccccttctctctttctctagtccccactgtgagtcgcacaggcctgggggtgaccggaaaaccctcatttgtggattctccctggcagggagacaccactcgagcctgcatccccactccaagctgtccctgaagtcagcatctggggactgggtggctctagtgtgtggcaagggacagtcctgatgaggccttcgtgccacgctccaggtgtgtgtccagtacatgaaggacaccaacatgctgttcctgggcggcctcatcgtggccgtggctgtggagcgctggaacctgcacaagaggatcgccctgcgcacgctcctctgggtgggggccaagcctgcacggtaattacgccttctctctcttgccacgtggctctgcatgagccccagggctggaagggggtggaggatggcacagaccaggccatccactggtgagggctggccatgggcttacctggacttggctgggtggggtgcgttatagctttagtgggagagaccagatgcatgcgtggtggtggcacatggtgagcagcagtaagtaagggtcctcgaatccagaggaggtgggtcagcaagagtccttgcaggcttggaaggctttctgggggaggcagctagctgcagggttccaccgggaacaaattggatagaggctggatcaagctgtgtctgataggataagggaagcaggccagaagtggctcaactacccagctcatggggaagcagaaaggtcctctctccaagctggagcatctattcccactgcaaagaagcttcttatcttccccgatatcactcagtaccccagcttctctctccatttccaggatctctcctgccaatctagctagccatttccagctaagccatggagtcaatataatcataatcataaccataatcaatcatgatcataatgggtatattgagtgtctacaaggccccaggcatgataccaggagcttatgaattgcctcatttaattcttaccacaactctgagagctgagtattcttactgcccacattctgtggatgagggattggaggcagagagggataaagtgatttgctcatggacacacggggattggacccagcttctctgataaggcctgtgtcctctctaatcagaaactcagggcatatcttccttttgagacaatgtgtcccctcaatgatggcacgtccttggcccagccatcaggagtcagctgctggtcagtttacggtaaattcctcctgaggcgcccctgtgtcaggggctgtgctagaccctgagcacacacagacgctagcctgccctgcaggcaacccatgcccggggctcccttggtgcctcagattcccctgagcaggggactttgtggctctctgatctgttacacatcctggcattgattccttccagtaattgctttagcatcaaatcaaaagccatcatattttctagaaatgagagaccccaggaaagtggacctcagggccctcagaattcttctgcttggctcccttgagtggccagcttgggtgggaggccactccagtgggtttcattctgcagcatgctggagagcttccacttccaaacccaagttcacacatgcttctgtatccttcctgccaccttgctcctctgagtatggtctccggttgtccaaggcactgcctgtcctgggagtcacctgtatgtgaggcacccttggtgccttgagatatcatgtagaagccttggttcttctcagacaactccattcatgcaaactctccccctcctcctagcctgggtcccgggctttgtttttttttgggtccataatgtctgcctgtgtggacagcagcttgggccctggtgcagaacagctcctaggtcccttcttcaggctcctacccctgcccctgctcctacccccaggtgaattaggagccctgaggaggagcctggctgcagcgaggcccacagactgagagtagctgagctccttctgtccctagccttggacagctggggcatgtagagccacagagcagagtcaggccctgccctgctcacagcccaaggagagagcagacatggaaacaggtgctttgaacccagcacagcgatgattagagtagggggaaggattgagaagggtcaggccagccccacctggtgcacacactgagagcgtggtcccagaggagggatgttgtttgagcaggctctgaaggaccatgaggagtcttcctgatagacagcagagaagggagcaggggttacaagcaaagggagtgtttcttctgaatactgtttgtgtgatagctccactgcagcatggaggggtcaaagtgtatgtgcggggcggaggggagatggcagggttggagtggcagccgggagaatagtcacactttcccaagctccctccccagctc

SEQ ID NO: 7605 - DNA, 6000 bp, Homo sapiens
caccgcaacctccacctcccgagttcaagcgattctcctgcctcggcctcccgaatagctgggattacaggcatgtgccaccacacccggctaattttgtatttttagtagagacagggtttctccaagttcgttaggctggtctcgaactcccgacctgaggtgatccacccgcctcagcctcccaaagtgctcggattacaggcgtgatccaccgcacccggccaatggacattaattttatgctaattccatgctaagcacaagtgtgacatgacagcttctctttcctatcttggacatagggctttctccctccgtatttgttcagtgttgtagagttgatctgttacaatgtaagttttattcttccaggggggaaaaccaccaggagcagcttttagcctgtgtgtgttgtgatcaagtcctattccttatttttcaacttcttccactgttcctccccctccaacaacactcacccactacatggttcccatacagaagctgctccaggattgaagttttgcccacagacgcctggccacacacgaccaccttgcagctcttccccatgcttagttttcaaccttgaagaacagaagcacgctgggtaaggtgaggaaagaaagcatcaacacagaaggcagttactagcagatgttttctggtggacaaaaacaaaaaccaaaaaaacagaaggcagaacgtccataactgagagttctaaactgaatgtatagttctaaactgaatgtatagttccagggtttcagcaccatcccaatgctagtcagaggaaacggatgtctccatgtctactactggatggtaagctgttattttattcgtctttgttatccccagtacctagccagtatctgtcacagggcaggtgcttggaaatgctgccataaagggagaggagagtcactggccactgggccaggttcccttctgtgcgcaagatgtagaggaccaattagtaaagggagctcagcccagcttcctctctttaaccatgaccccatggagaattaagcaggaacagtgttttgtgtggctgtctgaagccatctgctccctggggggactgagcaaataaaaaggataatctggggcagggcacggtggctcacgcctgtaatctcagcacttcgggaggccgaggtgggcagatcacaaagtcaggagttcgagaccagactggccaacatagtgaaacctcatctctactaaacatacaaaaaattagtcaggcgtggtggcgggtgcctgtaatcccagctacttgagaggctgaggcaggagaatcgcttgaatccaggaggcggagattgcagtgagccaagaatatgccactgcactccagcctgggcggcagagcaagactccgtctcaaaaaaagacaatctgctttcctgtacgactcatctggacaacaatcaattccctctaaactccagtcaagtctatggctaaaatgaacataagacaagagagaaaagaatgaagaaacctacggaaaaaaaggcttcagaaaggacatactttttgctgcccttggactgacagacacaaaagagaaagctcagatacagaaaccctaagaggtcccagacagatatctccccgaaggcaaacttccaaacacaagccccccaaaagctccagacaaagatcccccccagagagcagagatagatcactcccaaagacggtccctaacagaaacctctccaggggaagctcctgacacagaccccctctccatatagcgagccccacaataaaggacaccataagagtgggccagaggtgcctccgccacagattttctcacgggggagcccccagagggaatgagaggcagagaccagccacctaaagcggcccggaggcggaggccgatcctagcgccggacgagcctcgcctcccaggtccgtacctcccggggcccccgcagcaccagccgggccctccgagctcgcggggaccaggggaggggcagcgccgccgcaaaggctccagtcttcctccagagtcggtgtaggctcctccaggccccgcccccgccgcctgcccgctccccagcttccgtcaggcaagacgaattccggcagcggagagagagcgcggaccgcgcagctcccccagaggccggcgggagaatgacggccaggacctggcctgggtgtgcgcgggagcccaaggttctagactccctggacgcgggccgctgggtgttctggtgtctctgaggcccagatgttctctctgtaaaggcgatcagagtacagtaactcttcgtttactcaatcatttattcgtcaaatgttttctgagcatcatctgtctgtgcctggtgcagggccatatactgagagaaagtggacgagttagacatggtggctgcccatcagaactcacggtctagagaagctagatgtctaacaactactgaggtgctgtggagcacagcaaaagggcatttaacgttgagtcagcagacactgaagggcctgggggaaagggtgttctagggtggaggaaacggctacaagtcatggcattttctgaaactatgagaacttgggttcaatattggtggtagaaaggacctaaatattggtactcaaattaaattatttaaaaaaagaaacagataatcaaaggctttgtgtggtaggccaaagagatcaaattgacggcaatggaaagccattgccaatgaagagacatgatcagtccctgaggaaggtcactctggcagaagagggaagactgaacagagatgaaattagagaccgattaggagactattgatgtattccaagtttttttttctgttgttttgttgttgttgttgttgccgtttttgagacagggtcttgctcttttctccatgctggagtacattggtgtgatcatagctcactgcagcctctaactcctgggctcaagtgatcctcctgcctcagcctcccaaatagctgggactacagatgcatgccaccacacccagcctattccaagattttaaaaaatgatgagcgcctgaatcgggatggaaaggtggagatagatttgggaaatatttggtaggagaatcaacaaaacttggcaacaaattggaagccaagagtgagaatggtttaatccatttaacaagatacggaatttaggaaagataataattacatccaacatttgttttttctgttgttgaggtgtgggtagacaatgaaaaagttaaatttaaatatggtaagccttggggatttgtgaaacatacaagagatatccagtagatagttggatatacagctgtggaagctgaagaaaggtctaggttggagatatgaaaagttgagagtcatcaacagatggaagtaaagctgtgggaataaatgagttgccttagatagaacataaagtgggaagatggtgagacaggttggctagcattagactggactatgagccactggcaggcagggcaggtggtctgtaagtcttgtgccctcacaacctagcacagagtaggcgttttggaaagggctgagtgattggctcaacgaatgacccctcctttccaacctagtgagcttgtcctatccctccctactcagtggtcgctgtggtttcagctccctccacactgggataggcagagtatgagcattggcacatgctgttttcctggaacaaacaggtaaatccttttaaaattcctttgccctcttcttattttactcttagctttacattgtaaagctactcctcatactcctccaatttaaccccagaaagctccaatttaattcagctccacaaatagtcgtttgggtgagggaataacaacaaagacagttaaactgtgcccttgtcccctatgaattctcaatccagaccgcattcggcaaggcaagcgtgatgagtagagagtttatataagaggtgggagtactggggacacaagagcaaggacctcaccccgcgagcttccttataaactccagggcagggtctggggcgccatgtgtcagctttcctaggcttaatgctgagatggcactcccaggcggctgacatgaaaggagccttgtaaaagggtcagcgtcattagggtgatgaaccagttggtgtttggagatccggagtggatgaaaggcgcagggtgaagacgccctgcgttcccctggcttgactgggcagggcttccagagaacgatgaaagctgggggaactgagctcaaagtgtctcttgactttcccgggaagaagctgtggacacactccaaggtcggaaaggtagcagtggggactccttccctacagagtcttgggtcacctggtccccacgcaacccagactccacggagcctttcaggaagactctctaggattggaagttgctatggcaatgaggctcttggaatactgaaagcagccaagccctagagaggctaccaccggtacaccccgccttcccacccacgggtaaagtggcgccgcctacgcaccggcacagcccctgggctcccgccccggcgcggagaccaccgtggacatccgggggcgggaggccgctctggccccaagcggagcctctctctggtagacgagcccgagggagcccttctgggcgcggcgccgcggagctgctctatgctccaaccggaagtgctcttcaccgccggcctcccacccagctctctggtcccggcggtaagatggcggctgccgcggagtgcgatgtggtaatggcggcgaccgagccggagctgctcgacgaccaagaggcgaagaggtaaccgggtagcagggtagtagaggaggcgacctgcagctccgtggctcagggaaactcgttcctgccatgatgcagcccccagctgttgaggcgatgccccgccctccgcaaacacccccccatctgagatcaaggccggatggaccccctgaaggggcgctcttgggggtcggccttcctctcccgcttccgcctggcgtaggagctgaggcatggccttgttctccagctgagaggacgatcgtccttataggagaggccgagtctccgagggcaatttcagaggtctggtgcgaggtgggggaagcggcgcggcgtcgatgacgacttccttacatcgcccccgacccccgcgttctcttgttaacttctgtgcattgttgcctgtctgcactttccgtctccaaaacctttgctctcctcaccccgttttcccttgtaattataccccagcgatcactagtctgggttcgaagtgattgtgtgtctccataattgacctggttgcccccggttatcccagaagtcaaagatgacagagaaaaaaaggaagagcgaggggcttatctcgtgttctctacgtcagactcctcttcccctgtccttcctgggtgatctttatccttcccagcactgttctttcttaagttaagcaccaaggaagagggcaactgcttgggcgctgttggcactccgaagcagccgcagtggttcgagattgccagtcggactagccaagggagctgctgagtgagtggttttcgagaacgctctagattctggcaacagttaggccagattattggaagtggggttggaacagagttgtgggtagtcatacttgttctaatcctaaagcagaattgacaagaaggttctagaagtttggagccctttccttatcagctgcgggttagtctgacccttttgttcaagatatctacagtgccctcagtctctttgcaacatactttatatcttcataccaagcccgttgtgtcttcaggctgggtaatttgaggcggtgatgtagaattagttcatgagatctgaaatcaggattctgagatttttactatctaatgagttcgaaatataagaagtactcggacgcaatgaatagttatcaagcttgagggtggttaccacagccagatctcaagttcctgatctgctgggagct

SEQ ID NO: 7606 - DNA, 6000 bp, Homo sapiens
cacaagactccagggcttcacagtgcccaaggcttggtggacatcgagcccaccggggaatctttgccatcagcgccgtgttttgatgcccgcggcaaggaacaccacgaaataggtttcctgacactcaggtgaggtgccaggtcctgggttaccaaggtcaggtcaggtggtctgtacttgccacccctgggtcggctctctaccctgcttgactacatcacaggaaaaggctggaaatggatccggggcttgttgacctgtagctcatggaggctgaagaatttcctccttgaaggcagacctgattttcctcctcacggaagagtttaggccagtcatagggtgtttttcttctatttattttatgttatgttatgttatgttatgttatgttatgttatgttatgttatgttatgttatgctattttattttattttagagacagagtctcactctgttgcccaggctggagtgcagtggggccatctcagctcactgcaacctctgcctcccgggttcaaatgattctcctgcctcagcctcctgagtaggtgggattacaggcgtgcaccaccatgtctgtctaatttttgtatttttggtagagatggggtttcgccgtgttggcaaggctgatctagaactcctgagctcaagtgatccgcccgcctcggcctcccaaagtgctaggattacaggcgtgacccactgtgcctggcttcttctttagtaaataaactattttatcaaagtataatatatcttcagaatagtgcacacatcttaagtgtacagttgggtgaattttcacaaagtgaacacacctgtgtaaccagcacccagctcaggagatagaattctcctgaatgggagttagtgtttaatggtacagagtttcagttttacaagatgaaaatagctacggagatggatggtggtgatagttgtacgttataaatgtattgaataccactaaactgtacactcaaaaatggtaaatggtaaatcttatgtgtgtttcaccacaatcgtaaaaaaaaaaaaagaaaaaagatcagctgggtgtggtggcacaagcctgcagtcccagccatttaggaggctaaagcaggaggatcacttgagcccaggactttgaggttacagtgaactatgattatgacactacaccccagcctgggatcccatctcaaaaataagtttaaaaaattttagaaaaagattcccagccacttagaattctccacatgccttcccaaagccaaacactatcttgattcattttgccagtttttaactttattattatttatattttatagagacagagggtggctgtgatgcccaggctcgtctcaaactcatggcctctagtgatcctcttgcctcacccttccgagtagctgggattccagacacatgaactttatttttatttttattttttgagacagagtctcgctctgtcacccagactggagtgcagtggcgcaatctcggctcactgcaagctccacctacccagttcacgccattcgcctgcctcagcctcctgagtagctgggactacaggtgcctgccaccacgcccagctaatttattttttatttttttagtagagtcggggtttcaccgtgttagccagaatggtctcgatctcctgacctcgtgatctgcctgcctcggcctcccaaagtgctgggattacaggcgtgagccactgcacctggccatgaactttatataaaatggaatcatgcagtgctgtgatagaatcataaccactaaagatatccacatcctaacccccagaatctctgaatatgttaccttgcccaacataagggactttgcagatgtgatttagttaaagacattgagacagggagattatgctgtattattcagtgtgcccagtttaagcagaagagtcctttataagagggaggtggaaaaggtaagagtgatgggatgtgaaaaagactccaccttctgttgctgactttgaagattgacaaagaggccatgagccaaggactatggggtggcctctagaaggtgcaaaagacaaggaaacagatactcccctggaacctccagaaggaacacagcttctaccaatgctttgactttagccagtgatccttgtcagacttctacagaattataaaataataaatttgtgttgtttcaagcccattaaatttggggtcatttgttacagaagcaataagagacaaatacaggtatttactctttgtgtctggcatctttcactcaactttttttttttagcccaagcccatgacagtagatcattgtatttgtactatataacattccattacatgaacatgccacatattcttcgtcaactgttgatggacatttgtgttgtttccagtgtgggcgcttatgaatactgtggctatgaactttcttgtacatgtctttgggataaggtatgtgcatatttctcttgcacatatataggaatagaatttctgggttatagggtatgcatgtatagtggctgctgtgatgtatccccaactctttcagaacgaaaggacctattcccttagctgctgggaggacccctggctggcagtcccagctgccagggctctgtgcaaactagtctcagctgaaaagaacttatttggccaaggtcacacatgcctcctaggaacgacctgtgtcattcaatgactggttgatatgtaagggtgggggatataaaggccccctcccccaatgatacctggaatagctttgaagggtcaccctggattcaaagttcttcagggatcagaggaggcttttgcagaggctacataccaacccagcttctcccccaccaaccctgcttccctccctttcctgcaggtgttgatcatgagagcactccctagtcaactttctttcttttttctccctctaatccaatatgattgatatccctaatcaacttcctgcatgctaatctccatctcaggatcagctgcctgggaacacaacctacaacagcttacgttattcagctttcatggttatcaagcagtcttttttttttttttttccaagacgcagtcttgctctatcgcccaggctgggtgcagtggcgcaatctcagctcactgcaacttccgcctcccaggttcaagcaattctcctgcctcagcctcccaagtagctaggactacaggcatgtgccaccatgcccagctaattttgtatttttagtagagacagggtttcaccatgtttcccaggctggtcttgaactcctgacctcaagcgatccaccctccttggccttccaaagcgttgggaattacaggcatgagccaccacgcccgggcagttttctaaagtggttgtcgtcctatgtattccctccagcagggtgagagagttccagttgctcaacattcttgccaatactaggtattttttgtctttttttttttttttttttttttttttttgagacaggatcttgctctgtcacccaggctggagtgcagtggcatgaccacagctccctacagcctcaacctcctagactcaagcaattctcccacctcagcctcccaaagtatctgggactacagccgtgtgtcattatgcccacctaatttttatttttaaatttttttatagaaataggatcttgctatgttgcccaggctgctcttgaactccaggctcaagtgatcctcccaacctcggcctccccagagttctgggattataggcatgaaccaccacgcctggccttttttttttttttttttttccctaaagccactctggtgattgggtagtgatacctcattgtggttttcatttgcatttttctgatggctaaagaagttcagtaccttgttgcatatttattcagttatttgtgtatccttttttgtgaattacctggtcaaatcttttacccacttttctactgggttgcgtgcctttttcttatgactatgcagatgttctttctgtattctggatacaagtcattcgttgggtatatcacaacattattcagagattctcaacggcaccagcacattagggtcccaataaaaatgagttacgtgaatgcttgagtccgaacactcttctaaggaaagaatgcttggacagatgcaagtgtgtatagttttaatgggtataattggatataggatatgggtcccaaggaaaggaaaacagaaccttgaatgcaggtaacacaccctcaaactttgccactttcagcctgtggtttctagccacaagcacttaaacacgcagttcccaaaggcaactgtaaattagtattcattcattcaaagaatgtcgatggaaggtatcaatgaccagcatgttgtttgttttttgtttgtttgttttttgaggcagagtctccctctgtcgcccaggctggagtgcagtggcgctatcttggctcactgcaacctctgcctccagggttcaagcgattctcctgcctcagcctcccgagtaggcatgcgccaccatgcccagctaatttttgtatttttaatggagacggggtttcgccatgttggccaggctggtctcgaaacccctgacctcaggcgatctgcccgccttggcctcccaaggtgctggaattacaggagtcaggcatcgcgcccgactggtgagcagcctgttctaggaagtgagtagccagctgtgaaagagaaacaatattcttgcttccaggagatctaggagagacgacaacttctaaaatagcataattttagacatgagacataaactgaataggtcgtagggggaagtaggacgaaagggttgatcaagcaattcccagaccaagacaccaggagggtcccgccctcggccccgcctccagctttgcatacatctcctgattggtcggcggcggcaggccccaccccgcggagccgagctccgcaagctgcaggcgggctccgccaagatgcagcggcggctccggttgtcgccgggcgggccaggagcagcgcggacccgagccgggcagggggcgcccgccacggcacccgcgcgctcctagcgccccagacccgcctgcgggcccggatcctccttgccactgtcccacccgccgtccctgccactccaccctttgtgtcgccgcagcccggtgcccccggctctgcgggaccccggccgggccggaccctggcaaagcgccaggccccgcgtgggctcccggcgagcggttgatggcgagggggcgcggcgcgggctctgtagcccgagttcccgacgctggaggcccggcccgcctcagccgcattgtcccgggccgcgcgcaccggccctgagctgcgccgccgcagcacccgcccgccgcccgcggggccatgcggagagccgccgggatggaggacttctccgcggaggaagaggagtcctggtacgaccagcaggacctggagcagggtgagcgcgggggcgaccgggacaggaaggcggggagcgcccggtgacccctgtccgcttctccattgttgggcgctatcaccccgggaggggctgggctggaccgggcgcgcccgactcggaggagggacgcgtctggagaaccgggacgtggagagagggggcgctgccggagaagacgcggaccggacgggcggagacctgcaaaagtggggggcggggggcggtcttcctattttcccagacgaccgggcatccgtcatccagctcgcccaccccgtcctggaggcagcaactgctcggccgcccctggtattgttacggggcctgagcgctagctaggagtcttctgaggccgggaggcggctccttcgtcatgttttgctgggagggtggcttgtgtgtagagggaagttatctcacgccaaatccagcagcacccgtccctgacaggaattatgagctctaagactcctagaaagtttccctaactcgcttcctactcagggagaagtggtaccgc

SEQ ID NO: 7607 - DNA, 6000 bp, Homo sapiens; identical to SEQ ID NO: 1952

SEQ ID NO: 7608 - DNA, 6000 bp, Homo sapiens
tttccctttctttcctcccctgtttgttaatttgtgatcaatttccaatttcctctcctttccttttttcttccttctcgctttcaccctttccatttctcctagcttagctagaattaaatttcttattttcattttcctgggtaattttgtctctcccatttattttctcttctccaggtatccccagctttaattccctcctaagtttatcagagaatgacccttcgtccaacatcatcagggcccaggtacaagattcagcaggttcactcttcagagtctatatggacgtgccaaaaacgcagccaccttacatcgaagaggaggtattggaagaagggttgaagtggatgtgagatgagatgggtgagaattgtcttactgcttttattatttcaattagacaactgagggcgaaaagcccttgtgccttttccagtgcatcctttgtgtagacactgtgattatgtaacatatatgcttggcatattttgcaaatatttattgaatcatttggtttgacagccaagatctatgggacccatgctcccagatgctagatcacagattgcataaggaaagaacatgtggtgtctacaaaatctgcaatgttgaaactctccactttgggcattatcctggcttgctttctatatttctattaaaaagtaaagagagctgggtaagtggctcacacctgtaatcctagcactttgggaggctgaggcaggaagatggcttgaggccaggagttcaagaccagcctggacaacatagtgaaacccccatctctacaaaaaatttagaaattagctggatgtagtagtgcattcctgtggtcccagctactccagaggctgaggtgggaggaccgcttgggcccaggaggtcaaggctgcagtgagctgtgatcatgctactgtactccagtctcaaataaataaataaataaataaataacaggagaaatctgtctgctcaatgttctgaataagactatactgatcaggactgggcgctgtggctcatgcctgtaatcccaacactttgggaggctcaggcgggcagaccacctgaggtcaggagtttgagaccagcatggccaaaatggtgaaaccctgtctctactaaaaatacaaaaaattagccgggtgtggtagtgcgcgcctgtagtcccagctacttgggagactgaggcacgagaactgcttgagcctgggatgggaaggctgcagcgagctgagatcatgccactgctctccagcctgggaaacagagtgagactccgtctcaaaaaaaaaaaaaaaaaaagagtgtgccgatgggtctaaagaaactaaaatgtcagaatatatccactgtgttgaaagactgccctccagcatgcagatgcttggctaccaggcatggccaccccatgtgtcatctgcccccaaatcactggatagccactccaacttgggtgcccaaactgactgtagagacccacccttaggcagagatcaggaagcagtgtgggtaccatccgaatggtgctcagaattgtttgagccatctgtttcttgatattctgaaattttctttgaagctaataatgtgacaatgtagaaagatcaaggacttctagagccaggggatctgaagacaggcacctgtgtgaactcacgcaggttgcttgatgctaaaggttatcacacaacacacatgaactcatccctataccagaactaaactatggcaataaggcgaaaaggtgcctctttcactcaggtacctcctaataccttgagaaaaaaaggctccaggttctcatctctgtcttgctgtccccggcacagtgcctggcccggctgtggcagctgaggtctttgcccctgatccgtggttttgatggtcccagctgatatgcagaaggcagaggaagggggtggtgctgtcctgggaggcagaggacaaggaaaggagccatggagaggaaagagttaaagacacatttcctccagggccaggagcttttccagtgaccaggcagtcaggtgacagcttctgtcagtgctcagttctgcaggcagaggaacaacagtggcatcttcaggccagtcagatgaacttggccagggaaatacagaggaaaggcagggaacaccctgatttcaaaccacactctggactaggtgaggtggctcacacctgtaacccgagcactttgggaggctgaggtgggaggatccctctagcccaagagtttgagaccagcctgggcaacagagtgaggccctgtctttacacaaaaattaaaaaattagccgggcatggtggtgcacacctgttaatcccagctactagggaggcagaggtgggaggattgcttgagcccaagaggtggaggcttcagtgagccgtgattgcacccctgcactccagcctgggcaacagtgagaccctgtctcagaacacacacaaacacacacagacacacacacacactgcagtgttgacagctggccagtttgtcttttctctacctgactcagaacacacacacacacacacacacacacacacacacacactgcagtgttgacagctggccagtttgtcttttctctacctgagcttacaggtattgtgcacaagcgcaaggaccatcccatacaaagccctgggccccccactatccctgatatgttgacatttctccccttgctgtaagaaaggcttcaaccaaactctcatggagctggaaccttagtgcagtgtatatcagttagggctagggcaaaccagggaaaccgattttgattttcaaagaaacaaaattgatcagtaagacactgcacagttcatagaatctctgggaaagatggggaggcaggttcaggggacaggcaggaaggaaggaagggaaacagaacatttaaaacctagacgagcacaccacatggtgattctgtcgaggacgtcattgtgggtgcccacggctgccaccagcaccaccgccagcattagcagctgggagctggagctaagttcactgcccttgctgtccttagggagtggatgttgccggtgatacctgtgccaccaccaaaatgcaatcgcccctgtcacctgcgatttttttttttttttttttttgagacagggtcttgttctgttgtctaggctggaatgcagtggcccaatcatggctcactgacgcagtctcgacctccagaggctcaagtgatcctcttgcctcacttgcctcttgtcaagtggctgggactacaggtccacaggcccacaccactactcccggctaattttctttttctttttttttttgagacggagcctcactctgtcgctcaggctggagtgcagtgtctcgatctcggctcactgcaacctccgtctcccaggttcaagtgattctcctgcctcagcttcctgtctgctgcctcagcctcccgagtagctgggattatagatgtgcgccaccacgcccagctaatttttgtatttttagtagagacagggtatcaccatgttggccaggctggtctcgaactcctgacctcatgtgatccgcctgcctcggcctcccaaagtgctgggattacaggcatgagccacccggcgcgcgcccctttttttgtatttttttgtaaggacggggtttggccgtgttgcccaggctggtcttgaactcctgggctcaagggatccacacgccttgggctcccaaagtgctgggattacagcctgcttcttaatgtcactaactcttcacccaagtcctaggcgcttgtgcctgctgtgccagtcccaggccgcaggctggcaccgtagctataaagggcgccagaaaaaaagattttgctagatagcgatgaattccccaatcacagaaaggagatactgcggatgcttatcagccgaataccagtaagtgtcccttgcagaatgggattagagactgcaaactgcaggcctgccaacagagggtgctctgtgggaaattatgtgaaaacgtagaaaagagcgcgagccagtaatttaaaaatcgacgtccaaatactcactgggtcacctatcagctatgtaatttgggcaggtaaataagcttttgtttcttttttttttttcctcataaatggactaggaatattactcctacctacctggcatggccgatgtgcgagaaaatgagataatctcgtggacaggctctgaaaactgcacttttactgagtaaaaaaccctttgcctctccgggcccccgtttccccatctgtaaaatgagtctgtaaagtgagaatgatactccctacgccgcaaggctcttgcgggttaaactggaatattataaatgcaccatttatttgcagattgaaattctgtgcgtccggaggtggcgggtgggagagggaatgagcagggatgcagggtaggccctgagttgctgggggctcagcatggccgctgcgcacattgcatcattttgtcgacactggtgtgggtgaaatcttccaaaagaaattaaaacagaaaaaaaaaaaaagaagggtctgggacttagcagaaacaagccacaatctccagattctactattcctgggccacgtgaggagcgcccacccgtctggcgctgcgttccccggggcgtcccagcctctcccgcccagcccgccgccctcctcccccatggccaccaaggtcaggctctcgcagggaaaacgtcttcaggggctaaacatcggttttaaacgaaatggaaaacctccaacacgaatcaacagcagaggaaaagcagacgccaaacaagcgctcagaaccccttcaggggcggcgtggtagctcttcccggggaacagcgaggggcgcggatgtccctcttcctaaaactgcacgcggggtgcgatccgagacccagcggcggcgagcgcgcccgagtctgctcgcgggcgccaggcgcgcggagagcggcggctgcgcctgcgccaacgccgtcagtccgcggggcccgatcccgacacctaactccacagagaagctctgctcctaagggaaagggaagacttcagccacagtttcgcagccaacctggcgacctcacctctctggcgacctcacttcccagccggctccgtttaagaaaaccccgcgcaggaccgcgcccgcccccgcgcccgcgcccgcccccgccccctcgcgcccgccccctcgcgcccgccccctcgcgcccgccccctcgcgcccgccccctcgcgcccgccccctcgcgcccgccccctcgcgcccgccccctcgggtaacaaacatggcccccggcggggcggaagcgcttccgcccccaacgaagatggcggagggggcgggactaaaagggcgtaggtagatcgccgggggctgacgagtgcaccatggccaccgcggcaacctcacccgcgctgaagcggctggatctgcgcgaccctgcggctcttttcgagacgcatggagcggaggagatccgcgggctggagcgccaggttcgggccgagatcgagcacaagaaggaggagctgcggcagatggtgggcgaacggtaccgcgacctgatcgaggcggccgacaccatcggccagatgcgccgctgcgccgtggggctagtggacgccgtgaaggccaccgaccagtactgcgcccgcctccgccaggccggctcggccgcgccccggccaccgcgggcccagcaggtcagtccccgtgcccccaccctgcgacccgcaggcgggtcccggagcccctggccttgcaggtcaaccccgcccccctctgtcagtcccagaccccgcgagtcctcaccttccttagccaggagcctatccgcccctcaccctttgggcccccctcagaggacagtgccagccttccttgcacatatgcggctgctgatccgttctggaaatgccattcaacagtttcttcaggcgctttcccccgacttccgggccttgattcctacacctc

SEQ ID NO: 7609 - DNA, 6000 bp, Homo sapiens
ctgtagtcccctctgcaccagcaacacacatctttctctgctttttttctccagagctaagtgaagcccaacagaagctgctggtgaaatccatggagaaaaagatcctacccgtgcagctaaagctggtgagggaaaaacagcagatgctggggagagtctgggagtagctgcagccagtggagatgcagatttcgcctaaggatggagccattctggaggatccctgtcttatcccaggggcttatgcccactcctcctttctctctctatttctcattttttgttatttcacaagaggtagaagactgaatttctgggcaataatctgggtttattagcctgatcttgggagaagagacagaaactgtggctttgcttattcctagccaaatattgtaagcaaatttttttttttttttttttgagatagagtttcactctttttgcccaggctggagtgcaatggtgcgatcttggctcaccacaacctccgcctcccgggttcaagcgattctcctgcctcagcctcccgagtagctgggattacaggcgcccaccaccacaccctgctaattttgtatttttagtagagacagggtttcaccatgttggccaggctggtctcaaactcctgacctcaggtgatctgcccacctcagcctcccaaagtgctgggattacaggtgtgagccacctcgcctggcctgtgagcaaattttttactgtgtctgagtctgtctcaatttattcctctgtaaaatggggctaaaaatcaatgtgctgcccactgtatagggctgttcaaagacccagatggggttgtaatgtaaggtaaagtaaggaattctaataaggggaatgtaaccttcttgtgatttttgtgagttaggagaggagagaggtttccagttctttcttttcatgctgttttgattccctccaggtggagagcacgatggaacagaacttcctgctggataaagagggtgttttccccctgcaacctgagctgctctcctcccttggggacgaggagctgaccctcacggaggctctagtcgggctgagtggcctggaagtgcagagatcgggcccccaatatatgtgggacccagacaccctccctcgcctctgtgctctttatgcaggcctctctctccttcagcagcttaccaaggcctcctaatttgccttttacgtctgcttcatgactccctaatgccttcccaacctcgtggtgctgtgtccttaccacctaagggcatttcagagccatcagctgaagacatctgaaatctcagctggtcacccatgataaccaacttccacctgcccaaccatatatcaccccctacccctccagctccgcaacccactaagcccatctgctgatgcttaaattttctttacttttcttttctttttttttttttttttgagatggaggctcactctgtcacccaggctggagtgcagtggcttgatcttggctcactgcaacctccgcctcccaggttcaagcaattctcctgcctcagcctctcgagcagctggaattacaggcacgtgccacgacacccagctaatttttgtatttttagtagagacggggtttcaccatgttgcccaggttggtctcgaactcctggcctcaagtgatctgcccgcctcggcctcccaaagtgctgggattacaggcgtgagccaccgtgcccggcctgtgcttaaatattctaggagtagaagcactcagacttttaaaactatgagccgtttcagcaaaactgagaaaaaaagaagattaattaatttcctatcctaatccctcctacttatacttccccaaaaaacaagctttactggaattaatggaaaatattatgtcaatcttaggaatgatatgtcttttggtgtttttctttaaagaatttatcatacagaaattcttaatttgtgccagaaaaagaaattgttatcatactgcatataaatcatatgtacatgaatatgatgctgtactgtcctcaggcaaactggaaaatgctcagagggtatagaatgtggaatccagatttttttttctgttcaattagttttctttaatggaatctagagtctcaagtgagaagatatcaaagcagtttgtcttcaaagaagagcatttgggagtcccctagctctgggttgagggaaagaccgagagatatatagtagaagcccgaaacaaaaataagacagatttcaaatttattgaacagaaaatgcagatgggcctttaaaaaaaagggggacccaagaataagactaacccaaaactttaaaaactaaattgtgatattatttcacctttctctgttctgccctgaaatttagggttcttgtaggaggaagtagtgtgggtaggcttggcatattactactaatatggatattacaatctcatcaaaccgctgggtttatatcatcctcctctgcctaaaagctgggtttgaacatctttcaccaacctcttttaaagcagtatcaggaccggacaccgtagctcacgcctgtaatcccagcactttgggaggctaatgtgggcagatcgcttgaatccaggagttcaagaccagcctgggcaacagggcgaaaccctatctctacaaaatataccaaaaattagccaggcatggtggcatgtgtctgtggtcccagctactcgggaggctgaggttagaggatcacttgagcctgggaggctgaggctgcagttagccaagatagcaccactgcactccagcttgggtgatggagcgagatcctgtctcaaaaaataaaaataatttttaaaaaagtagttctatgagtgcagtacatgtctgtaatcccagcactttgcaaggccgaggcaggaggatcacctgaggtcaggagttcaagaccagcctaatcaacatagtgaagccctgtctctactaaaaattaaaaaaaaaaaaattaaaaattagctggacatggtggctcgcacctgtagtcccagctactcaggagaaggaggcaggagaatcgcttgaaccccagagggggaggttgcagtgagccaagatcacgacactgtactccctagcctggccaacagaacgagattccgtttaaaaaaaaaaaaaagttttatgagtggaagaatttctctaaggattttggtccgtggagtcagactctcccccagtgtcttagtcaccccctgcccagcctggttccctcatccaccaagaattcatgaccaactgccagaagctttgtgttatgccgccagcctccctgatcctgagcaccttccaaagcctcactctattgctcatggatatactgggttgttatctgctgacttggttgttttctccttgtgatgtaaacttaatagagagatgagctaacaccctaactatctagaagagtaactcctttgattgttaaggatgaacataactcatctgttttcttccttaccattctcgcccaccttcagttgcagatatggtgttatgaagaggttctaatgagtttattccaatgatgattcaaaagtcctgttatccaccccccagccctggagggtgagaggacagttgaggaggaactggtcaaggcatgttccctaaaactagagcacatatctttccagttagcgagtggctgtttaacgcaaggaacatcctgcaatcctatgaaagaggatgcaaaagatatgcaggataccctttatatatgcaaaggaggaggtcaaaacatatttcctgccttctaggtccttacaacagggctagattgtcttgtagggtccgtgaaaggtctaaaactcaggacttccacttatgggagagagaaaagtttcaaggtagggagagagtttttgttgtgtgttctaagaaattgggagctatatccttcaccttgtttcaccttccctgcagaaccagtggggcagtcctttgaaaaataagtgggtagggtttcttgtccaatttgcttccccttaggtacaccactaagtaaaccatcattctctccttaggcacaccattattctgttccccatttcacaatgtctgtctggatgtataaaagccctctcaatgggctccctaaagcgtctgccagtaggggctcccaccctctttcctcaacactcccaatccaccgcagcccagagcacagtgtctgcttatctaaccatctgactcccccgtatactacattcttgagctgtttttcacccccctatttgctaaccgtgggccgtacatagggtggacccctatattttgttaaactggagtgattctacgcaaatgcacgctcctacctatcggcactcccagcctgcagaaattgtatgccttatgttcagcactaaactcaaatctaaccaaggaagtccggatcccatagggttcttcctactctccagttcggtttattttaaggccaacagccctagcttcacgtccctccttcacagccttctttccttccctcctgccggatgcgcccggcagccgttgagcacaagcccagcggatctggaaggagaccccgccgcgaccggggaaaattgagcgaacttgggcgcaaaacccgcccggcaactcgtgacgtcatctcgtcccgcgctcggataggctgtacccactccacgctggttgaggcgctcttaaagtcctttgtaacccagattggagcctgaggggacctctcgtggacgcccacagaaatgcactcgagaggaacataaaagcatcacacttaagcgctcgaaagaaagccccacgaacccataaaggctcctccccgctccttcctcgaagctcctccttcatcctgcacctcggctgtggatttatttcccctttgttgactcggccatcggcctgccgggcctggcgtttcccagaaggcccagcgccgggaaggggtttgcagctgctccgtcatcgtgcggcccgacgctatctcgcgctcgtgtgcaggcccggctcggctcctggtccccggtgcgagggttaacgcgaggccccggcctcggtccccggactaggccgtgaccccgggtgccatgaagcaggagggctcggcgcggcgccgcggcgcggacaaggcgaaaccgccgcccggcggaggagaacaagaacccccaccgccgccggccccccaggatgtggagatgaaagaggaggcagcgacgggtggcgggtcgacgggggaggcagacggcaagacggcggcggcagcggctgagcactcccagcgagagctggacacagtcaccttggagggtacggcagcccaggccgggaacgtgccgcgatcgcgggtgacagcgacccctgtgatttggcttcttgctgggaagccacagcagcctccaccaccctcagttctttgggatcacccccagatacctgctcccactgccccgacactcccgactccaggcccaatgactgaaccttctctccaggctgggaaccactcccctcccatcccctccatccccatatctggggttgcatctatatctaggtcccagtgggcctggggactccctcttttaagtcctcccctctgacctattccgtttatatcccacccgactgattttagcgcctccaatatatgactgattgttcccgctggaaaccagtgtttgtgtctgtgtgtaaacagggccaggatgacctagaatattgactcctgagttttaaaactgtacagcagatttttgttgtcctagctgcctttagcacactcccccgaatgaaccatttcgacctagtatcttgtttcctacttctctaactgaagtgtcccaacagtccccttgctgtctcctcccttcaggtccttactgcccctctgtttctaaagggtttaagtacatacacacttaaaacttttcgggtgtcatctttgtttggttttgtaatactcaacctttggcctaaactcctatat

SEQ ID NO: 7610 - DNA, 6000 bp, Homo sapiens
gctgggcgcaatggctcacgcctatcttagcactttgggaggccaaggcaggtggatcacctgaggtcaggagtttgagaccagcctggccaacatggtaaaaccccgtctccactaaaaatacaagaattaggcaagtgtggtggcacatgcctgtaacccgttacccgtgaggctgaggcagaagaatcgctggaacccaggaggtggaggctgcagtgagctgagcttgtgccactgcactccagcccgggctgaggaggttgcagtgagctgagatcacgccactgcactccagcttgggctacagagccagactctgtctcaaaataaataaataatttatttattttaataatttaaattatttatttaaattttatttgtttatttatttgagatgaagtctcactctgtggcccaagctggagtgcagtggcgtgatctttgctcactgcaacctccgcctcctggatttaatcaatacttgtgccttaacctcctgagtagctgggactacaggcgtgtgccaccacaccccacttattttttgtattttagtagaaatgaggtttcaccatgttgcccagggtggtctcaagctcctgagctcaggtgatccacctgcctcggcctcccaaagtgctgggattacaggtgtgagccatcgtgcctggctccaaattatagcatatttcatacgtatatatacattttaggatggtttgacttaggattgatacatatttatacagtacaagtgttttcagatatagtatctcatttgatctttttactaaccctgtaaggaaattacaagggcagatattatcaatcctatttttaaaatgaggaaacagatttagaaggtaaacagtttaaggggactcaacttataagttgcggagctaaaagcagtttctaccttatacagatgatccccaactttacaatgggtttaccagtacataagccaacataaactgaggagctccttacgacttatgatggggttacccatcataatgttgaaaaatcctacgttgaaccatcctaaatcggggatcctctgctgtgttgtcagcaataaatccattttcaacttacactgggtttatcgggacataacccaatcgtaagttgaaaagcatctgtactcttttcagtagatctttcagattcacttttctggatttgttgaaaaagaaattatataaaaataggccaggtgcggtggctcacacctataaccccggcactttgggaggctaaggtgggtggatcacttgaggtcaggagttcaagaccagcttggtcaacatggtgaaaccccgtctctactaaaaatacaaaaattagctgggcatggtagcgcttgcctgtaatcccagttactcgggaggctgaggcagaagaatcgcttgaatccaggaggcggagcttgcagtgagccgagattgtgccactgcactccagcctgggtgacagagcaagactccatctcaaaaaaaaaaaaaaaaaaaaaagtatatatatatatacacacatacacacacacacacacacataaaatacttacacttctggcaaacttctggctgacagataactggttttacaaaatcttacttctacctaatcgaaagaatggcctagcctcaaatgagacagcaacgtggtacttcaggcagaataaagtacaatcaattacacatatactatgaacattgataacacagaagccagtctgcagaccacgaggagtgttttaatgttttaagagtagtatactaaacatgcttaagaaccactagtcttgaacaattttctgtatatataataaattatacagataaatagtatacaacttacctacaattcactgttgattttccaccttcaaattcagaattcttcccccatcttttaggtaattctaataccataagtccttttattcctataagtgctacatgatgttgtgttgggcttaacaagacttgatagatttcaaacaggggtggatttatgcaaagcaatctctgaaaattagagcaaaccagtcaacatagttaattttaatttaaatataggtggcagttacttgaaatcacagtaatacttagtttactacaattataggataataaaactctggataagtactcacacttgtaccattaactcacaaatttttttttttttttttgagacagagtcttgctgtcacccaggctggagtgcagtggcagcccactgcagactttactatgggggttcaagtgtcctccccacctcagcttccagaggagctgggactacaggtgtgcaccatcactcccagctaattaaaaaggttttttttgtagagatgggggtttcgtcatgttgcccaggctggtctgaacacctgttcccgtgctcacaagatccacctgcctccaccttggcctcctaaagtgctgattataggctacagctaccacacccagcttactcatgcttgcttttaacatccaaagttacaactcatgataagctgctttcttccccatctctaaggttttgagattttggaggagtgaaggttattgagatagtcaccaatatttactgaaagcttataaattctgggcactccagcatttctgtatgctggacatacaaaaataagtaaatagccaggcgtggtggcacatgcctgtagtcccagctacttccaggcgctgaggtgggaggatcactcgacccctgacagtagaggctccaatgagccgtgatcacaccactgcactccagcctgggcaacagagaaagaccccatttcaaaaataaaaaataaaatacgtttttaaaaaatgacaagggcagacccagcccctgccttggagcttacagtctagaaaagaagacagaggcagagtgccatggctcacggctgaaatgccagcactttgggaggccaagacgggtggatcacctgaggccaggagttccagatcagcctggttaacatggtgaaaccccgtctccactaaaaatacaaaaagtagccgggtacggtggagtgggcctgtaatcccaactactcaagaggctgaggcaggagaatcgcttgaatccatgaggtggaggttgcagttagctgagattgcaccactgcactccagcctgggcaacagagcgagatcctgcctcaaaacaaaacaaaacaaaaacagccgggcgcagtggctcacgcctgtaatcccaacactttgggaggccaaagccagcagatcacgaggtcaggagttcaagaccagcctggccaacatggcgaaaccccgtctctactaaaaacacaaaaattagtcgggcgtggtggcagatacctgtaatcccagctactcgcggggggggctgaggcagaagaatcgcttgaaactggaaggtggaggttgcggtgagccgagatggcgccattgcactccagcctgggcaacaagagcgaaactccatctcaaaaaaaaaaaaaagacacaaaataattataaataattaagttatgattatgtcaaatgctacacagcagtatagaatgttattagaatactgcgtgctgcacatttggtaattattattattttttgagacacagtcttgctctgttgcccaggctgtagtgcaggggcgtgatctcagctcactgcaacctcctcctcccaggttcaagcgattctcctgcctcaggcacctgagtagctgggattacaagggcgcgccactacacctggctaatttttgtatttttagtagagacggggtttcaccatgttggccaggctggtctcgaattcctgacttcaggtgatccacctgcctctgcctcccagtgttgggactgcaggcgtgagccaccgcgcccggccttcataattctttttaactgaaattgggtaaataagtagactgtagactcctgccctattttcaaaactgcagaagcattgctagcgtcttattaaaattaaatcacttctcggtaacaagaattggaccgggcacacaacagatgtcataccttagaatgagtaccaagctctttttcatctttaagagaatctgtgtattacaaataaacatttccataaaccaatatttgaccacggcaagtgtgtaatactttctggatcacacccattttcacatgctgtcggctaatcaaaaacaaaaatccccattttgggtatggctttattttctaaagcgggcgttacgggggtaagaattaacagagacttcctcctccatgtcaagcatgaagcgtggtgctttgaaacctgcaacctgacttgctgtgcacaacgcaagagaaagttacgatctaacctattataagcgtcacatcaggaaacaggtttctctcgacgaaactaaaaatagcaactccgcccactcgttctcaacccctttagcccgctttgtttttctccagagcactcatccgtcactagtatttttattgaatattcaatgaccctttccttcctcccaggcctccaggccgtaagcatcgagagagcctgagtccccgcgaccgcgtatggcagcgtcggagtcaatccgctggaacgcctgccacaagatgaaaaacagccaagaggagcaaggaacaaaaaagactggttccgatcccggtgagggtcacttccaagatcggcctggcattacctggtactgggacagggcgggctcttcgccgccgccgctggggccccgaaggcgaacgactaagaaggagctgtcttctccgtcccacaggaaaagctctccgccgaggccaaagaccacgtttctcgtcagcaactgcggcggcggcgacgaaggcaacgacgaagaagctggtttctcagcttcggttggactctggtttttcagtccctcccggagccgcaagaacacgacgtggttaggaagccaggtctgccacagctcgccgtcgcccaccggtccctcggcggccgccatcttggcccaactgctcccctcactccagttgctcagcccgccgctgagcacagccaatccgcggccgtccactcactgtttcggccaatcaccgagcagacggcccggaagctcgagaggctcgtgccaggtcggggggcgaaggcgaggccagcccaccaagcaggggcgtcaccaagggaaagccaatcaccattatttctgaagcccaagggggcgggacgagaagtcaacataatggtggtgctgctggaaatctagcacctggggagagcctgagacttgtgtatctaattgcctattggacacctccatctgggtaaacccaggcatccagaactttccctcaagacttacctccctcagtgcaggtcgggctggcctcacgcatttcgcttggatgcctaaatctgtctccacgtggggccggtcgataaaacaacacttcccagaatacgctgcgatccattcgcggtctgcacccggaaagtacacctcccaggggtctgtgcgcgcctccagggaacgggtcttgtggctttgtctcccgcgaagaggagatggcggagtcgttgaggtctccgcgccgctccctgtacaaactggtgggctcgccgccttggaaagaggctttccggcaggtgggtatggggtttgtgcagtggtctaccctagatcgtcccggtgaccgccgtcttccctgccttcgccttagccctgctccgtggagcaggtgccgcagcgcgcctggtctggtcaaacccaggcctgctgactgtagagtgtgggattagcccgggtcggtcaagtcctagaaagccttgtttttggattcgattttgttttgaatttaaattgtggtcaggacatcaccgtttgcacctctgcaataacactacctactgttgctgcggaggtggccaccgagagaggcactttgtctacgttcgtcttgtgagatagagatgatttctattctagagagtagta

SEQ ID NO: 7611 - DNA, 6000 bp, Homo sapiens
aaaactgtctgaagtggagagagagatgggaaatgtgagtgatgagagcatcttaaggctgaccaaatggggagaaaggaatgtagggggctgaggaggccagagaattgacagcctggcaggactgaaatgatttgggtttaggggaacgaacattaatttctttctttttttgagacggagttttgctctcgttgcccaggctggagtgcaatggcgcaatctcggctcaccgcaacctccacctcccgagttcaagcgattctcctgcctcggcctcccgaatagctgggattacaggcatgtgccaccacacccggctaattttgtatttttagtagagacagggtttctccaagttcgttaggctggtctcgaactcccgacctgaggtgatccacccgcctcagcctcccaaagtgctcggattacaggcgtgatccaccgcacccggccaatggacattaattttatgctaattccatgctaagcacaagtgtgacatgacagcttctctttcctatcttggacatagggctttctccctccgtatttgttcagtgttgtagagttgatctgttacaatgtaagttttattcttccaggggggaaaaccaccaggagcagcttttagcctgtgtgtgttgtgatcaagtcctattccttatttttcaacttcttccactgttcctccccctccaacaacactcacccactacatggttcccatacagaagctgctccaggattgaagttttgcccacagacgcctggccacacacgaccaccttgcagctcttccccatgcttagttttcaaccttgaagaacagaagcacgctgggtaaggtgaggaaagaaagcatcaacacagaaggcagttactagcagatgttttctggtggacaaaaacaaaaaccaaaaaaacagaaggcagaacgtccataactgagagttctaaactgaatgtatagttctaaactgaatgtatagttccagggtttcagcaccatcccaatgctagtcagaggaaacggatgtctccatgtctactactggatggtaagctgttattttattcgtctttgttatccccagtacctagccagtatctgtcacagggcaggtgcttggaaatgctgccataaagggagaggagagtcactggccactgggccaggttcccttctgtgcgcaagatgtagaggaccaattagtaaagggagctcagcccagcttcctctctttaaccatgaccccatggagaattaagcaggaacagtgttttgtgtggctgtctgaagccatctgctccctggggggactgagcaaataaaaaggataatctggggcagggcacggtggctcacgcctgtaatctcagcacttcgggaggccgaggtgggcagatcacaaagtcaggagttcgagaccagactggccaacatagtgaaacctcatctctactaaacatacaaaaaattagtcaggcgtggtggcgggtgcctgtaatcccagctacttgagaggctgaggcaggagaatcgcttgaatccaggaggcggagattgcagtgagccaagaatatgccactgcactccagcctgggcggcagagcaagactccgtctcaaaaaaagacaatctgctttcctgtacgactcatctggacaacaatcaattccctctaaactccagtcaagtctatggctaaaatgaacataagacaagagagaaaagaatgaagaaacctacggaaaaaaaggcttcagaaaggacatactttttgctgcccttggactgacagacacaaaagagaaagctcagatacagaaaccctaagaggtcccagacagatatctccccgaaggcaaacttccaaacacaagccccccaaaagctccagacaaagatcccccccagagagcagagatagatcactcccaaagacggtccctaacagaaacctctccaggggaagctcctgacacagaccccctctccatatagcgagccccacaataaaggacaccataagagtgggccagaggtgcctccgccacagattttctcacgggggagcccccagagggaatgagaggcagagaccagccacctaaagcggcccggaggcggaggccgatcctagcgccggacgagcctcgcctcccaggtccgtacctcccggggcccccgcagcaccagccgggccctccgagctcgcggggaccaggggaggggcagcgccgccgcaaaggctccagtcttcctccagagtcggtgtaggctcctccaggccccgcccccgccgcctgcccgctccccagcttccgtcaggcaagacgaattccggcagcggagagagagcgcggaccgcgcagctcccccagaggccggcgggagaatgacggccaggacctggcctgggtgtgcgcgggagcccaaggttctagactccctggacgcgggccgctgggtgttctggtgtctctgaggcccagatgttctctctgtaaaggcgatcagagtacagtaactcttcgtttactcaatcatttattcgtcaaatgttttctgagcatcatctgtctgtgcctggtgcagggccatatactgagagaaagtggacgagttagacatggtggctgcccatcagaactcacggtctagagaagctagatgtctaacaactactgaggtgctgtggagcacagcaaaagggcatttaacgttgagtcagcagacactgaagggcctgggggaaagggtgttctagggtggaggaaacggctacaagtcatggcattttctgaaactatgagaacttgggttcaatattggtggtagaaaggacctaaatattggtactcaaattaaattatttaaaaaaagaaacagataatcaaaggctttgtgtggtaggccaaagagatcaaattgacggcaatggaaagccattgccaatgaagagacatgatcagtccctgaggaaggtcactctggcagaagagggaagactgaacagagatgaaattagagaccgattaggagactattgatgtattccaagtttttttttctgttgttttgttgttgttgttgttgccgtttttgagacagggtcttgctcttttctccatgctggagtacattggtgtgatcatagctcactgcagcctctaactcctgggctcaagtgatcctcctgcctcagcctcccaaatagctgggactacagatgcatgccaccacacccagcctattccaagattttaaaaaatgatgagcgcctgaatcgggatggaaaggtggagatagatttgggaaatatttggtaggagaatcaacaaaacttggcaacaaattggaagccaagagtgagaatggtttaatccatttaacaagatacggaatttaggaaagataataattacatccaacatttgttttttctgttgttgaggtgtgggtagacaatgaaaaagttaaatttaaatatggtaagccttggggatttgtgaaacatacaagagatatccagtagatagttggatatacagctgtggaagctgaagaaaggtctaggttggagatatgaaaagttgagagtcatcaacagatggaagtaaagctgtgggaataaatgagttgccttagatagaacataaagtgggaagatggtgagacaggttggctagcattagactggactatgagccactggcaggcagggcaggtggtctgtaagtcttgtgccctcacaacctagcacagagtaggcgttttggaaagggctgagtgattggctcaacgaatgacccctcctttccaacctagtgagcttgtcctatccctccctactcagtggtcgctgtggtttcagctccctccacactgggataggcagagtatgagcattggcacatgctgttttcctggaacaaacaggtaaatccttttaaaattcctttgccctcttcttattttactcttagctttacattgtaaagctactcctcatactcctccaatttaaccccagaaagctccaatttaattcagctccacaaatagtcgtttgggtgagggaataacaacaaagacagttaaactgtgcccttgtcccctatgaattctcaatccagaccgcattcggcaaggcaagcgtgatgagtagagagtttatataagaggtgggagtactggggacacaagagcaaggacctcaccccgcgagcttccttataaactccagggcagggtctggggcgccatgtgtcagctttcctaggcttaatgctgagatggcactcccaggcggctgacatgaaaggagccttgtaaaagggtcagcgtcattagggtgatgaaccagttggtgtttggagatccggagtggatgaaaggcgcagggtgaagacgccctgcgttcccctggcttgactgggcagggcttccagagaacgatgaaagctgggggaactgagctcaaagtgtctcttgactttcccgggaagaagctgtggacacactccaaggtcggaaaggtagcagtggggactccttccctacagagtcttgggtcacctggtccccacgcaacccagactccacggagcctttcaggaagactctctaggattggaagttgctatggcaatgaggctcttggaatactgaaagcagccaagccctagagaggctaccaccggtacaccccgccttcccacccacgggtaaagtggcgccgcctacgcaccggcacagcccctgggctcccgccccggcgcggagaccaccgtggacatccgggggcgggaggccgctctggccccaagcggagcctctctctggtagacgagcccgagggagcccttctgggcgcggcgccgcggagctgctctatgctccaaccggaagtgctcttcaccgccggcctcccacccagctctctggtcccggcggtaagatggcggctgccgcggagtgcgatgtggtaatggcggcgaccgagccggagctgctcgacgaccaagaggcgaagaggtaaccgggtagcagggtagtagaggaggcgacctgcagctccgtggctcagggaaactcgttcctgccatgatgcagcccccagctgttgaggcgatgccccgccctccgcaaacacccccccatctgagatcaaggccggatggaccccctgaaggggcgctcttgggggtcggccttcctctcccgcttccgcctggcgtaggagctgaggcatggccttgttctccagctgagaggacgatcgtccttataggagaggccgagtctccgagggcaatttcagaggtctggtgcgaggtgggggaagcggcgcggcgtcgatgacgacttccttacatcgcccccgacccccgcgttctcttgttaacttctgtgcattgttgcctgtctgcactttccgtctccaaaacctttgctctcctcaccccgttttcccttgtaattataccccagcgatcactagtctgggttcgaagtgattgtgtgtctccataattgacctggttgcccccggttatcccagaagtcaaagatgacagagaaaaaaaggaagagcgaggggcttatctcgtgttctctacgtcagactcctcttcccctgtccttcctgggtgatctttatccttcccagcactgttctttcttaagttaagcaccaaggaagagggcaactgcttgggcgctgttggcactccgaagcagccgcagtggttcgagattgccagtcggactagccaagggagctgctgagtgagtggttttcgagaacgctctagattctggcaacagttaggccagattattggaagtggggttggaacagagttgtgggtagtcatacttgttctaatcctaaagcagaattgacaagaaggttctagaagtttggagccctttccttatcagctgcgggttagtctgacccttttgttcaagatatctacagtgccctc

SEQ ID NO: 7612 - DNA, 6000 bp, Homo sapiens
cttaaaatcctgcaatggttccccccaccttaaaaaaaatgaacatcttggcaaactacagtaaggtccaaactaggttggtccctgtctagagcctcacctcttgccactcatacccaatgcattagccataaagaacacatgcagaactattcggaagtatttatagctctccagcattcattaaataaaatgccaaaaaggtcttaatccatactcacacaaggatgctggcttcatggcacttaaagcataggaacaataaacgcctaccagtgggttaggtctggtactagaagagcttcttagagtcatagaggacagttcaactcaggtcagggaaagttctagggataacagtaatctttgagttgagccttaaaagatgggcaagtattgctaggggcgagggcattcataattatactgagtcatgaataaaacattaagttctactaagtatggtctatttgaaaagaggaggacatattacgtctttaagactctcaccaaaaaaggctcaaataggccaggcatggtggctcacacctgtaatcccagcactttggaaggctgaggcaggaggatctcctgagcacagaagttcaagaccagcctgggcaacctggagaaaccccatctgtactggaaaaaaaaaaaaaaggtaaaaaaatcagccagtcacagtggcatggacctgtagtcccagccagttgggaagccaaggtgggaaaatcacctgagccgggaggtcaaggctgcagtaagccgggattgctcactgcacgctgttgccactgcactccagtgtgggcaacagaatgagattctgcctcaaaaaaaaaaaaggctaaaataaaaatcttgtatgcctaagcatgacccttcatttatctttaaaactgagttatgttaaatgagatgttagtatgttgtgatagtaatagctcaaccaacaagaaaaaagtaaaagtgatgactaaaatacacagactttattacgaataccaaactacaaaaaggaccttggcatgttctactgcctgcctgaagagggtcagactagaagacagaatttaaaagaaaaggaaggagctcaactacactggcttcctcctcagaaaccaagaaaataaaacaaattggggacattcaaatcactaacacctctagtatataaagtcattatgggccgggtgccgtggctcatgcctgtaatcccagcacactggaaggctaaggcgggcggatcacctgaggtccagagtttgagaccagcctggccaacgtggcaaaacccgtctctactaaaaatacaaaaaaaaccagccaggcgtggtggtgggcgcctgtaatcccacctactcgggaggctgaggcaggagaatcacttgaacccgggaggtggaggttgcagtgggccgagatcaagcccttcaactccagtcaagagtgaaactccaactcaaaaaataaataaataaagtcattatgatgtataggcatacttaaaaacctgtgaaatagaattaagctacaatttttaaagccttgaatcgataaaatatgtagtgaaacaagattaagacgctagcatatctaaagggaaatttttaaagttaaacttccttacattatagacaaggttaacctccttattgccaagggctttgaaattaataacatgagaagcagcatacaaaaacattaaatgtataaaaaggtctgaaacaaatgttctggaggagtaatcttattctgcttctccatacctaagaatttaaaatattagaaattacactaaactgctttttccagcctttggttttcagaaacaataatggtataaaaaattatcccaaagtttttactgtaaagaatatttttctatccaaaccattgaaagaaaagcctgtatcagatataagtataatgatatagacattatacattttgtaatcaatgttatagaaacagtagttgaagttgatagtgttaccatacagcccatttcaatgatcatatgttaatgtgtcataaagaacagaagtagcttgatggatgaaatcagattctaacccccaactgcctgaggaatctaaaatttgggatcaaattattaaattagccccaccttcttagcattgacaaataccaaacagttcactgattgtggttttaagaataatatgtggaaaggtttaatatcaattgtgggcagagatctcatggcttaaatatttcctcttcttcagagagagtgtgtatgagtgtgtgagtgtgtgtgtgtgagtgtgtgcatcaccatgtaagaaatgtttatacctttcagcaaaggggcaattccacaataaagttattatcaagtaactaaagtttatacagcatcttgaaatcaaaggtactctataaatttaaaatactaatatggtattaacttaaagcaaagaacaataattttaaaacaccttatagcccaagtgtattgtaaaccaaatataaattcactgtgggatctgtctttttttaagtgattttttttcctctattaggcaacccagatctaaatgaactgttaaacacttagtctaaaggtatgccaaacatttcttaaggtcttcacaaagaatcaactttttttttttttttttttttaaacaaaatgaggcctaggttaaatattttatttggcttctcaagatggactgagaagttgggcaccagctccagaccaattcctggacgcacatcaaacacagccctgtcatttatccagtcagtcaaaacaatcttttccatctaaccctttaatgtttatgtcctaaaaagctgctaattgaatccagctcttgagatctatttgctaaaatctataccatctaatttataaatgatgaacaaaaatggaagaaaaaatatgttaactttcctggcaaaacagaagagactccactgtaaccaaagaaggaaggacaatgtttttaatatttgtcaaattttaagagaaaactattcagagacaaatagttgtaagaaactcagagtacctcaaactgtttttactattaagaggacacagggtatttaaaattcctcagaaaaacctgaaacaaaatcactataaatgtagttcaatattcccccttcccctaaaatataagcataatctttcctcttaataaactttaattataaattcttataatgtatcataggcagtacggaaaccacagataaacactttaagatctattaagtcatactaaaaacctcaactaaccttatctgcagaaaatcaaaaacccaattttttccctcattttctctacatagcccagaggagggtaaatggaaacagcctatttctgatgctttctgcacacctgggatcacatgttctttccacgatcactgactacagacagcaacagcaacagataaactctaaagcaacaaagatcccctataaaggtttccactgactcctcccaatgtaaggacactgaatgaggggggagggggtggaatacaagtatcctccaatccaggttttccattaagaatcactcagttaatgattccctgcaattttccctagggaaaggaaaactgccatgaaagtaatatattatttaaattgcagccaacatacattcaagctaaattctcaaataccaaattcactgcaagttttcatccagcaagttcagccagtggactgggatgtgacacacaggcatttaactacaaaattagtccaaataaatctcaaagtctagtgtgggcaaacataattacagtttatccgtacacgtgcacgcacacacaaatcctctacggaaaattatctttctcaccactcacccgaatacaaacgtggacaatttatcaggggtaaatggtgaaggtaggataacgccgtgattccaattcctttacaaaccaaataaaagttctcctaaaacgggggtggcatgtccatgtaagaataccaaaaatggcactgtaagcaaaacgtacctgtaatgttaaagatttcatgcacctggaatcataaacactttgtaagtgtagtcttctatctggcaacccctccggacattcttttccatttcgaaaaaggaatggggagggtggggagagtaacagaaagtttgctcgaaagtttgtatgagcacatacttagcaatgcaccccccccaaaaaagtgtgtttttaaagcaggtctggcgttagaagttagacacaagttctgcggcctaaaaggaacaaccccaaacatgccaccctacaatcagacacttccaaaacacagtgtacaatgagcccaagccgtcggatcagacaggcacaccggaaaagtcaacctgtctcctcacctcagagacatgagtttaaggtgtgtggcccgggcagcggtggccggcggcggggagtaaaggtttttcatgcgggcataactgggtgtgtgcaaggtaacaacccgggaacacacacgcacaccctcccgttaagcgctccatctttaaggagtgtttactgcgcgcagtcagcaaccggattcaataatcctcgccacgggagctcttcatccccttcacgatctcacctgggcggtagcccaggggctgttccccgagccccgggaggcagcgtctggctccttgaccaagactttccgacctgaaatccgcctgcgatgcgaaccggtgtattctcccctccacaaaacaccaccccccgccccgagtcatcctcggctttttaaacaatgtccaaaccagagcaagtggttttccaattactctccctgaactaggccttcccattcctccgacccccaactcatcattgatcgcgaccctggcccttcccaaggccacaggcaccccccgccagctcgcccaccccgcggctgcccagcccggcccgccgccccccctcacctgtcaggcgcagcttgacgggcccgttcctccggcctccggggttagacatgtccccggcggcgggggcggcgggggcggcgggcggcacgggggcgacggcgaggcgcggcggagtcaccacagcggccggggctggggcccgagcagccggcgcctcggccgccacggccggagggtcccggatgtgccgagagtcgtcgccatgagccgcggagggagcgggacgccgagctcccccctcctcccacttctccttcctcggcccgggccgcacaacaaagcggcagccgcggccgcccgcgccgcctccgcccgcgcccccgccgcctcctcgcggccgccgaggcctttccctcctctcgtctcggcgaggcccagtagccgacggggctggtcggctgaagcgggcggtgctcgggggcgccggagcagaactctgggctcggccgcttcctcctccacccgccctcttgtctgagggacccgggacctggggccgccgccgccactcgtcggctccggggggcggggaggagacgggaggcggggccggcggggcggggcggggccggggcggggccggcgggcgcgcgcagggtgccctggcgggcaccggcagtcagggagggtgtgagctgccgccgagggtcccacgcggaacgctgggagggagcaggcagggagcaaagcggcggcgggcgcggcagctctgtggcacctggaggggtttactgtccgggccacttaagggagaacttttgtccaagcagggccaactgcattttattagacgcccactgcgtgcagggcgctccgagaggctggggcgaggaaggttagaaccgagtccgctgcctgccgggaacttggcgtctttcgggcgagggaagagaaagcattcccacgccgatggttccagcaaaaccccaggaatgctctgctcctggtcttgtagttgacacctccatccgggactcacctggtggaggagatcaggttacctgccgactcccgctcttttcaggtgcagccaaggatggggagatgatac

SEQ ID NO: 7613 - DNA, 6000 bp, Homo sapiens
tcccagctactcgggaggctgaggcaggagaatcgtttgaacccagggggcagaggttgcagtgagcggagatcaagccactacactccagcctgggtgacagagagagactccatctcaaaaaaaaaagacccaggagttccctggggctgaggaatcttcatttcagtatatccccatgctccctcatacacaccaggcaagatgcatgtggtccagggccacactttgagagtgctccagaccctctgggactgtgctgtcacagagcatatttctgtgctcggggaatgaaccaattctggacaaaggcctgttccgctagatgtctcagcagctgctgtctgaagaacagcctgaactggcagtggcttggacagagctgaatggatgacagaaattgccagactgggccgggcacggtggcttatccctgcaatcgcagcacttggggaggctgaggcaagaggactgcttgagcccaggagttcaagaccagcccaggcaacattttgtagagaccccgtctctacagaaaataccaaaaatagcatgcgtggtggcatgcacctgcaattccagccactcaggagcctgaagcaggaaggatcacttgagctcagctcaccactgcattccagcctgggtgacacagcgagaccctgcttcaaacaaagaaacttccagactgaccgtgcttccgtcccttcttgtcacagtgaccctgctcagattttggccagacaacaataagcaaacttggcagtcagataaagaccttcagcgcctggcagctttagaagttgctctccagggccaggcacctccagacagcctctcctaccccctcccatgattgctgaaagttcactcactggaaagaagctgagaggtcacctgggacagccccccttcttttacatgtgaggaagcacagcccaggaggtttcgcaactagcccagccacctgactctcaactcagatggttacataaggccactgtctttggagcacaaagtacatcccagcactgggggaacaggtgtgagttagacaccattactccattcctgccccacgggacccacagtacagatggtcctgacttacaatttttcagctttgcaatggtgcaaaagcaatgtacattcagtagaaactgtacttggaatttgggatattgatcttttccccggatagtgatgtgtagtctcagacttgcagtgcctgtcagggcagtgggccacagctgcccatcagccctgccatcacgagagcaggcagctgacactctacagtggactgtgttgccagcgttttttgggtattttgttttgtgtttttgcatcccatcataactacaaaatggccatctgtgcctcctgcttctggggaaaagaaggcagctattactcttgcaatggaactgaagataattggccagcacggggatagcatgcgtcccacgcaagtcaggactctcgcaatccgtgatctcatcctttagaggcattttgacttaatgatattttcagtgcatataaccccatcgtaagccaaggagcatctgtggaatagggaaagatgttcaaaacgcaataaataacacagctcaagacatttgcatgatgagctgtggggtgcagcagagaattcagagaaggtttctgggggaaatgaagtggggctgaaacctgcatgatgaacaagtcaatgtcaaatagtcaggtgctggagacttgtctgtcggggaggactttccaggctgaggcactgaaaggaggctgggtggagggtgtaaccaggagatagggacgagagatgaggctggaggcctggccagggccaggccatagagggctttgcagaaccaaggaaagggttctgagcaggaggcacaagctcagatgtgcgtttgaaaaggacttggtggctccatttggagcatgagagcggagatacgaaaaagtggatccctctgagaggtatttaaggagctaaagccaaaggccttggtgaggacggattggaggagggaacggggagtagaggcgtgggggccggacctcacccggctttcctctgtccagctcctgccatctttgactacttcctctcaccctttgaatggaaggaaccaccttccctgtaggtcttcccctcctcgggcctaggcctgtctgtctctgaccaggcttcccctgcagaatttggtgtcagtaaccacttcctgatcaatatcttccccattgccttcaggatacaattcaaaagatcagcctgcattttttcctttgtgtgtcccgggtaaagcggttctctccagatcccccacctcacccccctcaacctgcctgccttctctgatatttctgccctgtaaccctagaaggtccgccagctccttcccacacaagtggaaacatttccctgagctggggcctgggctatcccacctctgttacatcccgggcaatgcccggggtccatctttggggttacttttcagaacttttgctgttttgattcagccaggtgatgagaggctgatgaccaagaagaggcacagctggagtacctgaggccaggtatctgcacgttccctcccttgcaaatccagtcttcctcaagctttctccaggataaaatggacgcatcttttgagaaataagcaccattcggctcacatttccattgtgttatgggttactctctttacaaagccctcatttaaagcccagtgagacctcaagggtcagggttaacttgagaggtctggaagggagatggcaaatgagagagaaaattacagagaggagagccagacagggcatcttcctcatgttatgttggacacttggagaagaaagtattggacaatgagcatgggaaaagaagggggtggtctctccttatcccatgccctttagtaaacagaaaactttatagcagatgggattagagatgggagacagacccaggccggtccacatacacttcatgagagactaagcaggtagcaaaactctacaatcacattttcacaaagcagagacacacacacacaaaggactagaaggaaagctcccaaattacctctcagcggtgagatttcagagggttttttcctattgttggtcttggttttctatttttttctacagtaaatatgcatgacatttgtaataaacacaatggtatacatatatgtacatacaaagagaaaaggtgaggtccccagcatgtcagtctagtgctcatccctggagacctggagaggtcccccacatcaaggggatcaggctactgggagggctggatttcagaaacctgccctgttattattattattattattattattattgctatactattaaagcaataacaggctgggcaaggtggcttatgcttataatcccagctcttgggaggccgaggcaggaggattgctttagcccaggaattcaagcaatgggcaacacagggagaccctatctctaacccaaaatacaaaaattagccaggcatggtggtgtgtgcctgtaatctccgctactccagaagttgaggctgcagtgagctgtgatcacaccactgcactccagcctggccgacagatcaagaccctgtctcaaaaaataataataataataaaacaataatagccttagaaagccccttctcacagcagctctgtgagggagtgttgaaccaagacatgattattatctccattttacaaatgaatatgcagagaccagaagaggttaggaggctgtttcaatctgcacagctgcttcctgacttactttcggaggtcaaagcagggcacgcagccccaggtcttgagattccaaatcatgaggtgtttttttgcccaggctggagtgcaatggcgcgatctgggctcactgcaacctccgcctcccgggttcaagcggttctcctgcctcagcctcccaagtagctggaattacaggcgcctgccaccatgcccagctaatttttattttttattttttgtatttttagtatagacggggtttcaccaggttggccaggatggtctcaatctcttgacctcgtgatccgcctgccttggcctcccaaagtgctgggattacagacgtgagccaccacgcccagccatgaggtgtttttgttttgttttgttttgttttttgagaccaagtcttactctgttgttcaggctggagtgcagtggcaccatcctggctcactgtaacctccacttcccaggttcaagcgattctcgtgcctcagcctctggagtagctggcactacaggcgcccgccaccacgtctggctaatttttgtatttttagtagagacggagtttcaccatattggccaggctggtctcgaactcctgacctcaagtgatccatctgcctcagcctcccaaagtgctgggattacaggcgtgaaccaccgcgcccagccccaaatcatgagttctttctggtctgtgagaaagcatggctgatggatcttattccatggctttgacctcggcattacccttgctgtcctgcacaccacagcgggtgccacaatatcccacaaactaccgagcccccactccagaggcacagcggcccccctcagcccgcgcaggtgcagaatgtgggcctcaaagtcaaaagcttattcacgccttaagtgcataccagttgcttcttgtgccgcgtcctaccctctcggtttgaaaaccacccaagctggcaggagaacgtggataggattgtgtttttgtggtttttaaaaccacattatttttaggagacaaggcagaaacagccctaacctaatgattaaaaagaaaagaatcccacagataagaacacctcgaccccacaaagaaccacattaaaaccccttttttctttcacatacataattactggcggggagggggtggtacaggatgcctctggtttcctcggtagaggttgactgaattctgaagaaatcatttcgcagctctgagtccacgacagaccacgcaccccctcctccgtgcctcgggattatttagatcgcagagctcccgaacttttgaccgctacttttcaaagaaacaagttcccttgtgttttgaagttcaggcaacttgcgttttattggccggaatcagctcccagagaaggcacccccggatgcaaatgcagcctggacctggtagagccccgttaggggcaaaggtcccagctctccggtgtctcctggcgcaggaggctggagccgccggcctctccgagccaacatgcgcccgggcgcgtaccagccgttcccgcagtgccccgcggggcccccagtcgggtggtgcggagcggaaagcggccgggacgcaggcagaggagctggggtgcccgcccggctcctggcacgatgctccccggagcccgccggcggacagctcgctcggtccccaaagcccgccaaagtcacccgcggaggcagaaatcaccaggtccccagcccgccggtaccggcctgccactgaggccaccttactcaccgcggggccagccaggaccaagagcgcccgcagctcttctcggaaggcggacagccgcaagcagcgcgacccacggacctcaagggtggcctccgggcctccgcgcactggcgcgggctcctcaggagcttccatgtgactcgcgcgctgcggccgggtagcgcggaggccggcagtgggtaccgcggaggccggcagtgagtaccgcgcaggccggcagtgggtaccgcgcagtgcagcctgctctgcagtccccgccccggccgcccgcccagagcccgccccgcgcctggcgcccgggggcccgactgagcgcgcagccaggcagcctgcgaccttgggcgcgccccttgcacctctctctgcaccactgcggacgcctgcgggtcttgcaaagaccaaggaactcctgcacttggaaggcaaagtttgaaaaagctctgtaaactaacg

SEQ ID NO: 7614 - DNA, 6000 bp, Homo sapiens
tagtttgggggcaggcgggtagggagagaggtcagggagggatgatctagaaacttcctaaagctacacacaattgcatattcatgggggatctggctattttttttttccaggaagaggtccaaagagttttgagattctcagatggtcagtggcccccagaagtttaagatccatttaaggtaagaagagtgattctagaggaggagggaccctggtacagtgagtagcaagactgcagaagggagggctcgcccggctcagaccccatggcaggcacccccgggacagcatctccccaccctcctgaagagattttggaacaaaaagcagttccccatcccactgggctgaacctaatcttaattctttggggatgttcagaagaattttgtcttgagaaactttagtggcctttttctagagctagctcttcaaaaaatcttaaagggcaaaaagtttggaactaacgttaaagtcttctggagggaagtctgggctgggaggagggaaagcctgatcaataagaggggggagtctggaggagaaatgcctgggaccttgaaaccccagaccattgccctgggggagggcagaagagcaggcagaaagcagcgtgggcctgagacctgccccaggcccaggtgccacaggtgagtgtatttccttcttggccctgaccctccagcaaacacaaagcctcgctcttccagagggagggaccagcccacttacaacatggaaacccttttctgctcaaaggacgacctagaaatctccaaaagcagatctctaagctcctgtttttaactgggttttctgaacaagggagctgaggtgccctctcccgtgaggcagtgagttcaggtggtttacctctgagtcttcctccagggtgctttctcctctttaccccaaattccccaaactgtggtctaaagcttcccttcctctaagagtgtttcatttaagaaacaggacaagggtgtggagaggagggttcccccacaacaattttcagtagggtaattcagcccttggctactccccctgaagaaggggaagggtatctctaagatctgttctttccaaaagatggaactgtcttattatctgtcttcctcctcagtcatataatctattttgtcagtgtctcaggctctcttcctttatgttggcaggagactttgaggagggggttgctcagtgcgagggtccagggacaaatgtacccaaagcacacagagccaagatcttgggtggcttataggtgggagaggctctccccaatcttcaacagagaccagctcctcttcccactgagctcaataccaggtactggaaaatcccacctgattctctggcttttcccattattacaaggagaggcactcacaatttgtttgtaattttactctttcctgcagcctttgcggggtccctttagaatcctgcaacaaatggagccgggggcggtgacacctcctcccgcctgcttctttgataattgagggaacctcatgttgagatctcacacttgtcatcatttgataaaaagctaggtttaactggccactgacacagatgatttggggggaaattatatatttttgggagggggcgctgctgaaatccacaggcttcatacaattccaaacaaagccccacatatcacttcaattaccaccaaacatttccagttcccctcccccaacataaactaacacaagcaaacacttcgaagtaggggttctaacttaactttctcccttgtccggaagacagccaacaaagggtggtaaggcaccatttctcccatcaccatttagctaagaaagcaaggtccagggctgggagcactcttctctgccccacccccagccaagtaggtaagggagagaggggaggaggaggtgtggtttggttaaactaataaaatgttacaaccctgttaaatacaattaaaaggatagatctctcaaagataattaaatgcactttattattatgattattagcttttaatttacactgttaagaaatggaagatggcgaaaactgagttatgtggcatacttgtattcaaactaatcctttggaattaaaattctaaaatattccaaatagttgagggaaataatatgtgttggaaactggagttctcacaccagcaaagatacttttagacatcacttctcaggaagttaacttaagagaagtcttgacaggccaggcactgtggctcactcctgtaatcccagcactttaggaggccgaggcaggcagataacgaggtcaggagttcgagaccagcctggccaatatggtgaaaccctgtgtctactaaaaatacaaaaattagcaaggagtggtggcgtgcgcctgtagtcccagctacttgggaggctgaggcaggagaaacgctgcagtggaggttgcagtgagccaagatcgcaccactgcactccagcctgggcgacagagcaagactccgtctcaaaaaaagaaaagtcttgactttatttgtaggggctcaggggaagataagaaacatctgctttaaacatcctatcaatcttgtgatatagaatgtaatgtaaacactcaacccacccccacagccacaaagggcctatccagagacttcttctaaagcaaagataccaccttttttttttttttcatttttttctggacaaattttaaataaaccagtctttttctcaaaggaaaactaaaaagcccaccagcccatcagtcccctccctccaacccacccgtctttatcactttttgaaaaaaataagccccaaacaacaacaaaaacccacacaaaccaacccagaaactgctaacctgaacgccagagatttttggctgcgggagtgaatagactgcagggaaagaagggaagagatgctaggaggtctcaaactccccagatttgcaaacaagtgctcaaaggcgaatgcttcccctagacatgaagggaggcaggatcagtactcctggtggggtgtatgttggtgggggctgtttcaaaacacacttcaaaaagcatttttgggccactggaagcacttggtgcagcgaattgaaaagaagagaagccagacaggagaaagatcttccagcctgcaggggaatgggccagggggtggaagccattcctcaccggatctctgccctctccccaccagcacaccccgaccccgatttttttttccacgtcttcatctctgttgggacttttccaagagtgagtgaagaagacaggacaaatgagtagggaaagaaaagggggaaggaaacaaaacgaatccaagtcctgttcaaaaatatccaacggcttccacaggcccagcgtcagagaggaggctcacaaatttggcttttatattagttgaatggaacaaactcctaacgactcaaagccaacaaaaacagcgctcaggctgggtgcctctcccatcaggcccagccctgccatatcaccaaaaaactccaaaagtggggcgggttttgaagggcacttaagaaagagaaccctccccccaactacactccccaacacacacacacctcattcttcagtcctggcgcccacacccctgtttttttttctccttttttcttttaaatagaaaatatatataattaaatttacaaagactatttacagttttaattacaaaccttgtgggggtgttgggcagagagttctcttttaaaaagcaacctaaaagtgaaatggtttcgatcgttttttatttaaaaaaataaaatacggagtctgtaggggccccaccccgggcggaggaaagcgccgcgcggttccggcctgggggcgtccctcacacggtggtctcaccgtgtcggctgttggtgaggcgagtgtagaacttcctccacgagtgcagcgtcttgcccgaccagatccagaagcccgacgtgatgcccacgatgagcgtcatgaggtatttgatcatgtagaccgtgaagtcgggcgacatgcgcggcgtgtagtgcgccgggcacgggatggccaggctcttgcagtgctggctcacccacgagcgctcccagtgctcgcggaaggcctgctcgtagaagtagcaagcgatgacgatggtggcgggcactgtgtagagcacggagaagacgccgatgcgcaccatgagccgctccagcttttcggtcttggtgccgtcgtgcttcatgatggtgcggatgcggaagagcgacacgaagccggccaggaggaaggacgtgccgatgaacaggtacacgaagagcggcgctagcacgaagccccgcagcgggtccaggctgttgaggcctacgaagcacacgccgctcagcaggtcgccgtcgatctggcccatggccaggatggtgatggtcttgacggccggcacggcccaggcggccaggtggaagtactgagagttggcctcgatggcctcgtggccccacttcatgccggctgccaggaaccaggtgagcgacaggatgacccaccagatggagctggccatgctgaagaagtagagcatcatgaagaggatggtgcagccctccttcttggtgccctgcaccaccgtgcggtaaccgtcctcggagaagcgctcgttgcacaccacgcgctcctggagcacgaagcccgcgatgtaggccaccgacaccatggtgtagcagcccgacagaaaaatgataggccgctctgggtagcggaagcgctgcatgtctaccaagtacgtggtgacagtgaagaaggtggaagcgcagcacagcaccgaccaggtgaggatccagaggcgcgcgaaacgcgtctcctcctgtgagaagaacatggaaccatcgggccgcgcaggttcgcagggcgcagcacaatcacgctcgcccagaaacttgtagctgagataggatggcaccttgaggacgcgcgggcagtggaaggggtgctccagcgtggcgtagcgcgggggagcgccgccgccgcccgggccacccggggtgcccccggcacccggctgcagtcccggcggcggcgcggtggtgagtagcgcgggagctccgtcctcggagtggttctggccgacgcagatctgctcggcgccgtggcgcgggaagtgctcgcagcgcaggcgctcgggccactgaaaaccgaacttgttcatgagggcttcgcagccctggcgcgcgcgctcacagatagagcggcacggcgggatggcctgttccagcacggtgcacacgggtgcgtacatggagcacaggaagaagcgcagttcgggcgagcactgcaccttcaccagcggatagaactggtgcacctctaggcctgcgtcctcctggttcgtgtggcccagaaggttgggcatgatggtctggttgtaggcgatgtccgtgcacagcgggatggagatgggctggcagaagccgtggtccgggatggagatgcccttctccccgtggaactgggccggcccggcggcgggcagcagcagcagcggcagcagcaggcggggcagggcgctgcggggccgcatgctggccgccgccccccacccggctccttggcgccccccccgcccccgcccccaacccggagactgcgcttcttccccgccgcctcctcgctgcggctgccgcctcccgcgcctctttgcaaactttactcgcggccgcagagttggggaggccgggcgggggagggggcggtgcgcctgcccgcttgcttgccgcggtcggactgagcagccggagacaccgcgcgctgctgccctctctcctcttcctcctcctctcgcctctcagctccccctctcccctcccttctgcacccagcgacttctttgtgcctcctccagccctcacctcggcctctccgatcccaattagtcggtttcaagggggcccccgctggcggccccgccctctcctcagccccccaaaaaagggatccttgaaaccgccccgtcgagctctaagcaccaa

SEQ ID NO: 7615 - DNA, 6000 bp, Homo sapiens; identical to SEQ ID NO: 2851

SEQ ID NO: 7616 - DNA, 6000 bp, Homo sapiens
gctgagaagcctctccaggtgggtgaagtgaggaacgggggtgcaaagaccatgggtgggaatataacttggccgtggtgagtgagaattggggggtgaaggccgaccatgcacagcctcaggctagggtagggcatagggatttcactctctgtgtctctgcagcgtggtaagcaggggaacggtatgatgtggcttaggttttaagtcatcccgtctggctgctgtgtggagtggttacaggggagcaggagtccagctgggggcccacagtgcccaccaggagctgctgagagaacatgttcaacgaggtccgggaagtgactgctcgattctgccaaaagagggatggcgcatgggtgacctgacaggagaattcagtggcatcctggtaacaagtggcagagtttgccaggggggaggcaaaggagtggatgaggaagtgaaggggcgttgatctaggggtatattcgtgtactgatgggtggcttcctggtgctgctctgacaaagccccacaaacctagtggcttaaaacaagcagggcgagaaggctgacttccaggtgtgggccacgctcctgccagaggttccaaaggaggatctgttgcctcttccagcttctggtggccatccttcattccttggctgtggcctccaccttcaaacggccttctctgcagatttatcttctaagagtgcaaatgcattaagaggccgcccagataatccaaataagctccttctctcaagatccacagaaagcagtatttgtggggttttggttggttgttttttgttttggccatataagggaatagtcagaggttctgggaattaaaatatggacatacgttttgcagggggccatcatccaacccattaccatgggaatgatctggaagagaaaggtaacactgatgcagaagggtgaacccaaggagggagctcttgggaaagctggaggatacaacccagagccagaaatcttcctgccaagcttttttattttttattttttttgagacagagtttcgctattgtcacccaggctggggctcactgcaacctccacctcctgggttcaagcaattctcctgtctcagcctccctagtaactgggattacaggcgcgtgccaccacgcccggctaatttttgtatttttagtagagacggggtttcatcatgttggccaggctggtctcgaactctgacctcaggtgatccacctgcctcggcctcccaaaatgctgtgattacgggtgtgagccaccgtatccagcccctgccaagctttatttcgaacattaccagtgaattttatgggacgggaattatagcttaattttttgtgtatgtgtgagacacagtctcactctgttgcccaggctggagtgcagcggtgtgatcctggctcacggcaacctctgtctcttgggttcaagcaattctcctgcctcagcctcccgagtagctgggattacaagcgtgtaccaccacacccagccaatttttgtatttttagtagagacgggatttcgccatgttggccaggctggtctcaaactcctagcctcaactgatctattcgccttggcctcccaaagcactgggattacaggcgtgagccactgtgcctggactatagctcaattttttttttttgaggcagagttttgctcttgttgcccaaggtggagtgcaatggcgtgatcttggctcactgcaacctctgcctcccgggttcaagcgattctcctgcctcagcctctcaagtagctgggattacaggcacccaccaccacacccagctaatttttatattttcagtagagacagggtttcaccatgttggccaagctggtctcgagctcctgacctcaggtgatccaccctcttcagcctcccaaagtgctgggattacaggcgtgagccaccgtgcccggccctatagctcaatttttttaagttttgaaaaacattcagaaccccccgccaactcctaccctaagcacaaagtcttgctaagaggtctttaatccctacctcaaagaccagatacgtgaggcacagagaaaagcctcaatgtggcaagagcagagagggtgactgggcagggtccagggacaggtcagatacacggcactggacccattcggccaactaaaccctcccggatccaccctctttcagctccactaggaaaacagctggcctcagccctgccagagactcaatgccacagggccagggaaactgggtctacaagcagcgaagacccccacagtgggtgtggcatgaaaggaacaggattcaagcagggaggaggaagtgctcctgcctgagggtgaagtgagagctgggagcagctttgggcatggcccacaccctcctgcctgtacacgtccacctcccccagcccaggagctacacgcccactcccgtcggcaccactggggactggagccccccgccgccagggcccaacatcaggaattgtctatggacttgaaccagaggcaatggacttctgtttgtggccagccctgtcctgaaggcaaagggccaggccaagggcgtcatatttgtccctggcattccctccggctcccctcccttctacactgtcatctgtcacatcagtaaacaccttggcaatgcggtggcaggtgggggctgtggtctctgcggccacaggcctcacacttggagccctcgaaccgggaggaactgggggtaggtcccaggactgtcctagcctaagcctttagccctcactccctgcacctcaccctccttattgcttggcttcaaaggggacacacctcctcccaaacagggcacttccaactttactctcacctggagttccacaaccccaggaaggcctcagggccaagtcagtgcttggggcgccatgcacccagcctgtgtcagtcaagtgaggaaagcttcaggccctgaatctaggaggattcttagatcgctggacccaaatgtccctggttaaagatcccactgctggaatcccctcgacacccactccagagattctgattcagtacaaccaggtgaggccctgtaatctgtattttaacctcttcccaaggggccatgaactgctaggccagctgagggaaggcctgccccaggcaccagcccctgagagggaagccctgggggccctagtacacctctcccacccaccagggttggggtggtgctgtggccaggtcagacgactaactctggggcagggagctggggactgcctgtgcacctcttccagacctccaagctctggacgggccaggaaggcaggatggggcgagcctcagtgttcttccctcctgcccttggcaatgcaaagaagctcagggcctgtgattcacagcactttccccttaacacacccacacccatttttttcaagacctcacccagcacaaaccaggacaagaaggaacagatttaaactttcatggaacttcctgctccctgtggcctgggagattgttccactaactcctctctgggtctctggtctctgccagggcaagtccaaggggtttccattagatggacaactcaggctggggcttgtgactgctctgctggatgcaaaacatccaaaatgccatcaagtaacaacgatgacaccaaaaggcagggaagggatccagaagagagagaagaaactgctgtcctccctaagccttggaaatccctgggctgtcacacctgatgggagacataaggcctcctggtccaacagcacgggcagcagcacatggagtggccagacacccacataaggctcacagccctcccaagcaggaggctcctgttcctgctgggacccacgaaacaacctgcaaggaccaggcccaacacatctgcctactcaaatggcctctgggagcattctccggctccattcccacaaacacattcccctacaaccaccagtttactgcaggcaggctcctcctcccaaaacagcagagcacttttctccctgactcctaaacacggtgccacacatggccttgcagagtggcctgatggcatgggtggggacacggtgccagctgtgagttcaagccccggctctgacacccatccctgatacaccatcctgggcaagactccaacctccctgggccatcacccctcctctacgagatgaaggttacagcacccgtcctctggtactactgcaaggactgctggggacacgtttattataaactgtctgcacagagttggcacccaataaatgaattccttcccttccttcctactctgtgatttagtttccctgtctcagctccaaatttaaagagatctcaagctctcctcagaaatgccaaagtggcccaggcaccaaagacagagaataaatactttcaacaaactctcaatgttgaagtcatcagctccaactgggaatccactctggtcgctggctgactccatcccctgaatcctagattttctcagtgtgggagaaagagtggacaagtaagttcgccaccattttctgcacttctcagcccgctcccaacagggcagcaggagataaatagttacacaagggcagtgaggctgtaaggccgtttgccagacacgaggaagcattgtaactccttttaaaagtatataatctgagtccgtagcgttccccaaagttaacggacaccttcccctgggatgggccgggccgcctctccgcagcagacacgttctgaagctggctcatgcgtgtccattctgacggtgcgaatgcccagcgtccaaagttgccttgcccttagtgggaacctcccgggcctccgggagccgcagcactcacgggactgccgctgcaccgccgctgcgggcgagtgttaggaacggccttcgtggcaggagtggagatgtgatcaccaaaactcccgcgccccgggctccacccgcccacgggggtgacgctttccccgggggtgacgctttccccggggtttccacggcgcctccccgggcgccggggaccgcactccccggaccccctagagctgtccctacgcagatctccttagagcgacgcgcatctgggatgtcttgggtgcccgggcgcactggtctagcgttgcggggtggccaggctgggaaccagccctccaagcgccccgcgcgcccccagcctggcccgtctggggcccccgagggaggaaccccggcctggagaagacgacccatttcggagctccgacggggccccgagttcgggcgacgccgagcgcctcacctgagcgggacacagatggccaggtatctgtcgactgccacggccagaaggctgaagatggagctctgcgtgagcaccagcacgaagcaggcgaggaagaggcagccgtagaagtcagtgcagaagcccaggctgatggtgatggcaaaggggatggcgaagagccccacggccacgtcggccgcagccagggacaccaggaagtagttggtgggcgtctgcagagtgttcgccgtgcccaccgcggcgcacaccagcacgttgcccgccaccgaaagcgcggcgatgaccagctccagcgccacgtacagcgcgtcctgtgtctccagcagcatggccgggccagctgggccccgggcgccccctaccgaaggcgcgccgggcgaggggcagccgcgtgagacccgccgggcatggccatagcgcccggaccgcgcctccgcctgccgcttctgagcctcggggctggggcgctggtggccgggacccacgggtcggggccccccgcggccaagaggcggcacccattggcccgcgcgcccgcccgtctcgggctgggcggagcaccacccactcgcccgagcccaaagttcgcgcccgcgcggggcccctccggtccaggcgccgtgccgcgtcttggtggcggcggataactaacaaattgccccaacttcccgtcacgctcgagctcggaggctgtgtcccagtg

SEQ ID NO: 7617 - DNA, 6000 bp, Homo sapiens
aagcctccagcaccccatcactcctctggactcctaggacccccaccttcaaaaccacaaagatacaatgataaaccatcacatttgtatgtgtgccgtgactgtgcttggggagtaggggtgggggtcaccctgattctaaagctcttgcccctgggcggcctggccccgttctccccccgagttaggaaggagttaacgcttgaagaggagggagggaagaggacataagctgggggcagaggaaactggggtcaacaggatattcaaagccggccactcccccgccccctctgcttccgctcccccctccaccccattctgccagcagccactgcccctcctccacccaaacaatcccagggccagggacccaaggcagggggtgcaaagaagagtcacaaatgctgggcacagtaggaggtgtctccctgagatagggggagataccctgaatacagggagaagagtccccagggccccaaaagcccattattctgggtaccccccatctggggagagatggcatgacaaagggggtctgttcccatcaatgctctgtctgtctggcctcaatactatgtccgggttactaacccctccccttctgttattcagctccaagagggcagccaggaggggtgacccagacagcaggggcagccctcactggccaaatcctccccagtgtctggctccatgcccatcactgtaggcagaacagggctgggttgggtaggggctatccatgtccaaagcctgggcagctaagggtgttgggtgcaagataagaactatgaccaggacaatcccagattcccaaggggccacgcagcatcgtcctgaggcccctaccaacgttcaagttctcttgtccagggccaaggatggatgaggatgcctccctaggtagacagatccctgcctcctcccatattccacaatcctacctagccctaccccaaactccggcacatgagactggctggcatttaaaggtgcccacagctcctggcccaagcaccttacagacatgagtcacatagccccaaatcacatggccctaaaattggggcacagaggaaggaagcatgggaacaccaggggctgactatgtgctaccaccctccccccttacctgcagacacagtgggggctgctaggcggctgatgacagggaactaggccaacaaccttggcagggctttcctggctcttagtagtgcctgggcaccacttcccaggccagcctggctgaccagcactgctatggccccccatccccttccctgccccaagaccagcctgcagcaatgggacagttgatgcccacaccatccccagcccagcagattctctcctgacctccccaccgccgtctgctcttcactccaacaccaactgccctggcctggttttctcccacctcattctccccaggccagacaagcaaatcagacaggctgagaggcctgagaacagctgctgggggggcggggttggggggcctgggtgaggccaggaggcagagggggtgagccacaaagcagccctttgttgtgctaactttttccaagacgtaaaagcagtaacaatagacaatccagactggtggggggaggggagatcaagggcaagggggtatgtggagggttggggggaccatggcctagaatcttggtcagcattccgacaagcagaggaagaaggcactgacctccccacccctcctaatccaccgtttgccctgggccccgcctctcccaaggccccacttctaaaatgaaccagactggagagggagaaaggactgagggagctttgggggtacagagcgggatgtcacgaggggagctagggtatggggagtcatgggggataccaggatgagaggtaaacagctctaaggcctgggacagactagagggcaaaaagccataaaaacatggagctaaagcaaagtccaacagagggtgtttacggaactgagagaatgtgctttttaaaattattttttggcagaatgggagagatgaccagaggcaaggactacagtttaggctgggcaaggcctccttttagcccacccaacggcagcttgactgccttggaggctgtaacatagcctgccccctacctccagcacatccccacctgtcacccaggtaacccagctctgaggtttccctgctctgccctttgaacccagagctcgatgccccacctccccaggcctccagccagcagtccaaggaggtgaggtacaaggaccaaggccggaggtgtggggaactccggaatcctcacagcctctgcaagagttaggacacggccataactccctgcacacacaggtggagtggggagggacaccaacgggggagggactgcccgggcctggcccatccctgctaacctccctccccagaggcccagcccaccaatctctcctcttcctgcagaaggactcgggctagagaaggaccacaccttctcagctcaaagttccagcgcccaacagaggactggaactgacccaggaagccaggcgtcccctcccgccgacgctgccagggtgcccctccctcgctccccatcctggcagggcgggcggcgcagagcgctccactccggattccccacgcccccgagccgttcgcaggctcgcacaaggggccggtttcctggaggagatcagcaggaaatcagccgggcccccggccagcggctcccctcccaatccagctggcgcccgctcctccgcagctcccctcgcagcccctggggatggttggggagggggcgtagggccctctgtaccgtccttcctcctcccggggagaggcgggggtagctctgggtgtaccgcggcagcggaagaaggcccctagcccagcggccgcctgataagcgtctccccctcccccaactacgggcatccacgtgcttcacattcttggacgtctgggagcgggcggaggtgtgagtggcggagattggtgggagacagatggggagccacatcctgtgcaccccccttgtcctctaatgcaccgaaatgagggctctggggagggaggcaatgtccctagggccctgcagaacccaggccacctcctcccagagccaacctgctcttcccaccttcagtggcagtaaaggggagagtggagaattccccaagagggggctggaggcagctccagtcaccagcggacttccacacacccaaggggacccttccaaggtggtggcattggccccacatattctagactgagtctagttgccaccctcagactccgggtccttcctgtgcctcaaggcaagcccccagacccccatcactcccaacctcacagcctcaggacccgagtccactgacacctcactcacttatatatgcacacccacgctcagactacgggaactggaaacccaggcctctaggtctactaccccaccccagaatggatgtggggacaggtctccacttccccatgtccagtggtttaggggaagggctcaccaatacactgcctgtcctactctctgtgatcctcctccctctccagttctgggccaggaagagctgagctgtccccatgggctaagaagagacaggggctggagaccaaggtctcagatcccagcttctctccagccctctggagaaggtggccaaggcagtggaaggggtgactctggcagccctgctccaactatccccctaggggaggggggtcttgctccagcactgggagaatgagaaaaagggtcctagagtcatcctctcactctctcttcttccaaagtcaagggtgataccttccctcttgtgtctacagccacacagcagattcggccctagaggaaatggtcgggggcaggacaataggaaaagctgggatagaagtggctctgggagggcagaggtgggctgtctgtccatctcaggtctctcttctcccagcaagaggggtggggtaagtcctttgcccttcaaccttctccaatctgccagggcccccccgagacccactccacccctcctccctggcaggcaggagggaggcagcaggtccaggaaggtgggagatcctccacggaagagcttcccctccagcaaagagcccaaagcccaggaggggaagaaacctgagccatctaacaataacccccttgcgcctgctcccgcccacccagtgtacactgcctcacagctgcgcaggaaaatgcccaggtgtacaccctggtgctccgagctcctgagtgtgcacagagcccttcctcccagaggagcctgcacccaggcagggggcaacaaggagagaaagtgaccaggctgccaggatgctaggattctcatcagtgcccctcttaggaaggcacagcccaggacctggccctatccccaagtgaagtcagggtaacaaaaggactcggtggcggagctgggaagggatgcagtcctcatttccagagcagccccagacccacaaaaacaaactcattccccagagaacaaaccggattaggattagggggagagggattcttctcaccagagcagcttctcccctccactcctggggatgaaagcctcaaagatgacagccaagtgtctggggccaggacaacaaccccataaggacccagtgccccttgccaagatggaaggttaggatggcagacgggtgtctgatgaagttgcccctttctgccacaccccactgtcaataccaaagacactgagtgctcccctgacacccactctaatgacgcaagagcaagggctgggggcagcagctgtcgcacaggaaggggctctccctcgggctttggcaagtgggatctggcgggggggccttcccccgggagcagacaaacccacacagacaggacctttaccccaccctccagcctgctgtgaagctgttggattccaggcaagaagatataaactgggggcaaggggcttgggcttcatttctcctggaagaagtgaaacaagagatgaaggaatgttgcttgaaagaaggaactctcaaagttcctcagccctaatctaacacaaattgcacttagggttactggggggagggtgcggccgggagggttcaattgtccagcaagggcaacacgggttaagtgaaaggtagagacaggacctccactacaccccgggactctcacccccgagtagtagtggaagccctaccgcccactcccaccccctacaacagcagactgagaggccggtacgtacagtggtttgagccattccaaagcggagtccggagcggggtggagtacggacccggggcggggagccccttctctgggagcaaacaggcccggttctggttataaaaatccaccactaggaagggattaggggtgggaccccccacttctacactctcgtacatctttcccctcgaaggcaagaggtccgagctgggaagtcctgcgcgccgcccccgtcactcagccggcggcgccatccgagcagagcagctgggggagaggagacgtcccctcgccccgactggtgacccgggcagggggcgccccctgccctgaagtccccgcgtctaagtccgccggccgctccgccagtcccggtgaaaagcagggaagttgtgtgtgctgggagggggggtccgtcggctctcccagggaagcctggcggggcccgggaactcagcggcttcacctcgaggggactcccgtctagagtctcgtggcgtccgaggcagagtacagcggctccccaagtccgcaggccgggggcgggatcagcgcggggctgggggtcaacgagcacttcctcctcccagccggggatccggggcttctccagggattctccgtggcgaggattccgggtgggggtggggatcccgcgcggttccgcccccgccaggccaggggcagctggcgactcgctcggtctctggtggtacgcgccacggcccccccaccccagctctgcgc

SEQ ID NO: 7618 - DNA, 6000 bp, Homo sapiens
tgagccctacatggctcccatctctgcctgctttgaatctctcagcatctctccttctctctgggatctgtccctcttctcgctaatcctcccttcttcccctttcccctctggcctttttgctgatgaatcctctccctgtggtccaggcccatctatccccatgggttaccatggtgatgagaggtgggggcatctccttggtggaggctcccttattcatcccgctacacaagtcaggggcctcttaacctcagttccacctgagtctccaggcaggcaccctttttcctgaaagaatctttgagtccttggcccaggtggaggcagggcagagctgcagagggcctctcaggaaacccagacacaagcagaacactataggtcacctccttgccccacactggaaatctcaagcttatccatgtctttagggtgatgctggtcccaaaggtgctgatggctctcctggcaaagatggcgtccgtggtctgactggccccattggtcctcctggccctgctggtgcccctggtgacaaggtgaggtggccgcctccccaccttctgccctaacacatagcctcctcagcaggcctgggcacggttccgtggggttgcgttgggagagcaggtcctgccaaactgagctgtcaacctgggaacctggagggaccagaaggaggggaggctctcctggggtcatctactaggagtattcaggggaggccctgaccctgagcctcttgtcccttgctctcagggtgaaagtggtcccagcggccctgctggtcccactggagctcgtggtgcccccgtaagtacagaagacctgttaagaccccatacttggcccttccctcccttcacacagcacccctggccctgtctgtgccttcaccccttgcctctcccctcaccgcatccccgccttccctcctgtcagcgcatctctccaatctgactccttttcttctagggagaccgtggtgagcctggtccccccggccctgctggctttgctggcccccctgtgagtaccaagacccccatcatttttcatcaccgactgggacctgggacctcgagggacggaatgaggacaaaggcgtcagccatcctcaggggagaagggtggagacgggattgtttcccacccaagcatcttcctgcctccattactgctcctcccccaggtagtggaaactcctgcctccttccctccattcaccgccctgcttcctcccccagggtgctgacggccaacctggtgctaaaggcgaacctggtgatgctggtgctaaaggcgatgctggtccccctggccctgccggacccgctggaccccctggccccattgtgagtggcttggccctctgtgcccacgaggctggtgggctgggacccaggacgggtccaggcttgatgcctctgtgctctcctacagggtaatgttggtgctcctggagccaaaggtgctcgcggcagcgctggtccccctgtgagtatcacccgcctctctgttgagcctctcccctctccccaggcagcggtggcaggtgagggcagctgggtcggatgagttggctgttctccctctgactgttcctatgttctctccttccagggtgctactggtttccctggtgctgctggccgagtcggtcctcctggcccctctgtaagtctctgcagcagagtccactgctctaggttgggggtgctgggtgggggctgccagaaggatggtggggctgactgaggacccaatgatgcaccagagccccctggagtctgacagcccctcctatcctcatccagggaaatgctggaccccctggccctcctggtcctgctggcaaagaaggcggcaaaggtccccgtggtgagactggccctgctggacgtcctggtgaagttggtccccctggtccccctggccctgctggcgagaaaggatcccctggtgctgatggtcctgctgtaagtgccagctcagatctctgcagctccggaggtgtgcagagctggggaggggtccctgtgctgctctctggcacctcacccctgtttgcctcccaaagggtgctcctggtactcccgggcctcaaggtattgctggacagcgtggtgtggtcggcctgcctggtcagagaggagagagaggcttccctggtcttcctggcccctctgtaagtgcccccctcaccttggggggccctgagaaaaaccatcacaggacttggagtggggcggagccaaggagaacagatttggtagagatgactccagcggactcaagggtcctcccagaccctatctctggcctgactctttcttctcccttagggtgaacctggcaaacaaggtccctctggagcaagtggtgaacgtggtccccctggtcccatgggcccccctggattggctggaccccctggtgaatctggacgtgaggtgagcagtccccagcccccatgccagtaccctcagcatggccattgtggccttgcctaagccctcttccccggctgactctcacttctctctctctctctctgcagggggctcctggtgccgaaggttcccctggacgagacggttctcctggcgccaaggtaagatggcaacactccatgaccacagccttgtctgctgcttccctgccccatcctggcccttcacccggggctgacccatattcccctgctctccccgccagggtgaccgtggtgagaccggccccgctggaccccctggtgctcctggtgctcctggtgcccctggccccgttggccctgctggcaagagtggtgatcgtggtgagactgtaagtagctgggctccagttccctgtacctggtcaggccagggactcttcaggcctccttagaggcctggggatgggtgtcggacttcacccaggcagggggaggaaaggagatcctgcaagatgtcagggccttaatccaaaaaactgagttaaagctcagccccaagtcccctctcccagacaggaccgcctctcccatgagttggccccagctcccgtgaagattgcagtggggaggtttccctgggagttgggagagatggccacagtgggaagcagctgaggagagagagatccagcagaggggaggcctcatcctgcagccccagcctcagccttccctggccaagagctcatgctttccttgctctccccagggtcctgctggtcccaccggtcctgtcggccctgttggcgcccgtggccccgccgtaagtaccctgctgtgtcccccatgcctttagaactctacagatgcagacagtgccccactcgatgccaatggaacttccgcctgacagtttgtccctttctctcttctagggaccccaaggcccccgtggtgacaagggtgagacaggcgaacagggcgacagaggcataaagggtcaccgtggcttctctggcctccagggtccccctggccctcctgtaagtatgctcagcccctccccagtccccatgctgtgctgtgggataggagggggagcttcgcctcagtttccccctctggatagtcattctttcccctccctagtggggactggggtctgaagatttgtgggcatgtccaagtagcttctgagagggtgaggggtacacagagagggattatgggagaggtctctgcctatggacaccctcgggctagatttccagaataatgaaggggcatgggttgcccacactgcccttgtctctccagccaggccctcaggctacatttgacgctcactgggcctgaactgccttttttatctgtccttcagggctctcctggtgaacaaggtccctctggagcctctggtcctgctggtccccgagtaagtcatgccttctctctcctcttcctgagccccaagcccaggctcacctcggggacccttgccagggacccaggcaccctttgcctctctggagaagggttcagggacagggagtgggcaaagagaggaagaatcctgaacaaacaatctgatctagctttggcctctctgctccccaatccgtcctcccctggctcagcggctgggaggagctatggcatgtcctatggaaagaggctgaggctggctctatgagccgtggggccagagccagcagggagggtggtgggcctctcctccagagctggggttgttcgggcttctggcagcctttctcaaaccatttcccccactccagggtccccctggctctgctggtgctcctggcaaagatggactcaacggtctccctggccccattgggccccctggtcctcgcggtcgcactggtgatgctggtcctgttgtatgtagcccctcatcccctctgctcatggccctccagcccccaaagcacttggatgccggtaatccccactctcttccctctctgtgcagggtccccccggccctcctggacctcctggtccccctggtcctcccagcgctggtttcgacttcagcttcctgccccagccacctcaagagaaggctcacgatggtggccgctactaccgggctgatgatgccaatgtggttcgtgaccgtgacctcgaggtggacaccaccctcaagagcctgagccagcagatcgagaacatccggagcccagagggcagccgcaagaaccccgcccgcacctgccgtgacctcaagatgtgccactctgactggaagagtggtgagggcctgccctagcctctccctccctcctactcctgccatgccagggtccccatgcccatatgtgcccctaccatatggtgctggctgctccctttccctgactccatcttgccctgccctaccacaggagagtactggattgaccccaaccaaggctgcaacctggatgccatcaaagtcttctgcaacatggagactggtgagacctgcgtgtaccccactcagcccagtgtggcccagaagaactggtacatcagcaagaaccccaaggacaagaggcatgtctggttcggcgagagcatgaccgatggattccaggtgcgtgagctggacctcagagccagtgttaggagatgggctagcccagtgctcagaagggacatgaagtcctggagtaggtctctgctaagggtgatggacagagctgggctgggaggcaggggtctcaggtccctgatagtggttcagacacaggctgccgatgggcaggtggtgcctcctctcgatataacggtgcattgggcagctctctgaggaccctggacagggaggccaggcaggactagaggttcccgcatagcggctcactcttccctctctcccctcccctgcagttcgagtatggcggccagggctccgaccctgccgatgtggccatccagctgaccttcctgcgcctgatgtccaccgaggcctcccagaacatcacctaccactgcaagaacagcgtggcctacatggaccagcagactggcaacctcaagaaggccctgctcctccagggctccaacgagatcgagatccgcgccgagggcaacagccgcttcacctacagcgtcactgtcgatggctgcacggtgagtgcccagaatccccaggcagggccccacctctccggccttgggctttttggccaggccatagtgccctctctccatcactcccacgtggtaatgccccctcccgttgtctccgccccaccccagagtcacaccggagcctggggcaagacagtgattgaatacaaaaccaccaagacctcccgcctgcccatcatcgatgtggcccccttggacgttggtgccccagaccaggaattcggcttcgacgttggccctgtctgcttcctgtaaactccctccatcccaacctggctccctcccacccaaccaactttccccccaacccggaaacagacaagcaacccaaactgaaccccctcaaaagccaaaaaatgggagacaatttcacatggactttggaaaatatttttttc

SEQ ID NO: 7619 - DNA, 6000 bp, Homo sapiens; identical to SEQ ID NO: 1951

SEQ ID NO: 7620 - DNA, 6000 bp, Homo sapiens
actcctcccgggaccacttcagccactctcgacggtcgctgctgatggaacaaaagatggggctgcagccctttccacagtcctccagggctgggacgttcaggtagtgcacaaggacgatgtcagggttctgagagtataaggggacacacagagccatggggtcctgaggtccaggggcttggcttcctaatcctcactttcttcctgggcaccctcctaacctcgcccccaatttctgactctctccatccccaagcccctttctcttcttcccaggctcctttcctcactcagaactcagccatcctttcacttccttctttcagacccgtgtccctcaaagagtcaggaagagggtggctccctgggctcttccgtccttacctggagcagccagtagcagcgccgatggaatgtggggacgatggaagagtgaacgtagcagccatagagacactgccaggagacaggctggggtggggggagggctagtctgctccccaactcttcctctgttcagtccctttgcaggaatcccaatctttccaccagttcctcttcaacccttcccccaccctcgcccccacctattccccaccccttttgaatcccagccaccctgagtcatagatgagcagtggggctggggccttatagtgaggaccagatttgagatacgggactatctagaaaccagagggcagagcaagaatgcatctgagatgaggggcaatgatttggggaagagaaacctgtgctgagagcatcattgctgggatccctgagggaaacacaagagcagtgaggggcctgggcatcagtgttctggaagggaggcatggcctacggcctggatagttgagtcacggagggaaatgggaagtggagagtggccaaagcaatgtcagccgacccaaagtgagtgagaagggaagagtaactgggaggggactgaggtggacaatgccaccaagcccaggtcgggctagagcccagctaagggtggaggagggcaggctcgggaagatgagctgaatatctgactctcttacctccatgccctggaccttcagcttcatgtggtcctctcgggtggtcttcccatccttccgcttcttccagaggtaaccatccttccgatatttcaccttcttgcgattgtagaggatgatggagccattctgaggcctgggaagggaagggttgccctggagttctgtgaacagaacccaggacccctgccactcccccatgttctcaaactttctcaccttgtctttggggcacaagacagccactcatcatgcttctcaaaggtgatcaggtaggatgcaatctcctgtaggagaggaggcactcagctgggcatctccttcacagagagtctcagcctggcctcttggtcatcctgtcagtgtctcactctctgctgagttctggcagctagtggaggatgcttctaggtatctggacccagcaagacccactgccctcctaagaacccttcttttgtcctaagacaaaagtctaacatttttttgtgaattattttactctccaaaaatctcattcctgtgcccctttttttttcttttgagatggagtttcactcttgttgcccaggctggagtgcaatggcgcgatctcagctcactgcaacctctgcctcccgggttcaagcaattctcctgcctcagcctcccgggtagctgggattacaggcatgcgccaccatgcccgggtaattttgtattttttttagtagagacaggatttcaccatgttggtaaggctggtctcgaactcctgacctcaggtgatccacccgccttggcctcccaaagtgctgggattacaggcgtgagccaccgtgcccagacttttttttttttcttttgaggcagaatcttactctgtcacccaggctggagtgcaatggcatgatctcagctcactgcaacctccgccccccaggatcaagcaattctcttacctcagcctccagagtagctgcgattacaggcacttgccaccgtgcccagctaatttttgtatttttagtagaaacggggtttcaccatgttggccatgctggtcttgaactcctgacctctggtgatccgcctacctcagcctctcaaagtgctgggattacaggcatgagccaccactcctggcctctgtgccccttcctgactcaaaaaatttcagtggtttgacactgccaggaatttcagattatttatttatttatttatttttttgagacagagtctcgctctgtcacccaggctggagtgcagtggcgccatctcggctcactgcaagctcttcctcctgggttcatgccattctcctgcctcagcctcctgagtagctgggactacaggcgcccacgaccacgcccggctaattttttgtatttttagtagagacggggtttcactgtgttagctaggatggtcttgatctcccgacctcgtgatccacccgcctcagcctcccaaagtgctgggattacaggcgtgagccactgtgcctggcaggagtttcagattctttagcctgactccaaggttcttcccaacaagggatcaaactttcactgttcccactatttacccatattgctcctacaattcctgccagatggatccattgattccttcctgaacatgctttgaatagttacctcctgcatgttagtgccctacaaggcaggtaccatgtgcacacctctccatatctggaaatcatagccattctataaaccaaaccccttttcagatgctccatgaagccctgctgaccacactggaccttcctaaacgctctatagcacttacaacaatcacacatacacacatacacgcatcgttttactgacagtcctcttctgacatcaaattgataaatatcaacaaccaactacatacaaggcagtaagtatgcagaatacagaaaatgtgtaacacaaggactgtgcctcctccagaaagagccagtatcagtggtggttaataacaaaggttccagccgggcgtggtggctcatgcctgtaatcctagcactgtaggaggccgagatgggcggatcactaggtctagagttcgagaccagcctggccaacatagtgaaaccccatctctactaaaaatacaaaaattagccaggtgtggtggcgtgcctgtagtcccagctactccggaggctgaggcaggagaatggcgtaaacctgggaggcagagcttgcagtgagccgagatcgcgccactgcactccagcctgggcgacagagcgagactccatctcaaaaaaaaaacaaacaaaaattagccgggcgtggaggcacatgcctgtaatcccagctacttgggaggctgaggcaggggaatcacttgaatccaggaggcgggggttgcagtgagccaagatcgcgccattgtactccagcctgggcaacaagagcgagactccgtctcaaaaaaaaaggccctggagtaagttagataaactatgaggtaaatcagtttcctcatcaataacataggagcaataacagggcttgctctatagaaccgttagaggattaaatgagacaaggcaggccaaatgtttagcacggtgcccagtatgtaaggaatactttactggcagtagcttttgtttttacccaggtggctatgccacagaaaagagggctccttcaagatccatgtctttttgtttttgtttttgagacggagtctcactctgtcacccaggctggagtgcagtggcgtgatctcagctcactgcagcctccgcctccctggctcaagtaattctcccgcctcagcctctcgagtagctgggattacaggcgtacatcaccacgcctggctgctttttgtatttttagtagagacggggttccaccatgtttgccaggctggtcttgaactcctgacctcagatgatccacccgcctcagcctcccaaagtgctgggattacaggcatgagccaccatgcccggccaagatccatgtttttatacctctcctaggatccccaaagagcttagaatggtgctctgcacttaggagtgttgacagacacggaaagaccccccactcaccctcctccagcctactaggtcttgctgggccccaacccccagcctccctagaaaacctcatttgtattccaccgtagcctctctggaggcagcagcgggcagcgaggaagacactccagcagcttcttggggagaaagatcttcaggtggtggctgttttctaaagggaattagaagggagggtttagtgtgctaccctggggcatccctgtgatagtccaaggggaaagggctgaaggcaatacagagcactggggaaaactgaaacctcactaaggagaacagaaaatccaagaattagagggccactaaagcgtggggagaacgaaaggctgtggccacattgggaacctggtttgtgaacttaccagcaacctcggtggtgtccttggtattcatggtgagggctccagggggcaaggtcacccccggcctgaggggccggggggagggggagtctgtgctgggaagggagagaacaaggtcatggcagaagcccccacattaatccaggatgagaagtatgaggtagggagtgggtatagaactgggtcatagtatctgggaaggatgaggaaagggagggaggggctgactgtgatgtgacagtagaagagagaacaacacacagtgcccggagccaatatgagtgagcagactggacaggaagagtgagcaggaagaaatgggttggggtgggggagcggggagaagactggcagggcttgggcctcagaggccctaaaccttgagcttttgcacagactggggctatggttgggtcaggtcctgggggttgggactcaggccatccggtccttggaggatggtttggcaagagagcctggatcctgggggcagggcaggagattctacctccggtagaagctaggcctttagaagacacgccctgagttccttctctgtttgatttttccaaggggaagggcagatctgataactgaacctaacctattctctcctccaggttggttaggacctgatagaatctgggccagacacccagattcccaccctcaggacaacccaccctccggctgacagccctctctacgtagctccctctccccaaacgcctctgcctcccctggcctccaggcctagcctaccccatctaccgctctggctccagcctgagccccccgccctcctcggggaacagatgggagctggcggaggctctcagcacgggctccgccaggtgtccaggatggagatgggaggaggcccgtcgggctcggctatgtgcagtgaagctggggttggggtaaggactccgccccagggcgcaggtgcgcagtcctggctaggcagcctgccagggtgcggagcgggagcgggtccttgggctgcacttgggcggcgccggatcggacgcttggcactctgggcggccccccggcggagtggtggtcccaggagaacctccgaggtgggagggtcccgcccgcatagagggatgttctggagaagccgggagcagagtccgcgggcacgcggtgggcgagggacagtgcaggtgccgggtgcgggggtctccgggacagtccccggcacgcgctggtccgccgtggggccctgcggtgagcggcgccccctggcgcgggggaggaggacggaagcgggaggtgagggcgaaccgggaagagggacggtggtccctggcgcggcgctccgcgtcgggacctggaggagctgcgccctctggcgcgggggcggagaggcgggcgagaggccctggctcttacctcccggggtcccgcgggtgacggcggcagcggccattctaccccacaccgaccccccccagcgccggctgacagcggcgtctaacgtcactgcgcacggggcggggcc

SEQ ID NO: 7621 - DNA, 6000 bp, Homo sapiens; identical to SEQ ID NO: 1911

SEQ ID NO: 7622 - DNA, 6000 bp, Homo sapiens
tggcctagtcatctaccaactctgcagtcaccctcctgtgatcacaccccttgtgatcttctcagccagatgtgatccctttttccctcacactcagataacatttggtttgtatccctagcatgattctcattacacttttgttttggtttgttaatttgtacacgtcaactttctcactagatgaaagccactgagggcagaaaaccagactctatctaacctatctttccaacataatacaccacacagtgtcttttttgttttgttttgttttgtttttgagatggagtctcactctgtcacccaggctggagtgcagtggcgtgatcttggctcaccacaacgtctgccacccaggttcaagcaattctcctgcctcagcctcccgagtagctgggattacaggcgcctgtcactgcaactggctaagttttgtatttttagtagagatggggtttcactgtcttggtcaggctggtcttgaactcctgatcttgtgatctacccgcctcagcctctcaaagtgctgggattacactcccaaagtgctgggagtgcgtgagccactgtgcccggcacacacagtgttttataccagcaggtccttgatgtatattaataaaatgcatgaaggcaaatacatgctacaaagggagtagatatacctttagggaagacagatgcattcatggaaattaaggaaacctgtatttcaggtgaaaactcaaaatatatatacttttttttgagacagaatctcgctctgtcacccaggctggagtgcaatggagcgatctttggcccactgcaacctctgcctcccaggttcaagcaattctcctatctcagcctcctaagtagtgggactacaaacacacaccccaacgcctggctaatttttgtatttttaatagagacgggtttcaccatattggttaggctggtctcgaattcctgacttcaggtgatccaccagccttggcatcccaaagtgctgggattacaggtgtcagccaccgcgcccggtcagaaaactcaaaatatttttagggaacatatgtgtgcctagaaaaacagatgcaccctgagagatgtgtgtctcagagaatgaataggcatgttccaggaatcatacaagcatatatggaaaaggcaggataccccaagaaatggacatgcatgtactcaagaaggcagatatttcaacaagaaggaaagtccctaaagaggctcggggtgccacaaggagtaaacagatgtatccatggagaataaagttgttttggagatatttttggagacctggcagttgtgtctgatggagagttgaaggtgtaggttacctggtaagaaatgggcctcactatccagggaacatataggtgtgttcatatacagcaatggtgacttgtagagaggggctgggtatgatcctagaaagtaggaaggtatctgaagagagtgttgtttgtctcaggaagctgatagcggggtccagctaagaactagtggttgtgcaggcacagcaggctcatgcttgtaatcccagcactttgggagactgactggggaggagcacttgaggccaggagttcaagactagcctgggcaacacggtgagaccccatctgtataaaaaaacttaaaaaaaaaattaggccgggtgtggtggctcgtgcctgtaatcccagcactttgggaggccgaggtgggtggatcatgaggtcaggagatcgagatcatcctggataacacagtgaaaccctgtctctaccaaaaatacaaaaaattagccgggcgtggtggcgagcacctgtagtcccaactactctggaggctgaggcaggagaatggcatgaaccaggaggcagagtttgcagttagccgagagcatgccactgccctccagcctgggtgacggagcaagactccatctcaaaaaaaaaaaaaaaaaaaaaaaattagctgggcatggtggctcacgcctgtggtcccagctacttggaagtctgagatgggaggatccttgagcccaggaggtcgaggctgcagtgagccatgtttgtgccactgaactccagcctgggtgacagaatgagaccttgtttcaacaaacaaacaaacaaacaaacaaacaaggaactagtgattgctgtagagatggcagttttctgaccccagggtccagtgctcctcagccttgagcttcttccagatcagatacgtcttctggttgctggctttagtggacaccagggggcagtgtgttgctaggctgcaggccacacccagtccaggacaatgtaggatgagggcaagggacatggagaggggtggtgaacctagtaaaggaagcccccactgctttctccctcaattgtgagggccttaggaatggattcctgttgctcagtcagggttcctcttcccaggccctgtgagtaaactgaagcatgaagaagaggaatagtcagggctcctgggcagcctcctgctcctcttgcaggagtcacaagcagagattcctcccttgccccttcccccacacctccccagttgcaggcccccagctgctgtccagaccggaagggagtctcttcctgcttgtttcctggagccgagtttggatataggcaggaaaggcccgcctgggaggaaagaatataggggtgtgaccttcatggaggcagggagcaggggggcaggtgaaatgaacagaacaatgggccatccagatttttccagttctactacccagggctgagggcctgtggcagtggcagggaaggacacaggttccactgaaatggggagaaggacattgtacaaaaaaaaagttttattttgaagattacagaacttgtgccatgaccccacctggcttccattcccagcaatccagggatctgtggtggggatgagagtgagaaaagggagtaggaggggaggagggaggcctggtgggggtggggaagtggagtaacatggttgttgagaagctcgtggccccctaggcctgggcctcactgtctttactcctccatactacaagagtgatgaggaaggggatgaggcagatgggggctatgatcatggccaggagtacatcctctggggggtcagagaaggtgggctgcaccagggagcagttggcaaagtggatctggtgagtctcaaagatgatcctctctgccaagggattggggaagcccaggtcaaacaactctgcaaagtgctccaggcaatctcgcagggtgctataaggcctaggggcagaagaggacttgagtgagagagggggtggacccagggagaagagtgccccactctcactcagggtctacctgcaatgagcaggtccaccccctggcctgagccaccctccatcactgcccctacctgctaatcatggcccagtcgcaccaatccttttcgataggatccatttgatccttataatgattccagcaaaattggacagctgtctcatagttcttcaccgtcccccctgtaggtacagatgctacacaatgaccacacccctacccctccctacaaaccctcctgcccaggtgcttgcaaggtgaactgcctgtcttcaaacgtgggaacccttcagaaagtttccctagcaaaacattctggctgaggacagagtcccagctcaggaatcctataatgacttccatgtgctaagcactttccatcccagcctgataagaacttccacgtacaccttttcctggggtcttctcgcccacttgtgaggtgggcagctcagagccgtgcaggggctttgtaggaggacagggagaaagaccacgaggaaccccaagaaagaacagaggggagtgtagtggggcatcagctggggttgggcaggcctcgtgggaaaggaaccctccccactgaacttgctctcgtccttaccctcggccacccttccacaccctgggtacccaccttctgaccctggtgtgcctgtggtgggaagaggctgagccagggcctcgtggggattcaggacagctgtgggaagaaacgggagaggagggtaacatagcggggaccccggcagtggagcctgcgaggggggttgggggactgagaccctccgaaaataggctaccttggaagaaaaggaggaataatctagcccccacggacgcctcagtgccggggagggaggggctggcaccagctccttgtcactcacacccaggcccaaagccccctcatctctggccagcttccgtcctcctaagccctcttcgaggggccggggccagcaccccagctttccctgggtgggaagcagctcatgctgcgcccgccccgaggtggggtcagggaccgtccgagggccagtgctgctaggtacgtcggtcctaacccgcaccccagggcccgttccggcctcggccatccagcccctctcccctctcccctctcccctccggggcctctcgcgcctcccgcccgggcctcggggcgccgcgctcaccgcccagcaggaggaggaggcggagcgctgccggccgcccgactcgggtcctagggagacgcgggccgccggcgcgctccacccggagcgaggccatcgtgcagcaaggaggcgaggagcggcggcggcgctgagccgggcccgggtgtgggggcgcctatatccccagcccaagctgcaggaagccgcgccgcttcctcggaggggctgggacggcggcggccacgtggggggcgggggcgacgctcggggcccgcggctggagggggagtcgctgcctcacccgcgcctggcgcccgcggctccctccgcctcgccggcgttggcccaccctctcgtagctcaccccgcgaggctggacagctcccggaaccccggaaccgggatctatttcgggggctcggctgcgtggcgcccaggactctccagggtctcccaggatcgctccccgaattcgagtcgccccctctctctttcgggtctggaggggtcggcaagctgctctcccagacgtggagaagagggagggggctgggagctccagcggcctctcgacgccgctgcttctaaggggctgtcctgggttgtgggggaaggggcgcctggagctgagccatgcagctcagggttccttatcctatccctaggaataccagctgatgtcagtccgccagccaaaaccagggaggagaagcgggagccagccctctggagtcgggagaaggtctggggagtggggtagaggggaaagcaaagtccaaataccttcccttcagacacctcctggggcctagaccccacaaacctgttgtggggagggcaaaatacgatgactacgttcccaggaagaaggtgccacagctcttcaggaccacggttgggagaaagaatggaggggttttagaaccttcagtgtgcgacttcatgtgccaggtgagtgtaacaccattttacagaccgagaagctaaagctcagggccaacagcccgggatttgaattcagaagctctgggttctaattctgtcttcttactccccagctatagagccttgaatgacacgtttaccttcaggacttctcatgtgaaatagggacattcccctcctcactgtatgatggcagctgtgaaagggcactgcactcgctaaatgctagtttcctttcctcttttcctaagtgacttatctaaggtcacactgttaaggaagcagcaaggctgagtctgggcctccgggggtcctgacttcagccacaccacagctgcttcttgtgtcctgggccagaggttcattagtctgaagcagctgaggagcccaggagctggtttggccatgacgttcaagtcccagacacagctgtcagcaccaaactttcctaaattactcccagacactgacccttggactcagctgctgctgttgtcccagtttactgattcctgcccaccacaaattatctgtcctgatctctcctgaagtcttcatctcaggat

SEQ ID NO: 7623 - DNA, 6000 bp, Homo sapiens
atgattgactattttttttaaaaagataccaacattaaacttaccttaaaatcagaataaaactgactgactagaacctttattatgccacaaagtgttaatactttggagaaaataagggaatagcgaggcttaaaaaaattttccaaaggatattctgtcacttgtaccaattcagccactaatacctttgtatactaccacgtaattggagaagattcataatcataacctataaaatctttattaagagattcagtcatgtttactaaactgggcaagcactaatatttataaggcttttccaatatgggttgaaattaactcactctggctaatcctcaattaatgagatttcagttaaaatctttcttacagttggttaaaattttaggaaagcgtttaggtatagtctcagtctcactggagtataacataactatttactacttattgattatttcaaaggccctcaatttgttttcttttagaaggacagggatacttttgatataaaccagtaaactactcattgtaaccaatgcttttccacatttttcccatgtcttctatgcctgaggaaaagtcaggaagctatatagcctgacggttactgctactcccaactgtttcactcatctaaacttaatttcaaaatactgacgggttccattactataaatttttttattcccatagactactttttaatagtgctttacacctaatgtaacagaatttatactttaacttttaagttacatgatagtaaaagtcaatttggaacaatggaaaatgccatgttttattagaatcatagtgttaaaattagtcctctgacagtttaagtgatgaaagaaaggaatttacattaataaagtaatcttttaatgactggttagtcacttacatatatttctgtttgctgaggtctaaagttccactggagacttgcatgcacatctgcattaaagctaattttaatgattcgatctttaacaggcaccatgttttcaatcttgtctgaggcatgacctgcaactgctgatcctccaagtccagtagtctagaaaaagataccaaatatgttaaacaatacttttaggtgttgatgatctatttatttgataaaagtttaaaaacaatgtagtatttataatccatttggagccaagtttacatatggtaactgaccattgctgtaactgtgtcaagaatctgactacttttgggatgtcatgagcctgtatttgttaaagtcattcctatttttcagcaatcccttggttacctggcatggtcaaaaatgagtctgggaaaagcaggttcactagataagtcaactattatcactgatagtcgaactcacaatttccagcttagccatttataaaaaacacatttccctttattgctagtatttcattaatagaaataaaatttacccatgaccttgtaattccactgaaaatacttaactcaatttttccatattcctgtctggtccttttccatatcacagcttttataatccaaataagattgtagcttcacttttattaacattctgcttttctaaggtatcacaggtattttcccacgttggttaatggttttgaatcttttctgtacttctctgtatagtagagcttttatataaatcactaatcagagcacctaatccctatggccacagaaataatcatagggcatcaagagtatttatgtctgacatttcttttattcatgacagttatttccttgacatcacttttaaaaaaagcccttacccagcactttgggaagccacggggggcggatcatgaggtcaggagatggagaccatcctggctaacacagtgaacccccgtctctattaaaaatagaaaaaaattagccgggtgtggtgacacgcgcctgtagtcccaggtctactcgggaggctgaggcagaagaattgcttgaacccgggaggcggaggttgcagtgagccgagatcacaccactgcactccagcctgggcaacagagcaagactccatctcaaaagaaaaaaaaaaacgcccttacttccaaggtcatctttcttctgatacttgaggttgccagaattctgatttctggataatttgcctgttactatgctaggaagaaaaaacaaaaaacaaatttgaggctaggggaagactcccagcaagatacagtgttttagcattctctgtttgttacgcaagtcaactaacttcatttgactgccatgcaacattactgaattacattatatccctaaaagatgcatcagagggcaagcctttatccttgtttatccttctgcctgagtgctgtgtttaagatgtaacttcttttactaaaaaatttaagtcacttaaataaaaatacttttaagtgtcctccctcaataaagattccaatatagtctttgaatatgggttcaaatttctaagttcaatgcctaaagtaaaatagacaaaaagactagaaaacagcactaaaaagatgtcctggtctctattctagttgtgctactagctctaagaacctgatagattacaaattacatttggcttcctgatctatgattgcatgtgggcacatttcacacgcaatattatcagttatttcagtttggggcagggtttctcaatcttagaactatggacattttgggctgaataattttttgttgtttgggggtgaggcagtgctttgttggttatttagtagcattcctagcctctacctattagatgccagtagcaccctatacccccacctccatgttgtgacaaccaaaaatgtcttcacacatcgctaaatgttccctgaggggcaaaaatctcctggcggtctgagaaggatctagatttgctgatttggattcagttctgcttatgatttaaccaactggtagttttagaattcatgcttgggcttggtctctgatgaaaagtaattcacattctatactcatcctcaaaatcaactattgcacattcccacataaatgctggcattaggagactatgccagaaaagaaaagtccttttgtcttctgcttcatcatctaaaagaaaggtaaattgatttccacgggcatggtggctcacgcctgtaatcccagcactttgggaggccaaggcaggagggtcacttgagcccaggagttgagaccagcctgagcaacatagggagacctcgtctctacaaatttaaataaataaacgtgcgcgcgcgcgcacacacacacacacacacacacacacacacggaaagagtgaactccagctaagaataccagtcatggtgttaaaaaaacaattcccaaactttcctgcacgctggaatcacctaaaacatacttgacaattactgatgcctggttcccactgtggccttgtgataaaatgggtaatgtgtgtggatttttagaagctgtccaggtgattcccaatgttgctgtacaatgaattttgggagccactatcttaaacacttactgaatcacttgtggcatgatttttaaaccgaaattcctgtccctaccctagacttcctaaccagaatctctggggtaggggatccctggaacgtgtatttaacgttaagctccataggtgatcctaatggccagccaaagctgcaaattattagctaagaacaaaggagaaatctctaaaatacgtgaaacttgtctttgcctgtggttctcaaaacttgccctcaaaatcaactacaggacttaactaaaatatagagtgctggtcccactccccttcttctccccgccccacccccccaccccgtgtttctgactcagtcctggagtcgggccctagaatttgcacttttaacaggttcccgggtgatgctgatgctgccggtcctgggcgccacactcccagaaccgttgcaatgtacttaacagtttccaggttaagtacattacagttatatattaacaggggtggggcgagagagcctcaaaggcctaattcatgcctctttgtacggaggaactgctaatcccagtttaagcccaagaaacacgagtagtccaatttccagagttacccttggcacataaaccacatgtggtttgcagagtgaatgtatgaataatacattttaaaagcgtgtgtgcgcaggagggtaaggcagactgctagatacccggttagaggctgcggacctttttttttttttttggcgaggtgcagttcatagatcaggggtttcactctgcagcatggtataagcacaatcactaagaactggatgctacttgcagttttgtcaccaatttctttggtgactttgggtgttaagtgactgttttgaacctctctcctcttaggtagataatatcggaaacctcttccacctacgacccgcagagcgagggcttgtcccgggatttgtcttgcacccccacctctcgcgtctgcgccaccctgcgggcggcgccggcccctacctggcaatagagccgataaaggggtacggcagcgtaggacgcccccagcatgcccacggcgacagcggccacgtaagtgagggtcgtcttgttctgccgccgccgctcctcctcctgcgcgcgtgtgaaagggttcgagctcttaggccgccgcggcggctgcaatgctggatgccgggctcgaaggctgcagcgcttccatgtcccaagccacctcagtcctctctcggcacctcctgtcccactccactctggcctaagaaacggctctaccctctctgcagccctggttggagacccagggtggatccagcgccagccacagaaaggaacgcacctccatccaggacgccagagccctcccataaccctctgaactaacacccacccgcctctcagggacgagaggtcaaatctcgcgaggcgtgctccgtctcgcgagatctgggttgagcctgccgctgccttggctaccaggctcctcaggtggcagcgcttgcagtcgggctacggaggccgggttgccagattacgggtaagtttgcgttttgctttgtgactgttactcccacttcgcttctcgccagaacgtctcttaacatttaggaaaatgcgtttcgcccgtccgcgtgcaagcttgccatcacttggggttgcgcctgtgatctttatttaaactccaccagcctttgtctcgacccggcagccccggcgacgctctcccgcggtcttttctcctggggtcccttggccgctggctcctgtgctcactgccctggacttagttcaagtatcacctctctcaggaagccttgctgtgttaaccgcagccctcatgggcacccacgacacctgcattttctcagcccgtgggcagtcggcttcccctgctctgatgccccttacaacttgcccagtggaaagcaccacagctggagcaggagggaggctgtcacgctgaagtttgttctggagagagtgaccaggataggagggccatttaaggagagactgaaagaaacgaaccccgtgggaggatgtaatagctttcttcagttgtcccacaggacgaactcgaggggggcagacagcatagcggattttactgtgttagaaggaagcatctttctagaaactataaaatagcagttaagagctcaggttctgaggttagggggttctggatttttacccgggtcctcaccatggccctgtgcccttaggtcagttacttgtcctctaagacctggtgtccttacttgtaaaatggaaatcagaacagtaaatgaataatattcatataacgtctttcatgatgactgaggcatagtaagaatgtagttaaaagttaggctgtatttctacttgctacgtggccatttctaatggccagagcaggtataattatccccactatgtggatgaggaacttggaggcctgagaaattttaactagtcattcgacattttatttatttattgccctctcaactgtgggcctgacac

SEQ ID NO: 7624 - DNA, 6000 bp, Homo sapiens; identical to SEQ ID NO: 2853

SEQ ID NO: 7625 - DNA, 6000 bp, Homo sapiens
taaaaaaaaaaaaagaaagaaagaaagaaagaaagaaaagaaataataataaccaccattcctatctcaacagcttgttctagaaatttttaaagcacagtatcacaaacagcactacataattgtaaaacatgtatgaatatatacatccaaacaacagcaatgtcatagcctatgggtagatataatcttatacaatgtaccaaaatcccaatttacttcactagacaaactgttataccaaattctgtacacagtatatccaagaaaatgtgttgtttttattgagaaactgaacctagcttgggaacacatgtgcacagtctagttcataatatttggtgcaagtatcattctctaatatagatttacatttttgcaagcaaatttttacttgcaatcataacatatccaaattttccctttttactcaatcagaacttagtgtaaagtactacaagttagttcttcggatttcatgctaagaaaataatgcagattttctgcattattatggtcttcacagaaaccttaactatgatgaatttaaaagtgcaaaataatccaggataactttatgatttcagattttttaatgttaaaaataatgccatcattaattagaaaattctaaaatcattacttccactttcttaggcaaaatatcaatatactctcatttgccaaataaattaaaagatctcctacaaacacaatctcctaaattgtggttttatggctttaatgttttatgtgtggcaactattgatgctagttaaatttttagaaactttttctttttgattccctacagttgtctacaagaaccttattgtagcatgatcctgccagactttatgctatttgttgctccaattaaaactgtttaaaacatgaatttgaaaaatcttattttaactataattttgtagctgaaacttttttttctaaactttgcaaacattctatgcaacctgaattagtgctgagaaaaatggatcttaacggttgctcaatgttcttcaacaggtgaaaagcataataaaacatgctcatctgaactccacccattttcaatttcaacatagcaaacctcctgtttattcttagggcaaattcaaaattgtacatattaggattggttattactgaagataatttatgcaatcataagccaaagatgctaagttggcaaaaagaaaacaatgtaagtaagcaaactctaacacatgtggacacaccctctcagtatataaaggcttgtcactgtccttggtagcaggcactccctgggctaaacagcatcaccatgtctgttcgatacagctcaagcaagcactactcttcctcccgcagtggaggaggaggaggaggaggaggatgtggaggaggaggaggagtgtcatccctaagaatttctagcagcaaaggctcccttggtggaggatttagctcaggggggttcagtggtggctcttttagccgtgggagctctggtgggggctgctttgggggctcatcaggtggctatggaggattaggaggttttggtggaggtagctttcgtggaagctatggaagtagcagctttggtgggagttatggaggcatctttggagggggcagtttcggaggtggcagctttggtgggggcagctttggtggaggcggctttggtggaggcggctttggaggaggctttggtggtggatttggaggagatggtggccttctctctggaaatgaaaaagtaaccatgcagaatctgaatgaccgcctggcttcctacttggacaaagttcgggctctggaagaatcaaactatgagctggaaggcaaaatcaaggagtggtatgaaaagcatggcaactcacatcagggggagcctcgtgactacagcaaatactacaaaaccatcgatgaccttaaaaatcaggtaagaggtatttttaaatccagctttaagtatcttgtccatgtaatccagacagatgaatcttaaattaagcacaatgtggctgttcactatgcttacccatgttactttcttccttcaaaaataacccagtctcatcaaagataaacatctgtgaaactatggtcatggcaatcttcatccagcaagtgtgctacttgtcttaagaggatgggagatttactaagcacttttgaggttttaatgagcatacaatgagtccacagttaaaatatgctaggctatttacaaatgtagaaactgaaaaaaaaaatcatgatatgaatcagaacaaaatgttattcagactgataacaagccatattcagtaccaacatggcaagaaaaataaattttccagtatgaaaatgggacactgcttgcctctaaggaatttctgaattgtacctattgtgtaccagttcagagtgtatttatttattagtatttatcatgagttaaacaaatgcaggtgtgagtcagccaaagcatggctgaaatacatggaaatcacatagtctaaaagaggagggcacacttacaggaatacatctatataattccagttagttttcagaaaggaataattcgtgtacagaaatacaagactggagaaattccaagagaacaaataattcaaagttaagtatatgggtaagcctgcaatatttcatatttaaaataaaaaattttcccaagattttgtaagagaacaacataaaagtgcagagtgcatctatgtcactacaaaagccatatctgcatctgacctcttctcaaataactgtgcctctccctccagattctcaacctaacaactgataatgccaacatcctgcttcagatcgacaatgccaggctggcagctgatgacttcaggctgaagtaagttaagtgatcgttgtataatactatcacaacgaatacatcagtggtttttaacaatgacttgggatgccctcaataacatttacatttttctgaattcacccaaagttaaatagtattggagttatctgagaaattttccatgtcagtgttacctttttggcaatattaaaggaagaaaatgcattttaaagtaactgctaaggttttttccattaaaccactattacttctaagagaactgtacatgacaaatattgccattacatgagatcaactatgtagctgctttttaaatagtctctgcccagatacatctcccctatataagttataaccagtattgatatcatgcttgtttcaggtatgagaatgaggtagctctgcgccagagcgtggaggctgacatcaacggcctgcgtagggtgctggatgagctgaccctgaccaaggctgacctggagatgcaaattgagagcctgactgaagagctggcctatctgaagaagaaccacgaggaggtgacacaaaagttatacttttcccagccaaaagagagttcattatggtcctcgtgtagccaataaatctttctgttcctcaaacaggaaatgaaagaccttcgaaatgtgtccactggtgatgtgaatgtggaaatgaatgctgccccgggtgttgatctgactcaacttctgaataacatgagaagccaatatgaacaacttgctgaacaaaaccgcaaagatgctgaagcctggttcaatgaaaaggtaaagtaatcttccttatagtgaaactcatggaggttttatcatttcagaatttcctcacccttttccttgtttttaatactctagagcaaggaactgactacagaaattgataataacattgaacagatatccagctataaatctgagattactgaattgagacgtaatgtacaagctctggagatagaactacagtcccaactggccttggtatgttaactctcatgaaatgacttcaactttatcatacaaagtttcatgctcacctaagaatatgcaatgcaacaaaaaaatgcagagttggaggtaagaaagagaaaacaaagtgaagctcatgttaatggaggaaaagtactactagtgttgatctaaaagtgctgaaactgaaatggtgccattaaacatacaacaaattctgttcattttcttattcttctatataatgccttactaaataatcaaataagcgtcaccatactcaactgaacaaggaagtcactaagccacaaaaaaatccgtttcagaaacaatccctggaagcctccttggcagaaacagaaggtcgctactgtgtgcagctctcacagattcaggcccagatatccgctctggaagaacagttgcaacagattcgagctgaaaccgagtgccagaatactgaataccaacaactcctggatattaagatccgactggagaatgaaattcaaacctaccgcagcctgctagaaggagagggaaggtaaattttaaaatgaaaagttatcccagtttcttttattcaatattccagatagcaaggcttatctaaaccccaagaagatgccagagaatgagaggaagggaggagagagggtagagtacagaaaaaggagtacgcaaccgcaatctcactttctcatgaatttggcccaaaatgattcttaagagttctgtgaacttaacattgttttcaaaggatgggttttaaaatatatacctggcagggttttattttttcaacacgttttgcttattttctaaattaacggcaactggaaagctacccaccgttttccaacgttagagataaccgaatgtgacctcaccccgtttagttccggaggcggcggacgcggcggcggaagtttcggcggcggctacggcggcggaagctccggcggcggaagctccggcggcggccacggcggcggccacggcggcagttccggcggcggctacggaggcggaagctccggcggcggaagctccggcggcggctacgggggcggaagctccagcggcggccacggcggcagttccagcggcggctacggtggtggcagttccggcggcggcggcggcggctacgggggcggcagctccggcggcggcagcagctccggcggcggatacggcggcggcagctccagcggaggccacaagtcctcctcttccgggtccgtgggcgagtcttcatctaagggaccaaggtcagcagaaactagctggggtaatcagaattagttttaacttcctgtgatggtttttttgcgctttaagctctagagttgttttaaaaaattaaaaatcttagagacggttccgtttgcatttgttcacaaactactcttaacaccagccgtgaaaaatggcatgatcaaaatgtcataccttaagcatttttttgggcttaacaatgtaaagttgaaatttccttctttttacaatatttgcttgttaattactaaggatccctacagactgtttaaaattttttttccatcattcacacagatactaacaaaaccagagtaatcaagacaattattgaagaggtggcgcccgacggtagagttctttcatctatggttgaatcagaaaccaagaaacactactattaaactgcatcaagaggaaagagtctcccttcacacagaccattatttacagatgcatggaaaacaaagtctccaagaaaacacttctgtcttgatggtctatggaaatagaccttgaaaataaggtgtctacaaggtgttttgtggtttctgtatttcttcttttcactttaccagaaagtgttctttaatggaaagaaaaacaactttctgttctcatttactaatgaatttcaataaactttcttactgatgcaaactatcccaatttgtcagaatttatctttacttaagtacataatactctttaaaattaaagattagtaacccatagcagttgaaggttgatgtatccagaaattcggaagacagaactattgtcatgccttttctaagttttttaatcatgtatgttcagaccaccgtcagtaaattcactgagtaaagtctgtaaatccccaatattactctttaagatacacaa

SEQ ID NO: 7626 - DNA, 6000 bp, Homo sapiens
ctggcctagctgattttttatagtgaaacatttcaattcccttatttccttttttatttcttttttttttttcagctcttgttgcccaggctggagtgcaatggcgtgatctcggctcactgcaacctctgcctccccggttcaagtgattctcctgtctcagcctcctgagtatctgggattacaagtgcctgccaccacgcctggctaatttttagtatttttagtagagatgggatttcaccacgttggccaggctggtctcgaactcctgacctcaagttatccacccacctgggcctcccaaagtgctgggattacaggtgtgcaccaccacacccggcctcccttatttcctttttcataaattctataactattttctgtgaggttaccacgagtgttacattaaacatcctcttcaaccattatgcagatgaaaactgtcacaagccattgtctaaaaaagatttccactgatacaggacaaaacaccataaaggctcagtctactgggatttgtccgcttttagtaaagtaactaagcctaatctagattttcctaaaataggataaccctgtcctgcattttcccataactttcacttggcagaaaaggctccacccaatatgttctcaacttttaagtcaggagattgagaccatcctggctaacacggtgaaaccccatctctactaaaaatacaaaacattagccaggcgtggtggagggcgcctgtagtcccagctacttgggaggctgaggtaggagaatggcgtgaacccaggaggcagagcttgtggtgagcagatcgcgccactgcactccagcctgggtgacagagcaagactccgtctcaaaaaaaaaaaaaaaaagaaaagaaatacaattctttatacttctaacgtctagtatacttcattctagattcaataccccagaaaaacgttttcacaatatatagcattaggtaaatacttccacttatttgtttctaaaatctgtctgccaacacttagctatcttaaaaaggaaagctctgttctaatgaaggggaacatgtgaatgttccttcaaacgatgactctggaacaagagcatgttaccgccattctttacagagctaaatggttcaggctgcagaattctaaggtgaagaagtcatcctacttgatcctctaccacagaagatgggagtccaggtttccaaggccaactccagtatttaacaagagacaaacataatttgtacgatggaaagttctggcctagcctctgacacagactacaaaatgaaatacacaggaagagacagacctgacaacatgaacacacagcctcttggtaacttaagtttccctatttataagaaaataagactagaacgcttcttggggaagttgaagaactggtgagatacagttaaatccacagaaactcttttctccccccaagacagagtcttgctctgtcacccagagtgggagtgcgatggcgcgacctcggttcactgcaacctttgcctgccgagttcaagcaattctcttgcctcaagcctcccaagtagctgggattataggcgcccgccaccgcgcccagctaattttttttttttttttaagagtctcactctgtcacccaggctggagtgcagtggtgcgatctcggctcactgcaatctccgcctcccgggttctaacttttctgcctcagcctcctgagtggctgggactacaggtgcacgccaccacgcccggttaattttttgtattttttttttttagtagacgtggggtttcaccgtgttgcccaggctggtctcaaactcctgagctcaggcaatccacctgcctcggccttccaaagtgctaggattacaaacgtgagccaccacgccctaatttttgtatttttagtaaagacgtggtttcaccatgtcggccaggctggtctcaactcctgacctcattattcacctgcctcggcctctcaaagtgctgggattacaggtgtgagccaccatgcccagcccagaaacttttcaaaagatctctttcttaaattcaaaataactttttaaatcaatttcaaaagaagagtgttttaattcctcacaatctgagacattcaacgagatccaatgctgtcaatgagagcctagccttatacactagtgggaaaaaaaaaatggccttgtctgaaacacttttcacttgtcaatggttattttaactcagttaaaagtacaaaggtagtttgaaagaaggtttcagtgctaattcctaacctatttctaggcaaagtcaccaatgattaacacttttttttttttttttgagacagtcttgctctgtcgcccaggctggagtgcagtggcgcaatctgggctcactgcaacctccacctcccgggtttgagcgattcccctccctcaacctccagagtagctgggataacaggtgcatgccaccacacccggctaattttttatttttagtagagacagggtttcaccatgttggtcaggccagtcttgaactcctgacctcgtgatccgcccacctcggcctcccaaagtgctgggattacaggcgtgagccactgcatggccacattttatttttcaaaggagtcaaaggtttcttggccgggcatggtagctcaggactgtaatcctagcaattttgggaccccaaggtaggaggatccctcgagctcagagaccagcctgtacaacatagtagagacctcatctctataaaaaaatgtttttaattaaaaagatttaaaggccaggcgcggtggcttatgcctgtaatcccagcattttggtatgccaaggcgggcggatcacgaggtcagaagttcgagatcaacctggccaacacggtgaaaccccatcaccactaaaaataaaaaagacatcagccatgcgtgttggcgagcacctgcaaccccagctactcggctgaggcaggagaatttcttgaacccgagaggcggaggttgcagtaagcagagatcgcaccactgaactccagcctgggcgacagagtgagactccatctcaaaaaaataaaataaggttaaaaaaaaaaaaaaaaaaggagtcgacgtttcctaagtttctcctgggccatatattcattccactcatctccaggttgggaaacatggaggcaccaagagggcccctgactggagagatgatggaaccaccagagaacagccttgcaaataagtgctaggttctcctggagacccatttgtttgtgtgtgtgagacagtctcattctgtcgcccagggtggagtccagtgacgccacctaggctcactatgttgtccaggctggtcttgaactcctgacctcaggtgatccacccacctgggcttcccaaagtgctgggattacaggtgtgagtcaccgcgccgggcctggagacctattctagacaacacctggcaaaactgcagagactgtcacaatgctacagtatgaacattactcttcacccaatactgctaagcttcccccagaaatcccaaatcttccttaatattaaccaaaatgctcctgtccaatggtcagttagtttttttcccatcacatttacttttgggaagaaacttctcacaacttaacgagggactggttttctgatttgtcactgatattttttacgttaaggaggagtgtgtgacaattttttttttttttttgagacgcagtctcgctctatagcccaggctggagtgccatggagggatctcagctcactgtaacctccacctcccgcgttcaagcaattctcctgcctcagcctcccaagtatctgggattacagtgcgccatgacgcccggctaattttttgtatttttagtagagacaagattttgccatgttggccaggatggtctcgaactcctgaccccaggtgatccacccgcctcggcctcccaaagtgctgacatcacaggcgtgagccactgcgccgggccgacaatttcaatttcaggtaaaaagtgaaatcaacatcatttacaacattccttttaaagaggaattgtcaagttgtccttccaagtaaggagcaaagccggcaagttactgtgttttcattttcccaggtcttctggtggggagggagctctgtaacgtccccgtctgcagagctgctctccttagtgactcatgacaaggcacttgctgggaagcgggagagcaggaggagagaatcagagggagattaggataagaggtgtccctggctctgagaggggcaggactggctgggagtccctggaattagaccaggaagtctcctggagccgggaaacgggtggggaaggagggcggtttctcttcgccacagtccattctccctgcttagaaaggctcggcctttccctgcccagggcggggaaccggggtcgtaagtcccctggggagggacacggacgggaagcagccgaggggggtgaaagtccccgagaggggcccagccactacagagaaagccctggcgagagaagagaaaggggccgagtcgcggcgccggcaggcccgcctcccccacaggccgaggccggcaaatctgctgcctcatcccggcgtccccgctcccgcccggccgccgcactcacgatgctctcggccatggcggctgctcctgcctccgggctcgagccccgggccgccgccgcctgccgccccaagggcctcgcagacccggccgcggcctcagccccggccccggcctccctacgccgccgccaccgccgctccagcttcgcccgcccggctccgccagccgccgacgtcccggtgcctcgctcaatacgctcccctcgggcgcgaggccgggaaaccaggttccggccccaccaacggctcgacgcatgcgcagggcggcgccgctgacccgcccccgccatccctgcaactggaggaggggattttggaaagttgcgtctgagattacttctgctcgtcctcggaaacccaagcggcacaggaaagtccaaaaaggaagcaaagacgagcatccgaagtctcacccaaaaataactactgctgcgtattatagcgtattataattggggaaacagcattccaaacttctctccatgcacaggtaagtagagaaacaatttcaggaaggcaggatcacaccttcatgtttttttttttaagtattttttaaatttaacataagaaaaacaaacgagtttaaactgcatttcaggccgggcgcggtggctcatacctgtaatcccagcattttgggaagccaaggtggacggatcacctgaggtcaaaagttcgagaccagcctggccaaaatggtgaaaccccgtctctactcaaaatacaaaattaggccatacgcggtggctcacgcctgtaatcccagcactttgggaggccgaggcaggtggatcacctgaggtcaggagttcaagaccagcctgaccaacgtggtgaaaccccgtctctactaaaaatacaaaaattaactgggcgtggtggcgggcacctgtaatcccagctactcgggagtctgaggccggagaatctcttgaagcgaagaggcggaggttagaatgaactgagttggtgccactgcactccagtctgggcgacagagtgagacttcatctcaaaaaaaaaaaaaaaagacgtcacttcacagattctaaggatttttggagttggataccaggaaaccggaagactaaatgtatacatatttcacaacatcacaattactgtgacagtttttttaaactatgttaaattacattaattgattaaattatgttagtaattgtattagtttgctcagggtgccactgtaactacccaacatattgtccctgcccactgcctagactttatcaagacaggggaattgcaataaagagtttaattcacacagagccagcttgtacaggttactgaggttttattactactcaaaaaaaattagtgtcctt

SEQ ID NO: 7627 - DNA, 6000 bp, Homo sapiens
ggggcaaagaactccttcactctcaggttccagaaccttctccataacttcccccactagtacccagcacagagctggcacaaaacaggtgcgggggccacccctggcatcaagtctgctatattaaggccctggcagagctgtgggcatgctggaggcagctttctccatcaggttgggggaggggcacggctgaggcgccaggacccttctctttgggtggagagctttcctgatggcagcacggggactgggtggctctagtgagttctctagagttggtgtgggtggcagggctttggcatgtggcacaagctgctgccctctgggcccagagtctcctcttcccttccacgtctacacgggctcttctgtccctggcaagagtacatgttccgtgatgtttgcttacattctgtacccactgaattccagaatgcatgagattgaacaaatgttggttggtgatgcctttgataaaccttgaagaaaggtttactacccctttcctatgtcctcaggcttggctgggtgtcaccaaagatacaaagaatgaggtgagtgtctcagaaggcagggagatgactgactgtggtgaccagtctagcacacagtggaaggagagaaaaaagagaaagagatagagatagtgacacagagagactgagaaacagattgggagagagacatagacaaagactgaaagagaaagaggaaaagggaggaaagaaaaggagagaagagaggaatggagaagagaggaagggaagggaggaggagggaaggggaggggaggagaggaaggagagaaggagggaaggtgaggggaggagaggagggagaggaggaggggaggggagaggagggagaggaggaggggaggggagaggagggagaggaggaggggaggggagaggagggagaggaggaggggaggggagaggagggagaggaggagggaaggggagaggagggagaggaggaggggaggggagaggaggcagaggaggagggtaggggagaggagggagaggaggaggggagggaaggtgagggaaggggagggaaagaagaagagaggggaggaggggagaagagaggagaggaggagaaaaagggagaagggaaaagaagggaagggaagagaaaagaagggaaaaggtgtgttacgcaatttatgtatccgttgtgcatcctcacttctaatgccttcatgctgccgccagcccaacctcagagctgggctccactgggtagtcaagtacttggtctatttttaatggcaacccagaagctgtttgggaaaaggcaggatgatctggtgagaagagctttgtagtgagacaaaggctccaatctggcccggctgcctcctacctgggcgcctctgggcaagtccctgaacctctctgcacctccctggctcatctgcagatgggggtgaagacagcgtcctcccagggctgtcatgggcaggccacgcggtaatgtgcacaaggctctgcacacttgagtattttggacactttccagcagaggggcaggcagaagggagagactttgatttgaggggtagaaagaggctaagacaaggtcagccctgtgaagctgggagcaacagtcttttgcacgtagccctgccagaatgcatggataccttaagcacacagagggctgggcttcctggcccggcaacatcatttataagacacgaacatgcaactgaatctgttgtttgccagttgccagcaaacccttcagagttctgcctttatcctcggagtcttattagctgcctgctgcagtgtttctttagtttcagcccagaggtttgattttttcattttcttctgttcattttgctttggaggtaatgctttggaatacttttctagagaacaggtggaaacaatgcatcttatacatgaaagccaacacggaggtaaccctccctccgtgtccccagaaagtggcctagggttaaggtgctgtccaggcctcagctctggctacttgctggcaggtggaggcatcgtaggaggtgaggtgtcaggtggttgagagctgttggtctagggatgtgctttttatgagaaaagctgtcagttcccacccaggttgagggactgtcacaatgattctagccaaggaatcttgaacccactctcccagccctgggtcccacaaggatgttctggccctcagaaccactgagcattggggaataacacaggcagcccagttctttcggtgaggtcccccagatggctccctctgctagtggagccagctgcccagatcagcttggggctctcttgatgaacaccgaagtgcaaatggctcgaggcagctggcaagatgctaagtgcagcattaatcctaattagcatgaggaattaataaaggaagccaggtttgctggcggggaggagttagtttcagaatttccactgggaaactggaaggccctgggtccacacatgccttcgggtcgtgccagtagcatgacttatgacttactgtgccaggcagttggcacctgatggaacttgcttgtgaggtggaatatggggcattgcagcccctgctctgtatccagctcaggtgctgtggcaggtagtgacgtgggtacattctccagaggagaggagtaggtgttcgtgatctgagcaattgcacactaaaaatgatgtttttcaaaagaaaagaggagggtgtgatcatgagcccactggctcttttgtgtggctgtgtttctcgaactactgattgcacatttctgttacctgcagactccactcagccctgccattaggctccaaattgcaaagggcaaagcagcctcttttgggagtgggggtgggagacagaggtgggcaggatccccgatgagatgagaacaagcatggtctggaggggaaaagggggccaagttgacttcactaagcagatccagcttcacaaagcctcttttcagatgacttcaaatgcggccagaaaagggctatggttttaagagctccttgccaacctccaccaagaaacaaccgcggctgaactctgtgcaggggttggaactgcagtaaggaaggctaggtgtgtgggagaacttcccgaacaaccgaggggcggagttaacacgcggggaaaggttaccgaaaaagaaggaattctgtccaagggtttttgaaaaatcaaaggaaagcccccaccaactccctccacccggtccccgatctgagcgccacgcttaagcagcaaacctgtgcccaaccttgctgggaccaggtggcccctccccagccacctgttagttcaagttccgcagccgggcagaagggcgcccggaaggcgccgaagccgagcgcattttggcgttggaggcatccaggcccctccccagtagggagctgtccccacggtcccggggctgaaatcctggtcccctagcattccagcctcatgacacctactactcagcctccagtcgcatttgggggtcgcagcgcccagctccgacgagatgaccacgcccctcccagtctgttcccggtccgcagatcggtcctgcacaccctagtttcctactgaggtctccgcagcctccctgctgaggggccgcgaccgaggtcgctgtctccgttgggggagactcggtgtcgctccccttaccaccccaccgcacagcgaggagcgggccggtgactccgtgggagacgaggcgggcgtcgggctgggcctacccagctaccctagatccgctaggaactcagcccctaccccggctccgaccgcgcccccgcccctacttctgcccctacttctgcccccacccctcagcccgagcctgtagaaagcgcccagcggcaccgacgcgccccgcccccggccggccccgccccaggatggccagttcccatagcaatagcacagacaccggttgccaagcaacccctccccccctcccgtccgctccccccaaccccagcctcctcccgccccctcgccagcctccacctcccccgggggtgccggcgcggcccctggggatcgctcgggtcccgggctacgcgcgcgtgcttgagtttcggtgtgtttcattgtgtctgtgggcgagggggtgtgcgcgtggagagtttgtgggatcggtgtgctggggaggtccccagccgagagggaccagagctgatgtacagctggccgcgaagggacccgcccgccagctccggctcctttgtgtctcgcgcggagccagcgccgcgcccaccctctccccggcccgcgcgccgggcagtgtgtgcgcgtgtgtgtgtgtgcgcgcgcgcgcgcgcgcgtgtgtatatgtgtgtgtgtgtgtgtgtgtgtgtggggcggcgaggggtcggggctggccgtaccttcgatgcagcacacccgccacagaccagagtgggtgaggtcgccgcgggcgcggcggggcgggggcccgtcgtccatggtcaggttggtgccgttgcagatgtgcgcgctggagtacagccagtagtcggtgccgatggcgatggccatgagcgagaaggcggcgaaggctccggccgtggtcagcagcatctgcagcccgcggtcgcatcgcaccatggtgggcgcctcatagtccgccgcccgccggcccggcccgccgcgcccgcccgccctcctccctccgcgcgccgctccgggggcgccggggttggggggccgagggccggggggcggcgccgcgctgcgcgctccgaccccgcgccccgggcgtgcctgcgctccggcagcgctggggctcaaactccgaggcgcggcgacgagtgcgggctgcgcggccgccgggcgggctggcggcggcggccgggggctcctccctctccgctcgccctcccccctcggcccgcgcctccgccctgcgccctccgcgcctcccccgccgccgccgcgctccgggtccgcgccccgtttctctcggcgccgcccctcgagcctcggcccccgcccggctgtgcgctcctctgagctcccctctctccccagccaggattttctccccctcgcctcccttcccctcgcctcccctcccctcccttcccctcccctccccgcgcccgcgcgcgctctctctctctcccagagttcattcacattattggagtgaaggaagccgagggaagtgttccccaggaggaccgaagggaaagcgcgtctccagccacctctcttacccgcccaggacatccagcctcccctccgacggccctgcggattctttaatttgtggaggagggcgtgggtgggtgtgtccctcctttcccctctgtgcctgttcacctggtgatgaaggtgagtgtgggagtgcgtgttcaggtcagaattcctgaaaccccagatgtgggacacagctgccagaccctgcaagccacgccaggcccgggccaggccccaccccaacccaggtggttcctgctcctccagatccccttgcagggcctggaaggaccctgacttggggttgagggagaagggcgatgacagcgagaagtcctttggggagaacacagggtctctgctttctagagtggtggcaaggctgagattgaagatggggcgttcctctgtgctcacatttctgagggtctattactgctagagtccagggacactccagttgtgttagattccaacactccacccgccagccttttccctttctctcccaacctttcgcaatgcctttatttcgttttgccttttgctctgctcgagcttaaccggctttccctcccctggcctttattgtcagcctctgaccccaacccctgctggcttcacttaattgcctttgctgctggccgtgatcccaacctggacacactcccttctccagggagccggtccggactcctccttccagacccagctccaaacccctccctccaggaggttctcagagcccagcatcaggaggtgcagcaccctttgacatgtccaggtggt

SEQ ID NO: 7628 - DNA, 6000 bp, Homo sapiens
gggaagggttgccctggagttctgtgaacagaacccaggacccctgccactcccccatgttctcaaactttctcaccttgtctttggggcacaagacagccactcatcatgcttctcaaaggtgatcaggtaggatgcaatctcctgtaggagaggaggcactcagctgggcatctccttcacagagagtctcagcctggcctcttggtcatcctgtcagtgtctcactctctgctgagttctggcagctagtggaggatgcttctaggtatctggacccagcaagacccactgccctcctaagaacccttcttttgtcctaagacaaaagtctaacatttttttgtgaattattttactctccaaaaatctcattcctgtgcccctttttttttcttttgagatggagtttcactcttgttgcccaggctggagtgcaatggcgcgatctcagctcactgcaacctctgcctcccgggttcaagcaattctcctgcctcagcctcccgggtagctgggattacaggcatgcgccaccatgcccgggtaattttgtattttttttagtagagacaggatttcaccatgttggtaaggctggtctcgaactcctgacctcaggtgatccacccgccttggcctcccaaagtgctgggattacaggcgtgagccaccgtgcccagacttttttttttttcttttgaggcagaatcttactctgtcacccaggctggagtgcaatggcatgatctcagctcactgcaacctccgccccccaggatcaagcaattctcttacctcagcctccagagtagctgcgattacaggcacttgccaccgtgcccagctaatttttgtatttttagtagaaacggggtttcaccatgttggccatgctggtcttgaactcctgacctctggtgatccgcctacctcagcctctcaaagtgctgggattacaggcatgagccaccactcctggcctctgtgccccttcctgactcaaaaaatttcagtggtttgacactgccaggaatttcagattatttatttatttatttatttttttgagacagagtctcgctctgtcacccaggctggagtgcagtggcgccatctcggctcactgcaagctcttcctcctgggttcatgccattctcctgcctcagcctcctgagtagctgggactacaggcgcccacgaccacgcccggctaattttttgtatttttagtagagacggggtttcactgtgttagctaggatggtcttgatctcccgacctcgtgatccacccgcctcagcctcccaaagtgctgggattacaggcgtgagccactgtgcctggcaggagtttcagattctttagcctgactccaaggttcttcccaacaagggatcaaactttcactgttcccactatttacccatattgctcctacaattcctgccagatggatccattgattccttcctgaacatgctttgaatagttacctcctgcatgttagtgccctacaaggcaggtaccatgtgcacacctctccatatctggaaatcatagccattctataaaccaaaccccttttcagatgctccatgaagccctgctgaccacactggaccttcctaaacgctctatagcacttacaacaatcacacatacacacatacacgcatcgttttactgacagtcctcttctgacatcaaattgataaatatcaacaaccaactacatacaaggcagtaagtatgcagaatacagaaaatgtgtaacacaaggactgtgcctcctccagaaagagccagtatcagtggtggttaataacaaaggttccagccgggcgtggtggctcatgcctgtaatcctagcactgtaggaggccgagatgggcggatcactaggtctagagttcgagaccagcctggccaacatagtgaaaccccatctctactaaaaatacaaaaattagccaggtgtggtggcgtgcctgtagtcccagctactccggaggctgaggcaggagaatggcgtaaacctgggaggcagagcttgcagtgagccgagatcgcgccactgcactccagcctgggcgacagagcgagactccatctcaaaaaaaaaacaaacaaaaattagccgggcgtggaggcacatgcctgtaatcccagctacttgggaggctgaggcaggggaatcacttgaatccaggaggcgggggttgcagtgagccaagatcgcgccattgtactccagcctgggcaacaagagcgagactccgtctcaaaaaaaaaggccctggagtaagttagataaactatgaggtaaatcagtttcctcatcaataacataggagcaataacagggcttgctctatagaaccgttagaggattaaatgagacaaggcaggccaaatgtttagcacggtgcccagtatgtaaggaatactttactggcagtagcttttgtttttacccaggtggctatgccacagaaaagagggctccttcaagatccatgtctttttgtttttgtttttgagacggagtctcactctgtcacccaggctggagtgcagtggcgtgatctcagctcactgcagcctccgcctccctggctcaagtaattctcccgcctcagcctctcgagtagctgggattacaggcgtacatcaccacgcctggctgctttttgtatttttagtagagacggggttccaccatgtttgccaggctggtcttgaactcctgacctcagatgatccacccgcctcagcctcccaaagtgctgggattacaggcatgagccaccatgcccggccaagatccatgtttttatacctctcctaggatccccaaagagcttagaatggtgctctgcacttaggagtgttgacagacacggaaagaccccccactcaccctcctccagcctactaggtcttgctgggccccaacccccagcctccctagaaaacctcatttgtattccaccgtagcctctctggaggcagcagcgggcagcgaggaagacactccagcagcttcttggggagaaagatcttcaggtggtggctgttttctaaagggaattagaagggagggtttagtgtgctaccctggggcatccctgtgatagtccaaggggaaagggctgaaggcaatacagagcactggggaaaactgaaacctcactaaggagaacagaaaatccaagaattagagggccactaaagcgtggggagaacgaaaggctgtggccacattgggaacctggtttgtgaacttaccagcaacctcggtggtgtccttggtattcatggtgagggctccagggggcaaggtcacccccggcctgaggggccggggggagggggagtctgtgctgggaagggagagaacaaggtcatggcagaagcccccacattaatccaggatgagaagtatgaggtagggagtgggtatagaactgggtcatagtatctgggaaggatgaggaaagggagggaggggctgactgtgatgtgacagtagaagagagaacaacacacagtgcccggagccaatatgagtgagcagactggacaggaagagtgagcaggaagaaatgggttggggtgggggagcggggagaagactggcagggcttgggcctcagaggccctaaaccttgagcttttgcacagactggggctatggttgggtcaggtcctgggggttgggactcaggccatccggtccttggaggatggtttggcaagagagcctggatcctgggggcagggcaggagattctacctccggtagaagctaggcctttagaagacacgccctgagttccttctctgtttgatttttccaaggggaagggcagatctgataactgaacctaacctattctctcctccaggttggttaggacctgatagaatctgggccagacacccagattcccaccctcaggacaacccaccctccggctgacagccctctctacgtagctccctctccccaaacgcctctgcctcccctggcctccaggcctagcctaccccatctaccgctctggctccagcctgagccccccgccctcctcggggaacagatgggagctggcggaggctctcagcacgggctccgccaggtgtccaggatggagatgggaggaggcccgtcgggctcggctatgtgcagtgaagctggggttggggtaaggactccgccccagggcgcaggtgcgcagtcctggctaggcagcctgccagggtgcggagcgggagcgggtccttgggctgcacttgggcggcgccggatcggacgcttggcactctgggcggccccccggcggagtggtggtcccaggagaacctccgaggtgggagggtcccgcccgcatagagggatgttctggagaagccgggagcagagtccgcgggcacgcggtgggcgagggacagtgcaggtgccgggtgcgggggtctccgggacagtccccggcacgcgctggtccgccgtggggccctgcggtgagcggcgccccctggcgcgggggaggaggacggaagcgggaggtgagggcgaaccgggaagagggacggtggtccctggcgcggcgctccgcgtcgggacctggaggagctgcgccctctggcgcgggggcggagaggcgggcgagaggccctggctcttacctcccggggtcccgcgggtgacggcggcagcggccattctaccccacaccgaccccccccagcgccggctgacagcggcgtctaacgtcactgcgcacggggcggggcctcccaattaaggggatgagggtcaggaagggaacctggggtcagcacacgtggagttctgggtggggcgctgggcagagggactcggcttctagggctctgagccaggccgagggacagactgctgggaagtccccaaaagggcagcagcactgaggggcaggattccagggtcctggaggcggaagctcggccgactgactcccagttcgagagaacggggcgggggcagcccaccagtgctggaacccgaggggccgggcgaggaacgctggactgggagcaggacccttctcgcctcggacaagactccttgtctggggacccagcccgacttcattgtagctgggtcctcgagaaagcgaaaggagccctccttccccattggcctctccatcgctgcatcccaagaagaaagacaactcgggctccacttgcttgctttttaataacagagcagagagaatacaaggccaggagcggggcctggaggaaaacaggacttggggtgctcctgtgagagcggtgggttgagatgggagcccacgggggctgttaatgcctagttcagaggatgggaaaggcagttggagagacgaaggaaggggaaacgccttcatgtcagcaatgagggtgactctagtgacggaactagtcttgggtccctggggcaccactagcctctcggcatcggtggtttctccttactcttcagacgctgccaactccatcccccagggattgtgaagggggttccttctggctgtgacagtgctgaacgaggccagagagtgcagctgcctggaggcacaagcctcctcctgatccagggggctccagggagaccaaagcagctgtcaagatgagagaaattgaaaaagaaaatggaaaagtaggtcttctttccagatttcctagtacccaagcttaggtacctcgaagtctctggttctcacctacgttatttttgtttctctcaaatccagctctccagcctggctctcagcttctgcatctccatgcaagaccagagacccacatcactccctcactccacccagttccactccaacaatacctgggccctgccaggagtgagaaaacggtcctcttcctgtggataggttgctctctcctcttccagatcagggtattcattggtgctggggaatccacagccctcttcgccaagcaccact

SEQ ID NO: 7629 - DNA, 6000 bp, Homo sapiens
gcaaggttgaaatcggaagacagactattttgtttaaatgatataactgagcagaccggataggctgacgaaatgctagaggaagaaagtcagattcccacctacaaatagaatagtgaagtggattttggagtaggcttgactgagtgtgtatcctgaaaatagagggaactagtggacaaaacctcctacgatggtgaatactgcccctattgcttataataatctgaaatggatcccagtttctggatactgtttgggcttgcttcatcacttctcacactttaagcaaccactatgcagaaatgcctgctaagtctctattagtacaggtaattctggcttgaagactctgaagatgcaggtttgctctgggggatagagagcaattctgttgcctagcaataagagccctgaaattctcctgagatggggctgtcatgtgtaatgacaggctaggaagtaagcaccgttgtgccaaaggaccaggtctttagcggattgagataaggcaggaactcatttcatgtgagtccagtgctgtgttctctcagacagagacaactgtgtaaggacagatcataaatgccagtccgcttactttcacttccagcgctgttatttggtataggttcctatggagaaggcactcacctttacttaatatgtgcaaatagtagttctcagttttctcctattgcctcagtcttccctagctaagaactatctatgtacttcaactttccatcttcactcctaagaaactatttcccttgactaactaacaaaaagctaagagaaagtctaaggtgttttctttaccaaatgtgtaataacaaaactaataagagttagaactgaaaaataaagcccatcttcaacttttcatacaaccaaatccttctgctatattaaaggggggcaatgaataactcatgaaaagagtcagaaatttgttgatgcctgataatgaagactccactttttccttctcctctaaatccattaagattaaacagttaatagaaccgatatcagccaagccagccgcaaacaaataaagcaatccatttatgttgtttttgtgcattcccttaagaagaggcaaggtgcattgcctttgaaaatgccttgttactgtcttttgacttcttctttatccaagttattatgcaagaatgtgccccaacacatttttcctgagattagtcatctttgaaaattgcaatgtgtgttacattttggcagcttttgacacctaaatgatgctcagtttgaaagtgcctttgaattactttataaaaagaagttactgtgctttcctaaccttccacctgcttcaatgttttgtctgcttccctgtgaagtttgcacttggaccaaagaaacaagaatcctgcccctcgaagttctagatcctgtacatggacagcattttttaagcaattatttcatcttagttttctcacattactaaacagacagagacagcaacaacaccaaacgcaggtatacgtttcaaaaaaaggagaagaacttcattcaatgaatgctttgtatttttgagttctgattgacttcagaactttgtattataagctgacaccaagaaattcccttttcatgattcaaaacaatccttccatgtgagttaccattaggggccatgagtagacagtctcaaatttcttctgacttatttctgtactccttccagattaaaacataacaaccatatgaaatctaaagactgaattatgactttccaaaaatcttgaccccaggacatttgtttgaattccacaaatcacacaataccagcttcctatgaatagctttccacatttagaatcttgaaagtagcctgtattgagagactattattgtcttatttccattgctaataacagaatttgttccacatgtggagcatcatttagaaattttaccatttcttcctggaaagagaaaaagaggagttttgggctttttttttttttttttttttttttggcaaaaagaaaacttttgccactttaaatagatatgcccccaaacagatttatgtgtgtatgcaggtgcacacacatatatgtatgcagactttttgtggagctgattacatagctaaagtctagaacctgtcaaggtttgatggggtaacggtcttaatatttcatggtaaaaattgcttttactgttaacctgcccacatgcctgagcgactttaagcaagcagaaaacttccttgcccggtcctctcactagcaattaccaattcgtgagcagctgagaaaagctatcattaaaaaaacagggcttacatgcaactttatttcaagcatatattcaaaataatgtttgagatgcaatcaatgaggagtagatgagaacactaagtgatacaaatccagagaattgaaatttgatttgatgaacaatgtgtaaatctcccttccagccaaaatatttaagggtctagatgtaaatttcatggacacaaataatcatttttatccaggccataacccatgatgtagaaagtatttttgggaaattgagaggttacatgtggtgctgttcatgttaagactatttataggctgagccaaaattaagcataagcaatggaaaaaaatagttcagcgttttaaacttaggtagatgttaaaggagaaagagctatggataaatgtaaggtcaaggagatcacatggtacaaatgggggatctaaattgctttgactatataggtaatacttccaatatggcttataaataactaaaaaaaaaaatcaaatgagagtaaatgtgtcctgtaatatggtcatggtgtgcaataaataagaaagtttctaaggataggaaataaagatagcaaaagaaaacgtactgggctgagagagaggtctgctaatgagtgtttagagcagctattccccagctgacgccatatagaacagcctgagtgtgctctgggcacatgttgctatgtgagcacaactgctaggaaagcagcctcttagaagctcaataaacatgagggaggaggagggggaagtggggaggggagggggatacccatctatctacgtgtgagccccctgtctaacatttatactcaacgacacttggcttgtagcactgctcagcatttgcatacgctgaaaaacagacatgtttggtaaataaaaatatacacttaaaaaaatctgaaacacttaatctgtgcaggtagctgttttcaatctttcaggctacgcaaaagtcatacaaggacgctacagctaaccagagattctacaactcaggaatccaaaggatgtagaaagactgtgttcttttattttttttaaaagcaaaattcacatgagtttagatcaaatatttcttatggagaccaagaacattaaaaaataaagtgtcattaaaatatgagagaggaggaagctaagtaaaatggccttgaccttatcctcaccctttccaccatgcttcaattaacatctcttaccccttctgagcaccaggatttttccagataatggcaaatagaaatgaaacatttggaagtgagcaggaaaacgctaacaagtgtacagataatgtacagcagacacacaacattggttggcgagaggaaatctggcagcctattgattattaatgtgaaaagaaaacaaatgataaaacgcaatatggtttctttgcatatccgaggttttcaaataacaccttatttcctaacaggtaaaatctgaatttatgaaaatcgtcggaattcacagccttttatcctagtgatcatcctatgatatccttacccagacacagacattaaactgcccattccctatccctattttttttccaattgtcatgatgaatccacgctatgatgcaatctttttgcagaatcaagtcgttttgactattttgctttcctaaaaccacactgtcttcaagccaggtattaataccattattactgaaaataacaaattggttaggggagagtgatatgtaatgtgaaagttttgcgatcctcaggctcaaatccaactcgggctcccgctcttctttcaggaaggcaactttgagacactcactctgtttgaaactcacagctatacttgaagcaatgacgaaaaaaaaaaaaagccaaggatcaagaatagtgctgagtcccaagctttgccaaggtttaagaccagggctcaagacgcacccccaaacccgcaaccacgttttctttctttttttccccacttagagtgagaaccgaacacagacgctctcgcccttgcctccaaacccagtatctcgctacagctggtgcattggaagttatgagcacaaacagatgctgcagagaaatctgtttctattgctcaactgttccaagcatgtctcagtatttttagctctggggatgttctggtgcgcacacaaactatataggcatgatctgggactccggagtgtgggtgagcgctacagcagtgtgacagctgggcacctctggagcagcggggcagggtagggtaggggacggcggccagagtccattccccaggacacaccggcagcgagcgaaaaggaagaaaacacagcagcccttacctgttgctggcgcaggagcatggggacatggagtggaagtggggggtacagaggcatgtaagatccagtggtttgtaaaaagcgagtgagccaaagcaaaccagaattcccaagacccagcccgccggcgccgggaaggctgcgcgctggccagggctccagtgcgctctgcaatatcctgggctcttttgaggcggtccgtgcgacaccggctctcctggccccgcccccggccgctgccggccaatcgcagcgcgcctggccgcgcggccggccccgggaaccgcggcggggaggggaggatgctgcgaggcgttgccagcggagggaacctgccgccgcctcgtccccctccaccctcggagcccggccggggagtcgggcccgggccggggaggaggaagttgcggcccagctgggacagcagcaggtgggaagctccgcgcccggctgttgcggctgcctgattgcagcctggccttgggcaaagcttcctactccgtctggagccccacacacttcccggttcccccgctcttgggccgcttgccctgcgtgctcctcgaggggcctgcgaggtgccagcgccgggtagagacctttgccgcaggggcaggattgttcgtcggtcccggcgcgtctccctctccactccctctctgccggagcccctcggcccttcgaagccccccgcggaggctgcagcgcccggagaagccactgagtcaatggggcgagggactggggcgggcgcgcagagcccccaggattgagacgcgcgcaagtgcggccactgcagcgccgcttggctgtttgttctcccgactgttcgcgaattacttacaaggcgcctaggcttctccgaagggtggacggctcgttccctctcgccttgtccgccctcagtctctccaccaccgcccggcacgctttgctgatctaaaatcagaacaattagagagtaatgattttttttggaatagcaactcctacagacactcagatctgccctcgcttcagcgcctcccagccctccttcccagcagccaggcgagagcgcgcagacccctaaaaagcaacttcagtgttaaccgggtctggatcctggaactttataaactaatccgtgtgtgtgtgtgtgtgtgtgtgtgtaaaccgaagagtaagtgcctattatttctgagtacttcggtgtcctaacgaagctttgctcctaaaggacaggatatattttaggagtctttctttccactgagttttttaaatgtttattttctcgagcgatcaaatgtgtcttttgtgcagtttatttaaacctcgtaaggcctccttgagtcgctgaactaattcagcaaactagctggtattgtggacggc

SEQ ID NO: 7630 - DNA, 6000 bp, Homo sapiens
ccctcacttcctgggaggggaaaggcagaatcccaacagctaaggagttacagaagaggttcccagaccagcgtaagaagcaagagctctcaggctaaaggggcccctcctggcccagtaccgcccccacctcccagcttcaccccaagcctgtaggcctatctcactagcaggaaggaagctccaatggaggaaagatggggccagggaggcccaaagcctgagtccagtgtaagacccaggaatattccaacttcctctgttcatccctacaccaggagccacggcagggttaataagcatggctgggccctggggtcctccaggccttgccctgcctgctggtgtcttcctgtagcccaggcactcacagcacgatgggtgtgatggtcaagaacttccgagaggccgtgaactggaccccataatccatctgctcccagtgggttagcagcctcgccttgccctggtccggggtctcaaagggtgtccccttcaccgtgtgcaggaagatatacatgccctggaggaagaagtctttgttagaggatacaaaagggaaaggcccccctgcccagctcctccacccagtcacagacacaagtaactcccagtgatctggagcctccctctgctgggcagggggatatgggctggaggtcaggatggagcagctgggagtatggcaggagaagaacaaggggactccctgggggacgggctaggcctggcatgagaatgcacggtggaagttggccacaagataggcaccgagatgctgcccccctccaggccactcatagccccctgtgcctgttgggaggaggcaagcgatgggactaagccctgcttacccgacaaagagtgcaaggtagcaagtggtgagggagcagagaagggcaaaagtggaagacggttcgagaagctaacttgagaaaggggcatttctgtatcagcctaggcaccaggactctcgggtcctgggaactctctggagccctttgttcagctctcaggagcacatcttccaggccaacagccaccccaccctagagatgtggaaaaatctgcagatttgattcctgtcatggtacacagggcaggaacccagaagggggagcaaggcagagaggtaagggctaggcctgggctctggaggcagatgtcgtcagtacatcaccctgacacctgggccaggcccgacaggctcctcctatccctcagccctgccaaagggcagcccacagggcaggggcaggggcaggggcaggcagcagacaggctctcaccatgttgtgaatgaggttggtgagggtccagacgacagggacactcacaaacgggatgctcagcagcacgatgtggaggagaccgatggccagcacgtaggagagccagatgccacggctgttcatcacccgcgtgttggggttcacctcgctgtgcgctgtgcccacattcatcctgctgcccctctctgctgttctgcaaacaagcagcacaggtcagacaggtcacactgctttccctgccccctctcaccctcggatcccgctgggaggcaggcccttgtttccctgagaactccaggcagttccactcttttgattctgaagcatggaaagtggagaaagtccatgtggacttagctctactcatttcctgctgctgggctgggataaacaacaggctgccccatgcatcatcccattgggacagggccctggcagggcatcggaggacaggtcatcaagaggcacgcagccccagggcagagaagtcaaggcccatcccccagcctcaccccctatggcactcccatgaggaccctctgccgacaaagccccagggagagaattctcactcagcacaacccctgctggactgtgtctcactgaaggcctaatgtgggacatctgctcttaagctcttcccatcaggagggaaaggaagtgaggcctgtgggtacaggcagcagtggatgaactattttgaggtcactgcatccactcacctcctctgattttttcaattctggatctccccaaaccccaacttaggaggactgatcaggtagaaagagggaagtggggagggaggaagggaggaagaaaggagaaaacaacagactagggacaacctttgcccagacctagaaggcacccctcctgggtgacacaaaacaacccatccggatgttttctccatttggcagccactcaggccaacccttgtgatgctacccactccactgccaaaccaccagggcccttttccccacaagagaggcgaggatagagaacgtggccaacacctgtaactcccatagagagctggaatccacctcaacatatgtctcctaagggcacagactcgaacctgtggcctccctcctgcccccgttcttctctgtcctgcccatcctcacctcagtctcccctctcagcacctgtttccaggtgtatattagcaccatgccttcccctgcccagcaccaacggtaggagtcctgcagcaggaggaaccaggaggtggccgcaacccacagtgagcagagggaagtagagaaggaaggggtggaatgatctgccccttatccagagtttggctgtccccagatccctgagggccctgtgaccaggagaaagtggagacagatggcacctgtgtactggctcacctccctatctgagatagggtcctgcttgctaaagaccgtaaggtcatcaccatggtaacagccccatctttcctgggaatgcagaaaagagtcccagatggagatattctagaagtacccagaaggccacctccctcacgcccctgcagcaaccccgtcagacccagatgctatctatctctgactaggatcctagccaaacctgcacaggagactgagtcctcaggggccagttatttacttccaggataacaggagcaagtttcctcttctcagacagctccaagcttagagacctcagagaaaatgtgacccacaacacgccatcccaacaagcaaacacccgtgcgccagcctggggcgcattctgattgaagagatgctcctgggacccatcagcgcagcccactaggctggataattgagcctaacagaaattcaagtatctagaaagccagagctggctcagattgtttatcttcccagggccttggggcttcagttactctagcagcccctgggacagctgctacgcaaaagcctccacctgagaggggagggcggcatgtggctgacaagtgagggctctgaaggacttaactctgactaaggagagggaaagagcttcccaagtctgacctgaaactgccaccccatcacctctctgtaacccgcacctacaggggtgctggtatagaaagtccactaacccttcctagtatttgtccaggagtgccaaaagccttggggaatcccagatcacaggaccccatacgcctttctggctttcacagggcagccaacaaaacttgatgagcctaggaaaagcctagacctaggtcctagccaacaccctcagaagcttcttcctgaagcctaaacactaggtgccctgagagcaggaaaccaccagagacccctgaaaaagaagagatcaataaactaacaaaaagactggcaatgaggaaacactcttgagactttcgtgtgactatggatacatatcacttccattagtaaaacaaccaactggcccctaccctagatggggagaaacagagagaagaggctggcagaggtcgactaggtctacaggagttgagccgaaaacttctgctgccatagctggcaggtggctgcttagtgctgggccctgatgtggtttcataacctgcctcaaaccagagcctgcagcaactctgttgtgttaaccacttttttgctggtagctctttccccctccttcccgccccaccctcttggctccacatacaaatatccgggcccagccagtatgccagacactcaagccaaggctgagcaccaccagggcagccaccaggtgagcccttcccattccctcccccaggaaagagcagccctcacaacagcaaacctcctgtcttctggaagaggagcacaaaacatccaggcctggatggggaccccaacggggagtccggggcagcacgtcacaatgccatgtccattccgcccaccccccaagctgcaggaccacagctgataacctctcaactttggcccagccaccccgactgggggagggcggtaggagcggaaagcgagtgcccaggcgaacccgcactaagcacaggagaggaggagcgaagaggcggagtcctcactgttgttggggttttctgagtgagacctcgggtgcggggccggggggaggggtcccgctctgttccccagcctgggtcttcgcactcggaacccggtccggtccgggaccccacagccatctccacgcgttcacccagccctggaggcagccaaacgtttatccccgaagccgagccgctccccgcctcccacccctagccgaggcgctcctcccgacgttccacccccggcctcccgctcgcactttattccttggccacctccccagccgatgcaccccctcggctgatgcactccctccaccccccactccctctgcccccgtctctccagcccggggcgcctccccagcagcccccaccttctctcccgcccctcccgtagccctggggcctcttggttccttccgggctcaccgtgtggggccgaagatcaacggcccgggaacggttcccgggagcgggggccgctgctgctccagcagctgtaacaacccgcggctgcagcctccccgctggcagctccggccgaatcagcgctccgcgccggtccccgtacgtcaccgccccgcgccggcacgcccgacgccttctgggagttgtagtttcttccgctggctccgggccggccctcccgacgcctcctgggagttgtagtttttcctgggctccgttcccggcctcttcggggacgcacggttggaagttgtaccgtgacgtgatggtcagatcggatgatagaattttggtgcgtaacaattccaacttttgcttctgtgcccttcaagtgtattttatccgtgccccagttttgcagatgaggagactcggacttgtaagtaactttctgtaggtctttgctgggtcctagactggatcgaaacccaaatattctgaccccaactgcaggatttttccactgcacctggctgcctccgccctggccccagattggctcctccagaaacagactagcccggccctttgccctgctgggccctcctgggagagcgcttttcacaacattggctgggatgagggtctggagggcccggaacggagcctgccttctccttctcagtcacgcttggcccaggctgccccggaccgggccacatccttggccgccccgcacctgacgtgagaagaggctacgtatcatagattcctccatcagtagtaaggagcctgagtttctgtctcaggtcagcttgtgtggctttgaatgagaggctctggtctgcagttttcacatctgcatcgtctaaaggcaagggcacagactttactgcctggtagacatggggtaggccctcctttattggcagtgtgaccctgggcaaattacttgtcttaatctccaattccacacctgtgaaaccccacctccaaggttgtgggaacccaaaagaatgtatgtaaagcacctgttgcattgtaggaatctacttaatattactgtaggaggttgaactaaatggctcttgaggtctcctcggttactcccattctccatgtcaccaagaggtcttgtctgggtagtttcaactccttacccagcttctttctaagtccactctatgcagggcagggctggaatagcaaggtcagatgatgtcatggcatgccaacctgactctgaatggcagttcatggcaccctgaactgaaagtg

SEQ ID NO: 7631 - DNA, 6000 bp, Homo sapiens
actcccaacctcaagtgatccgcctgcctcagcctcccaaaatgctacgattacaggtgtgagccacctcacctggcccagtgtagctttttaacacaaattttatatagctcaggttactggaaacactgtaaaatgccacctactttttcttttcacagctgacacttctcccaactaacagaaactggcaaacattgtagaggaagtgtccactgagtgaatgagtatataatttatgaaaacagaaaagtgctttggaaaaaaaaaaaaagacaacaggagtacatacagtgaaccaaaaagagtgtaccaggaggagcagaccctgaacagttagaactatggaaatcgctatgctttgtgttgtcacaggagttaaaataggaataccctgcatacaataaatatttattggataaataactaagcctgatacccttttcaatgcgttatacagactctatcatcacaccactaatctaagttctcagaagttaaacattacaagacttcagaacaacataggcgtctttggctccatttaacagaagaaggaccatagtgatcatttaatctctatgagtctgtcttatcttctggaaaaggggcctaacaccatttccttttgcaaaaaggtagctgccttgcttccagttctaccatcctctagcaacccatctttctcttatttgatgtctctgatcagctcctcttccagcacaaactggagaaaggggatcctttctgttttcttggaggcttctgaactcaattacaggtctgcattaaaaatgtatggagaaagctggtgatcagtttgtacatatggacaagttcaaggcagtatggtctacttctgggaaggcctggattccatttgctcctgatggaaaaaccctagtcccagcagtgtttagaatgaactggagaaggcagatgggtaccagattcaggaagaggtactgatagaccaagaccagttctttctgttttaaagatgtgttatctcaatctcctccaatgctccctttggaaattcacagaagattagggctccccacagaaacagcagctggcctgggctggtcttctgactaactggagctgaatacaaaaagtctgatgggttgactgagtcggtgactgccaattggagcctgaagcccccaaagtcttctctagacttgatgatgaagcaccagttacagttctcccagctcgccttccattgcccgcaccatgacatacagctcggccagacccaccacagaggcgacgatcaatgcagctagcacccgctggagatggggagaaccaggcttaagggatgcaggccaacaaccagctctgtaccccagcaactttaatgaggatggagagccccccaaccaccctctaagttgggggaggggaagaaaagagaatgtggcttctcctggggttattacctaacctcccgtgactgctggaaagctctaatgctccccttattaatggcataaatatctgttcaatacctaacctgtgcaaggcactttcacatacgtcctcccttacccactaacacccccaccagggcaccctgccctgcccagtgcctactcaccgaggccatttctgtgaagatatattggcttccaaggtaagtgcagacgaaggcagcaaccaccgtgacaatgaaattgaagatggtgatgaccagagccttcaatgatctcactttggggaggagccagagagggcacctttagttcaacattctctaggaggtgctcttatctcatggctcccccaccaactgggtttcagtcaaacaacaagcctgagtgtcatgacccatctcaggaaaaggttttagaagcctgatctcctagtacctcaccttgctttcccaggtcgctgagagtcccaccatgtcttgtatcctgggaaaaagaaaaagaagatgattcagaatagaagcagctcagagagcatccattgacagtctggctcagccctctctattccccaacatattaactctgccctccccatggattcttttgtctggaaccattttgactcttttctggactacagagcaggcatttcggagagaggacataggctgccagtacccatctactctcctgttccagggtaggagcatgccatagagtagtagggagccctgtcagaagaaatgctcgaatggctgggcacagtggctcaccttgtaatcccagcactttgggaggccgaggcaggaggatcaccttgaggctgggagttcaagaccagcctggccaacgtggtctctactaaaaatacaaaaaattagcctggcgtggtggtgcatgcctgtaatcccagctacttgggaggctgaggcataagaatcacttaaacctggaaggcggaggccgcagtgagcagagatcctgccactgccctccagcctgggtgacagagtgagactccatctcaaaaaaaaaaaagaagaagaaaaaaagcctccaagattcattcccacttatttatttatttatttatttattttgagatggagtcttgctcttgttgctcaggctggagtgcaatggtgcagtgttggctcacagcagcctctgcctccgcctcctgggttcaagtgattctcctgcctcagcctctcgagtagctgggattacaggtgcccgccaccacgccaggctaagttttgtattttttgtaaagacggggtttcaccatgttggccaggctggtcacgaactcccgacctcaagtgatccacctacctcagcctcccaaagtgctaggattacaggcatgagcgccgtgcccggctaactcccacttctatgacgtttaaaacttggtcaccatctcagcccagagtctcagtgaatgagatgggaactgtgttgtttgtatgcagacttcctatggtccctgaacagtatagaaaccaagtttccatgttttttctaaactctgtatcttcttccactgcagggccctactctgaggggctacctagaccacgtactgaagagcatgtccttacctgacaagtgacgttgcgggtgatccgtttatattcctcattggccagctgtatcttaatcttctccagccgggcaactagttctgggttctgaagcagaaaaatcaaatgagaagaatgatattcccagcttgttagaaagcacatcacaatcattggttccaggggtaaagcactgctaaaggtatcaggagacccacatactagtcgtaactccagtgctttgaaactgttttttttttttttgatctcaattttccaaacagctgatggggaggacaatatctggctcccccagatcccaaagatttcaaaaacaatttttcaagcctaaaagttgatttataagttcagtgtatcatggataagcccaactcagtcaataaccactctcacaaacatatcccttacatacccgtggaggcttcacaacctctgggagatagatttcactgccttctaggagctcatggaggtatagtttggaatctgagaagaaaaggtttcacaaacacaatgatccacgagctgaggttgaagggttaagatcaagaggggtgtagcccttctttctaccaaaataaaacagggccatctctacattaatccatttccaggatcattttcaattgaaaagaattttggataattccatgtaggtatctcccagtgctgcgcaggtgactttagctgtcagctctcaattatcctgccagtgttataactaacaagtaagccatttacttgtgcctttgggttagatcagttctgtggccacaacagctcttccctaaataagtttaggtcatagtgatgctaaatgctcagaggacactaatactaggcaatctctttctaaggtcctttctagttctaataattgagcagtctaccctttgcacttctggctggtctatgttacttctggcaaaataccttatgtgctagtttgtcctgttccttccctttacacataagggaactgaggcccagcgaggagaaatgactccttcaaaggattagtgacagagctaggactggaactcacatgctactctcaggccagatctttcaacacagcttttgccatcctatattaaaaaaacaaacaaacaaaacaaagtatcagatttcaccactcttgcttttgaggtggaaagaaatccggattcctacaagctcactatgctaagctgattcctaaagtggagaaaaagaagagacaaaacctgtgatatttgtatttggtaaaaacctagactttctcaagggtgaattgggcctaggtgtgcctggaagtgaagagggggctctcaaaagagcagaaactgcacaagcaaatttgtcatccacgagaaattcccatgggagttaagaaagtgggtggccctgggatttatggagtgactcttgacttgtctagatgagtgctccgtagaagaaggggaatgatgggaaaagacctcaggagggaatcgatctggacacaaggaggggaccccggactggagactggggctcacccctttctctcagatgctggtgcagatcccggatgagacggaaagaaaccaagcgttgggggccactggagctatcaccgcccttgtgcttcttccccagcgcggcctcaagctcggcccgcagctttcggggtagccgctctggctccagctccccgccggggcccaaagcacgcaccaatcgctcgcccgcaagcaaagaggacgccatatctagccggctctccggtcaggtgaccccaacccggacttccgcccgccgcgcgccggaagtaacgctaagcgcaccggaagttgctctgagctccggggtgggaccaggcgggccaagagggccgggacgccgcgcggggcagtgtgggactggggcggaaccgcccggccgcgggtcgggctctgtgtcagcagccgggcgggcgctcgggcgggacatggcagcctgtacagcccggcggcccctggccgtgggcagccgctggtggtcccggtcgctgactggggcccggtggcaaagccgctctgtgcggcggccggagctggagccttctcgccagcgtcgaccacgacgacgcggaggcacctctcgtcccggtgagggacggagccagggggcgcgaggaactgggcctggagcccagagagcgtgttcctagccagtgcggaggccaggggcccgggcctgctgagggtgactggagtttgacccgggagagggtcccgagcagggagccgacctgcgctgtctgggacatgtgccaggagcagggaagccagcgcggcccagagccctggttgtacagggctggccctgggggggaacaggttaccctccccaagtgaatcctacttccccggctggggtccccagcaccgatgtcagagggaagctttttaattcagccctagggcattggcttgaaccctcagcctttggatttggtgaaggtctgcctcagaaagatgctagaggtgggaaacgagactcttgggtgtggaccctcgtaggccccaggtttccaagtgactttggggagatcgattttctatctgtgacttggggaagggggtttgaggccatggggatggtgtggaaactgtttccacggatgggacaggcggatcaaatgggctggtggatcagtgggaggaagcataaagttcacatcttcaaaacagtaaaaacagcctttatttgaagggcccctagaaagagcagccctgttcagagtggtgactgacattttagtggctgatattagacactgaacattggggagagatgatagctatttgcaatttaagacccctgtgagaatatgaacaaaaacggtattgagagagcgatgtgccgtaggaaatctagagatgtttaagcttttcaagggcaatgtaagggctacaggttagagggggagatggacatgg

SEQ ID NO: 7632 - DNA, 6000 bp, Homo sapiens
gccaccgcacccagcccaccctttacctttaacttattctttggcttggggagcaggctgccacagctcaagctgggccttggccaagggcaacattgccaggttcccaagggtagcaacaacaggaagctgaaactgccagattacccgcccctaccagcatcctcccctggaaggcaacttcctgccagcttcctggtcactcagcctgagcacccctcccaagaggccagttaggtgcctcttccttgatttccctaactcttactcgtctcaagacctggaagtttctcctaactgtacctcactctattctttctaacccaacttgctttccctttccacaattgagctgaagaaccacaaaataccccacgataacctctgttccactcccttagcccttccccaggacacagcccaccactctgccctctcaggagcatcccctgcccttcctggccttcctccaccttctttttttttttttttttttgagacagtattgtgctctgtcacccaggctgaatgcagtggtgtaatcacagctcactgcagctttgaactcacgggctcaagcgatcctccagcctcagccttccatacatcgcaatgcctgtctaattaaaaagaattgtttttgtagagacagggtctcgctgagggaagagagagaccctctcatattgttttatactcagtacctgttttaagaaaaaaacaaggaagtgaaatcaaagacaggcagcccagcgccaggcccgaaaccaggcctgggcctgcctggcctaaacctagtagttaaaaatcaactcataacttagaaaccgatgttattcatagattgcagacattttatagaagaacattgtgaaactccctgtcctattctgtttcactctgactaccagtgcatgaaacccctgttacgtatcccctagattgctctatcaatcacgaccctttcatgtgaaatctttagtgttgtgagcccttaaaagggacagaaattgggcactcgaggagctcggattttaaggcagtagcttgccgatgctcccagctgaataaagcccttccttctacaactcagtatctgagaagttttgtctgcagctcgtcctgttacatcactatgttgcacaagccggtctcaaactctgggcctcaagttctcctcccacctcggtctcctaaagtgctgggattacaagtgtgagccagtgtgtccagcccactttcttcctactagtcaagaagtccatatcctggctgggcatgatggctcatgactgtaattccagcactttgggaggctgaggtgggaggattgcttgagcccaggagtttgagaacagtctgggcaacacagggagaccctgtctctacaaaaaattaaaaattagcagccaggcatggtggctaacacctgtaatcccagcactttgggaggccgaggtgggcggatcacttgaggccaggagtttgagaacagcctggccaacatggtgaaaccctgtctctactaaaaatataaaaattagctgggcactgtggcgtgcacctgtaatcccagctacttgggaggctgagacatgagaatggcttgaacctggtaggtggaggctgcagtgagctgaagtcataccactgcactccagcctgggcaacagagcaagacctttttttttttttttttttttttttttaaatactgagtgtggtggcgtccacttatagtctcagctacttgggaggctgaggtgggaggattgcttgagcctgggaggtcgaggctgcagtgagctgtgatcatgctactgcactctagtagcctgggtgacagagcaagactgtatttaaaaaaaaaaaaaaaagtccatatcctactagggggtttagtcttttttgagccacatacccctttagcaatccagcaatgcctaaggacccctcctcaagaatatttgtttattatttatttatttatttattgaaacagggtctcactctgttgcccaggctggagtgcagtggtgtgatcttggctcaatgcatcctctgcctcctgggctcaagcgatcctcccacctcagcctccggagtagctgggaccacaggtatgtgccaccactcctggctaattttttttttttttggtagagacagagttttgccatattgcccaagctggtctcaaactcctggcctcgagtgatccatctgcctcagcctctcaaattgctggaattacaggcattagtctggccaagaatacttataaattcataaaataaatacataagaaattatattgaaagttatcaaaatttaaaaccaagtgtgcaatattagtaatatgtcattctttattaatacattaaatagtaagatctagtggtaaatctaattattagcttaatgccaaaatacagatgaattatttcctttttttttgagatgcttacaagcgtgcatcactatgcccggctaattttttgtatttttaacagaaacgggatttcaccatgttagccagaacggtctccaactcctgacctcagttgatcctcccatctcggcctcccaaagtgctggaattacaggcatgagccaccgtgcccggccaatagattttcaaggtaccagaaataactgtagtgtagtaggaaactttttgctaatactatcatgaattgttgccaacattcataatcacagaaaacactaaatttcagttagggtgagtgaaaataaaattatgcttttctccccccttatccccatcccccgaccccatccaaatgaaaaggattcccctttaaaattttcaaaagtagagagaaaaaaggttttatgttacaaactgaaggagggaagttagataataagaaaggatggaaaagatgaccatgagatgtattagcatcctccttctgaaactgggctgggtgagatgcctctggtcttagacacaggtccaaggagcaaggcagacaggtgggggcaggggtgggggcagttgctctgctctcgcaggagtccacacacaagagggagctggatctcagcttgatcatctcaaatcccaaggtatcattgtgccaggcattatctgtcacccccgccaaccttctctgcttccctgactccagcatcctcagttctcagcaagatctcctcttcccacccctaaaatagcgttgaagctaacagtgcattgacttctgttctgaagaccaggttctcagtaactggaaggcacagagcaacccatctctggggctcttcttgcccctcagtcccaagactttccacaaggatggaactggagcttttgtcttctcagctcagagtctgggcttcctgaaggaaattccacaagaaaaacaaagtgcagtgcagattctggtctctaaaagccttctctaagggtggggactgggagacaggtttaggtcttatggaggagcaagtctgcatttagtgttctctgggagtctcccttctgtcctcaaggctatttctggtcttcaggggggtagggtacttatctcccacacactggggatgtcccagtggagagattgattttgagatccaaagtgagcctgaagccatgttttggaatgaaaattcccagtggatttatcacccctctccaagggttggcagctgtgaggcctggctcagggcttctatccccttctatctcttcagtaaccagttctaccaaatctgcacgcaggctgaaaaaatcagcactgatagtgggaagatagagaagagaaattcctccagctccaggcctccaagctgtcaggcaccaggacccccgtcccccagctcctgagagcaaggagctgcacaacccggtggcttgcaaggtgtcagccgcttctcaaagcgccccaaatataaaatctcaatagcagttccttttccccagtaccgcagtccccatgccccacctagatagaaattctggaacttgcagcattttgcaatcccaaactgcactgcccagaaccgggtttcccaacctgtagaggccgcatccgcgtctcctgggcgggcagtgccggtaatccccaacaagccccagcctgcttggaattaacgggtctgactgtgccgagaaacgacctctgtttcagggcccctccccatacaggcacctgccctccagggctgcgcgacccgccccccatcccgggcgctggaatccagccaaacctctgcgttcccggaaccaccagttccctccctcctggaaccccgcggcttcagttcgggacccccaacctcacagtagagcggcggggaggcccgcctagggagggggaggagaagcaaataaacacaggaaaacccacagcgggagggggagcccctggtgggtgcccgagggtgcgcagcaaggaaagcgtgagcacgagatctctcttggaaggggcctcaggtgcggcccgggggccagcgccctgcgccgcgcggtggactcaggcccagctcttccccgtgcactccccagccctgcacccaccccgagcaccctccacagctcccaccttcctcgccgccccctcacctgaaaccaccagcgcctcgttgggccccaccgtgtggcaattgcccatggcgccggcggcacggagggccctcgggaccgcacagacccggacaacagcagcgggtctgcagcgccggccgcgcccagcctatcccgccacccccagcggccggccgcccgctcgctcgcccgcgcccctctgcggtcgcagccccgccggaagtgtggcggcggagggcggggccggcgcgttgaggcaggagtgagcgcagcttcggcggtcaacgcgctttattccgaggggcttcagatacagatgaccccagccctgcatccgcccggaaggcgtccccttactcccatggggcacctcgataccagctgccctgccctgactcacttctcagcacccatcttacggcagtcggccctggcctcagacccttgggttcagatcccaggccctcctcctactcactgtgagaccctaggcgagtcccttagctcgggagcctaattccgcttcattaacatgggggtaatttaactacctagctagacggttgcaaagggatcagttcactaattctcaatgttggcagtgcatcacattgcaaactccctgcctctgctccagagctgatcagaatcaataagggtggggcctgaaaatactacatccaaatttccgagaagcacagtgtctagcatacccctatctctccatctggggttactgtcactctcaggaagaaataatcacccattattccttcaaccaggaaaagagatgtccagggcacagcttggggccccagaaagtaaccacggaggtcaagatcacaaacccgtcagtgtccagggcatggcctcgcacacatccgaggttttcaaggaccatgaagtgccatggcaagcatcctggcctgagggttaggagagctggatctcaggctcaactttagcctgaattcggtgcgtcatcttagacaaatctggtgagctctgagggctggggtaaggttgagaaactgtgggctcctcagggtggggggtgcttagagaagatggggcctctgagtcctcagactgggggtcttcatcgggttcagcatcctccccaggcccaagccctgccagcctcttgctggcctcccatagccgatgggctgcccggtcgtctcgggcagctggaggcacctcttccacatggcagttggcaaaatatctcccactgaggggctcgatgccctcttgtagagcacaatacaggggtgtctgggcaccccctcttggtgcccggagcaccagccaagccaatgggcgcaaaagtgggcgcagccatccaggaacatggcgcaggaacagctccgagttcacaggccctgtaggcaggaagaaagaaaggagtcgggctaggcacagtg

SEQ ID NO: 7633 - DNA, 6000 bp, Homo sapiens
taggaagaagttggtccttcttctacaacaaaaaccagagctgcggagggcagaatgcacagtcagagaaagagaaatcaggaggagtgggaggctgaggggagcagagcgcaggtggaagggtctgcgctgtgagagtgcagagccaagaggctggtgcccagcggcggaaggagagacgaggggccagggggaagtgcaagaagggaaacaaccggtggaattccacgaggggccacagtgtgcagttgagggggtcgacccaatctgtttcctaaagggctgcagctggtggaccccggcagaccccggtgtcacaggtgccactggacagccctcatccagctgccgtttactggtacaacccctagctgaagagtgacagatctgcagggcccagggtgagctccaggagcgcgtcaccaccccactggcccaccccacccagattcacaggacccaggcgtgggaaagcggccccctcccatctcacgtaggcctgaacaggaagacacgcttcctatcagcagtgctcaggccttccaagtccagggacccccactggagacacggtggggaggtctcaaataaagaataggccatggccatctctacttcagttctgcaggagctcagcagacacccactgaaggaatgaatgaatgaatgaacaaccatgtgaatccttgacctcagggaagctggagtgccatgctggggcaccttgagtcactcacttatcaatgccttcttggagggggtccctcagagatcctgaggacactgcaggcggctcggtccaggcctcctggacccacaaggaagtggctgacccaagcgcccagaccgctgacatgtgacagagggctgctcgctccaccctcctcctcaggagtcctcccggtgggacacattgagaggtgtcctagagggcttggagttatgggggcggggagaacacataaggcagaatttcccaggctttcctaacacacacacactgacagtgcttcatgcgatggaaacgctgtatggtactggagcgttcaggctccgtaaccactcctgggttcgaatctcactggtaacaccttctagtggtgtggtggcacagccttgagtgactcccttaacatctttaacattttcacgccaggtgtgtgcaaatctctgacacctgctcagagatgggaggtgccgaagagctactgccagcacaggacccagcacggcgcccaccacatgcacagcgcagccgtgggtgccatcgctccatccctctgggggtatggacagtgcaacaggactcctcctcgatgcttaaactgatgaggaactcaaatgaatatctgcctgagaactgcatggcacttccgaaatcatctcattgagccaagtcacggtgccctacgtgcatcagaaagccaggatttctctggtgcgaaaaatgggggccaaaacccggggttcttcctcccctccatgtaccctcaccttgcccaggtgaacccagaagagagccaggatcccagcactagccacagctcggctgggcacctcctgggccctgatgactcacagagagccagagggttggagcaaggaaaactgagttttgcgtgggggaacagtaagaagtttccgaaccccacgactcagcagaagctgggccagaagtgtagggagctggtctggctgactctggtcagagccccaagtacccgatgccaccctccctgtcctttaggcagcaccgaccttccccacaggaagatttcctgaggtctcctcaccccatggccttgagacttgatccctggagctcccagaagcccctttcccagcaactatcccctcattcctctgctcggaaacctccaagggtcccctggggttccccacagccagcttgcaggtcccatccccattctggcctcccaggcacctctttcactcaaccttctccccggcccagccagcaagcttccacatcatccccagaagagcccagcctggtggccccttcctgcctctctccagacagccttggccaccctttggcccatacggtctctcctgcctccaatctccagacgggaagcatccacactccagcctttcacttactaggggtgtgaccaatgtaaatgatcagacccctcttagccttcatttcctgaactgcaaaaatggtccaacaataaccatctccttgggttgttatcaaaatgaaatgggaacttgcacatgaagggttgagcgtgggtctgggcaggcaggcatcccaccaatggcattctgccccctacgcagttcactgttccacgtttcattctcccacacgattttctttttccagaggatgcatcttacactcttctctaccttccctcctccccaagaacttggctcaaggctgagcaaactgcatgctccagaaatgcggtaatatggcaactaacaaagaggactccttccagtgacagtctccgcgggccactccaccaaggtggagaaaagatggattccaccatcacgcaccaagaaggcactgccgcctcgctgcccctgccccgtgctctgggcacacagggctcccccatggtggtcaggaaactgcccacacgcagcccctgccctgcctggcataagcctcgcccccagcagcactggcctgccacaccctacctcccacatgcatttcctgggctatttggtctctggtgctggtgaattcctcccaacaacaacgtaattcaccaggtactaggggctgccagctcttcgggcaaggaattcggcccagaggctctgaacaggcttcccagggtagggcccagtggaatttggcagggcaggggcaagcgcactctgtgcagagggcacggttccgagggaaggaacctgcagcagctccatcctcctcctgctcagctgctgctggaagacctcacactgcctgccacccagatccaagcctcctcagggtgtggtcaatgcagtgccaacgggaaggggaccctctgaggctattcatccctggacacagccccagggagggccaggcacagagaccaggaggaggagggacactccaggcgtccttgtcctccctgaccgggcctctcaccaggcacttccagccccctctatgaaaagctccagggggaaaggccgagtcagcactctggccacaactctctcccagggcctggctttaaagtgtgctctggagctctgggaatggccatcctccccaccccttcccaccgcctgcctcctgaggccctgcgcagaggagcagaggaaggcaggagtgcgaggaggtaggggaactgcctgtgaggccgccctgcagtgggttagggggttacccggcctggtttgtgtctgtcccacattcaatgccaggtgggcccagaattgccccgggggtctccggttggtgtgaatgtgggtcaccgtggcccccacctttcccatctggcagatatgtgtcttgtgcctacgtcacgccaggccaacccagcaagcacgggccaggctggaggccccagactctccagggggctgtctggtccttgcacaaaactgcagacactgcacggactgtccccatcccccaattaaacagccagcaggaccaagctgggccgggcgattcccccggtcactccagacacccccacccccactcccccaggaagtggatctttcctttcaactcttagattcttggcgagggatctgtctgtccccacacttcactgttacccctgaataaggagcaggaagagaatggcacagttttggggttttctgatttttgttttgtttcctgttcgttgggttttaaaatctttagcagctcttttgccgctcaaggtctgtcccctctggagggccactagtgtgcccagagctgcccacgctacgcaacatcacagcacggcggcgcccagcctgttgctgcgtcccagtggcaggagcctcctcacagggctgccgagctcacgcggggcggatgccgcgcgccacaagcctccttgaagactaagtgtggaaaagaaaatatcaacgcccacgagatgcagggggcggggggaaggtgggggaaacgaaccctcgcggatagttggaaagccgtcctaacgcatcagtcctggggcagagcgaggagactgggcccgggaactcccggacagagagccctggctccccgggcgcgccctgcaggtcccctgccgaggacgggccggcgccgggtggtccgggagcgcggtgcgcgggggtcctcaagagcccacccgcttcctcctaggctgctggagtcccccgggctcccctcccccgccgcccgccacatctggttccactcaggtcctcccccacctctaggcgcgctcctcctcccctctcctcccccgctttcagaaaagcggagacgagttttaaaaacccagtcacacacacacgcacacacgcttctggagaaaagaggggggaaaaggagggaaaagtcgagagcggcccgcgcctcggcgctccccccgcccgggccctgaagttggccaagttggcagcgccttacccgggagggcggcgtccccaggggcgccgggacggccgaggtgcaggcacccgaggagcaggacgcagcgcagcaggtgacgaggccagggcgcgggggccggccggccgggccccatccccgagcgcggcgctcagtggacgcggggaccgagggcgcacaggcgcaacgcgctgtggcagccccgaggctgggctgtgatgaccgcccgcaaggggctcgcgtcctcctccgggtcgggacgaagtgatgcctcccggggaggaggagggaggaggcagcccgggcggagggagggcggagggaggagcgcagaaccggggaggagggttcgaggggtagaggggaagggaagtgggcagcgtgggaggggaaggggaggaggcgcgggtctggggctagagcgtcgggagggagagaaaggggtggcggagaggaggacacgccgggtccaggaggaccccagcgtgcgccctttctcttgctgctctgtttcccagtctctccccgcctcgccttccctctcttctgtcccggccaggatccccagacgctgcgtcacaactcccccgctggcgcgggcggggaagcaactgcaaaactttccgcaaacttcacggcgtggtgggacctgggctacgaggtccggccagcccggggcgggggcgtgcagctgacccaggtggccagacccgggccgccagcatccgccccgccatcccgcctctttctgcgggcgtctccagcagcctagcatcccctacctccatgccgaggaggacccctcccccggtctggtggggaaggggcggagcccagggcctggccaccagggcgaagattgggggagggggaggcagagcccttgttacgtgtgcggagcgcaacaattcttgcacgtcttgttttagcattttcgtgacccctgtgtcagtgttcccggtgcaggagtgtagcacttttgcttgttggggctgcatccagaaacctggggaaaatctgtccactggacgtctcagaagaccggcatcatcactcccaccaactggactgctggccggtagcaaaagaccagctggaaatttcataaaaggttagacaatccacagttactcagtgttacgcaacaggtctctgcagcacagagcacgaactggggagtcaggatgctggagtccagccctgcctctctgcggattccctgcctgaccttgggaaagcctcttggggtctcggggcatagggcaggactgagacgttgagaccccaagtgcaaagaagacacatttctcctaccacgagtaatcaaaaacactatgaaactgtaatatgggccgggtgcggtggctcacgcctgtaatcacactttcggaggccgaggagattgagcccaggagttgaagaccagc

SEQ ID NO: 7634 - DNA, 6000 bp, Homo sapiens
gttttatggggaaactaaacagtataagaggcatttgtaaattcagggatgcttgaaggtcttgggatgtaaaagtcaaaggtctcttgtggatcagggtttctcagcttgggcactatggaaatttgggggccaggtcttttttcatgatggggacctgtcctgtgcattgtgggatgtttagtggcatccccggcctttgcccactaggtgccggtaacaacctctctccaaccagtactgtcctgacaatcaaaaatgtctctagacactgcctactgtcctctggggggcaggatcaccgctagttgacaaccactgctgtagagagaggtataatgaaataagcatgctcccaaaagaaacttaggaacctttaagaactttacaaagaaatgaatgaagagagaaactattggcagttgggagcagaaatgggtaattgcagttgtcttgctttgttgcaattttttcagttccaaagcaagccctgtgtgtttagtgggggctcagggaatcctgcagggtaacgtaggacttctctgccttctcaggactgtggcactcctggcgagcattcagtcctcttcaccttctgtaaaggtaatcagtgatggccaatcacaatgaacagacatagaggcaggaagcaaatctgggctgagccacaggttgggtcaggaggggttgtggggaaggaagagaaaggagacgttctcttctgctggtcgtgggacagttctgtgggccagactcctgggaagcagtggcagaaagctgaggaataggctctactgcagtcttgataatgaagaccaatgcatgcattctaaactgagttatctccaattctcacctcttcctctgtggctgcactggaggaggcacaggcactgctccctgggacggctggcctgctctcctatgccctagagagctcagtgcagcatcccacatgcctcgtctccacccagcagcctcactcatgacctgcatggggcagatgtcaccagtatctttcaacagcttcccctctgacaattgtcaaaggaaacagaaggcagcaaagatgcggaagcaatgactaggatttcagggtgtgaaacaagcctctctccttcgaaagcaaccgcaacaatcttcagcaggaaccagcaggcagaggcaccctcagcggccgacccttctgtcgggcgtgacctacagcatcctgtattttgatcacacaacaaccacttcagttctgtgtcactctcggtcctcataaatggggaaacagacatgcctatcctgagatcccttaaggggacatgtacctctctgaaccacgttcccgtgttcagcactacccttgagagggtgtgacatctgagccacctaggaggttcgtctgcttgttacaaatattttaggcagaataattcaagctaaagcgaacatccttggaactcctgaaggggaaaagaactcaaaatgaatggggcaatagagagctaaggagaggctttgtcttgtaaatgcgcgtgggctgaagcacacgtatgaatgacctgccccgtgtcttggtttcccaaggcagccagggcagagctctgcccacgttgtcttgagctggggcctgcaggggaactcagagcagccagcatcagcagtgagttagttccacagcttatctgggttcagtgacaaccaactcttctggtcttacagaggaccaagaattgttccaggacgggggagttaaggaacccttaggaagaaggtgtcttctcccctcagaacactgaccactacacctcctgtttgatgtcacatcatcccctccccatcccaccccatctcctccctacatctctcttcaccagtaggataaaacaacacaagcacttgtttatggccaatgcccagagctggccctctgggcaacaaagaccctgaacgaaataaaacacagaggagatggagaacaaaaacgggcagagcgcactgaagcttgcaggcctaactgcctcatttcctgtgggcacatgctgacatgtgagaggaccccttaaacaaccggagatacaagaaatggggacatatccaagtgttttccttacaaaacttagttacagggatgactcatctccttatctctaaatttacagatgttgtaagaaaaagcaggagccgtggtgacttttacattaatagacagcatagagatttcatcactgacagcaggaggctaggagctgttacataattccacaaatgagagggacactatttattccattccagggttcatgaaagacttcacctgagaggctgggtgcagtggctcacggctgtaatcccagcactttgggaggctgaggcgggtggatcacctgaggtcaggagttcaagaccagcatgaccaacatggtgaaaccctgtctctactaaatacaaaaaattagctgggcagggtggtgcatgcctgtagtcccagctacttgggagggtggggcaggagaattgcttgaacctgggaggcagaggttgaacctgggaggcagaggttgcagtgagccgagattgcaccattgcactccagcctgggcaacaagagtggaactctgtctcaaaaaaaaaaaaaaaaaaaaaaaaaagacttcccctgagaaattacacaggtgatgggtgaagaaggctcctttattgccacacatgaatggcacaggcccaataggaagactctggaatcaggaaggctttcttccagctgtgaaggaaatgtcttggagacacttccttgtccatcacaccacaatgctagtctgtgaagctagcagaaacagaccagagatccccaggctaggaagctatgtacaaggcagggcagctgttgaaggcaggtcaagttctagaaaactcttgctacttagggcagtgctgcttttgcctgggagggttggtagcaacctgagtcaaccatctgattattccaaccctctggctacttatccaggcaagagggccctgtgatgtaacaactatgaccaatcatacgttacatagagaagataaactgcgtgtgtgttgggggcagccagaggtaacacagacctaagacagtgagaatcaatcattctaattgttctaattgcagagtccaccaaactgtaattagaagtctctgtatgctttcgctgcttcttacgccatccaagactataaaagttgtgcaatttaaaattcagtaaagaccaaagcggtttccaactgctgagatgagcaaaacccagagtcaacagctgtcaatcactgttcatctgaagggcagcactgcaggcaagtgtggtagcctggagatgaacattatttctttatttttgagacagagtttcgctctttttgcccaggctggagtgcaacggctcgatctcagctcactgcaacgtccgcctcccgggttcaagcgattctcctgcctcagcctcccgagtagctgggattacagtgccaccatgcccggctaattttgtatttttagtagagacagggttttaccatgttggccaggctggtcttgaactcctgacctcaggtgatctgcccgcttcagcctcccaaagtgctgggattacaggcgtgagccaccgtgcccagcccgggattaacattataaacagcatggcgattttgtttggcttgaccactctgacaaacaccttaaaaagagaataaatctgacttacattctgagccaccacagcagcactgtagtcgctgccccatggaactcccccatcctgcttccactatggtctgctcaagcagcagcactcactagtcccatctccagcaagcaatgtgcttttctagaagccaggaacacttaagtgagcaaaaggttctataagtcacactcacgtaggaagagtagagttccccggtctctgtaatttcacccgccatttccaaaagtgaggaagggctggcagcagaggttccttaggtgcaaggacggcggctgccgcagctccttaaaacaaaagagcaggcttcacctatctgatggactgagacaggggtgggaggaggcttgcagacttcccctgccacctctggttcttttatcacagacacttagggcctcagtatctgtcacaagactcacccccgagggaggggtcaccctggatgacagaaatctggacggtttcttctaacatttcccttgctgtgcagggcactgctctgtgcccagcacggatgttttcaatgctgctcggggtgcaagtgatttaaggggcctctaaaaccactaagtctcacccaccacaagagccccctttccacgctctggggtggttatcctcgtttagttccaggaaccaggagctcactaccacacatgggagcccaaggaactgtctgccgcctctgcctagggcagggagctgggggctttcctacattgcccttccaactccactcttggcactaaggcctcctttttttaatggggcctccactccctggccccacctactctcttagggttccccaccctcaaagctccctcttttctcaagaaccccactcccagcctctccctctctctccctcctggaggagtcccgagtctagtgccgccccgccccgccccaacctatcccgacccgtctcgtcctctcccgcccgtcccgacccgacccgacccaacacctgcagcacagccagctcccaagccgccgtctcccgccggtccgctgctgccggcgccagctgtccagcaccagcttccgcagcgcgcatgcgccggccccacagcccacctttttcgcgcgcgctgattgggcgcctcgcgggggcgggaccgggattggggcctggcggctgccgtcagcatggcggaagtgggcggggcgcgttctcacgcgcatgcggaaggggcggtagccggccgggcctgggaacgtggctggttggaggaggtagatcaccctttctgcgggggacgatttcgtcggtggtaggtgggtgtgagcttggcagtacccgggtccgcgtggttggagggtcgaagagagtggtctagaacgccactcaaaggggagggcctaagactaagcccgccttgccctgaagtggtcgggggcggggagggagtggctagagccccgtggggtggtcgccggggtaagaggttggaagtaggtttaaggcagggctgaaagttgattctgggttggaatccctggactggggcaagtaatgggagctctggggatactttggtacttggtacttggtgcttgggtttgaggaatcgaagttctggggagtggacggaaggaaccggcagaaacggagcccaggcttggcctcttggagtgggagtcaaggattgtttaattatccttaaccagcctggttctctttcttgcaagaattttggagtctgtattctttgaagtgtctagacggaactaatgacggaagtcaacttagccccagcaggaaagctggagcgcctacccaaagttggaggaaattcagggtcctgaagtctttgctctccccatctgcatgcaggctgctaccatgaggttgaatcagaacaccttgctgctggggaagaaggtggtccttgtaccctacacctcggagcatgtgcccaggtatctttcccgcttgacatggggtgcgtatcagcacccagagctgtgtaaggtacagccccagtctcagggctatttcccctaagaagaaacattggttgtgagaaataattatatatgaggggggaaaaaaggctgggtgccgtggctcacgcctgtaattccaggactttgggaggctgtggcaggaggattgcttgagcccagcagttcgagaccagcttgggtaacgtagcgagaccttgtctctacaaaaaaatacaaaaattagccaggcatggtggtgcacagctgcagtcccagctactagggaggctgaggtgggaggattgcctgagcccag

SEQ ID NO: 7635 - DNA, 6000 bp, Homo sapiens
cccaactagaaggcaattctcaggcctttcccctctaaggacttccaccaaagttcccaggaaaattgaggagactctgagtcaggggcccagcctgagctctgcccacagcaagtgacccccactgaggcatgaaaacaggaagtaaaggagagaggcctgtctttgggtttaggctttttttttttttttttttttgagacggagtcccgctctgtcgcccaggctggagtgcagcgggtttaggctttttaagggaccccctcccaatcagggcaacagagggatgcccaaggtgaccgccaacaccttcctggggggctgactccagggctcaggaggaagggaccagccttcttcgccaagagggggagccctagcatgcacttctgggctggctttacccaaatagtgaggcaccccaggtgtggagacctccctctccccactccaaacaccactgggtcagggggctgccagccagccacctccagcagcccaggcaggaagccggaaatgatgcagcccaaattcctcttggtggggtttcctgtaagtggggagccgcccagggcaggatcataaatgggctgatctgaggtctgtggtcctaccggagaagccaggcatggaaggctgactatatatccacggccaatggctccagagccctaagccatgggcagaccagatgtggtgagtgaccctggctatggcagtaaccaagaccaggatgcaggagtgtggtccaagggtttgcctggcactttcccccagcctgggggaggggttctccttctcctccaggtgacctgagaagaatggtaggcaaaggacactgtcctggtctgggcagccgctattggtgtcagctcatttctggatgacacagatgggacgcccaccctaaccattctgtctcctccctctgtgcaagtgcccttgggactacccagattgtagtttaaggtgaagggatccttgcgtcaagaagctccttggaccaaacctgggacggaaaggacaggaactgtaagggaactcgtcagccctccccctgcgcttctggctccaccggcagggtatgggtctgtatgtgtggagaggtagcaggcgtgatcctgggatcacgttaaccagtgccaaccccatggaggcctctactacggtgaattcctgccaccacctgaagccatcagtggcctccagggccagtaggtttgcacatacaggctagcctcaggcctccctcccctgagctaagggccagatctccactagactaagggaaaagcccacatcatgaaggcaggcgagagtagtccttggggtagagtcagaatggtggttacctctggggtgcacggactgggagggggtacttggaagccccctaaggtgatggaaatgttctataacatgcttgtctaacctgcagtccatatgcggcccaggcagctttgaatgtggcccaacacaaattcataaactttcttaaaacattatgagacttttttgtgactttattttttatttttatttttgcttgttttatttagctcaccagctatcattagtgttagcgtattttaggtgtggcccaagaaaattcttcttccaatgtggcccagggaagcaaaaagattggatacccttattctataacatgatcagagcagtagttacatgggtatacacacatgtaaaagcccatcaggatgaacactcaggtgcaggcattgacacacacaaattctacctccataagggaggaagaggagcccaacatttgtcccactctgcaatctacactatgaagagacaaatcagcctgtagcttgtcccgtaacatgtccccggccttgctcaccagagatacctacaggacaggcatcttgaggccttcactctcacccccagggttgccaaagtggaaaaggctgagatagaagcccatggggtgaggagaggcccttgactgagatcgtgtggcgaggtgggccaagcctaaggaaaggggaagatgcacattctccagggctccctgcccccttcctctcttggactccccaggcaggcaggaacacatacggtgcctgacgaggtggcacaagctgccagagcagccatgtcatgtccagctgcctagcaacacactcacacttgtcctgtgtgcccatgcccgggagcagagggaggatggggctctctggggacaggctgcatctcacctctgacctccatgaccccccaaattaaccaagcacaaaaagtccctggccccactcctgtggttaggactgcagggctcctatcataataaaagaagcctgtgaccctggggtggagcgatacaccatggggctggcactggatctggactccggactgctgggtaccctcatgcctctctgcctgagatgccacaggacccagaccaaacatgccgctgcatgccagggccagcatcctagggtccaggtgtgggatagtcccaagcagccagccagggtcctaacaagcagccaaacactcagggagtgcctgccatgtgctggacacctcgctgggtgctaggtgggctgatgagtaagactgtccacatcctccccaccccaccatcctcaccttctcaccaccttcctgacctctattgtgaatcaggggaaaggaggcatctggggcacaaattcctctgacagatgaggacctgggaggaggagctgggcaatccaacacatctgatgcccaccattcctccctgagcccactgggcatccagaggctgtggtcggacattcaacgcaacatacaaaggacaactgccttgctggtgctgcccttcacccctccaccccagaatcagaccacagattcggagatggcagccccccaaaaaccatttctactccaacttctttgcctctgaattgaggaagctgaggaccccacagtgaggaaagtcttgttgggattacagagtaagctgggaacaaaggcaacactaagccccagactcccccgattgggcgcctgctaagactctcctccacattccatgccatgcttaccccacggagttgtggaacagtggggagacatttataaggcaaggtgcatcctcagccctgccatccccagacctgcctgcagctcggggaacggagtcacagtttcttaggggtatggaccctcaaccccagggccctctaaaccatgataagcccctaggaggccttggtcataaccacctatggagtattttgtgcccaagccctgctaagtcatagttcccaaatactctagcttggcacccccagaaccaccagagcatctgtgaggctcaaccggtggggtcctgggcctgctcaaggggtggctgaaagttatgggcccacaaaccagcaccccatactctcactcttaatcatgcccacagccccgctagagttcacggacctccgcagcctgcccaggggcctaccagggagatagctcctttgctaaagaaagaatggatgtgggctagagcttccttcccaggccagctgcagagccccgtcactggctgtcctccctcatcagaagggagcagcctcttggatcattacccctgacttcctcagcaggcctggggggtttcactccagcccagtcctaactctgttaggaaaaggaagggaaccaccatgtaaatacagccaggagacaggccaggaagccagcaggatacggggaatctcggcacggcctcccacccatttctggccagactgggctaggggacagggaggggcccgcacccaggatagcttgatgccaagctcactttcccaagcaggccttaccggtgaacaggaacagcagggtccagccgagctgttcccagtcaccaccagcaggcctggggatgcctcccgagaagacacccgggtctagactggccctgaacgccaggcccggcaaggagcgctagccttaggaacccgaggcagggagtcctgggagtagccaccgctcatctgctcctgaggagacggtattcaggccccactggcgcatctgcccggccctctgctccttgccctccaccaccccggcaggcgtaccgaccacgcgagcagcaggtgcaagacgcgggggtggcactgagatgacataaaaccacactcgcccccacctcccaagccctgacggcctccgccacggccctcctgccaccccaggctggcgcttccgtcggatacagagatggaggtggaggagcagccagctgcccgcctccctcagaccgaggagcgggaggcggcgccgggaacgtccttcctcgctagtccacggcctccagggagcatgggcaccccaggccggccctcccgccaagggcgcagctccgcagtggccgaggcgggggcccagcctggaggccgcagccccccgccccgcccagccctccggccccgcacagcgctcttgccaggccccggcgcccgcccggcggcggcctggctgtgcggtcccgcccccggccccgccgcgcttacccggggcgctgcagtccgcacacacctccgctcgcggcccctttcgggacatcctcagcggcgacgcggccgcagccctctgggccagcgtggggggcgcgggcggcgggcccgggcggcggcggcggcccctgctgcccggcccggctccggcgaggccccggcgaggctccgcgcgcccggccaaccgtccgccccggggctggcccggaacccgccgtgcccgcctgcccgctcgccctcgggcgccctccgccccgcgccgccccgccgccgctcgcggctcctctctccgccccctgcgcggctcccggccgcttctgcaggaagcggcgcaggccctgcccacagggggaggggccgcacccccgccccgccgcgcgctgccggccgcgccccctagagaaaggaagcccgggcgcgggcaggagggggcgggggcgcttaaaggggccgcggcagatgcccggccccggcgggcagcgtggcctgcggccctggcctccgctgcagcgctcgcctggcccggaggcaatgtgagtcaccctcacagccccctccccttcactttccgcgtggggtggaccgggggacgctgggcccacggacggcgagggtggggattagggaagaaggacttggaggcccaagtcccgctccaggtcaaaggggctgtgccttggggtacccgtctatctctggttggggtgaggtgtgcgtccctgtcccgtaggtgtccacatctgtgtgtccaggggtgtgtgtgtatgtgtcacactcttgctgaatacgcccactgctaacaatatggacgcccaggtgccagaaaggtcaggcagtgtattcccctgcctccggactaaaaatatatctatctctccatgcatccttccatccagagaggagagaatctgggcggtttttaaagacctcccgaggagtgaccactgtgcctgtgtgcactcacatccacttgtcatccgccttacacacacccacggtgtttctgggccaccagaggtgtgtgtgtccagaaagggtgcatataacatagaggggccgtttcaggtgacggcctttcttcctggacttcacacgacgaggcaggcaaaggcaaggcaggtgagggacgtgggtgggctggggggcagggagcctaggtagaggccgcacatgagcgcagcccccgcactgagcatgcgcccccatacgcgtgtgccgcgcgtgtacccaacccccaatccctgcagcagcaaaaggcccgggcactctgcttgtggggagagggtagaggtccccagggccagacctgggggccaggtcagtggtgacaattgaggaggggttctccaagagtcagagactcctgcttgttaagatgggggcagtcctttggcaggggtgctcaagttggtcgattatcccaacggtgccagagcggcagtgatttgtgggt

SEQ ID NO: 7636 - DNA, 6000 bp, Homo sapiens
ctcctaaagtgccgggataataggcaggagccaactccggggctcaagtgatcctcccgcctcggcctcctaaagtgccgggataataggcaggagccacctcctgggctcaagtgatcctcccgcctcggcctcctaaagtgccgggataataggcaggagccaactccggggctcaagtgatcctcccgcctcggcctcctaaagtgccgggataataggcaggagccacctcctgggctcaagtgatcctcccgcctcggcctcctaaagtgccgggataataggcaggagccaactccggggctcaagtgatcctcccgcctcggcctcctaaagtgctgggataataggcaggagccaccgtgcccacgtgcccaccccctgtgccgtatctttctatgtctcttcctatttcttcattctccttttgtccttcctgccctctctctgcttcaatggtccctactgtggaaatgaagtatgggtctacacaaagtaacttttacttcagaacagatgtccattttctctgttagggtatttatttatttatttgagacaggttcttgctctgtcgcccagactgcagtacagtggcacaatctgggatcattgcaacctctgtctcccaggctcaagcagtcctcccatctcggcctcctgcgtaactgggactacagttactggggtgggttccacccatctggctttttttttttttttttttgagagacagggttttgccatgttgtccaggctggtctccaactcctgggctcaagtgatccacccaccttggacggatcccaaagtgctgggattaccgttgtgagctgctgtgcccaggctgtgttaggatttttaaagtggatgagcggacagagacccctaagttcccttttggttcgggagctcactacgtggaggcgcttcacgtgtgatctcacttctttctcatgtacatgattttcccagataggaggaaaaggtcctcgatcaagggtagttgcccacacatcacatatcttaatggcattcacttgagaactcacaaagtattttacaagtaaatacggtattttccatttaaggctgaagaaaccaggaaacagatatggggagagtccctgtgtcctattccttaatgatagcgagtggggtccagaggaatgggggagaggagatggaaaggcaggcccacatgctttcatggcagaaaaatccctccgtagccctttagaatggggagctttataaattctctgttcaagggggcgacagtctacatttggtaagtgagttttacgttggcattaagtagcccaaatttcactctggaaacccacacaagcagtgtaatgacaaactggtgaaacccagccccacagcctggagtagtggaaattaccctggaacaggttctaacctgagccttgtcccttcacagggtggtgagtcagcggcccatcctgcacttcgctttcttcatgtgtaacatggaaataacaggtttagccaacctcactgggttattttgagacccaggtgagctactacacgtgaaagtgctttgaaaatttgtaaagttacatataaacagagaatactgttcatggcagcatcagagcccatcaattcaccatacaaatttatgagtaaataattaggaacagtattcatcagaaactatattgtgaaagattattattccctccttgcttatcaggcttgaaggcagtatagtcatccggcacatggaactaaaggcagaaagtactgagtttgaatcccagctcgccaccagcagtgtgacctggggcgatttttaaattgctctggtctgagtctcattttgctgatacacacaaacacacacacacacacacacacacagagtgagaataacatctgttgtgaggatttaatgagacaatgtagacaaaacatctgacataggacctagcaaacagtaagtactcaacaggtatgagctttggaaagtatgaaacatgtattgcaccctcagaatgtgccagcctcacttggggtacaaaatgaaaagacacagtccttgtttctaggacctaacagtctggtggagaaacatacaaatgagaaaacaacagcctcgttacccaaacccaaaggcagacctggaaaccttcttagagaaggaaacagctgattcgagacttttgaaggatgaggggaagtttgtgtaaaccaggccccgtgtttttcatttggccttaccatttgccgacaggggtttgatcgcttgaaaagctaaggttcatgtttctgcttgttagctttatggtgattcaacataaacagtctggtgacttcactgagcatggtgttgaaactgatcttacttgctattttcttttttcttttttttttttttatttgagacagagtcttgctctgttgcccaggatggagtgcagtggcacgatcttggctcactgcaaccttcgcctcccgggttcatgccattctcctgcctcagcctcccgagtagctgggactacaggcgcccgccaccacgcccggctaactttttgtatttttagtagaggccgggtttcaccatgttagccaggatggtttcgatctcctgacctcgtgatccgcccgcctcggcctcccaaagtgctgggatgacaggcatgagccactgcgcccggcctttacttgctattttctatacatgaaacatcggttgttttgttttcaactcataaagatgccttacagcttcttgtgtaggggagactggttcccaccactcaaaggtgccagcatactcactgccaagctgctgctccctttaaggagggaaggcagggaggacttgtaaccacctgtcactctctggaaacactggcgctggaggtcactgtgataaatgcttaggaaagagacagtggactgcacagagtcgttttcctggagagaatggagagttcacaggtagctggttttgtccacaagcgaatgtgaaaataaagagagcgtcgcatttgtcagatatcttgggaccaacctgaagtggctttctcctttcactgagtatgtcagcagtgaatttgggagttagagatgttgccctaagtggacgaagtttgaggcttttcttgaggctgtctgccaccgtcctgttggctaagtcccttttcttaaccacatataggaagatgttagaggctacattcattccaaaaggtcacagcctagtaactgatactaccactgaaggaaaactatcttttaaacctgagaaacatcttcagactccatcatgaatgaatccaaattgaaaaaaacaaaagctgtgctcactctacaccagttcctacatcactaactgccgtgttaaagtaatttaactggcacctaacagaaatcatctgccactttgtaaaagtcatagactcataagaatctagagctggaagaccgttaaagagctagtgatccagcctccctctcatttcacggaccagcaaatcgtggcccagagagccgagcccagctgttccgaagtcctcatacgggattttggtcagcattttgcatgacggtgatctgaggagacccgtcatacctttcatttgtagtaacataaatgaactgtatttcccaccccctacgtttgttagctgaggaagatacagaccaaagcaaaataaagctggtagttcctaaaggacagaagccaatgatactgaaattcctgtcttcatccatgtgattggtgcttggcacaaatgaaatgtattccaattcattcaagtttagacgcctgtcccgataactgtttttttgtttgtttgtttgtttgttttttgagacagagtcctgctctgtggcccaggctggagtgcagtggcgtgatctcggctcactgcaacctctgcctcccaggttcaagcgattctcctgcctcagcctccagagtagctgggactacagacaggcaccaccacacctggctaattttgtatttttagtagagacggggtttcaccgtggtggtcaggctggtctcgaactcctgacgtcaagtgatctgcccgcctcggcctccccaagtgctggggttacaggcgcgcccgaccccgatacttttaaataacgacacgttgtgaacaacaccacagtccctacgcctctggatggtgtctccggatagatccaaagccgagaggcagtaagagcctgcagcctccacagtccgcctcctggtgcaggtggagaggggctgctggaggcccccggacctcacgcttcctgagggccaccccggagcggctgcagccgctggcggcaccgggaaaagcatctcggccgtgcggggagaggccacatcctgaggcctcccaccgagaagcaccagggcttggtggacggggcccgcgaacccagggccacacgccgcctccctccttccttccccgcgggcctcgccccaccccggagggggttcctacctggcttcctcggccccgcgcccaccccgccccttcgcccggggccggcgagaagagcaggtcggggaggggcgcgtccgctgacggaacagaagccgggagccgcggcccttcccgcctccgcctgggccccgcggccgctcgggagggagcggcggactcggaacgcgcgcgcgccgcggccccggccacagccgccgcctcggtccccgcctccgcccccgcccacccgcccgccggggacgccggggaaccctccgggcccagggaccgcgagagaccccgccccgccctatcgcagccgccgggcctggtcacgcgcagagccgcgccgcgggatcggggccagcgccgggcggaggcgggacggggacgggggcggagggttgaaatcgcgcggccgggccggggcgcgccgagccgaacccagccacgcggcgccagcgaggcggccggacccgcagccccgatgctgctgacgctggccgggggcgcgctcttcttcccggggctcttcgcgctctgcacctgggcgctgcgccgctcccagcccggatggagccgcaccgactgcgtgatgatcagcaccaggtaccggcgccgccgagacgccccccgaggcccggggcgctgcccaccgcaccccacccggccgcggggcccagggcggaaaaggggggcggcaggaagcccgggggctgctccctccgcgtcccggcggcccgagtttccgaagcccctccgcgtcctcccctggcgggagcggggccggggcgggcgggaatggccgatgagcctccggagcccgctccccacatctgcctgcggctggggagagtcaggccgaagggccgggccgggctccctgcggtcctcggaccggactgagcgcgcgcgctgttctctccgcccgcgctaggctggtttcctcggtgcacgccgtgctggccaccggctcggggatcgtcatcattcgctcctgcgacgacgtgatcaccggcaggtaagagcccgggccggggccttgttgcaaatgtcacatttcagtagctcgcaggctctggctctcgcagcacacgcgctcagaaagctgactaatgggaaaagctggcaccacaatgggctccttcttcctctccggagtcttcgggcacccccagcttaggagaaagtccacggaaatgagggaggacgacagagtcggagtctgatttcaggtggtgtgagccagggatccaggtccttcatggaagagataagcgtggaagcatttacgactgggagtgtggcttgattcttgcagttggcttcactgggttctcactctggagcatcactggctaacagacgtccagtgtggttagcagagccccctccatggaaaggaaccaacccaccacccccttccacgcaaacgccgctcttgcttttcctgcagatttgctaaaggtgattgagaggttcccagcgcttagaacacggacttgtacgtctatca

SEQ ID NO: 7637 - DNA, 6000 bp, Homo sapiens
ctagagctggccgggttcggtggctcacacctgtaatctcagcactttgggaggctgaggcgggtggatcacttgaggtcaggagttcaagatcagcctggccaacatggcgaaaccccgtctctactaaaaatacaaaaattagtcagatgtggtggcgcacacctgtagtcccagctacttgggaggctgaggcaggagaatcacttgaacccgggaggcggaggttgcagtgagccgatattgcgccactgcactccagcctgggcgacagagtgagattccatctaaaaaaaacaaaaacaaaaaaacccaaaaagcaattctagagataatctcaattccattaagaaaaacaggtctggaggctgggcgtggtggctcacacctgtaatcccagcactttgggaggccaaggcaggtgaatcacaaggtcagcagttcgatactcgccttatcaacattgtgaaaccccgtttctactaaaaatacaaaaattagctgggcatggtggtgtgcacctgtactcccagctacttgggaggctgaggcaggagaatcgattgaatctgggaggcagaggttgcagtgagccgagatcgcgccactgcactccagcctgggcaaaagagtgagactccgtctcaaaaaacacacaaaacacaacaaaaaaaagcaggtctggaaatgagcctggagctcaagggccacattacagcggttaggtaccaggagagaggctaggtcaaaagacagttttcccatttacttatccaaaggggctgaatcagtatttgctgaatggaaatcatagttgatcaccgtcctagagcagattagaagggaagcctctacaattcatacaatgtggttcccagtgataagcattccacagatgttttctgtgaagaaacatctaaattgaaatcatgtactatttgaggattccattcacatggtcagcaaacgtttgatgcgcatccacgtattaggtagaaaaccatttcgttttatggttctcaaactacctgaacatcagaatcacctgcagtgcttgttaagcgctccagtccccagagattctaaattgtaagccgagggccctgaaatctgtattaactttgtctctgatttcggacgcagccagtccgctgaactgcaacactggaaatacagtctacggaggcgccatctgaatttgtgctcttgagcaactccacacttaccacggcgtaaataatgaataaacaaataaggcaagcaagtaatggcaagtataacacacttgtaggtgaattcattagccaggttccttttttttttttttttttttggttttggtttttgagacaaaatcttgctctgtcgcccaggctggatgtagtggcgcgatctcagctcactgcaacctctgactcgtgggttcaaacgattctcctgccgcagcctcccgagtagctgggattacaggtacctgccgccacgtccggctattttctttttttttttctttttaagtagcgatgggggtttcaccatgttggccagactggtctcaagctcctgacctcaagtgatccgcccacctcggcctcccaaagtgttgggattacaggcaggagccaccgcacccgacctagctaggtttcttttggccaaaaagatgccatacttattccaatgcccatctatggtctcaggtgctttcttcaagcaatttcaagtaaaatacctataaacagctactaaaatttagctgaaatataactggcctctccccttgaagggaacctagggttttcatgttttcaccaattcagagaagagatctgaaattgtgactcatgagtagaatcctctgaagatttattagcaagagatctggattataatcttcactatcactagcctgtgatttaactttctttgtaaaatgaagatgataatccttgtctgtcttacctgtcaaaactgcagtgaagattaaataattaaatgtgggaaagtcggccgggcacggtggctcatgcctgtaatcccagcattttgggaggccgaggcggatggatcacctgaggtcaggagttcaagaccagcctggccaacatggctttactaaatatacaaaaattagccagacgtggtgacacatgcctgtaacctcagctactcaggaggctgaggcaggagaatcacttgaacctgggaggtggaggttgcagtgagccgagacctcaccactgcactccagtctgagtgacagagtgagactccatctcaataaaaagaaaggcggcggggagggggagtccttttaaatgttaaaaggtactatacaggctgggcacggtggctcacacctatgatccctgcactttgggaggcctgagtgggagaatggcttgagcccaggagttcagaccagcgtgggtgacagagccagaccctgtctaaaacaacaacgtactatctgaattaagtacttaaattgagaaaaccacctggagctgtgactttgtcattttagtgtctgaatcctttaagaatctgactaaatccttggccccataccaccttctgcctataatttggggggatttttaactccttctatctaatcgcattctatgtgaaggcataaaatgagaaggcatataatagaaaaatattcagtatatagtatatgaaccctgaaaggccttttttggctgggtgcagtggctcacgcctataatcccaacactttgggaggcccaggcaggaggatcgttggagcccaggagttcaagaccagcctgggcaacgcagggagacccctgtctctaccaacaacaacaaaaaaaagttagccaggtgtagtagtgtgtgcctgtagtccaagcttgggaggctaaggaagacgggtggcttgaaccctggagttcaagactacagtcagctgtcattatgccactgcacctcagcctgaggtctcgacaggaaaaaaaaaaagtaaaaaatttgctgggtgtggtggctcatgcctgtaatcccagcactttgtgagggtgaggcagaaaaatgacttgagcccaggagttcaagaccagcctgggcaacatagtgagaccctgtctttaaaaaaaaaagaagaagaagaagaagaaaaattgtacccagccacaccaatattaacctttggtgtctacaatcgatgtcacttgatctatcgtagcatctacttattcatcgccaatagccagttttgtttttaaaaaggcagaagaaaagcacaaaaatcatgacagcaggattgatcccaggtaagaccgcaggctagagtgagacggacagcttgctcaggcccctcgcagttcagtctcagcaggtgagaagcaggacttggcagagcccacaggagagcagggcctggaaaggccgttcaacttcctgcacatccgactgtggtccttcaacttgggagaaagtgagtgtgattccagcaagaccggtggggaaaaaaaaggcttgaaataataaaagcaccaccattgtccaggtctaactactgtacaaagtcgactattctggtcttaatttatgatttgtttcactggaactgcagataggtgcacatttcctgacctgcctctggactgacctctgatagacgtacaagtccgtgttctaagcgctgggaacctctcaatcacctttagcaaatctgcaggaaaagcaagagcggcgtttgcgtggaagggggtggtgggttggttcctttccatggagggggctctgctaaccacactggacgtctgttagccagtgatgctccagagtgagaacccagtgaagccaactgcaagaatcaagccacactcccagtcgtaaatgcttccacgcttatctcttccatgaaggacctggatccctggctcacaccacctgaaatcagactccgactctgtcgtcctccctcatttccgtggactttctcctaagctgggggtgcccgaagactccggagaggaagaaggagcccattgtggtgccagcttttcccattagtcagctttctgagcgcgtgtgctgcgagagccagagcctgcgagctactgaaatgtgacatttgcaacaaggccccggcccgggctcttacctgccggtgatcacgtcgtcgcaggagcgaatgatgacgatccccgagccggtggccagcacggcgtgcaccgaggaaaccagcctagcgcgggcggagagaacagcgcgcgcgctcagtccggtccgaggaccgcagggagcccggcccggcccttcggcctgactctccccagccgcaggcagatgtggggagcgggctccggaggctcatcggccattcccgcccgccccggccccgctcccgccaggggaggacgcggaggggcttcggaaactcgggccgccgggacgcggagggagcagcccccgggcttcctgccgccccccttttccgccctgggccccgcggccgggtggggtgcggtgggcagcgccccgggcctcggggggcgtctcggcggcgccggtacctggtgctgatcatcacgcagtcggtgcggctccatccgggctgggagcggcgcagcgcccaggtgcagagcgcgaagagccccgggaagaagagcgcgcccccggccagcgtcagcagcatcggggctgcgggtccggccgcctcgctggcgccgcgtggctgggttcggctcggcgcgccccggcccggccgcgcgatttcaaccctccgcccccgtccccgtcccgcctccgcccggcgctggccccgatcccgcggcgcggctctgcgcgtgaccaggcccggcggctgcgatagggcggggcggggtctctcgcggtccctgggcccggagggttccccggcgtccccggcgggcgggtgggcgggggcggaggcggggaccgaggcggcggctgtggccggggccgcggcgcgcgcgcgttccgagtccgccgctccctcccgagcggccgcggggcccaggcggaggcgggaagggccgcggctcccggcttctgttccgtcagcggacgcgcccctccccgacctgctcttctcgccggccccgggcgaaggggcggggtgggcgcggggccgaggaagccaggtaggaaccccctccggggtggggcgaggcccgcggggaaggaaggagggaggcggcgtgtggccctgggttcgcgggccccgtccaccaagccctggtgcttctcggtgggaggcctcaggatgtggcctctccccgcacggccgagatgcttttcccggtgccgccagcggctgcagccgctccggggtggccctcaggaagcgtgaggtccgggggcctccagcagcccctctccacctgcaccaggaggcggactgtggaggctgcaggctcttactgcctctcggctttggatctatccggagacaccatccagaggcgtagggactgtggtgttgttcacaacgtgtcgttatttaaaagtatcggggtcgggcgcgcctgtaaccccagcacttggggaggccgaggcgggcagatcacttgacgtcaggagttcgagaccagcctgaccaccacggtgaaaccccgtctctactaaaaatacaaaattagccaggtgtggtggtgcctgtctgtagtcccagctactctggaggctgaggcaggagaatcgcttgaacctgggaggcagaggttgcagtgagccgagatcacgccactgcactccagcctgggccacagagcaggactctgtctcaaaaaacaaacaaacaaacaaacaaaaaaacagttatcgggacaggcgtctaaacttgaatgaattggaatacatttcatttgtgccaagcaccaatcacatggatgaagacaggaatttcagtatcattggcttctgtcctttaggaactaccagctttattttgctttggtctgtatcttcctcagctaacaaacgtagggggtgggaaataca

SEQ ID NO: 7638 - DNA, 6000 bp, Homo sapiens
gaaaagcccttgtgccttttccagtgcatcctttgtgtagacactgtgattatgtaacatatatgcttggcatattttgcaaatatttattgaatcatttggtttgacagccaagatctatgggacccatgctcccagatgctagatcacagattgcataaggaaagaacatgtggtgtctacaaaatctgcaatgttgaaactctccactttgggcattatcctggcttgctttctatatttctattaaaaagtaaagagagctgggtaagtggctcacacctgtaatcctagcactttgggaggctgaggcaggaagatggcttgaggccaggagttcaagaccagcctggacaacatagtgaaacccccatctctacaaaaaatttagaaattagctggatgtagtagtgcattcctgtggtcccagctactccagaggctgaggtgggaggaccgcttgggcccaggaggtcaaggctgcagtgagctgtgatcatgctactgtactccagtctcaaataaataaataaataaataaataacaggagaaatctgtctgctcaatgttctgaataagactatactgatcaggactgggcgctgtggctcatgcctgtaatcccaacactttgggaggctcaggcgggcagaccacctgaggtcaggagtttgagaccagcatggccaaaatggtgaaaccctgtctctactaaaaatacaaaaaattagccgggtgtggtagtgcgcgcctgtagtcccagctacttgggagactgaggcacgagaactgcttgagcctgggatgggaaggctgcagcgagctgagatcatgccactgctctccagcctgggaaacagagtgagactccgtctcaaaaaaaaaaaaaaaaaaagagtgtgccgatgggtctaaagaaactaaaatgtcagaatatatccactgtgttgaaagactgccctccagcatgcagatgcttggctaccaggcatggccaccccatgtgtcatctgcccccaaatcactggatagccactccaacttgggtgcccaaactgactgtagagacccacccttaggcagagatcaggaagcagtgtgggtaccatccgaatggtgctcagaattgtttgagccatctgtttcttgatattctgaaattttctttgaagctaataatgtgacaatgtagaaagatcaaggacttctagagccaggggatctgaagacaggcacctgtgtgaactcacgcaggttgcttgatgctaaaggttatcacacaacacacatgaactcatccctataccagaactaaactatggcaataaggcgaaaaggtgcctctttcactcaggtacctcctaataccttgagaaaaaaaggctccaggttctcatctctgtcttgctgtccccggcacagtgcctggcccggctgtggcagctgaggtctttgcccctgatccgtggttttgatggtcccagctgatatgcagaaggcagaggaagggggtggtgctgtcctgggaggcagaggacaaggaaaggagccatggagaggaaagagttaaagacacatttcctccagggccaggagcttttccagtgaccaggcagtcaggtgacagcttctgtcagtgctcagttctgcaggcagaggaacaacagtggcatcttcaggccagtcagatgaacttggccagggaaatacagaggaaaggcagggaacaccctgatttcaaaccacactctggactaggtgaggtggctcacacctgtaacccgagcactttgggaggctgaggtgggaggatccctctagcccaagagtttgagaccagcctgggcaacagagtgaggccctgtctttacacaaaaattaaaaaattagccgggcatggtggtgcacacctgttaatcccagctactagggaggcagaggtgggaggattgcttgagcccaagaggtggaggcttcagtgagccgtgattgcacccctgcactccagcctgggcaacagtgagaccctgtctcagaacacacacaaacacacacagacacacacacacactgcagtgttgacagctggccagtttgtcttttctctacctgactcagaacacacacacacacacacacacacacacacacacacactgcagtgttgacagctggccagtttgtcttttctctacctgagcttacaggtattgtgcacaagcgcaaggaccatcccatacaaagccctgggccccccactatccctgatatgttgacatttctccccttgctgtaagaaaggcttcaaccaaactctcatggagctggaaccttagtgcagtgtatatcagttagggctagggcaaaccagggaaaccgattttgattttcaaagaaacaaaattgatcagtaagacactgcacagttcatagaatctctgggaaagatggggaggcaggttcaggggacaggcaggaaggaaggaagggaaacagaacatttaaaacctagacgagcacaccacatggtgattctgtcgaggacgtcattgtgggtgcccacggctgccaccagcaccaccgccagcattagcagctgggagctggagctaagttcactgcccttgctgtccttagggagtggatgttgccggtgatacctgtgccaccaccaaaatgcaatcgcccctgtcacctgcgatttttttttttttttttttttgagacagggtcttgttctgttgtctaggctggaatgcagtggcccaatcatggctcactgacgcagtctcgacctccagaggctcaagtgatcctcttgcctcacttgcctcttgtcaagtggctgggactacaggtccacaggcccacaccactactcccggctaattttctttttctttttttttttgagacggagcctcactctgtcgctcaggctggagtgcagtgtctcgatctcggctcactgcaacctccgtctcccaggttcaagtgattctcctgcctcagcttcctgtctgctgcctcagcctcccgagtagctgggattatagatgtgcgccaccacgcccagctaatttttgtatttttagtagagacagggtatcaccatgttggccaggctggtctcgaactcctgacctcatgtgatccgcctgcctcggcctcccaaagtgctgggattacaggcatgagccacccggcgcgcgcccctttttttgtatttttttgtaaggacggggtttggccgtgttgcccaggctggtcttgaactcctgggctcaagggatccacacgccttgggctcccaaagtgctgggattacagcctgcttcttaatgtcactaactcttcacccaagtcctaggcgcttgtgcctgctgtgccagtcccaggccgcaggctggcaccgtagctataaagggcgccagaaaaaaagattttgctagatagcgatgaattccccaatcacagaaaggagatactgcggatgcttatcagccgaataccagtaagtgtcccttgcagaatgggattagagactgcaaactgcaggcctgccaacagagggtgctctgtgggaaattatgtgaaaacgtagaaaagagcgcgagccagtaatttaaaaatcgacgtccaaatactcactgggtcacctatcagctatgtaatttgggcaggtaaataagcttttgtttcttttttttttttcctcataaatggactaggaatattactcctacctacctggcatggccgatgtgcgagaaaatgagataatctcgtggacaggctctgaaaactgcacttttactgagtaaaaaaccctttgcctctccgggcccccgtttccccatctgtaaaatgagtctgtaaagtgagaatgatactccctacgccgcaaggctcttgcgggttaaactggaatattataaatgcaccatttatttgcagattgaaattctgtgcgtccggaggtggcgggtgggagagggaatgagcagggatgcagggtaggccctgagttgctgggggctcagcatggccgctgcgcacattgcatcattttgtcgacactggtgtgggtgaaatcttccaaaagaaattaaaacagaaaaaaaaaaaaagaagggtctgggacttagcagaaacaagccacaatctccagattctactattcctgggccacgtgaggagcgcccacccgtctggcgctgcgttccccggggcgtcccagcctctcccgcccagcccgccgccctcctcccccatggccaccaaggtcaggctctcgcagggaaaacgtcttcaggggctaaacatcggttttaaacgaaatggaaaacctccaacacgaatcaacagcagaggaaaagcagacgccaaacaagcgctcagaaccccttcaggggcggcgtggtagctcttcccggggaacagcgaggggcgcggatgtccctcttcctaaaactgcacgcggggtgcgatccgagacccagcggcggcgagcgcgcccgagtctgctcgcgggcgccaggcgcgcggagagcggcggctgcgcctgcgccaacgccgtcagtccgcggggcccgatcccgacacctaactccacagagaagctctgctcctaagggaaagggaagacttcagccacagtttcgcagccaacctggcgacctcacctctctggcgacctcacttcccagccggctccgtttaagaaaaccccgcgcaggaccgcgcccgcccccgcgcccgcgcccgcccccgccccctcgcgcccgccccctcgcgcccgccccctcgcgcccgccccctcgcgcccgccccctcgcgcccgccccctcgcgcccgccccctcgcgcccgccccctcgggtaacaaacatggcccccggcggggcggaagcgcttccgcccccaacgaagatggcggagggggcgggactaaaagggcgtaggtagatcgccgggggctgacgagtgcaccatggccaccgcggcaacctcacccgcgctgaagcggctggatctgcgcgaccctgcggctcttttcgagacgcatggagcggaggagatccgcgggctggagcgccaggttcgggccgagatcgagcacaagaaggaggagctgcggcagatggtgggcgaacggtaccgcgacctgatcgaggcggccgacaccatcggccagatgcgccgctgcgccgtggggctagtggacgccgtgaaggccaccgaccagtactgcgcccgcctccgccaggccggctcggccgcgccccggccaccgcgggcccagcaggtcagtccccgtgcccccaccctgcgacccgcaggcgggtcccggagcccctggccttgcaggtcaaccccgcccccctctgtcagtcccagaccccgcgagtcctcaccttccttagccaggagcctatccgcccctcaccctttgggcccccctcagaggacagtgccagccttccttgcacatatgcggctgctgatccgttctggaaatgccattcaacagtttcttcaggcgctttcccccgacttccgggccttgattcctacacctcactgggctcctttcaattttagcggaaaacgccaggagtttctgtcttgacagttcaacgctcacctatataacatgtcctgacattgtttttcctcaggtttctcccctatgttgacacctgcactccaagtcatttcttcctcatcccaaccttccccttatctccccaagaataacttccacaaccccaaatagctgttctaccctttgggagttgttgagggtaccagctatcaagcccttaactttatgtatgtatgtgacagggtctcccaaagtgctgggattacagtcatgagccaccacagccggccaagcccttaccttttaatagctgaacattttcattttcagaactaaggcttttttcattcaggttctccttatcccgtgttcttccccccaaacgctattga

SEQ ID NO: 7639 - DNA, 6000 bp, Homo sapiens
tctttgcacatcctcttccctttgcctgaaagcctgttgcttgccttcttcatctaagtgactcccactcaaccttcagctttcaggttaaaggcttctccagggaagccttctctgaccttggtgagttacttccattcaatgttcccaaggcaacttgtactaagcctttctagcaatgaccaatatagacactaaatggatattcgcatatttgtgagtctgatacctgcttctaccactcaactgtggcctcgatgaaggaagggcctctatttgtccagttcactgctccatccccagagcctagcatggtggctggcacacggtagacgctgagcaaattatcagttgagtgaaccagaatttaaaaagcttggctaagagctcaccggcaggatgctggcctgtgatggtctccagagtagagaagagcaagccacatggcagggctggatctggcagcagtccttctggcaaagtgtagaaaagggcatgagcttgcttcagagtggtggccagcaactccactaatgagcaaatctgagccttgataccagcacctaaaagaagaaaccatcctctttgaaacaattacctttcccaaagtgaaagacagaggacgctctggaggcttcagtctcccgcagctcacccttctccatcccatatttaaggaccaaatgttggccagaagccacacccaccatggtgtggctggttgagaagtttctgaatagttgcctttctggccagcaggaagtctgtgagggcttggcgaggagaactctcttctaagagcattatagagcacagggcctcggccacagcttggtcagacacaccttggcatttgagcaacatcttgctttcatgcagaatagttgacctagaaaaatgatgacagaagtcgccagggtgtttttcacatcttgggtaaagagctttggtacatcaggaaagaagacaaacgccataaacccgtaatgtgaagcctggccaccaccagagcagctctttgcgctggatccacttaccggaagtggctggcggctgccacctgccggatgagtataggaaaccgggagaggacgggactgtatcgggaactagaagaatccagctggagcaggctgtggaggtggcagcagagcaggtagagctgtgtggcgtggagacactgagaggcttccatcgagctccagatcttctccggaatttctaagagtagcttgatctgggcagccatgctgtagaacttctcctgggatggctgctgtggctgcaggggaaggcacagaactaaaccagaagaacgaacaaaagcaatctcagtgttctgtaggcttaggaagaaatctgggggtatttaaggatacaaaacttctattaagctgggttcagtacaactcagcaagtcatcaaagcccagtgtagaagagttgccagagtcaggagtgttgtaagatcccatggtttttcctacacacgcgtgcatttttgctcagccccacgaagaggcaaactttcgtctcccaccaggccccacctccaacattggggattataattcaacatgagatgtgggcaagacacaaatccaaaccacagcaaatggatcagtgcctcataaaagggctggaggcaacttttaggttcttctaccttcccccacgtgaggatacagcaagaaggccctcaccagacatcaaaggccagtgccttaatcttggacttcccagacccacaactgtgaaaaatacacttgtgttataaattgcccaatctcaggtattttgttatggcagcacaaatggactaagaaacctaaattccaaatctcatcatgcccttaaggtccctccttactaagaacaacccaagcctaaactgacttccttcagaactcctagggtaaatatacacaattattttgggaatcaaacatcccgggttccagtgattctcctgcctcagcctcctgagtagctgggatcgcaggtgcgtgtcgccacgcctggctaatttttgtattttcagtagagacagggttttaccatgttggccaggctggtctcaaactcctgacctcaagtgatccaccgcctcagcctcccaaagtgctgggataacaggcctgagccaccgcgcccagccttttttttttttttttttgggacagcatctcactttgttgcccaggctggggtgcagtggtgcgatcatggctcactgcagccttgacctcttgggctcaagagatcttcccacttcagccttccaagtagctgggaccacaggcatgtgccaccatgcccgctcactttttggtattttttgtagagatggtgtttcaccgtgttgcccaggttggtttcaaactcctgtgatcaagcaatccacctgccttggcctcccaaagtgctggcatgagccacagcgcctgacctgttattctaaatttttttacatttttttctcgtcaagtttccatggatttatttcctcgaccaggttgtaagctccttcagagcaggaattgggggacttctgtttctttgtaatgtgaacgaagaagacactcaaatttttgtagggttaaccgagaataaaccagatataacaactatgaaaatcaatacgtttctaaaatcaggcataattcaagttagcgttttaataaaccctgaagcatgactcagttacagcaaaggctggccacctaaggggacacgtgtactaaatgttagctttgggagggatgaggtcactcatttcaaaaatatgcaaacttatttgcaacttcctatagttttattgtgtcagtccagtctactgaccaggatttctgtaaagctcagatagcatgaacaagttccaaattggagttagactgtacttttcaattttttcttctatgtcccagtaagttctcccaggctgttaaaaacaactaactgtttacctttttcacccttcatgccctttcacttcgttcattgctaggtctatattctttaaggggccgtgcgcggtggctctcgcgcctgtaatcccatcactttgggaggccaaggcaggcagatcacatgaggtcaggggttggagaccagccgggccaatatggtgaaaccccgtctctactgaaagtacaaaaattagtcggacatggtggcaggtgcctgtaatcccagctacgcgggtggctgaggcaggagaatcgcttgaacccgggaggcggaggttgcagtgagccgagatcgcgccactgcactccagcctgggtgacagagcgagatcctgtctcaaaaaataaagaaataaaaattctttttttttttttttttgagacagagtctcgctctgtggcccaggctggagtgcagtggcgcgatctcggctcactgcaagctccgcctcccgggttcatgccattctcctgcctcagcctcccaggtagctgggactacaggcgccggccaccacgcctggctaattttgtgtatttttagtagagacggggtttcaccgtgttagccaggatggtctggatctcctgacctcgtgatccacccgcctcggcctcccaaagtgctgggattacaggcgtgagccaccgcacccggccaataaaaattctttaggaacgcaagctgcagctccaatatgaggatgtgtttgtttacctcccatccttcctcattgtgtctaatcaatagcgtttggggggaagaacacgggataaggagaacctgaatgaaaaaagccttagttctgaaaatgaaaatgttcagctattaaaaggtaagggcttggccggctgtggtggctcatgactgtaatcccagcactttgggagaccctgtcacatacatacataaagttaagggcttgatagctggtaccctcaacaactcccaaagggtagaacagctatttggggttgtggaagttattcttggggagataaggggaaggttgggatgaggaagaaatgacttggagtgcaggtgtcaacataggggagaaacctgaggaaaaacaatgtcaggacatgttatataggtgagcgttgaactgtcaagacagaaactcctggcgttttccgctaaaattgaaaggagcccagtgaggtgtaggaatcaaggcccggaagtcgggggaaagcgcctgaagaaactgttgaatggcatttccagaacggatcagcagccgcatatgtgcaaggaaggctggcactgtcctctgaggggggcccaaagggtgaggggcggataggctcctggctaaggaaggtgaggactcgcggggtctgggactgacagaggggggcggggttgacctgcaaggccaggggctccgggacccgcctgcgggtcgcagggtgggggcacggggactgacctgctgggcccgcggtggccggggcgcggccgagccggcctggcggaggcgggcgcagtactggtcggtggccttcacggcgtccactagccccacggcgcagcggcgcatctggccgatggtgtcggccgcctcgatcaggtcgcggtaccgttcgcccaccatctgccgcagctcctccttcttgtgctcgatctcggcccgaacctggcgctccagcccgcggatctcctccgctccatgcgtctcgaaaagagccgcagggtcgcgcagatccagccgcttcagcgcgggtgaggttgccgcggtggccatggtgcactcgtcagcccccggcgatctacctacgcccttttagtcccgccccctccgccatcttcgttgggggcggaagcgcttccgccccgccgggggccatgtttgttacccgagggggcgggcgcgagggggcgggcgcgagggggcgggcgcgagggggcgggcgcgagggggcgggcgcgagggggcgggcgcgagggggcgggcgcgagggggcgggggcgggcgcgggcgcgggggcgggcgcggtcctgcgcggggttttcttaaacggagccggctgggaagtgaggtcgccagagaggtgaggtcgccaggttggctgcgaaactgtggctgaagtcttccctttcccttaggagcagagcttctctgtggagttaggtgtcgggatcgggccccgcggactgacggcgttggcgcaggcgcagccgccgctctccgcgcgcctggcgcccgcgagcagactcgggcgcgctcgccgccgctgggtctcggatcgcaccccgcgtgcagttttaggaagagggacatccgcgcccctcgctgttccccgggaagagctaccacgccgcccctgaaggggttctgagcgcttgtttggcgtctgcttttcctctgctgttgattcgtgttggaggttttccatttcgtttaaaaccgatgtttagcccctgaagacgttttccctgcgagagcctgaccttggtggccatgggggaggagggcggcgggctgggcgggagaggctgggacgccccggggaacgcagcgccagacgggtgggcgctcctcacgtggcccaggaatagtagaatctggagattgtggcttgtttctgctaagtcccagacccttctttttttttttttctgttttaatttcttttggaagatttcacccacaccagtgtcgacaaaatgatgcaatgtgcgcagcggccatgctgagcccccagcaactcagggcctaccctgcatccctgctcattccctctcccacccgccacctccggacgcacagaatttcaatctgcaaataaatggtgcatttataatattccagtttaacccgcaagagccttgcggcgtagggagtatcattctcactttacagactcattttacagatggggaaacgggggcccggagaggcaaagggttttttactcagtaaaagtgcagttttcagagcctgtccacgagattatctcattttctcgcacatcggccatgccaggtaggtaggagtaatattcctagtccatttatgaggaaa

SEQ ID NO: 7640 - DNA, 6000 bp, Homo sapiens
ctatctaatttaatgctttttttttttttttttttttttttttagcgatagagtctctctctattgctcaggctagagtgcagtggcataatcttggctcactgcaacctctgcctcccaggttcaagtgattctcctgccttagcctccggagtagctgggattacaggctcacaccaccacgccgggctaatttttgtatttttagtagagacggggtttcgccacgttggccaggctggtctcaaactcctggcctcagggattcacccacctcggcctcccaaagtgctgggattacaggtgtgagccaccgcacccagccttgattatcacacatcaaactgataatgtgctggatacactgggttaaataaaatatgcaattaaaattaatttcacttgtttattttaatagggctgctagaaaattgaaaaggccacgcctggctccatttgtaggttacatttctttttttttgagacggaatctcactgtcaccaggttggagtgcagtggtgtgatctcagctcactgcatcgtctgcctcccaggttcatgcgagtctcctgcctcagcctcccaagtacctgggactataggtgcgcgccaccacacccggctaatttttgtatttttagtagagacggggtttcaccatgttggccaggatggtctcgatctcttgacctcgtgattcgcccgcctcggcctcccaaagtgctggcattacaggcgtgagccaccgcgcctggcctgcaggtcatatttctactggacagagctagtttaaagagtcctcccagctgggcgcagcggctcacgcctataatcgcagccactgggaaggttgaagcaggagatcacttgatcccagaactttgagaccagcctgagaccagcctcagcaacacagtaagactccacatggccatggggtggtgtgtcatcccaggacagagctgctgtttcaaatggtcccagggtgagtgggtgcgtgagttgtgtggggggagacacgggaagaagtaagcaggctggatgtggtaaagacaaggaggcagtgttcagcagttagaaacagttttaggggcgggtgtgattggggagtagctcttggacagacccccagtgtaacaggaatagacattgcccccactccttggctcagaatatcagttggtctacatccacgtcgaatcctcgcgctttagacttgcacacagtacttagaagctcattaaatcctactcctcaggcctctttttacagcggaggaaactgatgcccagagaggaaaaataaatataaactgtgaaagggtcacagaactgccctcgaaaaccttgtattttaaatgggcaaataccaaaaactgattgtctgcacagctgccaagcttgaccctggtatagctaatacttatgagtgaaaagtatgaacttgaggaaagaacacagccagcagatattacttttttttttttttttttttttttggagacagagtcttactctgttgcccaggctggagtgcagtggtatgatctgggctcactgcaacctctgcctcccgagttcaagcaattctcctgcctcagcctcccaagtagctgggattacaagcacgcatcaccacgcccggctaatttttgttattttgtagtagagacagggtttcaccatgttggccaggctggtctcgaactcctgacctcaagtgatccacccacctccgcctcccaaagtgctgggattacaggcaagagccaccgcgcccggccacagatatgactatagatcactggttcctactcggggtggtcttgtcacctagggaacatttggcaacatggagacatttttggttgtcacatctggggaagaggggcaagcgtggctggcatctagtgggccagagatgttgctaaacattctacaacatgcaggacacccctcacacaacaaaaactatgcagcccaaaatgtcagcagcaccaaggttgagaaaccctgctatatagactaactcacagcagtgctgtttgtcccagagcacgattcatatgtggtgtgggggggttaatgactggcctccgctaagcacttcattaaataggtgtgacacactgggtgagcctgtaagcacagaacagcctgctgaaagctggggagggagggcagaaaagttttcaagaagtggccgtgctgccgcccctactgggaagtgaggagcccctctgcccggccaccaccccgtctgggtagtgtacccaacagctcattgagaatgggccatgatgacaatggcggttttgtggaatagaaaagggggaaaggtggggaaaagattgagaaatcggatggttgctgtgtctgtgtagaaagaagtagacatgggagacttttcattttgttccgtactaagaaaaattcttctgccttgggatcctgttgatctgtgaccttacccccaaccctgtgctctctcaaacatgtgctgtgtccactcagggttaaatggattaagggcggtgcaagatgtgctttgttaaacagatgcttgaaggcagcatgcccgttaagagtcatcaccactccctaatctcaagtacccagggacacaaacactgcggaaggccgcagggtcctctgcctaggaaaaccagagacctttgttcacttgtttatctgctgtccttccctccactattgtcctatgaccctgccaaatccccctctgcgagaaacacccaagagtgatcaattaaaaaaaaaaaaaaagtggccatgctgggtgcggtggctcacacctgtaatcccagcactttgggaaaccgaggcaggcagatcagttgaggtcaggagtttgagaccagccttgccaacatggtgaaaccccatctctaccaaaaatacaaaaaaattctccaagcatggtggcgcacacctgtaatcccagctactcgggaaactgaggcacgaaaatcacttgaacccgggaggcagaggtttcagtgagcagagattgcaccactgcactccagcctgggtgacagagcgagaccctgtctcaaaaaaaaaaaaaaaaaaaaaagaagtgctctatttcaggagaaactggcactttctgagcctactctcccctaatgccagctctcctgctcaccccaccagggtcagagccaactttgcctccaattcatagtcctttaagtaagaatccttttaatatgccctaatgtcccaaccaaactaatcttgaaagcttctatgtagatacaaagtgctcctgaaatccctatcctcagaaatgcttctgagccaaatgggctctgaaccctaaacaaccgtgtccatgtatgtggcaagagcttgtgaaaaacaaagctgggccaggcgcagtgactcacaactgtaatcctagcactttgggaggctgaagtgggcagatcacttgaggtcaggagttcaagaccagtctggcgaacatggcgaaaccctgtctctactaaaaatacaaaaagtagccgggcgcggtggctcacacctgtagtcccagctactcgggaggctgaagcaggagaatcacttgaatccagttggcggaggttgcagtgagcccagatcacgccactgtactccagcctgggcaacagagcgagacttggtaagaaagagaaagaaaggaaagaatgaaggaaggaaggaaggaaggaaggaaggaaggaaggaaggaaggaaggaagggaaggaagggaaggagtctcgctctgtcacccaggctggagtgcaacggagcgatctcgactcactgcaagctccgcctcccgggttcgcgccattctcctgcctcagcctcccgagtagctgggactacaggcgcccgccaccacgccccgctaattttttgtatttttagtacagacggggtttcaccgtgttagccaggatggtctcgatctcctgacctcgtgatccgcccgcctcggcctcccaaagcgctgggattacaggcgtgagccaccgcgcccggctgaccaaaggtttcttggtccgcattctgcttctgtggaatgagccaggagccagttaggcctgatttgacatctgatttccggaggaaaacccagactctgccctgggcaacaaactgaatcctgaacttgaggtcacagggcaggtgtgaggagcggagagcagcaagagtgaaagggaggcctgtggtcattccatacacacaagagatcagttcctccaaggtcaggggacagagagcacagggatccagcgccaagcgcaaggcccccagaagaagccagagagtcggggagggggcgggggggaatcggtcccagcaggtgggaaggattctgggaccagacctaagggatcatgagcacagctgctgcaggcagacgggcccctggagaagctggggacaagctggaatagagacttcattgcgggaagggctgtcagggaggcctcctggggtggaaaagggtggtcaggaggctcctggaggcggcgcggccccgggggtccaactcacctggggcccggccaccgcgctctcgaccgccgcctctgcccgcgcagcacgggcacagctcgccagcactgcgaacccggatgggtcgtcgggcgcggccctcagcagagctgccttcacagatgtggtgcccaggtcaatgccgagggtgatcggccgcgcagccattatctccctgacccgcgcagctccagtctgcagccagcggccccacaagtccgcgctcttcgcccaggggggcggggcaggggcggggagtcgcctgccaatctttcagccacacccaacatggaggcttctcgtcttcccactggccggggaaggcgagcttccacgcaacctctcggcgggccccggctataggcggagaggcggcggaaggcgggacctaaagggggccccgccccacgggctctgatttccgcccaatggagggcggtctgagcttcgctcacgaaaggagccgggaggcgctggcggctccaagagtctctgtgtccctggcagcggacctcatcttccctcacgccggagccccgatctctgcgccccggcccgacccagctgcgctctgtccgtctaagacgcgcggaaactacaactcccagagctcatctcgccgagatccggccccacgagtcaggtggcggaggtcaggtgacagcggacccgcctctcccaaagtctagccgggcaggggaacgcggtgcattcctgaccggcacctggcgaggctcatgcgtcccgtgagggcggttcctcgagcctgggggcgctcaggtgagagcggacgcggcctcccctgtttcccaggcggaccccttgaggcacagcaggtcagcggggcagcctgccgggggtccagcgccctcagccgcggcgggctcctttccccgccaccagtgctggcctcgcgacacgggacaacccccgggtggaagggcccgagcggtggtcagccgaggcaggggcagcgggctgccggggtgggtgccgttcccagccccttaccttctgctcagttgccgcctgggtctcggttggggaatttgcagattgctttggagacgctgagagaacctttgcgagagcgccggttgacgtgcggagtgcggggctccgggggactgagcagcacgagaccccatcctcccctccgggttttcacactgggcgaagggaggactcctgagctctgcctcttccagtaacattgaggattactgtgttttgtgagagctcgctaggcgccctaagcaacagaggtaaccactttatatccttgtttctcaacctcgttattcctacctacccccttcccataaaatttaataccactagtacgctgtgtatttgtttctgtggccacaaaccattgtaatagctagatttcttcactaccaccccaagccaattttttttttttttttgagatggagtctgca

SEQ ID NO: 7641 - DNA, 6000 bp, Homo sapiens
cgcagtgccctgtagagttcctagattacctcactgggaatagcattgtgcgtgtccggaaaagggctccatttggttccagcccactcccctctgcaagtgccgcagcttccctcagagcatactctccagtggatccaagtactctctctcctaaagacaccaccttcctgccagctgtttgcccttaggccagtacacagaattaaagtgggggagatggcagacgctttctgggacctgcccaagatatgtattctctgacactcttatttggtcataaaacaataaatggtgtcaatttcaaacgtgtcctgatttttttctcttcatgtttacccatctttttttttgagatggagtctcgctctgtagcccaggctggagtgcagtggcacgacctcggctcattgcagcttctgcctcccaggctcaagtgattcttctgcctcagcctcctgagtagcggggattacaggcgtgcaccaccatgcacggctaattttttttgtatttttagtagagacggggtttcaccatgttggtcaggctggtcttgaactcctgaccttgtgatccgcccacctcagcctcccaaagtactgggattacaggcaacagccaccgcacctggcccatttttacccgtattttaaaggaaaatgtaagaaggcaagatcaaaagaggcagacacaagaaacaattagtaagcaatatattcctcatcttgcaaagaaattcaaattatggaaatgctttaaatgagcaactattaaaattatagactaggaaggaactgataaaactggtacttttcattcaagtagtgtaatctaacacaactctggaagtaacttggaaccaaatttttatcctctgctgtaggaacttattaattttctcaaaacaatataaacgcagacattcattgcagtattttttatagtagtgaacatttcaaacttactgcccaacaatagggaaatggttaagtacatcagctcgcttatccctcttccttttttctcctctcccaccaggctgaggactccctctgcttctcccttacaccaggaatgaacctttccttcccactcagaggaggttctgagaggactgaggtgggcaaaccactgaggatcttcagtgggggcagagaaagggctcactgagatggggggcaacgctatggcctcagcttctccttggcgtcgtgtgcatgtgttcctgaagccgaaacggaatttaacaggtctgggtcccagatccatttccatgactggccatgggctatctatgatctgtcaaaaggggacttggattcaagctctcagatccccttccaatctaaaacagattctttttttaaaaaaaatccaaatgtgattacgtcacttcagactaaaaacttccaaaggcttcccccatttgctctgaggatcaaggccagggcaaatgggagctcactgcagcctcaacctcctgggctcaagtgatcttgatcttcccattccagcctcctgagtagctggactacaggcgcatgtccccacacccattactgccctccatgatctggtctgggtctaccctgtggcctcttctctcactctctaaatacagtcacattccttcctgcccaatggcctggaaacatgcgctttcctgaaggtaactccttccccacacttgcctatgttattcaacttttgggtttcagatgtaatgttatttcctcagagaagacttccttgacctccatataccccaacttgggctaggtctgctatgtcctcttcatagtactcaccatgatttaagtatttctgaagttaggtgatgctggtttccccagttaaccataaatccaatgagcaccatcattttcattactgtaatttcttttttttttagacagggtctcgctgttgcctaggttggagtgtagtggcaaaatcgtggcttactgtggcctcaacctcccgggcccaggtgatcctgatcctcccacctcagcctcctgagtagctgggactacaggcacatgccaccacatctggctaattaaatgtttttttgtagagatgggcatctcactatgttgcccaggctggtcttgatctcctgggctcaagccttggcctcccaaagtgctgagatcacagcaggagccactacactcaggcaattaccgtcattctaatgcaatatttattcctcaattaaacaaatgcattttattcttttttttttgagagggagtttcgctcttgttgcccaggccggagtgcaatggcatgatctcggctcaccgcaacctctgcctcccaggttcaagagattctcctgcctcagccttcctagtagctgggattacaggcctgtgccaccacacccggctaattttgtatttttagtagagatggggtttctccatgttggtcaggctggtctcgaactcctgacctcaggtgatctgcccacctcggcctcccaaagtgctgggattacaggcatgagccaccgtgctcggccacaaatgcgttttattctaaaataaccctcctgacaagaaaggatcatggattaacacatggaggtgtttacaccctaaacctgcccaaagttcaacttcaatgtccaaacaatttttgtgttttttttgagatggaatcttgctgtcacccaggctggagtgcagtggtatgatcttggctcactgcaacctccacctccagggttcaagcgattctcctacctcagccacccaagtagctgggattacaggtgcccaccaccacgcctggctaatttttgcatcttatttttagtagagatggggtttcgccatgttggccaggcttgtctcaaactcctgacctcaggtgatctgcctgccgtcggactcccaaagtgctaggattacaggcgtgagccactgtgcccagcctaaatgtccaaacaatgtttaatcttccctagacatattctaaaaaatacagcttgactttattttttcttatggaaaggactgtcactaaatgaaatggaactaaaatgacaccatatatacctgaaagtagtggttagtgggagggaacgctggcctgtgaaaggtacacccagcaaacatatcaagagcaaattaagagacctgcatttgaatcctggctctgtctcttcctagctgtatctcctctgggagaagtatttaacctctctgagcctcaggttccttacgagggagctaacaataacatctaccctgtaaggttattgctaaaattaaatgagaggatcggtgtagagtagaagtcacaatgccagcatatagggaactcttttttttttttttttccctgagagacagacggagtcttgctccatcacccaggctggaatgcagtggcacgatctcggctcgctgcaacctctgcctccagggttcaagcgattctctttcctcagcctcccgagtacctggcattgcaggcgcgcgccaccacacccggctaatatttatatttttagtagagacggagttttgccatgttggccaggttggtcttgaactcctgacctcaggtgatccgcccacctcggcctcccaaagtgctgggattacagacatgagccaccgtgcccggcccagggagctcttaatacatattaactgttactgcttcttaggatgttaataagttctttccttatgtaggcccttagggcccgtttctgaatggcctatgtgtaaatacaaggacttaacacaaggctatggcccattccttgctctccaggagtcaaatctcggcgattttgcatcagtggcagcctaagcgttacagcaggaaagaactccacaaagtgtctcacgcttcatttaatctgaagaatattacaggctctccgtcttcagatataaattatttataacgttacagaacaagcagcgaattcaaccacttaagaactaaggaagtctacatggtgttaattgctggccacagtcctcccgatctggttttttaaaaaagtcccccgggcccccatttcagtagacgtgcaccatgccgtagaggaacgtccagaacaggacgtaggtgaagaggcccccgatgaggcctcctgtaaagagaggtctccgtgatttgaaatatttgttccacctccttcccgccttgagaatgaggagcagggagagcaggacggaggcgagcaggtagaagatgaagccgtagaggccggtgaggccgaggatgccggccgtggcccccgacagcgctgacaccgaggtccggcaataatccaggacggcggcgttgccccgcacggccgcctcgctgatgaacggcggcccttcccgcttggccaccaccgcggccatcgcaccagcccgggctcggcctctcgctttctcgcggaacaacgcggagctgcggagaaaaccaagttacaagtggcgcccggagctcggtgagttgggttcacgccgccccctccccctggagcttccgagacctggcaccagtcctgggcctcggatcttccaaagacgccgaggagattgagggtccgggccggccgggaggtggtggcgcgtctgcgttccccggccacggtggcccagttacctggaacacggcgccggacacactacttagcgttccctcagacgggcagtggaagaaatgcccgcggcgccatcttgctcggaagactgccgggaggtctcgggctgcgcacgcgcccagatcccgccccgccctccgcgcctgcgccgtgggcgccccggacacgctccgccctctgcccgcttttctgcgcacgcgcagggacttccgaaagcggagtggcgctccggccagtgattggctggaggtttgttaactattcatgagggggcgggccgagcggggcggcctttgttaagcagcgagggcgcgaccgcgggtactctgctgccggcttctcggagcggcgctgggcgaccagagcagggtcgagatgtcctacatcccgggccagccggtcaccgccgtggtggtgagtgcgcttgcgcgggctcctcctcgtcttggcctgaccccacctcgcagagcgggaaacggacaccccaagcaggttgacagagcatcgaacccggggctcctgcgaaccggcggcaagggctcgggtccccgctttgccggagcgggccgcagttcccccagccacgaaacagggatggccgggacccgagagcctcccgagaccctggacagagcccagactgcgtgcgcagggcggggagggccacggggaaaggcctggctgcaggagcctggaaaagcgcccccttcccgggcctccgtgtccccagacggggagctgctgggggcgggcgccgatcccgacgtccatgagtcgcagcctctggaatgaggaaatgcttcctccgctgcagcctgcgccgccgcccggagggagatctgggggtggggctctcccgagcctgccgtggcagcccctgcccccttcctgtccagccttgctcctccaacccactcgccgcctggtccagggtggacgctcgtatagctgcgatgagcgtttcctcttcgaacttttcctgggtctccagcccttaaggcaaaaaagtccaggcctccctcctggcacttgagtcctgagtagaccctccgggggctagcctaggcccctggccgccctctggcttgttttaggtgctgggtgctattagactaggcagagggaggaaggaaggctgggacgttagactcagacgccggtgtcacagagggacacaaccctatgacagaggtggggagtcccagagagaagtgctcagccagaaaagaccacctcaggaaagactcaggtctcctgcctacctcccgacagcgttcagagaatgagaagaaatgcctgcccggtgggcagtaggtcaagcgaaagtccccgccctggagccatagggactgggtgtgttatctcag

SEQ ID NO: 7642 - DNA, 6000 bp, Homo sapiens
acaatgaaatgtacgtatatacttcctgagttttgataaatgaacatacgtaactaaaacccttatcaagatatagaacattactctagaaagttccttcatatgaaaatatggaatgcctcatgaatttatatgccgttcttgtgcagtagtatttatagaaaaaaaaaaggtttaacaaggcttgttttctctaaaaaattacctggtcacaatagctctcttttttagtgtgctgaaggaggcagctgaattatacataaagttgagatggtcatttataagattcactagaacagggttctgcaaactgcaaatatgtctgccatctgattttgtgaatgaagttttactggaacacaggtaagctcattcatttatgtattgtccatggctggttttgcactgcaactatggcagagttaagtaattatgacagacgaaatggttgggaaagccgaaaattcttttggctctttacagtaagtttgcccacctctgctctagaagatgatttggtatctttcactgtttcagataattaatgaaatgaataaacacacaccaatagaatatagaaacaaaatttatgatcaaagctgagactagttacactgaggccaatctaactgccttctgagagtcagcagctttgttttactaatcacagtaattgtgtgtgaggcgtggggtagatgtaatgaataaaaagtccaataaattaaaaagcactttaagttctttttctcttaatgagatagaacactacaagaaacaaaggttcatttaataaatatattgaatatgtaaaaatataacctaattccctattttagtcagaggagagataagaagaagaaaaagaagatgtagtggttgggggtagaaacaggagcacacaaaaagaaaaaatctacagacaaagtagactctagcagtgtctagaacaaaaatagatgctcaataagtataatgatcgaatgagtataaattaaagggcctttctcacttattctgcaggctttaaactcagtcatcatctctcattagtgtcctttgaaatgtaacttgtctgcagagttcactcacttccctaagaatgagatgcagacagggaaggagctctcctcagggctagataaaatccagaggactgtctggtctgtgtttaaaggttctaagtagctatttattttgtttctccttccaaaatatctcattcctacagaaggtcacaggagactgtaatcctgtatacaattattggccaacataaatcagttcagaacactgtagaatatgtacaacttcaggacactgtggtctcttctcttgggaataataaacatctcctaaattacacagagacaatttctatcatggggtaaggggttactctgtaaaaatgcactaatgaagaaaagaagatttattatcacacagattcagtgtgctcaatgggaggatacaaaattaagagacggaggtgcatgtttttaaagatatgtaaatatagcagtggttctccatctttagaaggacctgtagggcctgttaaaaccaagactgctgatgtccagcccaagtttctgatttagtaggtctggggttgggctagggttgccagaaaaaaaaaacaaaaaaacggcaatgcctagttgaatttgaatttcagagaaactttttatgttccaaattctgcaatattttatttttatctgctaaatctagcaaccctagaatttgcatttctaacagattttgaagagatgctgatgctgctggtctagggaccttactttgagaaccactgagatataggatattacgttatcaccaaaaaggaaaaactgggggaggagggaagctgagtagatcaggtaagagttcctgaaggaaaggacaaggacatgggatgggtctttaagggtgcctagaagctagccagaagaatactgagaggaaagctttgagcaaaggggcagaaatgtcagaaaatgcctgacgttttaaggaaattacaagaagcttagtgttgctggtgcataaagtttaatgcaggtggtggtagataaaactaaaaggacagaggccagaaagtactaggaccttatgtaccctgtgaaaaagcacttaggggtttacactgtaaaacagtcagcttacccgatggggagcaatttaaaggattttaagcagagcagggacttgatcagatttgcatttttagaaagatcatttgggtggaggatcagaagcatgattatgtgttcaagagtatttgaaatacggttatttatggaaaccatttttaatataattctgcacagacacagactgctggaggctacaccagagaagggaaggaaatagaacaatactcaattcattatgaaatttatttaaagtccctgctaacttggctctcactgatgccagaaggacagcatttaatttttaaagataccaaataaaaatgcatggttacaaaactttgtagttgtctagaatacattattttgaacatttattcttaagcctctttgataatgtgtaaaattatttaaaataagacttaaaaacaggtattgacattataatagcgttcatgctaatgaaagaatttctgcaaaaaaaattaaaaaaattaaaaagcagcttcctatttactgcctatttcatttcttaagcatgtttatgcgcctttctacttgtcagaaataaaacccattacaatgaagatgtccagacttaaggctcaaaggaggctaagtgttagtccagagctggaaatcctggaggccagtcctattttaccagagtggacctaacgggctttaattttctcaactgtgaactgagttagaatagatcatttgcaaagcagcattctcctttaccaatttccaacatcagcaaaggacatcttcacctattttcaaacaatatttaaggacaaaaatgtgttgtccagtgtgtatataaaagacattaaaatattcttggcttaatcaaggtcacttatctaagattctacatgtcctgaaagaccaagcgtcaaaaggaatattcctttcagtgttctttttgagtatatttcgctatggtaccaacagctatattagcaaaagacataaaagtgctgccttggaatgacacttgttttcactgcacattcatagtacaaaacctgtgacccatcagttttgcggctgaagggaaaagttaatttgtccatatttcatttttccttatttaaaataaggagataatcgataggaacaaaagctaaaatatacagtggccatgaagcaggcaccacttagaaacctctgtattaacgttaggagccaagttttattacccaaaagggcaggctggctgaggagtggaggctggatgcatcgtctcagcaaatgactactgcaaagctgccacgcttgcacaaactcagggatgtttatttattagcttgtttcctcaaaatgagtttaggtcatcagcagagattaaagcaggcctctacaccactctatgaaatcctgattcccacggcgcattctgggacagtgagtgtccacgaagaccatacctgtaatcgcaaagcttgggttgacagccacactgctgcttgcaaaccatacagtaactgcacaggggcacgttgccccggatccagtggtggggcatggcgtccaggaccttggtgtcattcttgagcataatctccttgcactggaagcgcttgtcggccttcctgaggcagccctcgtccacgcggagcccgcagcagtcgcagaaggcgccctgcagaatgtgctgcgcgcacacgcagcagtaggtgggctggctgaacaggtccgtgtcgcgccacccgtgcttgctcttgcggaagatgtccctgcggtgcagctgccggcgcgaccgctggaggctacaccagaaggtgatgaacaccggcagcaggaccgagcacagcgtccacaagatcaggtgcccgtccgcaaacaggccctcggagggcgagcccggcgccggccgcctctccgcttccatcttctccaaggacgatacctaaccagaaaagaaacaggcggtgcaccccgagctcgccatcccttccccgcccccttcctgcctttccggggccaaaccgggcgccctcagtgaaggtggctccgctctcccgagggcgggactgcgcctcgtccccccgtctcccgggacctgccgcgccgagaaggcgacgtccagccatcacgctccaatccccactccccaacccgccccacctcgggagcgcgtccaggagcccaaggcggctgctgctgccgccgccgcctcaccttgccgccggtctgacccacggaagggcgcaacatacaggggcaagctgccctccaccgaaaggccgggcgttcaggccaggcaacgccggtcggcgcccgtaaccgtcggcccaggcctcgcactcccctccggggcgccgtctcctcccgggccccacccgctcccacgcgcggcccggcgaccctagcccctctcgggaggcctccggagacctgcgccgcgccggtcctcgaagccctacctcgcgcgggtggaggcgcggctccgggccagcaggccttggccgcctcgcgcaggaggagaacgacgctgggccgccagcagggatgaagccgggcgggggaaacgcttaaggctccagccgcacgcacgccgatccggcgcgcggggccgcgagctggaggcggggcctgtggcggcgagccccgtggctgggcggagccagggctgacgggcggggcggaggtgtgaggtgggaggggagacggaccggcctgagggggcggggccgtggaggaggctggagacggatggaagaggcagggcactgcggctgggggcggggcctaggggaagggggcggagtaacagtggggcgtttgagaggatggagggttgaatgccaaaacttcgtaatcgtagaaaattctggaaagccgccggcggggcaaggccacgaggatcctcctcgcagcaccgcgccgcgcggggcccaggggccgcgctcacgcccgccgctcggcgcagacacgagtgcccccgacttgagccgaacctctagccgatgccggcgccgccgccgccggggatgcgtaagccgactgggaagcgagggggggaggcggcctgcgcggcaccgcccgacctggccgcggcgggctgaggtaggtgtggcggccgcagtaacgcaaacctgagggctcctccgctgcggagcggcgggcgggcgcggaggccgagggcgagcggggcagccgcccgctcgtcgccgctgaccccgagcccggccgcggtttccgccccctgccgtggcgggcgggcctcccctgcgctaccccctcgcccgcgcccgccagcgcccgaggccggggagaaaggggagcagcgggagccggggactaccggagatgggagcacgcctcctgctgctgtcgtccagccccaggttccggaggaatgctcgctccccgctggagtcctaccagcccaacacggacctgagccgcgaccacgcgggctgcagcctgcagcacatcagctacccggagaacgcggacgcggaagcaccgctgctcagcacccccgaagaaacacggaatccagagaggcacaggcaccgccccggcgcgcacagctgcactcagcggcttccttcctactacatacatacataggagtgggagccgaggaccacttgttgcttgcggacttcctctagcataaaagatggaaagaaaacacacaccgaagcaagggaccaaaggaacagaaaagaaacgcagagatcataggaaaactgcaaagaaatacttgataatatcttccaaacgattagagaagacataacattcattaagaatacacatatagatgtatatatacgtgtatgtgtgtatgtatatattattatgtgtgcatatatatgcatgt

SEQ ID NO: 7643 - DNA, 6000 bp, Homo sapiens
gcactgagatctgtaggaagtcatcaggtgggtgaaggaccaagtaacaatatgttgacatctgacatttggagaccaaggacaaaccagcagggatctttatgataataaacggcttcaaaccaaaagggctttctaagggcttagcatctggacctttgcttcacgctcctgtccccaggtcctttctgaaggtcctcactcaaactgtttcaaaactgttcgtccactcccaactggcagactagaactcacttgtagtatgccatggagacaaccagtagataatttgtcaccaaagctgttgggtttatggactctggaagactaagctcaaacatgttatgctttagagatttacaagttgagacaattaagcttttagagttggagaaaaaaaaactttctaggccggcgctgtccaacaaaactttcttcgattatggaaaatgttcttgacctgtactgaccaggacggcagccactagctacacgaggccactgagaacctgaaatgtggctaatgtcactaagaaatttttttaaaaatactttgaaaagtttaattagtcacacagctagcagctaccctacagacaaggcagctctaaactccccacacccaggacaaatttaggcaaataaagctatctttaaaaataaaaaatatttagaacagtagcacaccttagagctaagaacttgagatgaacagtgagttgttttttttccccttaagtctttgacatgtactacccattgagctgtgctccccagcccaaacacatcactccagtggcccctgggcacgtttggtctaactccaaggctcccaggaccataatctgaatactgataattttgaccaaacctcttttagccactgaataaaccaagatctggaaggccaaccagcctgcctagaatcaccgccaggtttcagctctgagagctgcagcaagtcccaggctcttgtcagctaagcccagcagtgaaacaagcctcatcagccctaggttatacatatttttacttccaggactcacctcagggcccttctttgctcccaagtgcaactgggccttagtgacacctggctcggtgaacacaaccagccaccattacagaacagggaacacaatgtttaccactgactgctgcaaactatcaaaccaagccggaaaaacaaccagatggtgaagacccggacagaatgtggacaaggctgcaccatttagtaaaatgaaaaagttaaggcaaaggacaccttgaaagctatttattgctggaaagctagttctcagaatgctgaatgataacacacacaatgttaacaatctacttagaaagcagcagaaagattaggagaaaagcccagggatttaagaatattccttggttcttctcacaaaagccatccagaggacctagttttaactccacacccacgcttcctagttcctctacccctcaatttgaatttgtgtgacagccactgaaacaatccagaatgacctccagcttcaccctcactgttctcagaggtgtgaggattaaaggattagtgtgctcataactcacctagcacagtaactatcaagaaagaggcatcctctcaagtttagctcccagctcccccactacctgtttctccagccagactctgtcctacttcaaacatgctcactgatgatgttttccacagcccaagcttcaaattaggtaccaaggccaggaggttccttcagtgggatgccacatgtgatgggaacttaatgttaaatgatcataaaagtgaaaactgcctgaggtattacaccaggaaggaacatggaagaaacagaacttgccctaagaagcaagatttaggactaaaatacaccccccaccataaagatgagcaactctcaaacagtatatgagatgatttcaatgggacaagatgcccacaggatctactacctccccatagtggaagaaaacgcctgagaatgacaagctgaaggtattaactcatacctgaaacaactgacttccccacaataggaaaacagaccaagctacagaaaggcccaatcattcagactcacagggaagattaggaaggagtgacctaggggaactctacggccagctctctgggtacattggctacaagctgcctgctcttcaaagccctgaaatgcacacacaatcaagtcatgttgcaggctgggagcaggaggctagccagcaaagcttagggaaaccaattcgtttttcctcccaaacaagcttctgggtcagaggctaaggagaggggtgcttttaatagaattcaagtcactcaagtaattcaagagaaacaaagtcagtctcagggattgttcagggaggagaggggaagagcaatgcttaagcacctatcacagtccccagtatcacaaatatgatctccatttgtctttaggacaggaaaagggaatactgtagaggctaacaccagccttcccctaaaatatggctgcaacccagcctatgtccaaagctcaagaataatttgggttaccaggcagcaagataaattgcttttaaatattgatgttcagcaaccttacactggagacatatcgacttcagcacctgagcaggccacttacaacagacacctccactgtcaccctgcagtggccaagtgagaatgcatttcctagaaacaactgggagatgggagagatattcctacaaggaactagacctagacacaaatccattagacctgtctcactcattggctaggatctgttacctgcaagttctgagccatcatctgacaacatgcatgaagacagagcctattaatccagtaatggactcaagctttagtgatttgcatgcctgtaggatccagaggacctcctctaacctagggccatatttcaaagagaatacacccaagaattatgcagaacctacaaaactagttagaggttaaagaaaagttcaacacaagtcaaaaggttcccaaaacataacttcacttgcttccagtgctcagggtcttaaataatcagcaggtgaaccacttcaatgccaagatcagaggaattatataaatgatcaagtcaggcagccttcttcatttcaaagatgttctgtacctttaagagcaaagtggatgggtggtgctaagagtccaagctttgctttctaaataaagagttaaaaaaaaaaaaggtactaatttgggaaggacttagcagttacaagagcttgtaaggctactagttgccagaattaatagctttttgtgaacggtgttccttgatcagtaactaacagatactgttgcaccaggtccagcagcctagatttcactggagacaaatctaaacacgaagtaacgcgcactacagtaggggaaagatacccaggttaacctcactaattgccctgcgcatacaccctacccagcttgagaggcctcgactcgcacctggagcgaagtccaccgggtttgtgttaacggcggcaggaaggcgccgccacccaggacatcccccaggagaggaagatcccgaaacgcccagggctcccatgccgttccgagtcgccacagcaccgcctaccacgatcagcacctttcttctcctatccctccctggaagggaaacaggaagaccttcagctagggcacaaaagagttgaacgccagaaagcccgcgttcgaggcatccagccactgcctctcctagcacatcgtaaccccaaaactggcgcggtccctccagatcgcagaccccgggccctgggccgcaggcggggccggacacgtgaccgtcggggcccccgggcgtgaggtcggcagacaccccaggctggacggcctccacccctccggacacgcctgcaggggctacgaatgcaaattccccccgagacgcccctgagcctccgacctccagaccccaattcggttcgaacggtccctcagcccgaaacacggttggatcacaaccggccgatgtcccggcccatcttcccagttcccctggctcgccgcacggaactcccaggggctgcgccggcgggcgagccgagggtgagaagttgggcgaggctccagaagtgaaggggcagctccggctcagactgtgtacacacgacctttgaaaagtaaacgcccgcggggctgggcgaccttgggtgggacgcgctcgggtcagcctcgcaggcgggtgtgcacgctccggttaagttgaggtgcagagaggcgacccgggcgtcgcgccctcgccccccgcccccgaggacagtgacgcgcgtggggaggacggcgcggccgcagagcgccgcccagagccgcgcacacgcgatctgtcaggagcccgcgggcagacaaccggcggggaaggacgagagggggcgcagacgagggagggaaagatgggcctgcctgacagcgcgcggcggccgagagcccccaggacacctctgcgtccggagcgtcccgcccccggggtacctggagggcgcgtcgcaccctgcacctgcacctcaggctccccatcgccccgaccccgccgccttcgggtctccggcagggggtccccggcgcagctgcccccgacctaccagctcctcggctaccatcggggtgcgggatgcggagtccgcgcgccgccgccggcccccggctgtgccccgcggcccggcccgcagcgccgcgcttccgcagctcccccacgtgctagcccaggcgggtggaacacagagacattaaatactgaagacgcgcggcgacgtgcccgcagcgcgacgcaggccccgcccctcgcccttgtgcccgcgcgctcccgagcccgccccgctcacctgcgcgtgcgcgccgccggccgctcccggcagtgcctccgccgcgcctctcccagctgcgccagagggggcgcggtctacagcgctgggctaacatcccgccgccgcccggagccgggtcttgctcgcgctctcgcgagagagccgtcatctctccggtgcccgggagaggggccgggcgggacggtacagcaaccggaggaaccttgattccctgccccgcaagcccagcaccggttttgccgccttgtctcgaagggtcaaccaggccatctcctgcctcgggacggagagcgccctggaaaaggcggaggggccggtgaggagcagggcttccctcgcttcggggctttgagcttccctgtgaccgtcatttccttgtagcgtataattgggttggccattaataattgctcgataactgcataatggtgaaacctggtaccactcaaatgcaactttcttgctcgttttcacaagtcgatgttatcgaaatgaagcacttttctctgaattggtgtgggttttggaatgatttttgcagagatagtcacggtgagtcactatctctgccaggaccttgggaaaataaattcctccaaaataaatggagagggtagggttttggctgtccagccctgctgtcatccttaaaacaaagtgactttaaatgaacatttgtttggccaaaatatagaaaatagatcatgctaagaactaacaattacttgggaaaatgcttaatcttcactagtgatcaaatgcaagtttaaatgacagatgccatttactatacctaatgagatttaagtcaaattcatatatatatgaatcccaattgcatggtgtggtagatgtcaggaaggaaacaaataggaaactgacataggaaagaaagaaaaagagccctattttttatttttttttttttgtgagacggagtcttgctctgtcgcccaggctggagtgcagtggcacgatctcggctcactgcaagctccgcctcccaggttcacgccattctcctgcctcagcctcccgagtagctgggactacaggcgcctgccaccacgcccggctaattttttgtatttttagtagagatggggtttcaccgtgttagctaggatggtttcgatctcctga

SEQ ID NO: 7644 - DNA, 6000 bp, Homo sapiens; identical to SEQ ID NO: 776

SEQ ID NO: 7645 - DNA, 6000 bp, Homo sapiens
caatataaaaggcaaccatttaaagacttgcatgctaaatgaactcaaaggccttagggcaactatgagacgtgtgatcctataggaataaatttgctataaaggccattattaggacaactgacaaaactgcaatataagctgtagataaaagcatcagtattaaatttcctgagtttgataactgtactgtctgtggttacataaaacagtatccttgttcttgggaaatatatacaaatattaaggggtgaaatctgcaatctattctcaaatagttcagaaataactgtggtgggagaggcaagaggatgggggtagggagggggaaatagagaatgaaggacaatgcaaatatgatttaaaaaaaaaaaaggtcgggcatggtggctcacgcctgtaatcgcagcatttcgggaggccaaggcgggtggatcacgaggtcaggagttcaagaccagcctgaccaacatggtgaaacccccgtctctaccaaaaataaaaaaattagccaggcgtggtggcatgcacctgtaatcccaggtactcaggaggctgaggcaggaaaatcgcttgaacccgggaggtggatgtcgcagtgagctgtgatagtgccattgcactccagcctgggcaacagagggagactctgtcgccaaaaaaaaaaaaaaaaaaaaaaaaggtcgggcgcggtggctcatgtctgtaatcccagtactttgggaggctgaggcaggcagatcacaaggtcaggagatcgagatgagaccatcctggctaatatggtgaaaccctgtctctactaaaaatacaaaaaattaactgggtgtggtggtgggcgcctatagtcccagctactcgggaggctgaggcaggagaatgacgtgaacctgggaggtggagcttgcagtgagccgagattgcgccactgcactccagcctgggcaacagagcaagactccgtctcaaaaaaaaaaaaaaagctgggcatgatggctcatgcctataatcgcagctactcaggaggctgaggcaggaggagcatgtgaggccagacatttgagaccagcctgggcaagataagatagactctgactcttaaaaaaacaacaaaaagatctccccataccccaaatatgacaaaaataacattgaaaattggttaatctgggatatagggagttctctgtgttattcttgctcttttcttgcttattttgaagttttaaattacttcaaaataaagtttttttaattaaaggcattagaaaagatacttaactaaaagagggtaattgaatttttgtatcacaaaggataaatgcttgaggggatggataccccattctccatgatgtgcttatttcacactgcatgcctatatccaaacatctcaggtcgggcgcggaggctcaggcctgtaatcccagcactctgggaggctgaggcaggtggatcacttgaggttaggagttcaagaccagcctggtcaacatggtgaaaccctgtctctactaaaaatacaaaaaattagtcaagcatggtggtgcacgcctgtaatcccagctacttgggaggctgaggcaggagaatcgcttgaacccaggaggctgaggttgcagtgagtcaagattgtgccagtgcactccagcctgagcgaagaaaaaaaaaagaaaaatctcatgtaccccataaatatatacacctactaggtacttacaaaaattaaaaaagaaaaataaataagattaagatcacccatgagttggtaattgttgaagctggatagtggatgcaaggaattcactgtatgtactattcccattacttctgtatgcgtttgaaatattgtttaaaaagggacatttaaaaaaagagagagagagcaattcctctttctactagctgaaacagagttgtttcacagtcacttcattaactagtacagccattacaagctttcttactcagagccaaagctcccagatcagggtgccctggatttagggacagtcccctttacaactgaatgccttcagtgggaccatgccaagccttgtagaaagtggactagacccacttatagtcccaatgccctacaaaccacaaagatgaggcaagtaatgatacacctgacaatgaactagagaatgaattaggtcagctgcaaacatttacagggaagcatgaggccagagtcttaaaagaaatgaggccaagcctttattatttttgtacaactgtgagttcaaaccaaaattaaaactataaataattgaatgtcagagatgtcttgcttcttcagactacagacactcactgctagcacacaaacaaatgtaaaaaaaggatcgtgacaattctggagattcggaaagaactcctgaagttatctgcaaagcggagctacctatcttccttctcacccaggaagctgaacaaagcctaaggaggcttccttaatcatgactccctcagacaagactggtagtttctgctctgtttcataaacctgaaactatacctgcacatgcgcctgatgaaaatgtcaaacaaaattgaaatctgtaaaacaactttaaagattctacttgcattttgaaaatccccaatgcaaacagtgcgcttaccttcttctgccaactccttagtgatgatgagtttcccgtggcggaggtagttgaggataggaccaaagtaggtggggtccctgtcaatcagataggctcctgtctcatcctgccaaccaaacacaagggtatcattgtggacctttgaggagtattttaaacaaaggcagggcaggatttcaccatctttgtcagcgccccaagacaacaattcattccatcagctaaaaaagactttagtgatggcaaattttgttacacatttgtcacaaactattggtaagaaagctatagctttatgtatcttgtacattaagatcatcttaggtagggtgttacagacagtcatactcatttaggcgtttacttactggctggaatttgcaatctttgcctggacaataattacagtgacaaacattcttctgtagcgtgtttgttattaagaaagggagaaaatgccgtagctgtgtaactgaaatctttgcttgagatggacattctgacttttccactgcctctgaactgcattcctaattccaagaaaacctctgtgtagttggcaatgctcctgagctcaaggccaacatcagtgggagtttgcactgccagctgtaatctcacacaccccagctctgtgcccagaggaagctcggtactgccaggacttggctctgagcagctttaatcctactcatctttacagtaaaaggaacaagaagaaactggcttctattaccacaaggaggatatagagtagataaaaataattcctttataagcaagggttttgaaatctctttaaagttagggcaggataggtttccatcaatctgagatttcttagagaagaggaataaacgaaaacaacaaatgtttacgcaactccagctctgttttgaggtcaccagctgagtgctatatgggatataagatggtgtgagttatggtcagtgcctttaagttgagaacttaaaggtgaatacgtaaagttaaaaagaaattgacacagttcaaactggaaatggtttaagtgtcttgtcacctctcaaccctttggttagcagccatgcatcctgcccaaaattttcccgggaaaattttcattttccttctgtcttagcctagatttgcagcggcaaacagtaacctctttccaaaaaacgcatttgatctaaatatggacctaaaccagtgactgttaacagataaaagttctgcgaccaggactatagaaaagcagtgtgatatcacaaggagcgcttcctgcagctgtggaagcccaacttggcagaggggtccgagagggagtctgagaaagctacaaggatgcctgagctaaccctgacccagttctggatgcatctggcaccggcagtggggggactgaagaggagccagggaaaactcatgcagatctcagtgggatgtcaggggcagagaatatggagaaggggtgtggagtgcgttctcgtgggtgcaggtgggcgcagtgtgggaaggagtctcagagaacgaagggcggggtcggggagaaagccagagtatgcctcagcatggaagaaggggagtgggaggtccctctgaggcccctgcgagtagtgtgggagggagggggaggatggggtcccggcctgagggggctgcctgtgaggagcgtgtctcaggactctggggaccgatctacgagaaaccagggggttcgaaggcccgggggcgcgcccgagggcggggcacaccttgtctgagtccagctccgggtcctcctggcagcagaggcggcagagaaatgacttgggctcccggcctaaggtctgtctggtggtcacgaagtaggtgcctcccacgttcagcctgacccagcgggccgcgccgccgccccctgcccgctcgggtggtccgggacccggctccagcggctgcgcgacggcggcagccgggcggccgtgcccgcggggcgtggggccagccgggcgtgggctggggggcccgcggactgggccacccccgtcgcccaccccactcccgccgccccctcccagccccgccatcgccgggtccagctgcagttccgccatcttggaccgccgccgccaccgctgctgcccgcgcgcagccgggccggcccatttctcggcagggagagccgggccggcccatcggcgggggtggggcagaggggagagggacgggagcgcccccaaccagcgcccggggacccgcgcgggggaggcgctgtgcccgcccccgggaagatacttccggaaccagccctcatctctattggctgatctgcgaagcaaggcccacccccttggctttggggttggctgaggaaagatcttcccgtgacccacttccgttacttgctgcggaggaccgtgggcagccagggtcggtgaaggtgagtggggcttggggcattggatccgatccctggagggctcctctgctctgccctctccaaacctcacgccgacccttgtcacgcccccgtcaaggacgctgggccctcggcttgccccgctggcagagtgtcccttgtgtagctgccgctcctcgccccgcgatcccttcctcagccctccttggcgcgcggggtcaggggggcccggctgtgtcccaggcgccgctgatgtaggcgctgccacaagccgtgtctcgtgcagtccgctcccagcgcggcagacttcaatagtttggtggggggactggggaaacattacgcagacagtgttaacctgccgagggacgctcagctggctgcggggctgcgcccttccccttcggcagcttccaggattcgaacgtatagagcgttcagggctcctcgggtgcagagttcggttactcattcaagaaagattcattgagcacctcctatgcgcatgatctgttctaggcgctggggattaagcaatagatttttaagaattaaaaaaaatttcgccgggcgcggtggctcacgcctgtaatcccagaattttaggaggccaaggcgggcgaatcgcgaggtcaggagttcgagaccagcctggccaacgtagtgaaaccccgcctctactaaaaatacaaaaaattagctgggcgtggtggaaggcccctataatcccagctgctcgggaggctgaggcaggagaatcgcttgaacccgggaggcggaggttgcagtgagccgagaccacgccactacactccagcccaggcgacagtgcgagactccgtctcactcacacacacacacaaagttatttgtgacttccattttccactgatgttgcgggaaatcagggaccccaaacagagagaccggctgaaaccatggcagaagaacgtggattgtgaagattttatggacatttattagttc

SEQ ID NO: 7646 - DNA, 6000 bp, Homo sapiens
ccaggcgccagaggcctcggtgtgaggaagcagctggcagacctcagcctctgagcagatggggctgacacagaggccagggagggccccccgagtggggcgtgggggccatgcaccaacctgttcccagaccctgagttcaaacctcacgcctgcctctacttgctggagccaaacaacgccgcgtctctgtgcccctgaccatctgtctctccctttccccacgggacctgcccaccccaggatccccggttcccgtcagcctccaacaggcaggacccggcaggcctgacggtggcagcgtggtgttggggctgagaacacaggggtactgcggggctctggccacgcccctccttccagtcacagccggggagacgcggggggcagccgctccagaaatgcctccaaattcagagcgggctccagaccccctgcagccatcctctcccccggttagagcgcagcctggcctcgcgtctacggccctctcggggacgccgtcccggtgtgacgtgcaggacggcgtgcgatcagaggctgctgcaagcaggctccggggcacttgcacctcagcctaagctcctttccagaacccctctgcatcctcagcggcgccttcccttcacagccctgcctcaccccagaggagcgaaccggctcaggatctgcagcctgactgaaggagctcaggagcaccagggtcgggcagggccagactccggcaccttccgcctctcagccaggacaggacgggacaggaagccagccaaagtggccagtgagggcctttgagaggcctggctgtccaccgggatccccgggcaggttctcagctgtgtgagtccagggagtctcctatgagacccaggtctggcccacaggttgggacagaaggggagcagcctgactacatgggacactctttctccttgacacctgcaacagcatccccactgcatcacagtccacatcacagtccctgcaggtgtccccagcacaatccctgcagatgtccccggcacaatctcctggggatctggagggcttttcctcctctgcccaggaaagcatgaagccctcgctctccaaaacagctcttatccccgccagacacatccgatcttacaagcccccgctcagagccctcccaggcccctgcctgtgggatgtggccagcctgccctccggaccacagccactctcacacacgatagccaccacctgccctgcccacccagtggcatctactcaccttccctaagacagcaggtgcccaagccctgcctcccggaagcttcccccaggccccagggtcgctgtcaccttggtcctccagacacagcaccccaggccggctcctgctaaaccctgacctccctggattggggctcacggccctgtctctccgactcatgagtgcgagcttgcgcagtgcagggaccaccgatctgcacctgcacattttccgccacacctggtgctgttctgtcatcagtgcccagtaaacacccggagaagcaaaggtgccagcctgggtggccacccgcatgcccccgtctcacccaccttcagcaggtccttcagctcctccatggtctgcttgttggccacctcatcatgaactgtctggccacagttctttaccacagattccatgacctgcagatgcccaggaagggaagggttgggccagtggtcagggcagggcccctcctcctcccggacagacccacctccctgtgggacagcagagcccttcgacaggcccgtcagtggccggtggggaacccggtgggacagcagagcccttcgacaggcccgtcagtggccggaggggaacccggtgggacagcagagcccttcgacaggcccgtcagtggccggtggggaacccggtgggacagcagcccttcaacaggcccgtcaggccagtggggaacccacatctgagactcagcagcctgcacagcaccgctccgtgacgccaagtctcactgccaagcacagcaatgacatccgccttctggtgtttactcacgcaggaccggctgaagaagtggtgcccactccctcccctatctcctgtctctccctcagcgtgaccctctcctaggtggcactgttcacacaggcactcaaggctgagtggaaactctcctgcttgatgtatgcccagggaggtgggcaaggccacaggacaaactcttctcatgctgtcgtgactagtagggggtagggaccctgggggccactgaggcacgggggtctgcttacctccagggcatacaaggcgacgtgtgggttcttgtcgttgactttcttcttgatggaattcacagcatattttgctctgaaaaggaaacattgataaaagcagagaaaaacgggaaaaaaatagtctcagcaactaagatgagaaaagctcatctgctgccaggtgcagtggctcacgcctgtaatcccagtgctttgggaggccaaggcaggaggattgcttgagcccaggagtctgagaccagcctgtgcattacggcaaaaacccatctctaccaaaatacaaaaaatcagccgggcgtgatggtgaatgcctgtagtcccagctactcaggaggttgaggtgggacgatcgtttgagcttgggaggcaggggctgcagtgagctgagatcacgccactgcacttcagcctgggtgacaaagcaaggccccgtcttaaaaaaaaaagtctgtctgccatcttagtctttgagaaccccgaagcaaatacaaacataaccaggtatctgcaagctgtacagagaaaaccccttaatcctccaagatgtcaaaaaatcctagcatgtagcccatgcagttctccacataagagcctaacacggtcagctacgtcgtggagacccaacgggcaccaagcgagcccagcttagtgcacggctgctcctccgcatcagggcacaggccccgctaactcactgtgtgtccccttggcggatcaggtcgcagatctgcaaaatggactcccaatctgtctccaacaggagctggctggtcgccttgtctgagagagaaaatgccatgaaagggaggggttatcctgctggacgccccgtgcagcaccccagcttggcagcagctgggggggactctctccttcccctttagacatttggaccaaatgaaaaagcatgacagaatcctcctgagcgtgctgatgggcagggaagtgccatcctccccagggaagcagcaaacagcgtaagagcacaccaggtgctggtccaagccctcccacaacccgcgagcgaggtaaagacactcagcagagaggcgagggcactgccgtgagtcacacagctcaccagagacagaggctgattcactcttaaacatcaggctcggctgcttctcaacaaagaaccctatcacccgtcccttggagtccccgttcgcccagatgctcccggtttcaatgggaccttagcttgggcaagggctagagaggcctgcagtgtagactccaggccccttgctccaagccaagtgctttggaaataagggcagaacggggctccaaggaggactcgccagcatacctgtcatcataccacatcactgctgtctccaacaactggcccctctgggggggcagctccagctctgcccacatcgcctttcccggatacagaaacgatctaacaagccaagccacgtccactttctatactgattcagtagttaacctctggattcatccctgaagcactgaactacctgtgtggctgagatactcagtctgcttgctggttcccttggcaaggaaggtgtctcacttgaagtctccttgaaaaccctacttgacaaaaaggcaagcttgggcagcccattcgaccacccaagctcctacccccaaacattagacgcattttccacgtgctgctgggcacgtgcacatcaacattcgtttccctcccaaaacgcgtcaattccaggaggctcagataggatcagctttcacctccaaaaacgtgagaaaacgccttcctaaaccattaggcacttcccgaagccagtgtgggaacaaaaggtgggtctgggacccgcagcccccaagagagctcgaaggtcccagagagaacactgccggctccacccttcgaggcccagtgttttgggtcagaagcccaagtgcgagcctaacatccgactgagtcacccactttcatgactcaggccttgtggcccactcggccgggtgctcgtcggtcaagaggaaatcggccgaatgcccgggcccgcggaggagcgaggtcgccgagcgcccctggcgccctgcgcggaccctcgcagagccccatttgccaacgcccgacggacgccgaccccacggccgcgccgagggtccaggatcggcggctccgaacccgggaggacagcgggccggggagaggcgggcagggcggccggtccgcgcccctcgggccctcggggccgcgctgactcagcgccgggcggaggctgcgggctgaccaaggccgagccgtcgggtggggacgcgttacctaggagacgctcgaaggtgccgctgcctcgccccatggcgacctccagcccaaacccgacgccgcgggcgctcccctgctacgagctggcgcgccccccgacttccgcttccgccttttccctccagtgcgcgcacgcgcacgtcaccgcgccggccctagagccgcgaggaggcggggtcttccgctctcccgctaacgctgcgcgctaattggacgcgcccttggaacaatgagccctaagaaccaatgagaagtccgaaggtgagaactatccaatgagagtggccggtgggcgggccttgagccgcggcgccgagctacgggtgccgggtggagcgaagcacggaatgtgtctcctgctgggggccacgggcgtcgggaagacgctgctggtgaaacggctgcaggatatccttccgcgcggggacgggaccggggcgcggggggcacccggagtggggcggggactcaccctttagctgctcgggtccttgaccgcttcgcacaggtgagctcccgggatgggaaaggcgacctgggggagccgcccccgacacggcccacggtaggtgtccgcccccgcgggtggagttgcggggggtcagttctgcgcttggcgaagagctccgggctcctctaagtgcacgccgaggcgcagcgggtcaggtcgtgacttaaggccagccttcgggagcgggggacggcccgagctgaggataattggcgcgggatgagggggcctgccgccctccacgggcacttcctctcccctcgcaacggcttcctgtggctggtcgcccccacagcgagtccagctactgatgggcgtcggtccctgctcgccgttcctgcgttagggagaatgggtctgcggggttcaggccaccgtgtaaggtgtgggcacggtgctcttcaggagttcacaacgggacagcggttgtattgttctttttgcatcgtggtttttcctataggtgggcaccaatcttactgacatcgtggcacagagaaagatcaccatccgggagcttggggggtgcatgggccccatctggtccagttactatggaaactgccgttctctcctggtgggttgtaatcctatatgggcttcctttagggaagtgtgtctacatttctgtgacgtccagtccccaaccttgctgtgtgtagaaaggggtttgggttatttagtgactatactactcatggaaataggtcttagctagtgttgcttcctgctgggcaccctgtctggtttctggtgcttgcgctcccaggcccccggtaggagctcacagagggcttgctgagggcagggctgctgctccgcagagaacagacttggccctctgtgtcactccccggtacgtctgtgtttatgttggacttatacgtacctctggttggtctcatcttgataaggcctgtgccgc

SEQ ID NO: 7647 - DNA, 6000 bp, Homo sapiens
gtcacctaggctgaagtgcagtggcacgatcttggctcactgcaaccttagcctcccgggttcaagcgattcttctgcctcagcctcccgagtagctgggattacaggcacccaccatcatgcccggttgatttttgtatttttagtagagatgaggtttcagtatgttagctaggctggtctcgaactcctgacctcaagtgatctgcccgccttggcctcccaaagtgtgggattacaggtgtgagaaacagctgatacttttgaatttagtactgaattctattaatcaactgatggcttaagcgaagcctggtggcccaaggaaactgagctcggagaaagtgtaaatgctagatggttcttgcaaacatgggtgtaaagtagctagctggtcattgcttagatctattctatgacagctgtttagaagatggtggactttttgtttttgtttttggagatggagtttcgctcttgttgcctaggctggagtgccatggcacaatctcagctcactgcaacctccacctcccgggttcaagtgattctcctgccttagcctcccaagaagctgggattacaggcatgcgccaccatgcccggctaattttgttttagtagagatggagtttcaccatgttggtcaggctggtcttgaactcctaacctcaggtgatctgcctgctttggcctcccaaagtgatagtattaaacgttagatagtatctaaacgatagtgctgggattacacgcgtgagccagcatgcccagccttcttcttcttctttttttttttaatagagacagggtctccctatgttgcctaggctggtctggaactcccggactcaagcgatcctcccacctcggcctcccaaagtgatagtattaaacgtgtgagccacctcacctagccagatggtggactattcatttctatttcctttctgagccactgctgggaagttaattccttagtttttttaaaaaactctgctttatgtctgagctattctactctagctagagccacatataactttcacctgcattcttgggtttttggacagaagctttcttttctttttataactgagatctccatcaaggaaagatgacaccctgaaccccgtcctacccccaaggtttatgcctttatcatcctaaagcatcctatgtcctattaaatttagctttgaagataagaccacaatataaagtaataacaggataacctggtttctgaaccttcctgggtgataatgcctgtatttaagtaaagtcatgcacaggtctttccttaaaaaaccgagtcataaggggagaaagtgcttggttgcagaataaaacccttcctggactcttctcccttttttcttttctcttctcttcttctcttctctctctctttctctctctctctctctccccctccctccctcctttcttttttttttttttttgggggttggggatggagtctcagtctgtctcccaggctggagcacagtggtgcgatctcagcccactgcaagctctgcctcccgggttcaagcgactctcctgcctcagcctcctgagtagttgggattaaaggcgcatgccaccacgcccggctgattttttttttgtatttttagtagagacagggtttcaccatgttggtcagactggtctcaaactcctgaccttgtgatccgcccgcctcagcctcccaaagtgctgggattacaggcgtgagccactgtgcccggccttctccttttctttttttccattccttcagcagaaggccaaaccttctgtctctgcaaacaaagcaactgaggcctgaattttgaactcatttatgcagaagcctctgtaagttccagaatataaaagtttatctgtccactttggtctgtggccatgtgaatttatctgacgggtagggatatttttcagctgtgtagggatctaactggtgaggcgagctgagtcatcctgcccatcaacccctgctttacggatgatggaatttaggcaaatcacttcacttccccattttcaatgtcaatgtaaaatcaaggtaaatgtaaaaaagggagttgaactagactctgatgagcttagatctcttcctgccctaatagtctatacttctatgacagcctttgaccgtcacttgctttaatccttctaagccctttgaaggcaaggccgaagagttggtcttcttaaagctcttaggccatatttgttaatttctgtgtaccattaactggctgcacagttatggaaaccacagaatcctgaacttctagaacttctatcatctgtaaagcatgggttgtcaggggagtctctcaagccttttccaacttacaaaactcgacaattctgaatgggggttcccggcagccatcttcccttcaccctagtgttcttctggaggaagtacaatgacacaatccacgggcagtttggaggatttcctagtagcatgtggttaagtgtccccttaaataaatgagtattggccgggtgcggtagctcatgcctataatcccagcaattagggaggccgaagcaggcagattacttgagcccaggagtttgagaccaacccgggcaacatagtgaggctgtgtctctacaaaaaaattaaaaaatgaggtgggaggatcgcttgagcccgggaggtcgaggctgcaatgagcagagatgacgctactgcactcccatgatgggagtgagaccctgcctctaaacaaataaataagtaggtatcttgccaaaggcttggaaatccgctatccttgggagtttcactgtgatttaatttgtcgagagaagatttggcccgagggcatgaaaaaaattgtattattgtagaccatcagagtgttattccagggtcagctaagagcaagtttcaaaacgcaggctctggatggaaatggggtggctactgttgtaggcagacctcgagcaaaagcactgcggatttctcttcttcttaaaggcgtagcccggagaacagctttgacaagttgtttctggcccaagttgtcaaaaccagtctgtatttggctaaagttcatctgcattctctatttaaaaaaaatttccaaacctaacctggatagctgcctcacgatgttgaatcactggctacaaccgagtcaccattttacaagactatggtgttgaaacctgagcccctaatttaagtgtcctcctcaggagttccactgaggaaagtcctttttcggaaaccacagaaggaaaactcagggttagtggtactcattacactggaaggagcttttccacttggctgcattgtttatttacacactgtaagttcctattttggacactcttcccttaattatgagaagaggggtttctattatatcatctggccggatgtattgttgaccccaaaaatgccacataacggtgcttgggacatggggagatgcatggtttagagatttcagcataagcacttggcatcttttttacaagcaagacacctatcttaccatgatttgcaaaaacaatcagatcactgagaaatctcattcccggggtagaaaccatctcctgcgagaaggagctggcacggagtgtctaaccgtgcaaacaaaaccggcttccaggttgacaagttgtaattgctcttccccagttggctccggggagctttttctaagactgacgccccccatgtttggtgacattttatatacgccacctaacaaacttctatgacctgtcttgctagggtggggggaataaaaagaaaagacgacaacaacctagaaggaaataacccatttcctctgcaaaaccatcttcccttgctacggaactgcttggcgacaccagcgctttcctgcggttggcagcccgggaaccttgaagttgcgcgggaccggccgtcagccgctgacagttctgacagtccaggtggaggacccgcgctctgccgggaaatccccggcttcccgctggggacaaacggtggccgccgcagggagtgctgtgtttgggggtcgggggaggcagggagccccactttccctcgcgctgcctcagtgcccggcctgcgtgcgcgcgccagcctggggtaggaaggtacctctgacatttcgctcctgcgacgcgcaggcaacttcatgcggaaaatccgcggaggggctgagcctggagcccccgactcttccgacgtcccggagcccccaacccggggcagggggcactcaaaggccaggcgtgcctttaggtatcttccgggacccaactgtaccagggtcacggacattcaactctcagctacccacaccggcgcgagcgcgtcatcccggtggccctgggcattcctaactgtcagagcgaatatttttgggaataacctctccaaaatgtgaagatgttcagtggtctcctccgcctcccatcacaaaaaaaggccccaacacatattttttaaaaaacaacccacatcccacaatcaaacttttaaacatgtaaaataataaaccaactcaccaagttagaagggaagagaataaacccccaaaggctcccaataaggcggaggcttggcctccccctccttataagccgctcggtaacatgagaaaaggattaaccccttagggggcgggcccgactctagcgcaagttggctcgggctggtgaggcccgagcgcccgggccctccacccactcccgcgactcgggcacccgagccacaccctccccccgccccccaccccggccgcctgcgacccgggccgtgcgtgctgccgcccgcgccccggccccgcgtcgctgcctagctcttatcctataccggctgcagccggtctccgccggcctcgggggcgcgccgccgccgaccatgtgctgcgagcgctgagcgcagccaaggagggggcctgcctggcgcgcgcgcgccgtcccacgtggacctgagccgcgccggtcgcgcgcccgccagcctgccgcctgggctgggggtcacgaaaggtaaccgcgtcgcggtccggggccgggccgcccccgccagcgccgccggggtccttggcacaacgccccgatctcccaacccgggtgcgcctctgcgcgcgtgacccgcccagaccccggagctttgctgcaacgctagtaggagcgcgagcgtgcagggtgttgggggtgcctgcatcctgtctcggagcacctcggccaggcgcgagcgcgcgggtccccgtccccacccccgggcgccttcccggcgcgcccaccgcccagtcccgcccgcgccctgaggatttagggatttagcggcgagggggaacacgcgcgcgccggggctgatcccgcgcggcgctcgcggctgcggcggcttcgcgcccgccccgggcagaacaggttccttccagtttgggtgtgagctgcgcgcgcggcgcctgagttcctcctgcagcgcccacttcccccagtttcgtcaactcgcgcacccccacagttccccttccggcagtggggagggagtgtcgcagtgggccccagggagcgagcggccgggccgctgcgggtgccttgcttcccccactttgctgcaccggcagcagcggcagcaacagcatccgcgttgcgcgaaaggaatgtgagcagccgggctgagtcagcatccccggcccggggcgcgcgcgcaccctccaggcagtggcggcgtcggcacaggtgcatggctcccatacccgcggggagccctctgtaagggacctggaggtttagacagtccgtgcccctcatcccgtagtccccgaccccaaggtcaccgtgaactaagcggatgatgcacgcgaaatctcaggagctcctcatggggacaaagcatgtgtcagatcctagacatttcagagcctgcgggggcgcaaacttagcttcttggtctctacctcacatcccgagggcaaatttggaaactgctcggaagcaaaggccatgttattt

SEQ ID NO: 7648 - DNA, 6000 bp, Homo sapiens
gtcgagattgaggacaacatgccaccagcctcctgaaatccaacaaataaacagttaaacaaggtttgatcctatacctaattactgtataacacacacaccagaaattgggaactcctacccataagggagagcctacagagacatgatacagggtagttccttctgatccagggattgcaaacaacttgtttgtgtaaatcaagttttatcggagcacagccatgcccacctggtgacggattgtctagggctgctttccagctacaaggccagagttgagcagttgtgacagtctggcttacctaaaatattgactccccggccctttatagaaaaagtttgtttactcctgttaatccaaagctatgaccaaaagtgcaaaagcataaagttcttcagcctctacgaagaggacacctactttaaatacacttaccttactttccttcacttatcaaagcgcagttgtctggtgtgggatttcctgactcaacacggacagtgctatactgcatcaaaaacccaatttaggctgcgcttggtggttcacacctgcaatcccagcactttgggaggctgaggcaggaggcttgtttgaaccaaggaggccagcctgggtaacagtgagacctccaattcaatttacagaattaaaccctggccgggggtggtggctcacgcctgtaatcctagcactttgggaggctgagacgggtgggttgcctgagctcaagagttcaagaccagcctgggcaacatgatgaaaccccgtctctactaaaatacaaaaaattagctgggtgtggcggcatgtgcctgtattcccagctacttgggaggctgagacaagagaatcgcttgaacctgggaggaggaggttgtagtgggctgagattgtgccattgtgctccagcctgggtgacagagcgagacttggtctcaaaaaaaaaaaaaaaaaaaaaaaagaattaaaccccaatttacagaaacacaaacaagccgctacacatacacaaacaaagaaaagttgtatctttacatacaatttttttttttttttgaaatggagttttgctctgtcacccaggctggagtgcagtgacacaatctcagctcactgcagcctcctcttccggattcaagtgattctcctgcctcagcctcctgagtagctgggattacaggcgcccgccaccacgcctgattaatttttgtattattagtagagacagggtttcaccatgttggccaggctgatcttgaactcccgacctcaagtgatccacccacttcggcctcccaaagtgctgatattacaggtgtgagccaccgcaccgggcctgcatacagtttatcaggttttatagccatataaaatgtgaacaagagctcccaaagtatgtgacactatagctacatgttactgtcagaggtgagtaccagttcatttaccaggcagcatccaaaggattttttggactcactctctaacagttctgctccaaaatgacaaaatattgaaatcaaagaatgtactttcttttttttttttttgagatggagtcttactctgtcaccctggctggagtgcagtggcacgatctagactcactgcaaccttcgccacctgggttcacgtgattctcctgcctcagcctcccgagtggctgggactataggcgcccaccaccacgcccggctaatttttttgtatttttagtagagacggggtttcaccgtgttagcaaggatggtctcgatctcctgacctcgtgatctgcccgcctcagcctcccaaagtgctgggattacaggcatgaaccaccgcgcccggcaaagaatgtactttcttccagttcatctatacctggtacaaagacagtctctcctggtttttgtaagatttccaggggtttgaattcaggtggccaggttggaagctgtgtccggggataaataacattaaaccaggtaatagcttcgtcttgctggttccctccttcgtctcgggtcactttgatgagttccctgggagtgctggtaggaaacaggcaccagcgcttgtggccctgaactaaggcattccaggcactggttcccagagggtcgatgtgaatcccagttccggagcgtggtggccccatcacaaaccacctacagaatggagatatccaagatgtgaagtgtaatttacttacacacataccacacaaaacaataagtttttagtttttctttgagagtcttgctctatcacccaggctggaatgcagtggcgtgatcttggctgacagtaacctctgcttccccaggttcatgtgattctcctgccttagcctcctgagtagctgggattaccgacgcacaccaccacgcctggctaatttttgtatttttagtagagacagggtttcaccatgttgcctaggctggtctcgaactcctggcctcaagtgatcacctgcctcggcctcccaaagtgctggaataacaggcttgagccaccgcacctggccaggttttaattttatgtgatatgtcatctttatttcagagattatataaattctggtacacagaaacactgggtgcattgttcatggactgattcctaacaaaataagaaaaatcagctggggcggtagctcacgcctgtaatcccagcactttgggaggcagaggtgggtgcatcacctgaggtcaggagttcaagaccagcctgaccaatacggtgaaaccccatctctactgaaaatacaaaaattagccgggtgtggtggtgggcacctgtaatcccagctactcaggaggctgagacaggaggattgcttgaacccgggaggcggaggctgcagtgagctgagattgcgccactgcactccagcttggacgacagagggagactccatctcaatgaagaaaaaaaaaagaaaaaaaaagaaaaatcactaatgtggtttattgctggactttattaaaacctcccttagagatcagtgcttcaaccatagctgcacattcaagtcacctgaagagctttcagaaattctgatgcgcaggcatcacccgaattaaatcagtctccccagtagggcccaggcaggcctcaggagccccctaaatgagttcaatgtacagccgagggagtactcactgtttccaaaaaagattagcaactgaactcagcgagcaaatgctgttgtagataagattttaaccacaggccgggcgcggtggctcacacctgcaatcgcagcactttgggaggccgaggcgggcagatcacctgaagtcgggagttcgagaccagcctgaccaacatggtgaaaccccgtctctactaaaaatacaaaattagctgggtgtggtggcgcatgcctgtaatcccagttacaggaggctgaggcaggagaagcgcttgaactcgggagatggaggttgctgtgagccgagatcgcaccacggcactgcagcctgggctacaagagtgacgctctgtctcaaaaaaaaaaaaaaaaaaaaaagaaaaggattttaaccacttagctgcagaatactttacctgtaagggggcctgcgcttctccccagcatactggaaaaggtcatcagtgaaaaactttggcaccttgtagtcttccaaaagtttccttcttttagggtgttcaccatagctgctgtcaaagatgtaaaggggactatcatctcgagtgctctccatgtactcgatgtagtatttcatcttcatcttcactgagtagccatcgttatcctcaccacacttgaacttctggttccgatatttcctttttaggcgctccagagtccatttctcctgcgcagaccagccctcttgcgcattcaacaaaaccacgggcttgtaaggtctttcataccgctccacaaattcttccacagacagctgtaaagcatctgccctttccacgttatcctgagggaattaaaaaagacctgtccagttaaaaaaaaaaaaaaagtccagtggcagataagggtgtccccaaggccaactggtaatgacaaaccgaaggaagttgactctcgtctggctcctccggggtgggggcagggcgcgtgcgtgaggccacgtcgttcctagagccaccccccatgagccttgacagccaggtcccctaggggacccgccgcccaaaggagtcagggacgacgggccttctagttgagagcgccacaggcgtgggactcccgtcgtccgccagagcagacgggcggccacagcacgggaggaagcagacccgccccggaatccgcgcctcggggaccccaaactccgcggggtgcgggtgagcctctacgaggtcccgggcgctcggggcgagggcagcctcgggcccagagaaaggtgcgtagcggctggaggtgccgatgcccggcctggccacccccgcccgacccgctcaccgccacggccgccgggctcagcgagaagctctcgtagtagttgtgccgggtccaatccagcgagtccttgagctccggccgcgcactccgcttggcctcgcggatgcgcttcttgctcttgtggttcattctgcggggtcgccagctggttccgctacgacctcggcgcagcccgcttcctgacactaacgcacccctccccggcctgggcggcggcgacggcagtacccaaacgcccttcgctcagtcccggcgcctttaaagtcgccttccagaaaattcactccccagccacctcccgagcctcgggttgggcaagcggccgccgtcttccccgccccgacgcctctcgcggttttccattggctttggctcccctggggtactccttcacatacggcgggcctccgccatgttgggaaggtcacgtcggctgcgtcaccgccccgccccgccccgcccctcccctcccgcgctgccgctgtgcccatcacttccggtcgcgccagccgcccgttgccagttctgcgcgtgtgagtctctttcgccttgctccgggctttcttcgctcgcagcgcggcagggttatcaccagatctgggctttccccttcttgccgtcaggtgctacggccacgtggcccgcggcttcccgctcgcgcagtctggcagcccggagccttccgcggtcccccgcccgcccggggcccaacgacgccctactgggcgagcacgatttccgaggacagggggtccgggcccagcgctttcgattctcggaggagccgggtccgggggccgacggggctgtcctggaggtccacgtcccgcaggtgcgtgcagcagcacccgccaggaggcgcctgaggtcaggagcggatgtcggctgacttggctgggttcctgagggaccgggggtgcggacgctcagctgcgcagcttcctgctttaggttgacccccggagcaaaaacgtcggatatgaagcccttcggtgcattaaatgtctctcagtaagaattttggagaccctgccaagaagtgaccctggtcactatgttggtcaggctggtctcgaactgtaagcttaagtgatcctcctgcctcggcctcccaaagtgctaggattacaggcatgagccactgcgccgggccggctttctccacatcgaatctttcctgccaggaaagtgacattcttgactgacctctaatgcttcttttgatcttgtccaagggtttcttgattcatccttatctctcacttttgtgtgagttttgggatcagggtttccagttttatttggtgcccaaagtgtttcttgggttggacctcgcttcttcctctaagctcacagctacaacaaaactctcaataataattctttttcttttcttttttttgagacactgtctcgctctggcgcccaggctggagcgcagtggcgcgatcacagctcactgcaacctccaactcccggattcaagtgatcctcccgcctgcctaagtgctgggattgcaggagtgagccaccatgccctgcctgtcttcggttt

SEQ ID NO: 7649 - DNA, 6000 bp, Homo sapiens; identical to SEQ ID NO: 3670

SEQ ID NO: 7650 - DNA, 6000 bp, Homo sapiens; identical to SEQ ID NO: 1913

SEQ ID NO: 7651 - DNA, 6000 bp, Homo sapiens
caacactggttttcctttaaaaattattctcagacagcatctcaatcatctcctgagaataccgtctacacagtttgtttccactgaataaaaggggcccagccaacatacatccaacaaaactgttccacttaaaccaattgtcagaaccttttattttcctcatggtaaagatactaggctgggtatggtggctcacacctgtaatctcagcattttgggaggctgaggcaggaggattgcttgatgccaggagtttgaggctgcagtgagtcatgatggcaccactgaactccagcctgggtgacaaaacaagatcttgtctcaaaggaaaaactccaactactatttcttgagtgtttatcacatatgagggattacacctatctttttttattcctcaccaaaaactctagtaggtaggttctattattgttttacagatgaggaaactgaggcagcaaggataagtggtagtcagctcagtcacttcacaaagctccaggtggtagagctgggaaggaaacctgagcctgtgtctgctctagggccaccatgctctactgccctcctgtacaacaaagatgacctgattatgacactcccacacataagccacaaaagttcattttgtttgtgaccctgattttgtcaggaaaaacatgttcttcagtattcagtggaagtaccctaatgcgagtgctcacttggtctcaatgaactaaagaatgctgctcccctctgagggagatcctctattcatctgtgcttgaaactcaagtaacctggcagcatctactataacctaagttcttttctgatgttctagttcttcaagaataaatctatcagccgggcgcggtggctcacgcctgtaatcccagcactttgggaggccgaggtgggcagatcacgaggtcaggaggtcgagaccatcctggctaacacggtgaaaccccgtctctactaaaaatacaaaaaattagccaggcgtggtggtaggcgcctgttgtcccagctactcgggaggctgaggcaggagaatggtgtgaacctggaaggtggagcttgcagtgggccgagatcgtgccactgcactccagcctgggcaacagagcaagactccgtctcaaaaaaaaaaaaaataaatctatcacactcatctatctacctaactcatcctttttggtttatgtttctttgtggccttatactcaccaaggcaccctgtggtgaagacagcaaccacagcctatcgttcggcaacctaaaaagacattcaacaccccccacctccaaacacccaaacagatccttctgtctcctaaacctgcacccccaatgccgcctcacctggtgaccccggatggtgctcaaggagaacatgccagtctccccctcgtctgcaatggaaaccccaggcagatccatcttcagctccacacgctcccgctgctttctctgctcacgcaacagcttctttttcttcctgagggggtggattgagggagtaaaaccggcccagctccaaagtttctatccatgccttgcattttcttctcccatcttcacacagtccctgcgttggggaactccaagctctaccccagctcctttcacctcttcaattccgccacctcctgggccttcatttctgccaaggtctggttcagttgttcctcctcctcctcttcctcctcctccttagagggctgctttgtggttccagctgttgagtcctcctcatcaccttcatcttcctctccagagctgaggctggcaaaacagtcccaagagttgggttattttcccagacttttcccctggacacccagtccacacctgcctcgctgcgttctctcctcacctgatgtccagtgcctttgcttgttctttcagcttcttggccacatatcgccgaagttttgttctccagtttagtagcgacctgccccagagatactattactgatcttgccatctccctctttgtccccgcccccttctgttttaggctcactacccacctttcgggcttcggctacataaatcaaaaggctcaggcccccatcccaaacctttagcacagcaatatcctcttcccagaggtccaacatcatggcctttccctgcctccagggctcctggcccccgtgcctaccccactccatacctgagctccttgcgccccaacactctgatgtcctgacagcacacccgtatgtcctcagtggtagctggatgctgtgccaactcttcatcatctaccatgatctgtttgggaggatggaaaggtgtcaggggagatcctcaggccatgtttctggggctacctcatgtccctcaaggctggagactcacttcgctggccttggagaggaagtcaacagggttggcagctcggaggaagtcagtgactgaggtacggtgatagagagtgaggtcaccctcagcatagccttcagccttaggaaggaaaagagagaagcttggtcaggcccttctaaggtacctgtaggacccaccaggcccaacctccctagagttccaggacccaagagtgaccccattccccaaaacacacctttggcttcttcttagtaaccaattcagtaacggtcttagcctgaacttcaacctccttaaaggcaaatttggggtcaaagaatttactgtcaaccttgtcaggggccaggaatcctaaaaatgacaggatatattaaaaagtgtgctttgggagttgggagcctggatcaagagaaaggaaatgatgcccaccttggcagactacaaagatctctgcagattcatggcgagaggcttggggcttggtggcctggacacggcggaacagctgctgaaagatccatagcagaggctgatagtcacgagaacggaaaacctttgtgatgaagctgccaccacgggccaaaaagtcacaagccaaacgtagagccatcagtgtcaaatgggctgtaggatagagacaattagttgacgcactctgcagcccaggagggcatgcgcccacctccaccatcacctgatctccaagcaccacactccctgtaccttgtgagtaagcatcatggacccagctagccccaacgttgggggccccatcattgagcacaacatcaaccttccaggtcttcagctccttcctcagggcctaaagagaagaaaaggaactatggaaacagaaacactggaatggccctggttcagccatttgtccatctagtcatttgctgagtgcccatcatgggccaaatgcagtaccaggcacaggagatacaatagtaaacaaaaacagtatgtctctaccttcatggagattacagtctgacactgaattcacaggagaagacttcactaaagatctctgcccttctcccaattccaaacacctttatccctgactctaaataaagcctggagtggacactacgaatgccataggtcttgtcgtacagatgtcaggcaagaacgtgctcaaagcacggtaaaaaggaaaaacttgcctttagaggatttcagggatgtagatgtttccgtataaagggggaaggaagagagagactcctattacctgcctacaacgttctgttgtgatgtcctgctggagagtcaccacattggggagaggcttgattggaaccaggtccactcctggaagaaatcaggtcagagtattctaaaaggttgcttcaagcagggaggagagaaatacaggacaaaataccttatacacccaccccttaaaacaccaaggagagctgtccgttactcacccacaataaggctggatacaggcataaacttggcagctacctgcagcctataaaaggaacagaaatttaaaaacctagagccatccttttccccctcttggcaactgatctctcatccctggtgttacgtgtactggccaaagcatatcataggcacgtattccaagccctttctctgcaatcaagaaaggaaacggcccccaagaggaccgggattcgggttcccctcccgcagtgaaactggaagccatcccagctcagaacccagaaagcggccaccaggagcaacctgtggcgagtgttacgaaccatccccctggcgcagcacacaggtccagcaaggctcgggctttctgcaggaactgaaagcggcgattgagctggatcagcttgaaagcagatcgggaacggtaacctggacaaaacaaccaagtgcgcaaactgcttcactagtaggatttctccggcctcgcaaccgaccaccccttctgcaggagaggtacataatggtcgcaaagagcaggcgaaccgggcagagatcgctcgctcgctcgcagactgagcgaatccggactcacccgtctccttcgccaagtgataaaacttgtctcgtcggctcttgccaactttgcccttcttgcccatggtggaaagggggagtatccctcaatctggggagaaagtagaagttgggaacgtctctttccggagcaccagattccacttccagtttcccacttccagtttcccacttcccgcagcaattccaccccgcgcccctctccgcacactacctagacccagagccgctttctccacacttggaaccgcacaagtatgcagctaactacttccgcttccgcttgcgtcccctgcgtccctggctcgaggttttccgccattttgagtgtggccctagattgttctcaatactctgtccttgggttttgtaagttgaaagttgagactaggaaggcatatcacaagaactataaacagagtttcaatgaggcaacactgaggaggagttctactccttcctcatccccttccaaagcccctgaactcgagtagccgcccctcccatcatggttcccttagtgtggtctcgccgcacaccccgcccattgacccggaattcttctctgcctggtcttcaggtcccaatcctccgcttccgcgcttgcgcgccaagacggctcggatgccggcggtctctgctgaagagagaagatggcgcttgacggaccagagcaggtatggcgggtgcagtggcggcccggcaggttacggggctgggtgcggagcgagcgtgatctgagtggagagcgggccggggcaggagcgtcgggtgggtcggaggtgcctggaccagtccatgctggacgctgcctgcgaccggatctgctgtgtcagcgccgccctcggtgagtcagggcaaggctgggagaggaagacgcggtagaagcggagtgagtgagggaagcgatgggcgcgggaatggccggcccacgggtcgcaggagacgggacgccagtcctttggctccgttccgctggctccttcgtcagtactgacacctcgggcttgtagagcacttcacgcagtgcaaagcgccccccgtctatatcatatcgcctctcggtcctcctaaaagtcgtatgaggtaggcggcgttcccattcttttattttagtcctgggaaaatggagggttccaagggagggagggattagaacccagatcctgagcctccgaagtccaaactttttctactacgcaaagctacctggtgtcaagccttattcaaagtgccctgcaagtggctttaccccctcggatgtttaacctgtcgtttaagactcactctgtgtcttcagatggagctggaggaggggaaggcaggcagcggactccgccaatattatctgtccaagattgaagaactccaggtgaggacggactccagagggagctaggaagggtgatgatgggggatggaaacggacttccacaaatccatctaattcctttgggagtgcagtggaagaagctgctgcttctcctttcttgtttgtttcttagctagtagggtgtatgtatcagaagtaagcaatctcttgttctcctccagtcccatctctttgagggtcttagtgttcacagtttgttacacatcttcgagtcaaatcttaatagtaaaggt

SEQ ID NO: 7652 - DNA, 6000 bp, Homo sapiens
cttagagcaaggaagataggagatgggactgcccctctcctggagtcaggctggactggggggagcagagacccccagccccccagatggagtgggatgggtgaagtgactactcaagggctttccaacagctgcctcctcaccctcccattggctccagccaaacagcccctcttggcctctgcggagccccttgagctccaagttccgaaaaagcccttccttacccctgccctatcactccccttggggcagttcagagctaatggaacagccaaggagaaagcagaagaatcaaagaagggcgcggcacagtacccaggagaattcagggtaccaggttggctcacctcaaagaggagaaggcccctgggggcactggggtggggtaatgctcagagaagcagcctgtaagattcaccttcccagattctgtcacctcagggaggcacttggtggctccatgggaggattccagagggggccaaaggatctagcactcaggccaacatggcagggcctcactccttgggtacctagcctcctgtgttcccctcctatccccggccgggaggcaggtggggagggtgcctgctccacctctgagccccagagaaggggtgggggcagctctgggatgcctggatcccagctctatgccagccttgctgcccgaattagccatctccccagaggccggccctgtggcagctgaaactgcagccctccccatccttcctgacccttcccttgctgcccacccagccccctctccccactggtgactcagccctagaaccagagcaacaagctggagggagagagagaatgagaaaggacaggaaaaagagccctggctaagcctcagataaaaaaagaacaaggccatttttctcagttctgctccctttccttggctcttcagtatttttcctgtatttgacccccgagggcattctaagtgtcatctaacctcaattcctcttactgcaaaggggatcttcttccttctttgtttacttctgaccaagcccccttcgctgctgctttttctacaagatcaggcttcccctactcctgcccagttgaaagcctcttggcctagactggtcactgggtagagccagaggaaaaagatactacacgagcaggccttctgcctccagccacagctgctgtgcccatttctgctggcacgaaccttgaaggctgccaggcacctgctttgcccagggaaacatgatgttaggagagcatggcaggtgagcctggctcctgcgtacctcaggcatgacctcatttctaggagccaccctgccctgggcttcccagataccctcatttccaagcaaaagtgaaagagagagaaggaccggcagtatccccataggcccacagggtcaggccagaccagaatgcctggattcccaggagggaatgtcagtgcaggtgctggagcagagagggtgtcagtaaccacctcccagagaacagtccctgtccctccaaggaacccctcatgcatcttgccaagaagcccagagcactttggtcctctgcctgctccttacccctcatttccacagactaggagactgggccctgggttggggctagccccctatgttgtggaccaggaaccccagtccagagatgaaggtgatggggcagcaaagagggtcccacccctgggtttctaaccatttctgaggccttatgaatggagaacaagaaagctgtgctctcccctcctcccacccccagggcagtggacaaatactacgattttgggtacactttcagggagtccctgcatctcttgaaaaccttctacgaaccccagtttaagagcctgtccaagaccacgaaccatcccacttttccaaagagactttcaggctaacagaatatgaggctgcagctcgtcttactagttagttcctctgagttgtgcactcaggcagctgtttgcatctggctacacagctggctgcagctaagcccagctggctctcccaaatggccgaggggtcgaatttagtgagatgaagagaagggccaagacacagaaccacccttaggaaagactgaggatactcaagggagagaactgcccctcagaggttcattagctttagaaccttctgggctcttggcaggctgaatgccagctccagcttcccagacagaaaagtagaacccctttgctcagccaccctgggcggggcccatgggtaatgaggatgcatccaggttctggcctcagcgcaagagccttcaggtgctccttggagaaaggcacatgtgcagaggattttacgcactttatctcgttacagccccactaacatcccagcagaaggcatgctgttcccctccctccaacatgtgcggaaattcaggttcaggtattggtaacagatctgagacaggacactggccatgggacctccaagcctcttctccctctaccatatcaagttgcttctcacaggccagcagcagtgggaaagagcactagatccaggtccaacccgttttgggggaaacctggcccagggaggggaaatatcttgctcaaggtcaccaggcaaaagggttgcggaatcattattgactctttctttccagtctgatctctttacctatgttatcttatatcatgcagatttggcattgaaagtctgaaaatctttttctcagttagggcagaaagagctgatgtagaaacttgtgctcatggtggctcaggatctccaaaagatagagggttggctaaggccaggtggcagctgctggggccaggctgggaagggtgtggtagccctagcctctgcaagagcaagatggagttgaggttaagtccaggtaggtaggctgggtcaggagggcagaaccaaggcgggggcagagtttggactttggacattctaaacttcctcaagctctgcaggccccagccagagcagggagattttccagtgtaccctggatgtgaccacgtcttcttgttcagtggggtcagaggccaggtgggggcagaggctaggtgggggcagatgcctggcagatcgcccagcccaaagtggtggatggtacctgcttaacctgtcctaaacaccgtccctctttggacagcttcacctcccccaaccgccaacctccgcgcgctctgaggccacggcagagagacctctgaagcctggacatgctcctgggcatgagggcgtctggtggagtgagggggacccaggaggctgggtgcaacctcctcctccttcctccactgtgcatagctcttcccctcctccttgcagctgttggggaaggagaacagaagaaagagaaaaacactgtttccctcttcaaaccaaaacaaacacactcagggttgaagatccaacacgaatctgtggaatgcagggaagatgtctgcggggagagtgccactgcttgcgggtgggcaggaggagacccagccagagttgggacaagtcctcctctctctttcaccgcccctatcctcaaggcgtcagagggagcgtatggacagctccaaacgcccagactcacccatcgcctcaccctccatccgccaagccagcggttgagaaggccatccagtctggctctgcagagggtgtggctggcgtggccgcagactaccagcgaggtgcttaaatgtatatgctcatttttcccccaagcgtacgggaaggggggagtccgctgggtgtttatcttgcagtttaccccagctcccagccctggagagaacaggctagtgctgggtactcggttcacagaatgggagaggactcagccaccgggaccccacttccgctctcatgagagatctaaagggcggaggggtggcgtccagacaggttctggccccgtcagcacttgccaatgattactgcccgaccccacacccaatcctccacttcccgccaacccccagcagccagagggccgccccttaatcctggctcccaagggccagctgccctgggctccgactcagctccggacccgcatcccgcgctcgcacactctctcgctcccaccccacaccctccagcttcacttacaggtagcgctgctgccgctctgtctgccgatggagggcgaccgagtagccgaagaggctgcccgggttcccggcctccttcactaccaggaatcgggtatccaggttgaaggcggagacgacgcagccgccggccgccaccatcaaggcgagcgcacagagcatcaggcgtggggcgcggggcgcgcggctggggccggggcccatggctgccagcggaagcggggtcccggcgagagcgcgtgagggcgcggagctgggcgtgaggacctgttcacctgctccccgcgccgccggaggacactggaacccgccggccgctgcgctccgtagcgctgatcggtttcgtgcccccagccccagccagtttcacagctgcgctctcggatcccttcctaagatccgtgggtctatcttcctgcctccccagcggccgggtcgccgccgtccctgccccgggcaaccggcccccagcttgtcccggccgcgcccccttggccgcgctgtcgccttcgatcccggcttcgcggcggatctggcaagcgcaccggtcgaccgcaaggaggacaggagggaggggtcccccggcgcgcgccccgcctccccacgcccagtcccgcacctccccaccttgcgagcccagcccgggctgcgctttccttccggggaaagagaaaaagatcccggctcggccgcctcctcttaaaggggcagcaccgcccctccctcctcatcctccctaccccagctccgccttctcccccaaacacctgtcggcaacccccaaaggcttagatttcccctccccgcccctcgcttctccgagaaagcgtcgcctggggagcaagatggatgtgacgggcggggccgggggtgggatttgtctggccgctttcctgcggctgctgctgctgctgctgaaaaggccagccgggctggagagacctggcattggcgcatctgggaaccgacgtccgtgcgcggctggctagaatgctggactcgcctccgcagcgctgtgagtccccaagaggtggctggcggtctctgggagttcttcctcgcactcaggcccctcgctgtctttgccgagatttatttctcctatccactcaccctgatccgagctgagattggctcctcagcaaagacagacatatttagcagtggtaacaaccaaatgtcgctaattataattaccaaaaagcatttttccccctaagtgctgcgacttctggtatcaaaggctaagactgtcaatgtagaaatgagtccgtccttcacagaacgcactgcgtagccgggaagctgagcctagaccgtatccatttctcgtccactcctgccttcagggcccagcccagcagaatcccagaggctccctcttcccacccaagctcgaacagagtgtttggagactgggctcggacgtcagcacccatcaggtgtttggtgggtagggccaggtggcagtaagtgggcggagactaaaggtctcctccaccaaggaatcaaatcgaaagggaacttcaagaggttactctggccaggcgcagtggttcacgcctgtaatcccagcactttgggaacccggggagggcggatcacgaagtcaggagttcgagaccagcctggccaatgtggggaaaccctgtctctactaaaaaaatacaaaaattagccggtcgtggtggcgggcgcctgtagttccagctatttgggaggctggggcaggagaatcgcttgaacccgggaggcgcaggttgcagtgagccgagatcgcgccactgcactccagcctgggtgacagagtgagacgtcgtctcaaaaaaaaaaaagaggttactatgtactttcttggatctaactcacatttctcttattgcagctcagagacccattttccc

SEQ ID NO: 7653 - DNA, 6000 bp, Homo sapiens
tggccctcctggtcctgctggcaaagaaggcggcaaaggtccccgtggtgagactggccctgctggacgtcctggtgaagttggtccccctggtccccctggccctgctggcgagaaaggatcccctggtgctgatggtcctgctgtaagtgccagctcagatctctgcagctccggaggtgtgcagagctggggaggggtccctgtgctgctctctggcacctcacccctgtttgcctcccaaagggtgctcctggtactcccgggcctcaaggtattgctggacagcgtggtgtggtcggcctgcctggtcagagaggagagagaggcttccctggtcttcctggcccctctgtaagtgcccccctcaccttggggggccctgagaaaaaccatcacaggacttggagtggggcggagccaaggagaacagatttggtagagatgactccagcggactcaagggtcctcccagaccctatctctggcctgactctttcttctcccttagggtgaacctggcaaacaaggtccctctggagcaagtggtgaacgtggtccccctggtcccatgggcccccctggattggctggaccccctggtgaatctggacgtgaggtgagcagtccccagcccccatgccagtaccctcagcatggccattgtggccttgcctaagccctcttccccggctgactctcacttctctctctctctctctgcagggggctcctggtgccgaaggttcccctggacgagacggttctcctggcgccaaggtaagatggcaacactccatgaccacagccttgtctgctgcttccctgccccatcctggcccttcacccggggctgacccatattcccctgctctccccgccagggtgaccgtggtgagaccggccccgctggaccccctggtgctcctggtgctcctggtgcccctggccccgttggccctgctggcaagagtggtgatcgtggtgagactgtaagtagctgggctccagttccctgtacctggtcaggccagggactcttcaggcctccttagaggcctggggatgggtgtcggacttcacccaggcagggggaggaaaggagatcctgcaagatgtcagggccttaatccaaaaaactgagttaaagctcagccccaagtcccctctcccagacaggaccgcctctcccatgagttggccccagctcccgtgaagattgcagtggggaggtttccctgggagttgggagagatggccacagtgggaagcagctgaggagagagagatccagcagaggggaggcctcatcctgcagccccagcctcagccttccctggccaagagctcatgctttccttgctctccccagggtcctgctggtcccaccggtcctgtcggccctgttggcgcccgtggccccgccgtaagtaccctgctgtgtcccccatgcctttagaactctacagatgcagacagtgccccactcgatgccaatggaacttccgcctgacagtttgtccctttctctcttctagggaccccaaggcccccgtggtgacaagggtgagacaggcgaacagggcgacagaggcataaagggtcaccgtggcttctctggcctccagggtccccctggccctcctgtaagtatgctcagcccctccccagtccccatgctgtgctgtgggataggagggggagcttcgcctcagtttccccctctggatagtcattctttcccctccctagtggggactggggtctgaagatttgtgggcatgtccaagtagcttctgagagggtgaggggtacacagagagggattatgggagaggtctctgcctatggacaccctcgggctagatttccagaataatgaaggggcatgggttgcccacactgcccttgtctctccagccaggccctcaggctacatttgacgctcactgggcctgaactgccttttttatctgtccttcagggctctcctggtgaacaaggtccctctggagcctctggtcctgctggtccccgagtaagtcatgccttctctctcctcttcctgagccccaagcccaggctcacctcggggacccttgccagggacccaggcaccctttgcctctctggagaagggttcagggacagggagtgggcaaagagaggaagaatcctgaacaaacaatctgatctagctttggcctctctgctccccaatccgtcctcccctggctcagcggctgggaggagctatggcatgtcctatggaaagaggctgaggctggctctatgagccgtggggccagagccagcagggagggtggtgggcctctcctccagagctggggttgttcgggcttctggcagcctttctcaaaccatttcccccactccagggtccccctggctctgctggtgctcctggcaaagatggactcaacggtctccctggccccattgggccccctggtcctcgcggtcgcactggtgatgctggtcctgttgtatgtagcccctcatcccctctgctcatggccctccagcccccaaagcacttggatgccggtaatccccactctcttccctctctgtgcagggtccccccggccctcctggacctcctggtccccctggtcctcccagcgctggtttcgacttcagcttcctgccccagccacctcaagagaaggctcacgatggtggccgctactaccgggctgatgatgccaatgtggttcgtgaccgtgacctcgaggtggacaccaccctcaagagcctgagccagcagatcgagaacatccggagcccagagggcagccgcaagaaccccgcccgcacctgccgtgacctcaagatgtgccactctgactggaagagtggtgagggcctgccctagcctctccctccctcctactcctgccatgccagggtccccatgcccatatgtgcccctaccatatggtgctggctgctccctttccctgactccatcttgccctgccctaccacaggagagtactggattgaccccaaccaaggctgcaacctggatgccatcaaagtcttctgcaacatggagactggtgagacctgcgtgtaccccactcagcccagtgtggcccagaagaactggtacatcagcaagaaccccaaggacaagaggcatgtctggttcggcgagagcatgaccgatggattccaggtgcgtgagctggacctcagagccagtgttaggagatgggctagcccagtgctcagaagggacatgaagtcctggagtaggtctctgctaagggtgatggacagagctgggctgggaggcaggggtctcaggtccctgatagtggttcagacacaggctgccgatgggcaggtggtgcctcctctcgatataacggtgcattgggcagctctctgaggaccctggacagggaggccaggcaggactagaggttcccgcatagcggctcactcttccctctctcccctcccctgcagttcgagtatggcggccagggctccgaccctgccgatgtggccatccagctgaccttcctgcgcctgatgtccaccgaggcctcccagaacatcacctaccactgcaagaacagcgtggcctacatggaccagcagactggcaacctcaagaaggccctgctcctccagggctccaacgagatcgagatccgcgccgagggcaacagccgcttcacctacagcgtcactgtcgatggctgcacggtgagtgcccagaatccccaggcagggccccacctctccggccttgggctttttggccaggccatagtgccctctctccatcactcccacgtggtaatgccccctcccgttgtctccgccccaccccagagtcacaccggagcctggggcaagacagtgattgaatacaaaaccaccaagacctcccgcctgcccatcatcgatgtggcccccttggacgttggtgccccagaccaggaattcggcttcgacgttggccctgtctgcttcctgtaaactccctccatcccaacctggctccctcccacccaaccaactttccccccaacccggaaacagacaagcaacccaaactgaaccccctcaaaagccaaaaaatgggagacaatttcacatggactttggaaaatatttttttcctttgcattcatctctcaaacttagtttttatctttgaccaaccgaacatgaccaaaaaccaaaagtgcattcaaccttaccaaaaaaaaaaaaaaaaaaagaataaataaataactttttaaaaaaggaagcttggtccacttgcttgaagacccatgcgggggtaagtccctttctgcccgttgggcttatgaaaccccaatgctgccctttctgctcctttctccacaccccccttggggcctcccctccactccttcccaaatctgtctccccagaagacacaggaaacaatgtattgtctgcccagcaatcaaaggcaatgctcaaacacccaagtggcccccaccctcagcccgctcctgcccgcccagcacccccaggccctgggggacctggggttctcagactgccaaagaagccttgccatctggcgctcccatggctcttgcaacatctccccttcgtttttgagggggtcatgccgggggagccaccagcccctcactgggttcggaggagagtcaggaagggccacgacaaagcagaaacatcggatttggggaacgcgtgtcaatcccttgtgccgcagggctgggcgggagagactgttctgttccttgtgtaactgtgttgctgaaagactacctcgttcttgtcttgatgtgtcaccggggcaactgcctgggggcggggatgggggcagggtggaagcggctccccattttataccaaaggtgctacatctatgtgatgggtggggtggggagggaatcactggtgctatagaaattgagatgcccccccaggccagcaaatgttcctttttgttcaaagtctatttttattccttgatatttttctttttttttttttttttttgtggatggggacttgtgaatttttctaaaggtgctatttaacatgggaggagagcgtgtgcggctccagcccagcccgctgctcactttccaccctctctccacctgcctctggcttctcaggcctctgctctccgacctctctcctctgaaaccctcctccacagctgcagcccatcctcccggctccctcctagtctgtcctgcgtcctctgtccccgggtttcagagacaacttcccaaagcacaaagcagtttttccccctaggggtgggaggaagcaaaagactctgtacctattttgtatgtgtataataatttgagatgtttttaattattttgattgctggaataaagcatgtggaaatgacccaaacataatccgcagtggcctcctaatttccttctttggagttgggggaggggtagacatggggaaggggctttggggtgatgggcttgccttccattcctgccctttccctccccactattctcttctagatccctccataaccccactcccctttctctcacccttcttataccgcaaacctttctacttcctctttcattttctattcttgcaatttccttgcaccttttccaaatcctcttctcccctgcaataccatacaggcaatccacgtgcacaacacacacacacactcttcacatctggggttgtccaaacctcatacccactccccttcaagcccatccactctccaccccctggatgccctgcacttggtggcggtgggatgctcatggatactgggagggtgaggggagtggaacccgtgaggaggacctgggggcctctccttgaactgacatgaagggtcatctggcctctgctcccttctcacccacgctgacctcctgccgaaggagcaacgcaacaggagaggggtctgctgagcctggcgagggtctgggagggaccaggagg

SEQ ID NO: 7654 - DNA, 6000 bp, Homo sapiens
acttacctggcagcagcctgcagtactaggggcaaaggtgggtgcctgctttgcacctgcagcctcagaagtgcagctctcctcactgcccaggtcagcaggacagcaaggggtggaccctgcagcatgcaccatcttggtgtgactgaatagtcttgggtttcctgctctcaggctgggacacaggcaaatggaaccccatttcttttctcataaatcctgccattctctaaacacactggtgtggcttcctctcctgccttgtctccagcccaatccaaggcttggggcccagagaatgggactatggagacccccatccccctccagatggtcctgaagatctcccaaacctgaaagtctgaccgaatctctccccaggtggaggaccaactcctgagcttggcagtcagggagtgccaagcactgaccccatctgacagtccagcttcatctcaagggagatacctcacagtctgtgctccaactatcacaagcctatagatcacctgctccccaacagtgttttactctaagcctttgccctcagtccagccaggtgtgctatccttgccccatccccagccagtctaaccactcagtctgcaagtcactactcccaggcgaggccaggtgctccaagttaccctgcaacactattgctacactcagtttcccaactgctcctgtataatcttgtcttctggaccaggaactccttaaggacaaggtctaggcttcaggcatctcacaatagccaccaaggcgcaggacagtgtacacggaggcagcagcaggggcgccaggatgctgagctccacctcttctgctgatgaggctctgccaaagggacagctcccacctgctgcctgcctgtcccctagcctggcaagcactcctcagtttgaccttcccaaactctcttgtgccccaagaggttttaaggctccttgaaggctggcctgggaaccacacatcttctaaagaaatggacaaggttctcactctccccagccaaggacccagatcaggtctctggccagcattcccctttcctcaagcttccagtgcccacccacttaagccctggccttccacctgcactgcctccagcccacagtggtctgacttcctctctaagtctctttatttcctccctctttaggctgcagaagcagtcatcagaccgaggggcttttcctggggattatgtgagatgatctgggcatcggtggcattcttgggcgagtggctggaggaaacacaccgggcctgggatttgagtttttctggccctgtcagctgctgtggcatgacagatttatacagcatttgcaaaaaaccagcggctgctttttctttaacaatttttcttaaaaactccagttcctattctccagcttctttgtccagtctcctcccctctcctagccaccccccagactctccagatttggggctggtgtcatcaatccaatttattaagtcctcaatgagggggaggaagggccacatctccctctgcaggccctttgaccatcttgatggcttctgctcctccctgtcccctcagctctgccttggtttccccactgacaaaggggatcttctgctgtcctgtgtgccctgaaactaaaacccagggggaggccagaaatcctcaggaagttttccagctccctgcaagaatagccaaggacagagaaatcacaggatcaggacgagcagggcaagctggagcagggggtagaacagaccaagtcctttaccgcagaggaagaaaccacactgtggaagggaaataaatagaggggtccagggcagcagagcccaggcccccagggcgcagtggctataggcgcagcaggcgagtgggagcccccggccgcttcagccactgaggaagagacgcttgtaggccttgttcatctgctccaagaagatgaaggtgaggacggtgtgggggcccaggcgggcatagtacggcgtgaagcccttccacaggctgaagaagccctcgtagcggacaactttgaacagcacgtcctagacacagacaggcagggcgctggggctaggactctaggtccccatccccctcacccagctgccttcacacctttcccaggggatccgacaccccctcccaggcccccagaatggcttcctcaccagcccgttcttgtattccggcttcccatcaatcatccgcatgttctggattctgcaggagaggacgcaggggcatgagagaccgaaagggcaccctcccacccacctccaggcccaggctgcacactcaccgggtcttggcaatgtccacaggcatggaggcagcagtggtgacaagaccgctgatcatgctggcacagaagtggcacaagatgttgtcagagaagtagcctgggggaggtgaggcgggggtggcagtcagctcagaggtggctcaggccaggctgggaactaagggcccagctctggatctcacctgagtccagtaagaactgcttggattgggagtaggaggcgagctgggcagcattgacgacgacggcccgagccatggtagggatgcagccctggagggaggggagcggggaagagtcagaaacccctaaaaccagacctcacagcccccaagtctccagcccctccactcacccgccacagtgtgaggacaccctcttcccgggtgattcgaatcagggcgttaaacacatttttgtagccacggcgctggtcagctggaagcctggtgggaaggcagaaagaggtcaagatcaggattgcccacaggtgcaaagaaaggaaggccagaacaggtaaacactctgctccagatccgggataaaaaactggtcctttcattctagattcgagggaatggggctggggttaggttcagacttggaactcaccggccatcggcagtcatgcggataagagccacttcggctggtgttcccacaaaggcaccagtggcacctgcggtcatgccaatcacagccttcagcagaaagccagggggagtaccatcagccccagtcaggcgctcaaacagcacggtatagatgccaaggcgggtagtggtgtaggtggcctgacgcagcaggccagccgacagcctgaggagcagaggggtcagcatatcaggccaaggtctagagctgccaacccacagtctaccctccatcctgaggccccaatacccagtgtaaatgcccctcaggccttctgccttcaggatactggtgagggcatggaagctggttttgtactctcgagtcttggccccttccccgctcaactgcatccggttcttcaccaggtccaggggctggacaaaaactgtagctcccatcctgggggaagacagaggtggagtgaagggccaggcattccagatctaccagtgcccactggagcctggcagcaagaggttacaaaggtcagggcctgccatgcgattcaagaatcaggatgctggtgagcatgtgtataagagtctatatgtacaccaagtgcaacgggtctgaaaagtctagttgtccagtaggggccatgcaatgaaagtgctccaagcagcttcatgacagtcaagcagtgacctggggctgcacgcagtccgacacagggaggggaggaaggggcatccaagatttaggactccaggtagtcctgcaggagccatttaatggcctggaaccccctgccgcccggccgagcttagcaatgcgctgggaaactcagctggcccggcgggggttgtgcaacgaccctgcatgcagtccataagggtcctgcaatggggccctagcagcccatcggggaactcgcaatacgctggagatcgcgctgaccccgtgccggcacagttcactgcaacagacccagagatgaaccgggcccggttccttttgcccttcccttcctcctcttttcccatccctggggcctgagcttacccggccaggcccccaaacaggaacttgacggacttaggggaggtacggggcttcccgtctatcccgccggccccggcactcgccgtcgccgccatcgccactcaatggccctcggctccgggtcccgtgcgcgcgcggccccgctcgcgcccaaggtgacaccgcgcgcgcaacagagcgagggcgcgcgcacgcccctccagctctcaggtccgacacccgctggaagccggcgcgggcgcaggcgcgcagcgcaaaggcggccgggagtaaggcggagctgaaggaggagcttgatggaagcgtgcgagaaggggcgtaactgatttggaaaccagaggaaaggcgctgttttcaccgaattagaatcgcgggaaaatagagaagagtttgtttgaaggtctcgcgagatcgagtgagtacggctcgccaagttggagcgctctcgcgatagacacagcaactattcagctgcgaggggacgggagaggtggtgagcactctcgcgagatttgaaggagcggcggaggccagagggaggagaggtttgtaaactaggaggctccgggtttccgggcacttttattaggtcgtcttctgggccaccagtgccccttccatctccacaggcagtccctccatcgctaacctttttttaaccggccttttaggaccggaagtccttcatctcaagcatccaatgctgaaagcggcctgattttctctaccggaagcccttttccagaggctgggaacacggcccacctagcaggaagtcccacctccttgagctccgccacccttcccgaagtttttctgtcacctgtgttaggctccgtcccctttccgcgttttatccccgtaccagaaaaggatacatttagtgcctcccacccagctccactaaacgggttggatatctcattctttgagttggtgttccttccccggcgcccccatgtagctgggaagtgggacctgggggtggttggacccctgggatcctaaaggaggggcagggagggcgcagaactccgcttctgctccttgctaccaggacgcgcggcctcctcagcctctttcctcccgctgccatgcaccctgcagccttcccgcttcctgtggttgtggccgctgtgctgtggggagcggccccgacccgggggctcattcgagcggtgagtctgagggacggatggggaaagggcgctgaaaggaagggttgcaggctgaaggggaacatcgccttttttgtccgcagacctcggaccacaatgccagcatggactttgcagaccttccagctctgtttggggctaccttgagccaggagggcctccaggtgattttctttcttttcttttcctccttccctcccttccttccttttctgtcttttttctttttttagtatttcgcaagatcctccatcctaggctggggttggggaggtttgtcctgggtgaaactggaggtaggaaaatgaagttaggaactgagcacgtctagtgtagaacccagaatctagagggagaagacagagtgtccacccctggaactccgaggttatcagggagactgaaagtggacgaagacagaaggcaggatcaacggtccttatcaggaaggtctcaggtgctagttattgcttatatgactttgggcaagttaatctctctgagccttagtttgttttactgtaaaatgggatattagaagttttcctagggttattgtgaagatcaaagtagatacgcaattttggtagtacttcatcccaaagactgccacatagcaagaactcagttgggccttagtagcagtcgagttgtttgtgagatgggtaattagaaaattgaagaggccgggcgcggtggctcacatctgtaatcccagttcaagaccagcctggccaacatggagaaaccctatctctactaaaatggcaaaaattagctgggcgtgatggtgcacgcatgtagtcccaactacttgggaggctgaggcaggagaatcacttgaaaccggaaggtgg

SEQ ID NO: 7655 - DNA, 6000 bp, Homo sapiens
cctcccaaagtgctgggattacaggtgtgagccaccgcacccagccttgattatcacacatcaaactgataatgtgctggatacactgggttaaataaaatatgcaattaaaattaatttcacttgtttattttaatagggctgctagaaaattgaaaaggccacgcctggctccatttgtaggttacatttctttttttttgagacggaatctcactgtcaccaggttggagtgcagtggtgtgatctcagctcactgcatcgtctgcctcccaggttcatgcgagtctcctgcctcagcctcccaagtacctgggactataggtgcgcgccaccacacccggctaatttttgtatttttagtagagacggggtttcaccatgttggccaggatggtctcgatctcttgacctcgtgattcgcccgcctcggcctcccaaagtgctggcattacaggcgtgagccaccgcgcctggcctgcaggtcatatttctactggacagagctagtttaaagagtcctcccagctgggcgcagcggctcacgcctataatcgcagccactgggaaggttgaagcaggagatcacttgatcccagaactttgagaccagcctgagaccagcctcagcaacacagtaagactccacatggccatggggtggtgtgtcatcccaggacagagctgctgtttcaaatggtcccagggtgagtgggtgcgtgagttgtgtggggggagacacgggaagaagtaagcaggctggatgtggtaaagacaaggaggcagtgttcagcagttagaaacagttttaggggcgggtgtgattggggagtagctcttggacagacccccagtgtaacaggaatagacattgcccccactccttggctcagaatatcagttggtctacatccacgtcgaatcctcgcgctttagacttgcacacagtacttagaagctcattaaatcctactcctcaggcctctttttacagcggaggaaactgatgcccagagaggaaaaataaatataaactgtgaaagggtcacagaactgccctcgaaaaccttgtattttaaatgggcaaataccaaaaactgattgtctgcacagctgccaagcttgaccctggtatagctaatacttatgagtgaaaagtatgaacttgaggaaagaacacagccagcagatattacttttttttttttttttttttttttggagacagagtcttactctgttgcccaggctggagtgcagtggtatgatctgggctcactgcaacctctgcctcccgagttcaagcaattctcctgcctcagcctcccaagtagctgggattacaagcacgcatcaccacgcccggctaatttttgttattttgtagtagagacagggtttcaccatgttggccaggctggtctcgaactcctgacctcaagtgatccacccacctccgcctcccaaagtgctgggattacaggcaagagccaccgcgcccggccacagatatgactatagatcactggttcctactcggggtggtcttgtcacctagggaacatttggcaacatggagacatttttggttgtcacatctggggaagaggggcaagcgtggctggcatctagtgggccagagatgttgctaaacattctacaacatgcaggacacccctcacacaacaaaaactatgcagcccaaaatgtcagcagcaccaaggttgagaaaccctgctatatagactaactcacagcagtgctgtttgtcccagagcacgattcatatgtggtgtgggggggttaatgactggcctccgctaagcacttcattaaataggtgtgacacactgggtgagcctgtaagcacagaacagcctgctgaaagctggggagggagggcagaaaagttttcaagaagtggccgtgctgccgcccctactgggaagtgaggagcccctctgcccggccaccaccccgtctgggtagtgtacccaacagctcattgagaatgggccatgatgacaatggcggttttgtggaatagaaaagggggaaaggtggggaaaagattgagaaatcggatggttgctgtgtctgtgtagaaagaagtagacatgggagacttttcattttgttccgtactaagaaaaattcttctgccttgggatcctgttgatctgtgaccttacccccaaccctgtgctctctcaaacatgtgctgtgtccactcagggttaaatggattaagggcggtgcaagatgtgctttgttaaacagatgcttgaaggcagcatgcccgttaagagtcatcaccactccctaatctcaagtacccagggacacaaacactgcggaaggccgcagggtcctctgcctaggaaaaccagagacctttgttcacttgtttatctgctgtccttccctccactattgtcctatgaccctgccaaatccccctctgcgagaaacacccaagagtgatcaattaaaaaaaaaaaaaaagtggccatgctgggtgcggtggctcacacctgtaatcccagcactttgggaaaccgaggcaggcagatcagttgaggtcaggagtttgagaccagccttgccaacatggtgaaaccccatctctaccaaaaatacaaaaaaattctccaagcatggtggcgcacacctgtaatcccagctactcgggaaactgaggcacgaaaatcacttgaacccgggaggcagaggtttcagtgagcagagattgcaccactgcactccagcctgggtgacagagcgagaccctgtctcaaaaaaaaaaaaaaaaaaaaaagaagtgctctatttcaggagaaactggcactttctgagcctactctcccctaatgccagctctcctgctcaccccaccagggtcagagccaactttgcctccaattcatagtcctttaagtaagaatccttttaatatgccctaatgtcccaaccaaactaatcttgaaagcttctatgtagatacaaagtgctcctgaaatccctatcctcagaaatgcttctgagccaaatgggctctgaaccctaaacaaccgtgtccatgtatgtggcaagagcttgtgaaaaacaaagctgggccaggcgcagtgactcacaactgtaatcctagcactttgggaggctgaagtgggcagatcacttgaggtcaggagttcaagaccagtctggcgaacatggcgaaaccctgtctctactaaaaatacaaaaagtagccgggcgcggtggctcacacctgtagtcccagctactcgggaggctgaagcaggagaatcacttgaatccagttggcggaggttgcagtgagcccagatcacgccactgtactccagcctgggcaacagagcgagacttggtaagaaagagaaagaaaggaaagaatgaaggaaggaaggaaggaaggaaggaaggaaggaaggaaggaaggaaggaagggaaggaagggaaggagtctcgctctgtcacccaggctggagtgcaacggagcgatctcgactcactgcaagctccgcctcccgggttcgcgccattctcctgcctcagcctcccgagtagctgggactacaggcgcccgccaccacgccccgctaattttttgtatttttagtacagacggggtttcaccgtgttagccaggatggtctcgatctcctgacctcgtgatccgcccgcctcggcctcccaaagcgctgggattacaggcgtgagccaccgcgcccggctgaccaaaggtttcttggtccgcattctgcttctgtggaatgagccaggagccagttaggcctgatttgacatctgatttccggaggaaaacccagactctgccctgggcaacaaactgaatcctgaacttgaggtcacagggcaggtgtgaggagcggagagcagcaagagtgaaagggaggcctgtggtcattccatacacacaagagatcagttcctccaaggtcaggggacagagagcacagggatccagcgccaagcgcaaggcccccagaagaagccagagagtcggggagggggcgggggggaatcggtcccagcaggtgggaaggattctgggaccagacctaagggatcatgagcacagctgctgcaggcagacgggcccctggagaagctggggacaagctggaatagagacttcattgcgggaagggctgtcagggaggcctcctggggtggaaaagggtggtcaggaggctcctggaggcggcgcggccccgggggtccaactcacctggggcccggccaccgcgctctcgaccgccgcctctgcccgcgcagcacgggcacagctcgccagcactgcgaacccggatgggtcgtcgggcgcggccctcagcagagctgccttcacagatgtggtgcccaggtcaatgccgagggtgatcggccgcgcagccattatctccctgacccgcgcagctccagtctgcagccagcggccccacaagtccgcgctcttcgcccaggggggcggggcaggggcggggagtcgcctgccaatctttcagccacacccaacatggaggcttctcgtcttcccactggccggggaaggcgagcttccacgcaacctctcggcgggccccggctataggcggagaggcggcggaaggcgggacctaaagggggccccgccccacgggctctgatttccgcccaatggagggcggtctgagcttcgctcacgaaaggagccgggaggcgctggcggctccaagagtctctgtgtccctggcagcggacctcatcttccctcacgccggagccccgatctctgcgccccggcccgacccagctgcgctctgtccgtctaagacgcgcggaaactacaactcccagagctcatctcgccgagatccggccccacgagtcaggtggcggaggtcaggtgacagcggacccgcctctcccaaagtctagccgggcaggggaacgcggtgcattcctgaccggcacctggcgaggctcatgcgtcccgtgagggcggttcctcgagcctgggggcgctcaggtgagagcggacgcggcctcccctgtttcccaggcggaccccttgaggcacagcaggtcagcggggcagcctgccgggggtccagcgccctcagccgcggcgggctcctttccccgccaccagtgctggcctcgcgacacgggacaacccccgggtggaagggcccgagcggtggtcagccgaggcaggggcagcgggctgccggggtgggtgccgttcccagccccttaccttctgctcagttgccgcctgggtctcggttggggaatttgcagattgctttggagacgctgagagaacctttgcgagagcgccggttgacgtgcggagtgcggggctccgggggactgagcagcacgagaccccatcctcccctccgggttttcacactgggcgaagggaggactcctgagctctgcctcttccagtaacattgaggattactgtgttttgtgagagctcgctaggcgccctaagcaacagaggtaaccactttatatccttgtttctcaacctcgttattcctacctacccccttcccataaaatttaataccactagtacgctgtgtatttgtttctgtggccacaaaccattgtaatagctagatttcttcactaccaccccaagccaattttttttttttttttgagatggagtctgcagcctctgtcacccaggctggagtgcagtggcgcgatctcggctcactgcaacctccgcctccggggttcaagcgattctcctacctcagccttccgagtagctgggactacaggcctgagccaccatgcccagctaatttttgtatttttagtagagatggggattcaccatgttggccaggctggtctcgaactcctgacctcaggtgatgcgctcacctcggcctcccaaagtgctgggatgacaggcgtgagccaccgcgcccagcctacccccag

SEQ ID NO: 7656 - DNA, 6000 bp, Homo sapiens
ttgggcagtgggagaattgctagaagggcacgggcctcaaagaggcctgcactgaaggtcattcctcctacaaggacgtgtaaactccatcccagcctgtgttccaactgacccctagccctgctgggctgttgcaccctgttcctcagcccctctctaagggacaggttttctcatcttacaaggggatgctgggcagactcctcaggtgatctgtgcctggcagaaccgggtacaacagggtggctacctcttctgcttccccagtgtttcccaggacccaagactctctctgtgaggtccacagggcagaggcataagccattcttcttttttttcttttaaagtcagggtctcaactctgttgcccaggccggagtgcagtagtgtgatcataactcactgtagccttgacttcctgggctcaggcaatcttcctgcctcagcctcccaagtagctaggactataggcacgagccactgcatatggctaatttttaaaaattattttttagtagacatggggtttcactacgttgcccaggttggtctcaaactcctggcctcaagagatcttcctgccttggcctcccaaagctctggaattataggcgtgagccactgctccagcctgagccagtctttaagatattatcccaggttgttggagctctaccgtttgactttgagaatcagctgcatagtctgaccttaagaaccagctgttcactttggtacagaaaggtacagagataccagggcagaaggccaattatatgtggaactatctggctctttgcagaacacctggatcccagacctgggtctgctccaccaccccagtggccacatggccaagaggcagacagagacatgtggtctgaatgattctaaacccttggcaacaaacagatcagattactccttcctctagccaccatttccctctttacaaagttgacgtgtcatttctaaacttaccacatttctctacgagcttcaggggaaaaaggataaaaatagtcagccaattccttatcatgtttctcgatttctcagaactaggaagaaaaacagcaagagagaagttcaggggaatgttgaatcagctcagctccctgtagacaatctgccctctggagcatggatggctcataaaggactgccacctgacagctgtgacctcagggctttgcatcacggcctcagagggacaccctagagaggacttatctttctttgatatacaggggaaacgggctccgagcagataaatgggttgtgtaaagtgcccccctgaggaagtgaacaaagaccagaatttttccctcttcaattgctttttgtaaaaacttagttagcagaaagaaagaatgcaattttactggcttgagattctttttctccaaaagttgttaaaactgtggtcagatatttgacattgtgaacctataaacctcaaggaaattaatttcctttcctgtcctgggataagagtctaagggctgatgacaccaactgacccttaagacttaaaaaaacatttttttttaatatacatatttaaatttttttttttttgagacagagtcttgctctgttgcccaggctggagtgcagtggtgcgaactctgttcactgaaacctccaccccctgggttcaagcaattcttgtgcctcagcctcctgagtagctgggattacaggtgccccccaccatgcccggctaacttttgtatttttagtagagatggggtttcaccatgttggccagcctggtctcaaactcctgacctcgagtgatccgcccgcctcagcctcccaaagtgctggggttacaggtaggagccaccgcgcctgtcaagactttatttgacaagtgtcaccattccaggactggctggggtcattcacaaggaggactcggggagggatgagccccagagcaagtccttggtttagtgtggaagatggggagctgcattcctgtaaacccaagacacagcaggtgaacagtgggtcaagagcagccaggccggcatggatttctgtagcttggtctccgtgctgcctcagtacacagtctcacgggcctcctgcagactgtggggagctctgggtaaggtctgtgtggagacatccctgttcccactctgatttcagtttccccaaggcctccagcatctccggacatctcccttacacactcctcaagaagtctccctggctgctccagctgtctgacctctgttggcccgtctcctccagggttctctctttgcctgctgcaggtctgcctcatctgagacccttctcaccggccgggaatgaccccgtacctactctctggcctcctctgggggccttgctcttggcgctggatccctgtgctctgtcccctgaccttggaggaattgccctcctgcgtgtatggaatgaccacaggcctccctctcactcttgctgccctccgctcctcacacctgccctgtggcctcaagttcaggattcagtttgttgcccaggacagagtctggtttttctccagaaattagatgcagaatcaggcctaaccagcttctcaaactcacagacttggtcagcaaacattcccaagcctcaaaggctgagacccctggaggaacgatgccagcagagacaaaacgacattgagaggtaagtcaattaaaatgttaaaaaacatcagattaggctgagcgcagtggctcgtgtgtgtaattccagcactttgggaggccgaggcagttggatcacttgaagtcaggagttcgagaccagcctggccaacatggtgaatccccgtctctactaaaaatacaaaaattagccaggcgtggtggcatgtgcctgtagtcccagctactcaggaggctgaggcaggagaatcgcttgaacccgggaggtggaggttgcagtgagccgagattgcaccattgcactccagcctgagtgataagagtgaaactccgtctcaaattaaaaaaaaaaaacaaaaaaaaaaccagattgataattacatacaactagtggcttgtgaaagctacaagatagaaatgaagtatctcctgacaatgggctctgtctggcgtgcccttcctatgtaagttctaactattgtccaggcctcattcagatgtcacatgtttcaagaaggctcctcacccattcagtcccttcccaggagcaacctggggctaggggtctagtgtggcagctcctgtctgccaggtatgagttggtcctgtcctctgttctacgacctggaactccctgggtctcctgcttttggagagggtacacaaatagtggcaagggctgtgtgcactggagacaggcttgacctatttattacttatgcgaccttgtggtgccaaacaaggaggtggtaactacctcacaggacttaaatgaggagatgtaaagcacgcattgtcaagtgggactaaaattggctgggggtaggctgggcgcggtggctcacgcctgtcatcccagcactttgggaggccgaggtgagcgcatcacctgaggtcaggagttcgagaccagcctggccaacatggtgaatccccatctctactaaaaatacaaaaattagctgggcatggtggctcaggcctgtagtcccagctactcggaaggctgaggtaggagaatcgcttgaaccccggaggcggaggttgcagtgagccgagatcgcgccactgcactccagcctgggtgacagaggctgcagactccatctcaaaaaaaaaaaaaaaattggcttggggtggtagtgaagaaatctagctattacaatggtttgtggccacagaaacaaatacacagcgtactagtggtattaaattttatgggaagggggtaggtaggaataacgaggttgagaaacaaggatataaagtggttacctctgttgcttagggcgcctagcgagctctcacaaaacacagtaatcctcaatgttactggaagaggcagagctcaggagtcctcccttcgcccagtgtgaaaacccggaggggaggatggggtctcgtgctgctcagtcccccggagccccgcactccgcacgtcaaccggcgctctcgcaaaggttctctcagcgtctccaaagcaatctgcaaattccccaaccgagacccaggcggcaactgagcagaaggtaaggggctgggaacggcacccaccccggcagcccgctgcccctgcctcggctgaccaccgctcgggcccttccacccgggggttgtcccgtgtcgcgaggccagcactggtggcggggaaaggagcccgccgcggctgagggcgctggacccccggcaggctgccccgctgacctgctgtgcctcaaggggtccgcctgggaaacaggggaggccgcgtccgctctcacctgagcgcccccaggctcgaggaaccgccctcacgggacgcatgagcctcgccaggtgccggtcaggaatgcaccgcgttcccctgcccggctagactttgggagaggcgggtccgctgtcacctgacctccgccacctgactcgtggggccggatctcggcgagatgagctctgggagttgtagtttccgcgcgtcttagacggacagagcgcagctgggtcgggccggggcgcagagatcggggctccggcgtgagggaagatgaggtccgctgccagggacacagagactcttggagccgccagcgcctcccggctcctttcgtgagcgaagctcagaccgccctccattgggcggaaatcagagcccgtggggcggggccccctttaggtcccgccttccgccgcctctccgcctatagccggggcccgccgagaggttgcgtggaagctcgccttccccggccagtgggaagacgagaagcctccatgttgggtgtggctgaaagattggcaggcgactccccgcccctgccccgcccccctgggcgaagagcgcggacttgtggggccgctggctgcagactggagctgcgcgggtcagggagataatggctgcgcggccgatcaccctcggcattgacctgggcaccacatctgtgaaggcagctctgctgagggccgcgcccgacgacccatccgggttcgcagtgctggcgagctgtgcccgtgctgcgcgggcagaggcggcggtcgagagcgcggtggccgggccccaggtgagttggacccccggggccgcgccgcctccaggagcctcctgaccacccttttccaccccaggaggcctccctgacagcccttcccgcaatgaagtctctattccagcttgtccccagcttctccaggggcccgtctgcctgcagcagctgtgctcatgatcccttaggtctggtcccagaatccttcccacctgctgggaccgattcccccccgccccctccccgactctctggcttcttctgggggccttgcgcttggcgctggatccctgtgctctctgtcccctgaccttggaggaactgatctcttgtgtgtatggaatgaccacaggcctccctttcactcttgctgctctccgctcctcacacctgccctgtgacctcaagttcaggattcagtttgttgcccagggcagagtctgggttttcctccggaaatcagatgtcaaatcaggcctaactggctcctggctcattccacagaagcagaatgcggaccaagaaacctttggtcagccgggcgcggtggctcacgcctgtaatcccagcgctttgggaggccgaggcgggcggatcacgaggtcaggagatcgagaccatcctggctaacacggtgaaaccccgtctgtactaaaaatacaaaaaattagcggggcgtggtggcgggcgcctgtagtcccagctactcgggaggctgaggcaggagaatggcgcgaacccgggaggcggagcttgcagtgagtcgagatcgctccgttgcactccagcctgggtgacagagcgagactccttcccttcct

SEQ ID NO: 7657 - DNA, 6000 bp, Homo sapiens
aagaatgctgctcccctctgagggagatcctctattcatctgtgcttgaaactcaagtaacctggcagcatctactataacctaagttcttttctgatgttctagttcttcaagaataaatctatcagccgggcgcggtggctcacgcctgtaatcccagcactttgggaggccgaggtgggcagatcacgaggtcaggaggtcgagaccatcctggctaacacggtgaaaccccgtctctactaaaaatacaaaaaattagccaggcgtggtggtaggcgcctgttgtcccagctactcgggaggctgaggcaggagaatggtgtgaacctggaaggtggagcttgcagtgggccgagatcgtgccactgcactccagcctgggcaacagagcaagactccgtctcaaaaaaaaaaaaaataaatctatcacactcatctatctacctaactcatcctttttggtttatgtttctttgtggccttatactcaccaaggcaccctgtggtgaagacagcaaccacagcctatcgttcggcaacctaaaaagacattcaacaccccccacctccaaacacccaaacagatccttctgtctcctaaacctgcacccccaatgccgcctcacctggtgaccccggatggtgctcaaggagaacatgccagtctccccctcgtctgcaatggaaaccccaggcagatccatcttcagctccacacgctcccgctgctttctctgctcacgcaacagcttctttttcttcctgagggggtggattgagggagtaaaaccggcccagctccaaagtttctatccatgccttgcattttcttctcccatcttcacacagtccctgcgttggggaactccaagctctaccccagctcctttcacctcttcaattccgccacctcctgggccttcatttctgccaaggtctggttcagttgttcctcctcctcctcttcctcctcctccttagagggctgctttgtggttccagctgttgagtcctcctcatcaccttcatcttcctctccagagctgaggctggcaaaacagtcccaagagttgggttattttcccagacttttcccctggacacccagtccacacctgcctcgctgcgttctctcctcacctgatgtccagtgcctttgcttgttctttcagcttcttggccacatatcgccgaagttttgttctccagtttagtagcgacctgccccagagatactattactgatcttgccatctccctctttgtccccgcccccttctgttttaggctcactacccacctttcgggcttcggctacataaatcaaaaggctcaggcccccatcccaaacctttagcacagcaatatcctcttcccagaggtccaacatcatggcctttccctgcctccagggctcctggcccccgtgcctaccccactccatacctgagctccttgcgccccaacactctgatgtcctgacagcacacccgtatgtcctcagtggtagctggatgctgtgccaactcttcatcatctaccatgatctgtttgggaggatggaaaggtgtcaggggagatcctcaggccatgtttctggggctacctcatgtccctcaaggctggagactcacttcgctggccttggagaggaagtcaacagggttggcagctcggaggaagtcagtgactgaggtacggtgatagagagtgaggtcaccctcagcatagccttcagccttaggaaggaaaagagagaagcttggtcaggcccttctaaggtacctgtaggacccaccaggcccaacctccctagagttccaggacccaagagtgaccccattccccaaaacacacctttggcttcttcttagtaaccaattcagtaacggtcttagcctgaacttcaacctccttaaaggcaaatttggggtcaaagaatttactgtcaaccttgtcaggggccaggaatcctaaaaatgacaggatatattaaaaagtgtgctttgggagttgggagcctggatcaagagaaaggaaatgatgcccaccttggcagactacaaagatctctgcagattcatggcgagaggcttggggcttggtggcctggacacggcggaacagctgctgaaagatccatagcagaggctgatagtcacgagaacggaaaacctttgtgatgaagctgccaccacgggccaaaaagtcacaagccaaacgtagagccatcagtgtcaaatgggctgtaggatagagacaattagttgacgcactctgcagcccaggagggcatgcgcccacctccaccatcacctgatctccaagcaccacactccctgtaccttgtgagtaagcatcatggacccagctagccccaacgttgggggccccatcattgagcacaacatcaaccttccaggtcttcagctccttcctcagggcctaaagagaagaaaaggaactatggaaacagaaacactggaatggccctggttcagccatttgtccatctagtcatttgctgagtgcccatcatgggccaaatgcagtaccaggcacaggagatacaatagtaaacaaaaacagtatgtctctaccttcatggagattacagtctgacactgaattcacaggagaagacttcactaaagatctctgcccttctcccaattccaaacacctttatccctgactctaaataaagcctggagtggacactacgaatgccataggtcttgtcgtacagatgtcaggcaagaacgtgctcaaagcacggtaaaaaggaaaaacttgcctttagaggatttcagggatgtagatgtttccgtataaagggggaaggaagagagagactcctattacctgcctacaacgttctgttgtgatgtcctgctggagagtcaccacattggggagaggcttgattggaaccaggtccactcctggaagaaatcaggtcagagtattctaaaaggttgcttcaagcagggaggagagaaatacaggacaaaataccttatacacccaccccttaaaacaccaaggagagctgtccgttactcacccacaataaggctggatacaggcataaacttggcagctacctgcagcctataaaaggaacagaaatttaaaaacctagagccatccttttccccctcttggcaactgatctctcatccctggtgttacgtgtactggccaaagcatatcataggcacgtattccaagccctttctctgcaatcaagaaaggaaacggcccccaagaggaccgggattcgggttcccctcccgcagtgaaactggaagccatcccagctcagaacccagaaagcggccaccaggagcaacctgtggcgagtgttacgaaccatccccctggcgcagcacacaggtccagcaaggctcgggctttctgcaggaactgaaagcggcgattgagctggatcagcttgaaagcagatcgggaacggtaacctggacaaaacaaccaagtgcgcaaactgcttcactagtaggatttctccggcctcgcaaccgaccaccccttctgcaggagaggtacataatggtcgcaaagagcaggcgaaccgggcagagatcgctcgctcgctcgcagactgagcgaatccggactcacccgtctccttcgccaagtgataaaacttgtctcgtcggctcttgccaactttgcccttcttgcccatggtggaaagggggagtatccctcaatctggggagaaagtagaagttgggaacgtctctttccggagcaccagattccacttccagtttcccacttccagtttcccacttcccgcagcaattccaccccgcgcccctctccgcacactacctagacccagagccgctttctccacacttggaaccgcacaagtatgcagctaactacttccgcttccgcttgcgtcccctgcgtccctggctcgaggttttccgccattttgagtgtggccctagattgttctcaatactctgtccttgggttttgtaagttgaaagttgagactaggaaggcatatcacaagaactataaacagagtttcaatgaggcaacactgaggaggagttctactccttcctcatccccttccaaagcccctgaactcgagtagccgcccctcccatcatggttcccttagtgtggtctcgccgcacaccccgcccattgacccggaattcttctctgcctggtcttcaggtcccaatcctccgcttccgcgcttgcgcgccaagacggctcggatgccggcggtctctgctgaagagagaagatggcgcttgacggaccagagcaggtatggcgggtgcagtggcggcccggcaggttacggggctgggtgcggagcgagcgtgatctgagtggagagcgggccggggcaggagcgtcgggtgggtcggaggtgcctggaccagtccatgctggacgctgcctgcgaccggatctgctgtgtcagcgccgccctcggtgagtcagggcaaggctgggagaggaagacgcggtagaagcggagtgagtgagggaagcgatgggcgcgggaatggccggcccacgggtcgcaggagacgggacgccagtcctttggctccgttccgctggctccttcgtcagtactgacacctcgggcttgtagagcacttcacgcagtgcaaagcgccccccgtctatatcatatcgcctctcggtcctcctaaaagtcgtatgaggtaggcggcgttcccattcttttattttagtcctgggaaaatggagggttccaagggagggagggattagaacccagatcctgagcctccgaagtccaaactttttctactacgcaaagctacctggtgtcaagccttattcaaagtgccctgcaagtggctttaccccctcggatgtttaacctgtcgtttaagactcactctgtgtcttcagatggagctggaggaggggaaggcaggcagcggactccgccaatattatctgtccaagattgaagaactccaggtgaggacggactccagagggagctaggaagggtgatgatgggggatggaaacggacttccacaaatccatctaattcctttgggagtgcagtggaagaagctgctgcttctcctttcttgtttgtttcttagctagtagggtgtatgtatcagaagtaagcaatctcttgttctcctccagtcccatctctttgagggtcttagtgttcacagtttgttacacatcttcgagtcaaatcttaatagtaaaggtacctctagccaaaggtcaacccttttggaagaagcccgaatgaaaaggattcttataaaagggaaacataagctcaggagttgaaatttatcaccaagaggttgggtgagggtgaagtgagaatgtgaggaagggcatcattgagggatctggacaatgctaattccatagagactgaatgaaagaaattgggcaacccagagccctagcctaaagcgctaaaccatagaaaaaggaccgtttatgttgttaatcaaatgtttgtgttaccagtaaggcttccagcagtaaggtatggcttccagtagtaagccttacagacaacataaacagtagtctgttagtgttacgttatactgttacggtaggctgttagtagtttaactttggacaggtccatggattttcaatttcaccctaaccccctgcgttgttcaagtgtcaactgtaatataaattggatgggggaaagccacaaaagacaattctgaattccaagtgcatttgcaggtattatgtttagtttaccatttttgaatgctttttcatgtgtttttattcgttcaccttagtagtcttgaagcagggtagctgatgctatacccatgtgccgtttggtaacagatctagatttttaaaaatagattgtcttacctttactttgcttttgattgacagcggctgggctagaactcaggtttctcacctaacaatctttccacca

SEQ ID NO: 7658 - DNA, 6000 bp, Homo sapiens
ggtttcaccatgttgcccagggtggtctcaagctcctgagctcaggtgatccacctgcctcggcctcccaaagtgctgggattacaggtgtgagccatcgtgcctggctccaaattatagcatatttcatacgtatatatacattttaggatggtttgacttaggattgatacatatttatacagtacaagtgttttcagatatagtatctcatttgatctttttactaaccctgtaaggaaattacaagggcagatattatcaatcctatttttaaaatgaggaaacagatttagaaggtaaacagtttaaggggactcaacttataagttgcggagctaaaagcagtttctaccttatacagatgatccccaactttacaatgggtttaccagtacataagccaacataaactgaggagctccttacgacttatgatggggttacccatcataatgttgaaaaatcctacgttgaaccatcctaaatcggggatcctctgctgtgttgtcagcaataaatccattttcaacttacactgggtttatcgggacataacccaatcgtaagttgaaaagcatctgtactcttttcagtagatctttcagattcacttttctggatttgttgaaaaagaaattatataaaaataggccaggtgcggtggctcacacctataaccccggcactttgggaggctaaggtgggtggatcacttgaggtcaggagttcaagaccagcttggtcaacatggtgaaaccccgtctctactaaaaatacaaaaattagctgggcatggtagcgcttgcctgtaatcccagttactcgggaggctgaggcagaagaatcgcttgaatccaggaggcggagcttgcagtgagccgagattgtgccactgcactccagcctgggtgacagagcaagactccatctcaaaaaaaaaaaaaaaaaaaaaagtatatatatatatacacacatacacacacacacacacacataaaatacttacacttctggcaaacttctggctgacagataactggttttacaaaatcttacttctacctaatcgaaagaatggcctagcctcaaatgagacagcaacgtggtacttcaggcagaataaagtacaatcaattacacatatactatgaacattgataacacagaagccagtctgcagaccacgaggagtgttttaatgttttaagagtagtatactaaacatgcttaagaaccactagtcttgaacaattttctgtatatataataaattatacagataaatagtatacaacttacctacaattcactgttgattttccaccttcaaattcagaattcttcccccatcttttaggtaattctaataccataagtccttttattcctataagtgctacatgatgttgtgttgggcttaacaagacttgatagatttcaaacaggggtggatttatgcaaagcaatctctgaaaattagagcaaaccagtcaacatagttaattttaatttaaatataggtggcagttacttgaaatcacagtaatacttagtttactacaattataggataataaaactctggataagtactcacacttgtaccattaactcacaaatttttttttttttttttgagacagagtcttgctgtcacccaggctggagtgcagtggcagcccactgcagactttactatgggggttcaagtgtcctccccacctcagcttccagaggagctgggactacaggtgtgcaccatcactcccagctaattaaaaaggttttttttgtagagatgggggtttcgtcatgttgcccaggctggtctgaacacctgttcccgtgctcacaagatccacctgcctccaccttggcctcctaaagtgctgattataggctacagctaccacacccagcttactcatgcttgcttttaacatccaaagttacaactcatgataagctgctttcttccccatctctaaggttttgagattttggaggagtgaaggttattgagatagtcaccaatatttactgaaagcttataaattctgggcactccagcatttctgtatgctggacatacaaaaataagtaaatagccaggcgtggtggcacatgcctgtagtcccagctacttccaggcgctgaggtgggaggatcactcgacccctgacagtagaggctccaatgagccgtgatcacaccactgcactccagcctgggcaacagagaaagaccccatttcaaaaataaaaaataaaatacgtttttaaaaaatgacaagggcagacccagcccctgccttggagcttacagtctagaaaagaagacagaggcagagtgccatggctcacggctgaaatgccagcactttgggaggccaagacgggtggatcacctgaggccaggagttccagatcagcctggttaacatggtgaaaccccgtctccactaaaaatacaaaaagtagccgggtacggtggagtgggcctgtaatcccaactactcaagaggctgaggcaggagaatcgcttgaatccatgaggtggaggttgcagttagctgagattgcaccactgcactccagcctgggcaacagagcgagatcctgcctcaaaacaaaacaaaacaaaaacagccgggcgcagtggctcacgcctgtaatcccaacactttgggaggccaaagccagcagatcacgaggtcaggagttcaagaccagcctggccaacatggcgaaaccccgtctctactaaaaacacaaaaattagtcgggcgtggtggcagatacctgtaatcccagctactcgcggggggggctgaggcagaagaatcgcttgaaactggaaggtggaggttgcggtgagccgagatggcgccattgcactccagcctgggcaacaagagcgaaactccatctcaaaaaaaaaaaaaagacacaaaataattataaataattaagttatgattatgtcaaatgctacacagcagtatagaatgttattagaatactgcgtgctgcacatttggtaattattattattttttgagacacagtcttgctctgttgcccaggctgtagtgcaggggcgtgatctcagctcactgcaacctcctcctcccaggttcaagcgattctcctgcctcaggcacctgagtagctgggattacaagggcgcgccactacacctggctaatttttgtatttttagtagagacggggtttcaccatgttggccaggctggtctcgaattcctgacttcaggtgatccacctgcctctgcctcccagtgttgggactgcaggcgtgagccaccgcgcccggccttcataattctttttaactgaaattgggtaaataagtagactgtagactcctgccctattttcaaaactgcagaagcattgctagcgtcttattaaaattaaatcacttctcggtaacaagaattggaccgggcacacaacagatgtcataccttagaatgagtaccaagctctttttcatctttaagagaatctgtgtattacaaataaacatttccataaaccaatatttgaccacggcaagtgtgtaatactttctggatcacacccattttcacatgctgtcggctaatcaaaaacaaaaatccccattttgggtatggctttattttctaaagcgggcgttacgggggtaagaattaacagagacttcctcctccatgtcaagcatgaagcgtggtgctttgaaacctgcaacctgacttgctgtgcacaacgcaagagaaagttacgatctaacctattataagcgtcacatcaggaaacaggtttctctcgacgaaactaaaaatagcaactccgcccactcgttctcaacccctttagcccgctttgtttttctccagagcactcatccgtcactagtatttttattgaatattcaatgaccctttccttcctcccaggcctccaggccgtaagcatcgagagagcctgagtccccgcgaccgcgtatggcagcgtcggagtcaatccgctggaacgcctgccacaagatgaaaaacagccaagaggagcaaggaacaaaaaagactggttccgatcccggtgagggtcacttccaagatcggcctggcattacctggtactgggacagggcgggctcttcgccgccgccgctggggccccgaaggcgaacgactaagaaggagctgtcttctccgtcccacaggaaaagctctccgccgaggccaaagaccacgtttctcgtcagcaactgcggcggcggcgacgaaggcaacgacgaagaagctggtttctcagcttcggttggactctggtttttcagtccctcccggagccgcaagaacacgacgtggttaggaagccaggtctgccacagctcgccgtcgcccaccggtccctcggcggccgccatcttggcccaactgctcccctcactccagttgctcagcccgccgctgagcacagccaatccgcggccgtccactcactgtttcggccaatcaccgagcagacggcccggaagctcgagaggctcgtgccaggtcggggggcgaaggcgaggccagcccaccaagcaggggcgtcaccaagggaaagccaatcaccattatttctgaagcccaagggggcgggacgagaagtcaacataatggtggtgctgctggaaatctagcacctggggagagcctgagacttgtgtatctaattgcctattggacacctccatctgggtaaacccaggcatccagaactttccctcaagacttacctccctcagtgcaggtcgggctggcctcacgcatttcgcttggatgcctaaatctgtctccacgtggggccggtcgataaaacaacacttcccagaatacgctgcgatccattcgcggtctgcacccggaaagtacacctcccaggggtctgtgcgcgcctccagggaacgggtcttgtggctttgtctcccgcgaagaggagatggcggagtcgttgaggtctccgcgccgctccctgtacaaactggtgggctcgccgccttggaaagaggctttccggcaggtgggtatggggtttgtgcagtggtctaccctagatcgtcccggtgaccgccgtcttccctgccttcgccttagccctgctccgtggagcaggtgccgcagcgcgcctggtctggtcaaacccaggcctgctgactgtagagtgtgggattagcccgggtcggtcaagtcctagaaagccttgtttttggattcgattttgttttgaatttaaattgtggtcaggacatcaccgtttgcacctctgcaataacactacctactgttgctgcggaggtggccaccgagagaggcactttgtctacgttcgtcttgtgagatagagatgatttctattctagagagtagtaaaatgaggcttagaagagggctccacctcagttctggcctcttctgaacacagtgtggttattagtaagtaatgtccaagaaagtaacccgacgcaagaaagatagcagatacagcagagtttctcagccttgacaatggacattttgagggagatatttatatgttgtggagggttgtttaagccacgtctcgggcctccacccactagatgctaatagtcctataactagaattgtgacaaccagaaatgtctccaagcattgccaaatgttccttgggggacaaaacctccctgagttcagaaacgctgctgtgcaggaaggccgttacccagccatatctagagtagcaagaatttggaaggaatataaatgttctgtaataggacattggatgctgagatattatgcacacaaccattaaggaaactggcaagctagaataaaaaatatggttctttgtaaatacgtgtacaaagcattgtaattttatgtatctctacagaggaatatgcaaaagtaacactagttagtattatcattgaaattttgtgtctataaactttctt

SEQ ID NO: 7659 - DNA, 6000 bp, Homo sapiens
cttattgacattcctgagaagatgtaagaacttgtgaggggagtcctgtatagttcttctttcaagataccagacagagcctcctacgcaacctataatagagagagaagtggaagaaaggttaaatgattcgtacttcttatcaaatgatgactacacctccccagaagcaaagccagccactaaggtaagcgctacactgtgtgatgggtcagagctttgaaataatctaatccagatttgtgaataaatgcaatttaccagccctactcattgtttaagtccgtgtaggtcttcagaagggccagggaaaattttcatttcaggatcactatgctttactacatttaatgctgaaatgaccacgctacatatcttcttaagaaaatataaaacaacccgttcagtcaatttttcaaaagtagaaaataaaaagcacaatttttcttaataaatgacaataaattgaaatatatagatttcaggttaatattttaactaagtagggtaagacaacaaaagggaagaagaaacagttctcaatagagtatgactctatcagtctagttaggaataaactatttttattgtatctaaatttggcttttagtcattctactgaaacttctctcaagtatcaacaaatccaatgcttctctgccttggtcctcctcctactcaagcctccgacaagccatagaacactacagattctcccgaaggcttccatgacactaagtgttcctggttctctgcattctatttctcagttgcagatggtgtctattcttgctatgtatgccaccttaaggtatccatgttccctctttctgaacattaaatattgtccctgagcaaatgtaattataggataatttctgatcttcaaaccatttctagagtcatcaggtctatttccatctcctctcttggtatctctatatggatggattgcaaaatgtctttaagagtgttttattctcaaccaatctctactctgttccctattgtacataaaaccattacttaagacttcaggaacatctgaagacttcaggaacatcctgaactctcctgttatcaattaacaatcatcaagtccaatctactctgaaatataggtcagatctgtccacttcttcccatttttactgatcatcttacattcatcatcttacatttggactatggtaacgatagcagcattcaagccagtcctcctgccttcaatacttcctttcctctccaatccacgttcccagaggcaacagttttcttcctgttacatattactaaatacatattactcacacaacccaccaaagcaacatcgcccatgaccctccactgaaaacaccacacgtttcacaatttgttcatctgtttctatcgtttccttatttgcacaccactctgtcaaattttctgtctttgtcaactactctatcactttatgccatgttgcatgacacttcttcatgcaaattgttcccatcatctaattttttagttccttgatggcaagaattctcctttactcaccacctttgtacaacagctagcagagcacttttatataataaggaaatgatgtttgatgactagatagcccacacagcacacctggactatgggaaggagaactatcacaaccccaagaaatacatcacaattttcttagactggagataaatcacttcttcactgaaattatggtctcaaacctgagttaattatgacatgcttgttttccataaacatgaaaatgtgtttgtcttggaaccaccttggaaaataactctcatgattaagtgggtggattacctgaggttaggagttcgagaccagcctgaccaacatggtgaaaccccatctctactaaatacaaaaaactagacaggcatggtggtgcatgcctgtaattccagctacttgggaggccaaggttgggggatcacctgaggtcaggagttcgagaccatcctggccaacacagtgaaaccccgtctctactaaaaatacaaaacttagccggccgtggtggtgggcgtctgtaatcccagctactcaggaggctgaggcaggagaattgcttgaacctgggaggtggaggttgcagtgagccaagattgtgccattgcactccagcctggacaacaagagtaaaactccatctcaacaacaacaaaaaaaagattacgtgggtcaaactgagattttacagaatggtagtaagaagaaaaaacagctatgaaactgacatttcatttcgttgaaacatgtcacatttttatgaatcagtgcctagaaactgaaagacatttcagccttgtgtaaacaaatgtaagtttagagatacacaaagattataatagatacattaaaattctggaagcataagaccatatctattattcaccatcaacactggctcctgattttaggacgtttaaaattaggtaaggagacaaacagctaaaaaatgctgacatttttaattttttttttattttttgagatggagtctcactctgtcacccaggctggagtgcagtggcacgatcttggctcactacaacctctgcctcctggattcaagcgattcacctgcctcagcctcccaagtaactgggatttcaggtgcacaccattgcgcttggctaattttttttttttttttttttggtatttttagtagagaaggcatttcaccatgttgaccaggctggtgttgaactcctgacctcaagtggtccacctgccttggcctcccaaagttctgggattacaggtgtaagctactgcgcccggccagtgatgacagtttttaaatggctgtaaaatacttagaacttttagaagcaaaatcaggcatgatactactcgatcactaacactgtcccagtttaccttctctgccaccttgtcccaccatgctgcttccccatcaagctctcttagtagatcttccaaatggatcacagggagttatacagaccacttactagcagagtttttggcaattatgttcacagcttcagggagtaagctgtctattaattccttccataccaccactgcaaagactgatgcagcaacaaaccatatgggccacatgcagcccacctactggaactgggcaattcacagtagtcaagcagaattgtcctatagctgacaatatagaatggaaaggcagaaaaacagctaatctgaaggatgcatgctggaaaaacctccatacagagaagatatttgaagcaacataaaaggatgagttctctgagaatgagtgcccaggatcaggatcaaagaacattcacagtcaggtatggtagaatgtaacaaagaagtgattcaaaaaagaatcacaggactttaaaaaacaacaaacaacaacttttcattatggaaaatcacagccatgtgtaaaagcagaagagtaccatgagcccccattacttatccccaagcttcaacaattaccagaccctagccaatctattctacctctccactttacaaaccaaacaggacctttgagatcacctacttcaattacgtcattttatagatgagtaaactcaattccagaaaagtcaaatgaattgccctggaatcacacagaccagaagacagccataaaataacattatgaaaaagaacgaagaacgcaatttcatggagtcacagtgtcaacatcaccagatggtgcagagagcttgtgtgtggtaggtgacaagtgaaaaaagtttctgggatgtgatcaaaaggcagtccctggcttctcttatctggcctctaatatgcaccaccggcatcacattcctcacacaaccattagttaatcatctaacgtcctctttaagatctccatggggacaaattgcatccatccacaaataactattgggagcaaacaatgtacactaagtactgttctgggcactggaaacacagaggtaaaccagagatggacactgtccctgccatcacaaggtttatattctagttgggaaaaacaaataataaacgagtatataaataaacaagtatagactgtgctaaccataatgaaagaaataaatggaatgatgtgaaaagaaagaagtagggggccctagtttatatagggtggtctctataaaggcctctctgaaaaggtgacatttgagatgagccattaccaagagtcaaggaagaacattccagctccaatatacatttgtcactagtttcttcgagtgaaaggatattaaagaccactctggcggtacagagacaaaagtctgatggggactacactccgctgtctgcaactgtcattatcatcaacgttgtcatcatgaccctttatattggaacaaggcttctgagtggaagcaaagcaccttccttgtcattgcaagccagtggctagaagccgaggctctgataaggaggactgtggaaccccaaggttctgctctgccctctcctccagcttccactatctgaaaacctaaagaagcaggaagacaccgctcttccgcagaagccggatggaggaggctgtgtggaccactaaagccacagtgcaagactggaccctagctccgtgacctcttcactccaagctactccagaggtcatttcccccaccacaccggtggccggccaacctcgccaagggctccccaaggttgcagccagccggaaccacggcctcgcacgtggtaataagagaagaatttcccccaaggtcgtgcccaaggcgggtacagtacctgtcaggaggcgtgaggagagagtgtgcggagatgcggccataatttacgagtctggggccgctccccgggatccctgtgtcctctctcctcacgggacgctgggcgccgccatcttccttccccgcccccctgtgggagtagttccgggccgccacttccggcgggcgggctccgaaaggagagcgtggtgtctggaggtgatcggaagggactggctggagtgtggcgggctgacaggtctgaggcctgaaggacttccgggaaccgcaaagcacggtgtgcctccgctgtcctgaagaaaaagccgcgcgcggacgactggccggcccgcgcttgcagctcccagaagttgacaggcatcctccggtgaccgggtgaggtgggcagggttgggctgcagagtcctcccgggcaatttaaagttacagcggccgggcgctgtggctcacgcctgcaatcccagtgcttagggagaccgaggcgggaggatcgcttgatcctgggaactcgagaccagcctgggcaacaaagcgagaccccgcctctacaaaaaatgtaaaattagccaggtgtggtggcgcgtgcctgtggtctcagctactcaggaggctgaggcgggaggatcgcttgagcctgggaggtcgaggttgcggtgattgcgccactgcactgcagtctgggcgacacagtgagaccctgtctctaaaaataaattttaaaataaaaataaagttaaaattagaacacttcccggtgacaggagcatcatgaggaaatggttctcgtggggatgcttccacctccacgtctaatcaattacactttaccgtagtctctatcaaatgggagcccagaggaactccgggttacttgtttctgagccacactaaaggaactgaatcatccagatatctccagattgcatgtagaggttcagatttggtggtctggagtgaaatccgtattctagttctggccttttgaccttgttggagcaaattacctaagtcctctgaacctcagttatctagcaatacaatggagtagtaatggtacatcttttataagaggttgagagaattagataaatgtgtttcatgggtagccagacacctactaggtacaggcactaatagattattacctgtgttatcataagtgttgtgattaccagggtagatctcagcatcccccaacccctcgatcttcttttcagattggggttccacaa

SEQ ID NO: 7660 - DNA, 6000 bp, Homo sapiens
ttcttgagtgtttatcacatatgagggattacacctatctttttttattcctcaccaaaaactctagtaggtaggttctattattgttttacagatgaggaaactgaggcagcaaggataagtggtagtcagctcagtcacttcacaaagctccaggtggtagagctgggaaggaaacctgagcctgtgtctgctctagggccaccatgctctactgccctcctgtacaacaaagatgacctgattatgacactcccacacataagccacaaaagttcattttgtttgtgaccctgattttgtcaggaaaaacatgttcttcagtattcagtggaagtaccctaatgcgagtgctcacttggtctcaatgaactaaagaatgctgctcccctctgagggagatcctctattcatctgtgcttgaaactcaagtaacctggcagcatctactataacctaagttcttttctgatgttctagttcttcaagaataaatctatcagccgggcgcggtggctcacgcctgtaatcccagcactttgggaggccgaggtgggcagatcacgaggtcaggaggtcgagaccatcctggctaacacggtgaaaccccgtctctactaaaaatacaaaaaattagccaggcgtggtggtaggcgcctgttgtcccagctactcgggaggctgaggcaggagaatggtgtgaacctggaaggtggagcttgcagtgggccgagatcgtgccactgcactccagcctgggcaacagagcaagactccgtctcaaaaaaaaaaaaaataaatctatcacactcatctatctacctaactcatcctttttggtttatgtttctttgtggccttatactcaccaaggcaccctgtggtgaagacagcaaccacagcctatcgttcggcaacctaaaaagacattcaacaccccccacctccaaacacccaaacagatccttctgtctcctaaacctgcacccccaatgccgcctcacctggtgaccccggatggtgctcaaggagaacatgccagtctccccctcgtctgcaatggaaaccccaggcagatccatcttcagctccacacgctcccgctgctttctctgctcacgcaacagcttctttttcttcctgagggggtggattgagggagtaaaaccggcccagctccaaagtttctatccatgccttgcattttcttctcccatcttcacacagtccctgcgttggggaactccaagctctaccccagctcctttcacctcttcaattccgccacctcctgggccttcatttctgccaaggtctggttcagttgttcctcctcctcctcttcctcctcctccttagagggctgctttgtggttccagctgttgagtcctcctcatcaccttcatcttcctctccagagctgaggctggcaaaacagtcccaagagttgggttattttcccagacttttcccctggacacccagtccacacctgcctcgctgcgttctctcctcacctgatgtccagtgcctttgcttgttctttcagcttcttggccacatatcgccgaagttttgttctccagtttagtagcgacctgccccagagatactattactgatcttgccatctccctctttgtccccgcccccttctgttttaggctcactacccacctttcgggcttcggctacataaatcaaaaggctcaggcccccatcccaaacctttagcacagcaatatcctcttcccagaggtccaacatcatggcctttccctgcctccagggctcctggcccccgtgcctaccccactccatacctgagctccttgcgccccaacactctgatgtcctgacagcacacccgtatgtcctcagtggtagctggatgctgtgccaactcttcatcatctaccatgatctgtttgggaggatggaaaggtgtcaggggagatcctcaggccatgtttctggggctacctcatgtccctcaaggctggagactcacttcgctggccttggagaggaagtcaacagggttggcagctcggaggaagtcagtgactgaggtacggtgatagagagtgaggtcaccctcagcatagccttcagccttaggaaggaaaagagagaagcttggtcaggcccttctaaggtacctgtaggacccaccaggcccaacctccctagagttccaggacccaagagtgaccccattccccaaaacacacctttggcttcttcttagtaaccaattcagtaacggtcttagcctgaacttcaacctccttaaaggcaaatttggggtcaaagaatttactgtcaaccttgtcaggggccaggaatcctaaaaatgacaggatatattaaaaagtgtgctttgggagttgggagcctggatcaagagaaaggaaatgatgcccaccttggcagactacaaagatctctgcagattcatggcgagaggcttggggcttggtggcctggacacggcggaacagctgctgaaagatccatagcagaggctgatagtcacgagaacggaaaacctttgtgatgaagctgccaccacgggccaaaaagtcacaagccaaacgtagagccatcagtgtcaaatgggctgtaggatagagacaattagttgacgcactctgcagcccaggagggcatgcgcccacctccaccatcacctgatctccaagcaccacactccctgtaccttgtgagtaagcatcatggacccagctagccccaacgttgggggccccatcattgagcacaacatcaaccttccaggtcttcagctccttcctcagggcctaaagagaagaaaaggaactatggaaacagaaacactggaatggccctggttcagccatttgtccatctagtcatttgctgagtgcccatcatgggccaaatgcagtaccaggcacaggagatacaatagtaaacaaaaacagtatgtctctaccttcatggagattacagtctgacactgaattcacaggagaagacttcactaaagatctctgcccttctcccaattccaaacacctttatccctgactctaaataaagcctggagtggacactacgaatgccataggtcttgtcgtacagatgtcaggcaagaacgtgctcaaagcacggtaaaaaggaaaaacttgcctttagaggatttcagggatgtagatgtttccgtataaagggggaaggaagagagagactcctattacctgcctacaacgttctgttgtgatgtcctgctggagagtcaccacattggggagaggcttgattggaaccaggtccactcctggaagaaatcaggtcagagtattctaaaaggttgcttcaagcagggaggagagaaatacaggacaaaataccttatacacccaccccttaaaacaccaaggagagctgtccgttactcacccacaataaggctggatacaggcataaacttggcagctacctgcagcctataaaaggaacagaaatttaaaaacctagagccatccttttccccctcttggcaactgatctctcatccctggtgttacgtgtactggccaaagcatatcataggcacgtattccaagccctttctctgcaatcaagaaaggaaacggcccccaagaggaccgggattcgggttcccctcccgcagtgaaactggaagccatcccagctcagaacccagaaagcggccaccaggagcaacctgtggcgagtgttacgaaccatccccctggcgcagcacacaggtccagcaaggctcgggctttctgcaggaactgaaagcggcgattgagctggatcagcttgaaagcagatcgggaacggtaacctggacaaaacaaccaagtgcgcaaactgcttcactagtaggatttctccggcctcgcaaccgaccaccccttctgcaggagaggtacataatggtcgcaaagagcaggcgaaccgggcagagatcgctcgctcgctcgcagactgagcgaatccggactcacccgtctccttcgccaagtgataaaacttgtctcgtcggctcttgccaactttgcccttcttgcccatggtggaaagggggagtatccctcaatctggggagaaagtagaagttgggaacgtctctttccggagcaccagattccacttccagtttcccacttccagtttcccacttcccgcagcaattccaccccgcgcccctctccgcacactacctagacccagagccgctttctccacacttggaaccgcacaagtatgcagctaactacttccgcttccgcttgcgtcccctgcgtccctggctcgaggttttccgccattttgagtgtggccctagattgttctcaatactctgtccttgggttttgtaagttgaaagttgagactaggaaggcatatcacaagaactataaacagagtttcaatgaggcaacactgaggaggagttctactccttcctcatccccttccaaagcccctgaactcgagtagccgcccctcccatcatggttcccttagtgtggtctcgccgcacaccccgcccattgacccggaattcttctctgcctggtcttcaggtcccaatcctccgcttccgcgcttgcgcgccaagacggctcggatgccggcggtctctgctgaagagagaagatggcgcttgacggaccagagcaggtatggcgggtgcagtggcggcccggcaggttacggggctgggtgcggagcgagcgtgatctgagtggagagcgggccggggcaggagcgtcgggtgggtcggaggtgcctggaccagtccatgctggacgctgcctgcgaccggatctgctgtgtcagcgccgccctcggtgagtcagggcaaggctgggagaggaagacgcggtagaagcggagtgagtgagggaagcgatgggcgcgggaatggccggcccacgggtcgcaggagacgggacgccagtcctttggctccgttccgctggctccttcgtcagtactgacacctcgggcttgtagagcacttcacgcagtgcaaagcgccccccgtctatatcatatcgcctctcggtcctcctaaaagtcgtatgaggtaggcggcgttcccattcttttattttagtcctgggaaaatggagggttccaagggagggagggattagaacccagatcctgagcctccgaagtccaaactttttctactacgcaaagctacctggtgtcaagccttattcaaagtgccctgcaagtggctttaccccctcggatgtttaacctgtcgtttaagactcactctgtgtcttcagatggagctggaggaggggaaggcaggcagcggactccgccaatattatctgtccaagattgaagaactccaggtgaggacggactccagagggagctaggaagggtgatgatgggggatggaaacggacttccacaaatccatctaattcctttgggagtgcagtggaagaagctgctgcttctcctttcttgtttgtttcttagctagtagggtgtatgtatcagaagtaagcaatctcttgttctcctccagtcccatctctttgagggtcttagtgttcacagtttgttacacatcttcgagtcaaatcttaatagtaaaggtacctctagccaaaggtcaacccttttggaagaagcccgaatgaaaaggattcttataaaagggaaacataagctcaggagttgaaatttatcaccaagaggttgggtgagggtgaagtgagaatgtgaggaagggcatcattgagggatctggacaatgctaattccatagagactgaatgaaagaaattgggcaacccagagccctagcctaaagcgctaaaccatagaaaaaggaccgtttatgttgttaatcaaatgtttgtgttaccagtaaggcttccagcagtaaggtatggcttccagtagtaagccttacagacaacataaacagtagtctgttagtgtta

SEQ ID NO: 7661 - DNA, 6000 bp, Homo sapiens
gcggggcaaggttggagtgggtgtctgagcagaggatggatcacctgattccccctccgtggccaggttgagattagctggcagactgtgcctctttggggagacagtgggtgagcctagtccagtgcctgccatccctaccatggccccccatgggcgtaaagaacttatggagaggctgtctgcagagtgtgtgcctgggactgcctggaggcacccttacaatcctcagggggcacgtagaggttgcagggacactccgtccctcactgcccccacaaaggcccagctctgagccctagagcggtgccagtgcctgagggtctgcatgtgcgtttgtgggctgtgtccacggggtgcccggctttgtgcccgcgcccttaccgtcctcggtgggcacgtagaggttgaggtacaggcagtcctcgctctggttctgcacgtaggtggcggccgcctccaagttgtcggtgaaccacacaggcagcatgatggcgggcagcgccccgtgcaggttctgcgggcaggcgggcggcagggtggtggcgttgcgcacgccgggccacgaggcgggcgcctcaggcggctggaagcggcgggcgcccaggggcggcgtggcgtagggcacgcccaagaactgcacgacggggcccaggatctcgttgttgagctcgcgccgcacaccgcgcactcgcccgtaggccgtgttcaccaccgggaagcgctcctcgccgaggctgccgaggcccaggccggggccgcccggggcgccgccgccgggaccccctcccccgcgttgagcccccgccagccccaccagacacagcgccaggagccacatgctgatcgggggaccccccctccctccctgggacccccccccctcggagagagagagaagggggggagagggagggaggcccccctcgccccaggagggaggaggggcggggggaaaggagggaggagggggttggggagggacctgggttagactggacagagaaggggtctgttcctctccatggagggggcacggggtggggaaggggaaggaaatgggagaaggtgaaggcaggcccgacctgcggggggtggagcgagaggggcagggaggcaggatacagacagacggacagacagaaaaatacagaggtggaagagggcaagggaaattggatggggcagacagaaaggaatggggaaacagaagagacaagtggttagtgacctggaattcagaccaagttgcccccttctcccacccacaggccccctgacacctccccactcccacccagcagcccttctcccctcagcagacgcctaggttgggggtggggcccagatgtggttcaagtccaggacccagccagaggagaggcgggtcagctctccagacccagcatgctcccttccagctgatgtatccctcccaggcaggttctcctcagggactcaggagtcccagctcccacctccctgggagggaatgaggtagacaaggaagagaaaacaaaaataccaagtcattaattagctggaagaggcaggtttgtttatatgtgttaattactcctgagctgtaatttcatggcgctgaacccccaccccaggccagactcaggcctttcttgggactgcacaaacctagcaccttatccccacttcaacacaccattcgctaaggatttgtgctgcctgcgacccctctctccccagactctctccatttcctccgtcagaagttggggtaccttgaggctggggttagagtagggaggggacgctggaggggcaaatccagggacagatgcgtgatcctgcagccggttgccgggtgacgggatgctgccccgcaatgttacctcggcaacgggctgcagctttaaccctggaggggggttctggaggaagacgggaaggggctggcttggtttggtggtccattcagggcatgaaggggagggcaaaggcgtgagtcagaatgcaagagttccccccaaccttaacatagaggaagaagtatatatgttgagaggagggggagattgggggcaccaagaacgctaaaagccctgcctgttggccaatcaaagcctagccttagtgaccaggcctctggcttgggagagggggtgctgaggtgggcttgaagagacatcacaggagcctactgactgcccccctccagcaatttcaagcaaccttggaccccaccaccttttcatctttgcaagccattgtgacccatgtcctgggggcaacactgagctttcttctcttcccatcccaacccatccattcacctacccttccccttgccaccccccctacagttgctgctctgatgcctgggtgctcagggcagcaggggccagccaagggagaagatcagaccggaggggcagacacccaggtcatttcggcaagccccccccccgcccccccaccagccgccagagctgtttgctgacgcggggttttcagagccaggcgccagcccgcgggtggctctctgcaggtgtcaatttattccagagatgaggacacaggaatccttaccacacacacccagtcatgccccctgcctttcagcttctctaaggctcctctattcctccatcacctggaggtggctcggggctgattcccccaggatctccttttcctgtgccagactgggctcagctaccatggccttgctgccccctccccctccccacaacaagatctgcctcagtcaccctctcctcttgagggtactctgggcccctggcctcctcccaccagctccgctccctccttccctcccactggaggcccccccatctctctcctctccgtagtgctccctgggagcatcttttgtgggcctcttccagcttgccccagctcttgccttcagtctctcaccctcggtctttttacatctttctcttctgtatctctctccttggtgtttctcatttctttctctctctccaaatgccttccccaaatttcccccttaagccttctgtctctctctcctgtctttccccatcactgtctcccccattttctctcctcatctctgtctgccacatcttgctccctcctccttctccctatccctctgccttctctctccattcctgcccaggcctgactcccccagccggggagagttgagggacgggggctcaggccgcaggcccccccttcctgcagtggtgaaaatggcttggctgggaaggggagaaggagggggagggggagatgggaacacacggggtctgtgggcccattcaaaggatcattcatggactggagagaggcagagacaaagagaccaagacgcagagacacggcgagagcatccctaggcggagacacgcagacagagcaggctgggggaaaccaggcgcagggagggagatggggagagggagaccccagtggaccgccacgcagccccctccaccgacccggcttaggtcctacctggctcagccctggggccgtggtgcctccatccagggctccgagtggggggcgaaaggccttcgggagggggcggcggcctctgagcccccgcggccccgcaggcccagcccccgcccgcagcgcctcacccggcgggggagggggatcgccccagccccggggggcggggccgggatccagtcgatccccgggaaaaggagagctaggggatgggatcagggggagcccgagaacagggaaccccgcagtagggacgatagagaaaggagggggcaacgggacaggactagattgaggatccgctggttccgtgggccggcttcgagggaccagaaggcggtccaggcggaggatcctaaggatcgggtgctggaggaggagtccacgttaatccccaggggcccggggcccgggagcgcaggatccgcggtgcaggggcagggatccagccggaatcctcggggagggggagggatctagtcgatcccgagggcgggcgtgagggggaggtccggggagtcagaggagggcgggagccgagtccagagccccggggcgggggtcagcgcggatcctaggagggaaggcgggggtgaggggaggcttcgagggacgctcagcagccgggaggcccggactcctggctccgcgcgccagggccggcccgccccgcgtccatcccagcccgagagtgatgatccgccggcggagcagccgcagcagccccgcgcgtcaccgcgcggccgcctcccccgccccctgccgagagagcggcgcacaccccccgctcgcaccccccgctcgcacccgcctgcccgcccgccctccggagaatggggggattggagatggtgggaagaggcgggagcggacagacggacagatggacgtagcgggccagggcagggtggagacattcccccggatctcccaccctcggggctctcgcggtctcggagggctggcgggggggagaatatcttaactacagggggcggggcatcatacaaagaaggcggagccttcagacatgggggaggggccatttgtgcagtgggcggggtttactggcaataggtggggctttgctatctttcgggccgcctctttttggtagtgggtttgatttgaagctgaacaggaggagcctgtggaaaaaggggcggaactttgagagaagaccgggatctttggaaattggccggagcatgggggtggggggttcgaagaggcgatcaacttggaaagtgggccaatccttgacgcaaatccccctagtcccgccctcaaccccgcccccccactgcttagctcctctgttcctaattggtgctggtttctccgcccgccagacgtcttcgccactctgcagcggttttacaaaggcgggtgaagagcgcaatgctgaaatgaacacggcccggattgggcgcctgtgaaccttatttgcatgggcggtcgggattggctggcctcttgggtggcctgggcggcgttggtccggtgcgtcctgttctacagctatggccgggccagctgcagctttccgccgcttgggcgccttgtccggagctgcggccttaggcttcgcttcctacggggcgcacggtcagggggctggggacgaagatgggactgtacttggggcgtcctctggggtctgctgcaagggcgtaacctatgggaggtgcccggcctctcgtttatcagacagtccgcggagccctaaaccttttaaagtcccccagctgggtccaattggttcccagtactgcccgagcgtgttcccaccaatcggaagcttcctggggcgggggggggggtgccctttctcgccaatgtccacctgggtccccccggattgggggcggtcagggctggcactaggaccgctaacctttgcttcttttctccacaggcgcccaattcccagatgcctacgggaaggaggtgaagtaactgcgctggggctccctgactcgtgggtctacgaaggcacaaagtctggggtccctgggggaagtgggcggggagagggtggggcgagccgcggatctctggagcagcaaaggccaaaggctctgtaagccaaaggcctgggatcaagctgggacttcaagggtggggtgggggaaggaactttggtcccttgtgtcatcaggggatctcagtacctgtattgcctacgacatcccttcgtttctgtttttcttacagctgtttgacaaggccaacaaacaccacttcttacacagcctggccctgttaggggtgccccattgcagaaagccactctgggtaatctttccctgcgcctaaccctgaccaagccccacacactccctctcagcctgccctgttcttaacaatcctgttttctgtgctgtgtctccttcaggctgggttattgctagcttccggaacgaccttattctgcaccagcttttactaccaggctctgagtggagaccccagcatccagactttggcccctgcgggagggaccctgct

SEQ ID NO: 7662 - DNA, 6000 bp, Homo sapiens; identical to SEQ ID NO: 1915

SEQ ID NO: 7663 - DNA, 6000 bp, Homo sapiens
agcctcccaagtagcccagctaattttttattttatgtagagacaggggctccctatgttgctcaggatggtctcatattcctgggttcaggagatcctcccaccttggcctcccaaagtgctgggaattataggcgtgagccactgcacccagccgttccctattttacagaggccaggggtatgtgatctgccccaggtagcacagctagaaacaagctgtgatttcaaacctgggacttcccactcaagccagaaggacagaaggtggggactgagacagtggcactggcacactcggtgctggcacaccctggccaccccctggcctgctgcctcctcaggtccagccagacggtcctcagccttccccattacctttgatgagctgcacctagcacccttttcaggtacctcctccatcacagcttgtgcctcacggcgagaccactgccacatggcctgtctgtcctctgagccccttctagggtgaagggaatggtgtcttgtttatcacggtagccctagcacccggcacacctggcacacagtgggtcctcagtaacgaatgaagtaaaactctagatttccctttggctctgctcagttaaaaatcacagtgaggacctactgtgtgcacctggtgtacacagtaagaggtctcctgggcttcaggcaatggtgtgctggtcagtgtttaacaatggctgtggtggccagtgcgatggctcacacctgtaatcccagcactttgggaagccgaggtaggaagattgcttaagctcaggagtttgagaccagcctgggtaacatagtgagactgtctctacaaaaaaattgtttttaattagccaggcatggtggtgcatgcctgtggtcctagctacatgggaggctaaggtgggaggattgcttgagcctgggaagttgaggctgcagtgagccacgatggcatcactgcatttcaccgggacgacagagtgagagcatgtttctacatatacattgaattaaataaaaaaataacaacggctctggtctctggtgcttgacgtgtagcgtttgccaatttctgtggtgtaaacatttctgtcgtggtctatttcaagccaccagcaggaccccctctaacagacaaaattcaagtggtaggagctggctccagtgatttgtccactagtgacactcagagagcaagtgacacgtcagcagtgcctctcttctccaaattcctataaccctcttgactacacctctggggcctcagtgcatcctctgggtgcctcagtcctgggtgggtgtctcctctttcctctagacacagcctccttcgctcctattctcaggccccgtggtcagggctcaagcttctctaggctgaagagcttggagcctcaagttttccagccctgaaggtgggcagtggtcagttgctgaatggccaagcgtgtttaggtgagacaccgtgagatccccgtgcaagggcaatgcctgcccaagggatgatcctgccaggagggggctgcagggcaacgtggactcacccaaggtcccagagaggctgacgctgatcaaggctgccaggagcagcctggcccatgggctggggcgtggccctgccatcctcttcctcctgcagaacagcaacaattgacacatgaggcctccacagccatggtcggtgccgtcagcttcctctcgctgcacagctgtgggaactgaggctctgagcaccaacaatgtgaccaagggcgcccagccgccagaggcagggccctgggcctcggactcctgccttttccgctgccctgttccgtgccatccctgcagtggcctatgccctgccccgggaggccccctccagccctcaaggactctggtttgcgagtttgtcccagtgccaggcctctcagcactgggctccctgagggcagatgtgggtttattcttctttgccttttagctcccagtgagcctgggtcaggcttggccatgacagggtcatccaatgagggtgcctccctgagagggggccgcagctctgcctcctgctccttctgtcctggcccacttaccctttggtgagggtggcacagccgggaggagaggggcccctcccaatatctggggcctggggctgggccacagctgcccgcagtggcttactgcaccgggttgggttctgcagtgactgcccggcccatcagggtggggtctgaatcatctgccctcccctgtacctctgcctgccccagagttaagttttctgggcccctgagctgttcaccctttcacaagttagcccagagtgagacatgcacacacactgtggctcccctcaaggcgtccccagcggctgtgggttcagtattaaaccatcctaagtcctcagcggccttcagggcaggactggacatccctgaggccctctaagagatgctcagcctgaagcctggacaagaaaagaggctggcggcagagccatccaggcctgcaaggccggggcaaaggtgagcaccgcgcctctttctctagggccaggtctcccaggggcccaagcctctgccctgcccacgggccctccccattgaatcctgtctcagcccggcttctggggcagtggccaccccagggtctgggggctggggtccccgaggtgctggagaagcccttctcaggccaagggcaggaaggcgtagcctgcttctaaggcgtgcagcctggaggaggccacagcagcgccaacacatgcaggtcagacctgttgtggcacagggactgggaggcagccctgagccagcagggaaagggtggggacagcagggttcctagagggaaatgacttccttgcagcctcggggtgtagccgccacacccacatgctacacaatacaggctgcaggctcaggcctcccaggcatcattacacaggcaggtacaggcctggagagctgagcccagctcttcctcccactgtccctggccacagcccctcaggcagtgctgattcccacactgtgactgccatatgagcccagggcttcacggaggagattgctcagcacaggagcccggcgggagatgatttcattctgcccgtttcccagatgagagaccaggcacagaaggctgtggaacttccccatcccgcggacagcactgggagggccaggacagggccctgctctgcaggccctgcctttaacctccatggcagcctccacgcagaagctacaaaatggcagttagagggttggcgaggcacccaagagtgtttggcttcatttgtttagaaagttttaaaagtaggagccaatgttagaaacaacgagatttcccataaaagttaggaatttgtgtttatcattagatgtatcacgatgggctgggcccagcgctcaggacacctactctccaggcggcccggaccccaccaggctgccccgactttatgtaccagcaggtccctggagtgtgtgactgccaccctgaatgccatcacactgcagcacaggcagtttcccccccacagggacacacacacacacacacacacacacacacacacaggccatgcccacccacccacaggctcagagctcccctggcccccatcccaacccctggggacccctctgggcacacctgctcctgtccactatcctctcccgctgtcacatctcctcccctcagggacccaggcccttcctcgccccagagaggcagctggccagaagtctggggaccccaggcccttggctgttctgtctccctgagaaatcagggtcgagtagacagacatacctcccctcctgtccctcctgctgtccttccctcagcccccaggatggagactccaagccttcactgccagctctgtttcggacagcaacaaccatgccacctgtgcctggtccttgtcctcagggtgtggcaaggccatgggggcagaggagaagccctgtccctgctcctgggagtcaccaggagccccagagccccagtcccagccagagggccaccccagaggctgagccatgggaaagagggcggatgctgcaggaggtggcagtgttgggcacagccctggggctggtgggtgaggcctgtagagcttcctgaaggaaggcgcctggggctgactttgggaggaaggcaggcctgtgcttggccaagagaaaaggaaaatcagggactccccagccccagatggactgtggcaccgcatagagcaagccctgcctggagccgggatggcgtctgcctctcagggtggcttttaaaagtaggagccaatgttagaaagaacgaaatttcacataaaagtcaggaatgttggtttatcattagatgcgccatgatgggctgggcccagcactcaggctggtgtctactccaccttctttgcaaaccctggaggggcccagccccagagggctaccagccactggcctctgcccacttctcccgcaggcgcacccaaggcgctcctctggcctggaggtctgatgggcaccacccttctctagctgccctgccccttggctgccagctgcccccggcgcaccccggggaggctgggcacctgtcctgcgcagcgtggacagagggaccggggcctgtcagccttcagggaggggaaggggagacaaaagccaccggccctgcccgaccagctcccctgcgcggctgcccagctggggcgggcactcaccctctcccggccagcctcggctgctgctgtgcgcccgtcctggacctacctcggggcggactcgctccctccgcgcctgggctgccgctaggagatggggctgcagcgcgcgggcgagcagggactgtccgagggcgggcgcgggggttgggggggtggggacgaggcgggcagcgctttatggggcgggcgcgcaggtaggaaggaggcgctggtgagtcagaccggctgcattccttcgcgcggcgcgcacctgtcggggcaggagctgggtgccgccgccggagccgggtccgccccccggaaagggctgcggctcccgcggcgcccgcccagcgccccgatcggctagcggcgggggccgggggaggagccaccgctctccctctccctccggtccggccctgggcgcggggcctccccacccctccaggctccgggctccaggctcgggtgcgcggactgccccgggctggaggcggcctcttagcccccgtccgcacgggaaccctccctgccccgactctgggccgctagccaacgccgggctgtgctgctgctgctgccccgacggtcgtcagccgcgtacccccctccccgctctccgtgccagcgcgaggcatgggcccagggagtgcccccggcccggtcgggaggcctgactccccgtcccagctctgctctgcagttcacggggtcctctcagcctccaacccctaacctcacgttgtatccagagggagagccgaggaagggtcgggtcctcggtgcacccttcaacaagctacttaaatctccttacagtgtgaacagtgataccctggagaggtcagtgccgacctggcatggattggcactcgatgccttgttacagttgttcttaacaagctggttacagagctggcccctccctcccgtcagtcctctgagagcagtctctccattgccactgcttaccacgggtgttcaggtcagagaagggcttcatttttctttttctttttgttttctctctctttttttttttagatggagtctcactctgtcgccgaggctggagtgcagtggtgcaatcttggctcactgcaacctctgcctcccgggttcaagcgcttctcctgcctgtttcccgagtagctgggattacaggtgcccgccaccacgcccggctaatttttgtatttttagtacatcatgttggccaggctggtctcgaactcctgacctcaggtgatccacccgtcttggccttccaaagtgctgggattataggcgtgaaccaccat

SEQ ID NO: 7664 - DNA, 6000 bp, Homo sapiens
caggagctgggactacaggcgtacaccaccatgcctggctaattttttaaatttattttttgtagaaatggagtctcactatgttgcccaggctggtctttaactcctgggctcaagcgatcctcccagcttggcttcccaaagtgctgggattacaggtatgagccactgcactcggcctcacctccttttcgaggtgaaggagttgaggcaggcactctgggaaggtgcagacctaggccggaaataaaatcgaatatagagctcacagctcaccgaactcagctggggagactgacttggattctaaggaattctgtggtctccgaatacagtggaggcctcttagggctaatatcctgcggctctgtataggaaggggttaactcaggcgctaggcggccggggcggggccgcggcctccgcgggcgcgcgcgcgcgttgctgactcagcggcgattccagagatcttggatggagggttccaggtcggtccccagtggctggcgtgtgggaccctttgaggatcggcgccgtctccgggccttccctggatcctggcccctagaggccgtgggggaccccttttcgccgctgctgcgggaggctctgaggactgctagcctgggcagggctgggctgggcggggaggggcggggaagggcgggacgggcggggccgtcaggccagcacctcccttgagacctcctcgccacgccccgcccttctcgaccctagactccaggctggagcggtggggacagctttgctgaccgatattaaaccgcgagaactgtcgcacgtgaacaccatcctgcccgttgtgattgtgtaaaacaaagaccaggaatcaatgcgagcgtgtctaggaggccatctcggccgtggcctctctccacatgagagtggcctgtactgagagattacctaggaatggagataccacaaccatcttccaggtctggatcccaggcccttgcctgcagagaagttttttcccatatccaacctctctctttccggccagctcagtgcatttcctctgacccagtccccagagaagatggagaacagcaaatatccctcacccccaccacacccgtgataactactctggaaatttgcagattgcaatccctcctaggtttttcttcaaggtggaaaaacttcaactcaaattttacaattcattttttcattttttctttccatcacagacactaggaagggattgtaaagtggttatgaaatccaaacgcccaccaaaaacgggaatcccctgcccctccccctccccccacaccacgcaaaggcccacagcgtccccgacagtctgaacattccaatagcgggaactcagtatttgctaaggcagccattactggagagcgctctggttgttagaaagctcttccttacagtattgcaagaggaaccaccgcccctccttgcctggcagctttcccacctcacctctgttggctgaggccaggtgacggtggagggggtgtcagtggctagagctttagcagactcagcagccccccacccccacccaggccctcagcgtcttccactcagagagccaagcgcggggcagggcggggggtggggcgggggcggggtgttaacccaccggttctgccccgccacaaatcacttccaagtcggtgactcaaaaatagtaacagttgttgggttgcatctcatttccatgttatcaatttaatgtggcaaggcacagaggtagtccctttaggtccctgcctctttctcagtgttcccccacctactcccctttcccacgaccctcagcctgccccctcctctagattcgcagccctagttgtcccaggagagactgtgggtctccgtgggagctgagcaggaagaaaggcggggccggcgggggcagccgcggcggggttgaggccctgaggggcagctcccaccccgtagcagcctccgcaggtcctggcggaagcgcaggcccaggaaggcgtagagaacgggattgaggccacagcgggcgagggccaagccgctggtcaccagcagtgcgacatccttgcgtttgctggcagggcagctccgctcgcgcgcagccagtagatcggcagtatccagcagcagggcgaggctgtagggcagctgcagcaccacgaaggccgccaccagagccaccacgacgcgcagcgcacgccggcgctcgggccccctggcggccagcagcgtgcggcccagaagcgcgtagcaggctaccatgacgcccagcggcagcgcgaagcccagggccacctgcgccacggcgctcgcccccttcaccgtctgcgtgaggccctcggggaagatgaggcgacagcgtcgttggccttcccgctgcccatcctggctgaagagcagcgcaggcagcgccaggagcagtgacagcagccacacgatgacggagaccaagtgtgcgcggccgggagtggagggccgcggcccggctgggagcgctcgcgcgatggccacgtagcggtcggcgctgatacaggccaggaagaggaagccggcgtggaaggaggccgagtagaggccagagatggtgcggcaggtggcacttcccagactccagccctgaagagcccctgctgccgcgaagggcagagtcagggccagcaagaggtcggccagggccagctggagcaggtgggcagaggtgggcgagcgcgctgcgcgtcgggctgccaggtgggtggccaggaccaggccattgccggccagacccagcgcagccacggtcagggagacactgggttggaaggcccggctgaaggcctggacatcggccttgtagcaaagctccggcagtggctcagccgagtatgcgtcctcttcatccccagagtaatggccccaggaaacctgggagggtcaaatgagaggcgggatcttatgagacacatctgaccacacaactcccccgcccacacttgccttccaagctgagagctcctgtgtggccagatgtaacagtacacggggagacataagctcttctccagactcttcctagcacaccttcagcaggccttggcttcccttgcacccctcctacctctgcttccagcttcctgggtgaccttgagcaagccacttgctctttctagacctcagttacctaacctgtaatgttgagattataaatcctgaccagcccacctctcaaggtttgctgtgaagatggcaatatggaaaataatggatggggagaacctgtgttctccaaaggccataatacaaagtttgtattattattattatttattattattattattggagacagagtcttgctctgtcgcccaggctggagtgcagtggcacgatctcggctcactgcaacctccgcctccgggttcaagagattctcctgcctcagcctcccaagtagctgggactacaggcgcccaccaccacgcccagctaatttttgtatttttagtagagatggggtttcaccatgttggccaggatggtctcgaactcctgacctcaggtgatccgcccaccttggcctcccaaagtactgggattacaggcctgagctaccacgcccagcccaaagtttgtattattaataaatcctacagcttcagttccctttgcagcgccctctcctggaaggatgcccatatgcaggctttgcctcagacctgagccctggactccaacctccgtctggagtgggtttctgtttctcttctttcccttccatacccaccttccctgtacctccaataccagcacactgaaccactcatgccaagggggtctccagggttgggactcaggttttcagggcccaggtgggaccctggacctctaggttcaacccgcctttcccctcagccctagtccctgtcccacaaccccagcctcacaccaccagcccatttatctggaggacccctagtctgagacagcgccaagaatcctgaataagccataggatggcagaggcccattgccaggtggggaatcccattccttccctgtctcctccctctctgtaacccttctccccctccctgcccccactcccacctgctctgtggcctccgtccccatctctggctacacaggtttctgaggtatagccacagggggtagaagttaaactactagcgggacaggaaggaagaggcggggagaggggccgagagggaggtggggattagggtctacggggtcactttcccattccacctcctccaaaagacttcactctcttgtgcaggatctggattttacgaaaaaaaaaaaaagaagaagaaaggaaggaaagaggaaagaaagaaagaaagaaagaaaaaaaggaaggaaagaaagaaaaaagaatgaacgaaagaaagaaaaaataatttactgtctttgtcagtgaagaaagaacgggcttcggaatataatcatttgctgtgtgatattgactaagtttcttgacctctctgagcctgaggtttttcatctgcaaagtggagtagggcaaaaatgctaaattcacagtgcccagcaccactcctagagcataatttgccttccgaaaatgttaagattcttttacttacccttcattccatttccaggcacccctcccccaaaccacctcccttttcttgaaattttcaggatgcttctggccctaggttccctgtcctcactcctgtggccctagtcccgggcagcctcgggttacttggggttttcccggtggcgagaggctctctacccccgccctttcgcagcagggctgaggcacgcgcttgcgcggggtccgggaaaccggcgcgtgccaggagacagaggctggggaaggggggaggtgagaggaaagagggtggaaaggagaggatagagagagaagagcggaggaccaggaaccagagagagagagagagaaaagagagaggagagacagagcgcttgggggcgaaaggagagagggagggaagggtgggtaaggaggagagagcggtctgctgcaaaccccaggaggagagcttggagcccaagccagaactcgagccctagccggagccgttcacagggaggcggctgccgggaccgtcagccctgcatgatgcatctccggctcttctgcatcctgctcgccgcggtctcaggagccgagggctggggctactgtgagtgttgggcttggaggcaggtggggttgggcccaggagtccagagcctgcagggcggccccgaaccgcattgcggctgggtggtcgcgggtccttcccggccggcgcgcgcccgctggctctcatcttttcctgcctctcccccgcgctccgcattgcagctctgaggctgccgcgcgcgcccggggctggggctgggctctgggaagaggatgaagtcagcgggcagggatttggggttgggatccaagcaggagctggtgcctgggtttgaggctagggctgggggataagtgtatactggtgaccgatactaggattaaggttttgccagggcttaaggctggactttggagctggccaaggggtggggtttgtggctagggctggggtttgtggctggggctgggttttgtggcagggatccaagcaggagctggtgcccctgactgatgctaaggctggacatggagctggtgatggtgctagcactggctgaggttgggtgcaaggcctgtatttggggatggtgcaggttttgggggccgagttggattgaggctagggttggagctggattggtgtcttgggttgacttaggttgtggaagatgctgaggtttaggattgagtttgggaaagtactaaaccagggcaggtattgggctagctagggagggtctggccttgggcctataggtgtagcctaggggtttgcctagaaggagaaggtagcctcctctgagcatgcagctgttgctgcagccaggattgaatagatggctttaaggtagggctgggtgtgcctctgg

SEQ ID NO: 7665 - DNA, 6000 bp, Homo sapiens
acttaaaacacacatttccccagtgtcggtactaaagctcgctaggcctttcaaggcttgagttcaagctctgactccaacacaaatcggctgcacgcccttgggcaagtcaattagcctgcctgggattcttatctgcagatggggtcagggtctttaacaactccacaaagttgtgggaggatccaagggaacaattttcctaccttgcctagtccccaaaatctgaatttccaaaccccatctcattagttctgaaatagtgcctgggagtctgcatgctaacagcaacaacacccacaaaaaaaaaaaaaaaaaaaaaaaacaggcctttttctggtgagtggcaagtttgccaagggctgctaggatattcaggaattggaatgcgaggtctttgaaaaaaaaaatttttttaaatagaggtaggatgtcactatgttgcccaggtgagtcttgaacacctggcctcaagcaatcctcccacctcagcctcccaaagtgctgggattacaggcatgagccaccacccacagcctgaatgccaggtctttcctctgagagacagaggaaaagagaaagggagagaccgacctgcactcactcatccagcatctaccctaccacgaaatagcacctccctagtctctcacctcagtgtccaggttcagcctctcgaagtctccattgagaataaagcgctgcacatagccgtccagggtgaaatttacatcgcggccaaatcggtccacccgcacatagtgccagtgctggtcattgaggactccgcctgcgctcacggtggtgtgacctggtcttggctggatagggctgctgcctgagggtggggcaggacagagtgaaacctcaagccaggagaactccatggagtccaagctcctaggcagagcagcagcgtgtaacaaagcccagggcaatcagggagagtgggcgaatagatcaacagccattggcgagtgtgtgacagggtaagccatttagcctggcttcctgtctgtaaaactgggaacacatgagctgcttctatttcatgtgcgggtgttatgaaaagctaatgagatacaatgtgtgtgcgtctgtgtgtgtgtgtttacaaggagggaactgaggctcggaagtgccccatccgaggtcacatctctgtgtagtggtagagctgagactggaatccagttctcactcaactccagtgttttgctagcaccaaatgctacaagaaaggggcagtttggtccaggccttagagaagtggaagaccaggctgagcgcggatgcgcggaggaggtgccacgaggagggcggtgagagagcttcaggggttggctccgcatcgcacatggtcgccgagctcacccaggctcatgtgcagcagcaggtgtgccccctccagctcgagcgtcacgtagtcgccctgggcgccctcggcgtgcagcagaagaccgtccttctcctcggtcttgaagctgaaggcgaacacgtcccacaggcttcggctgacccctcgcgggaagcggtaggagatggcatcgtcgccgtcgaaatagagtatgtcggcctctgcgcaaaggaccgtaggtgggccgggaactggggaggctgtctcccaggccccctccgcgctctctgcacacttactgtatgggcagccatagaggccgagcctcaggccgatcttgccgcgtgggttccaggccaggggcacgatgcggatgtagcgcgcagtgaagtggaagtgcaggtcatggcgcaccaccgccgactcgttcacgttaccaaagaaggtctgcgggggtggaggagagtagtaaccacgtcctgccctctgcttcttttttttattttattttttgagacagagtctcgctctgtcgcccaggctggagtgcggtggtacgatctcggctcaccgcaacctctgcctcccgggttcaaacaattctcttcctcagcctcccaagtagctgggattacaggcgcccgccactacgcccggctgatttttttgtatttttcatagagacggggtttcaccatgttggccaggctggtcatgaactcctgacctcgtgatccacctgcctcggcctcccaaagtgctgggattacaggcgtgagccactgcgcccggcccccctctgcttctttctccatagcctcccagcccacaactttcacacccagccaatctcgacttctggaaagtaaacactccttggtcttccctgcttggcggctttgcccgcacagtttccataaagtgccctgtcccacaatcctattatttcctcagacctgaaatcaaatgtcacctccttaggaagctctcccaggttttaccctaaagtgtgttaaaccctgtgaaccgagtgtttcgcgcacgtcctaagctgacagtccctctggacagagtccctggaatggagtcactgctccttgtccgagccctcaccaccaccccctccattttcccagaggctggtgcccggcccagagcctggagcagaggaagctccccaagtgttaccgccttggcgcccagagtaccgagttgtgccctcgctggtagaacggtgtccagctgtccactcggtcgccgtagagtagcatgtaacgtgtgacccagtcccaagaattaaaggagccctgtgtggccacggcccggatccggtgcttcttcattaagtctatctggagccagggattcggatccccaatccgtggtgaccacccgcttatgcctatagaaaggacaggagctttaaccggctatccctctccccgaagtcctccggaggcccccacccttccgcggtgcgctgccagttggcagctgatgttccgcggagctcaccgtgcagcctggcgaatctcggcgcagtaaggagactgtagtaggaggaggcgcccagggagcgtgcatacaggggacccaccagctcctcgtcgcagccgtctagggtagggaaaccgactgttagtcagcgctggcccctcccagacccttccaaaggccggcccacttagcgaccgaagcttccccttccgtgcccccaacccccgcccccagaggcacacccagccctaccttaaagccatctattcaatcctggctgcagcaacagctgcatgctcagaggaggctaccttctccttctaggcaaacccctaggctacacctataggcccaaggccagaccctccctagctagcccaatacctgccctggtttagtactttcccaaactcaatcctaaacctcagcatcttccacaacctaagtcaacccaagacaccaatccagctccaaccctagcctcaatccaactcggcccccaaaacctgcaccatccccaaatacaggccttgcacccaacctcagccagtgctagcaccatcaccagctccatgtccagccttagcatcagtcaggggcaccagctcctgcttggatccctgccacaaaacccagccccagccacaaaccccagccctagccacaaaccccaccccttggccagctccaaagtccagccttaagccctggcaaaaccttaatcctagtatcggtcaccagtatacacttatcccccagccctagcctcaaacccaggcaccagctcctgcttggatcccaaccccaaatccctgcccgctgacttcatcctcttcccagagcccagccccagccccgggcgcgcgcggcagcctcagagctgcaatgcggagcgcgggggagaggcaggaaaagatgagagccagcgggcgcgcgccggccgggaaggacccgcgaccacccagccgcaatgcggttcggggccgccctgcaggctctggactcctgggcccaaccccacctgcctccaagcccaacactcacagtagccccagccctcggctcctgagaccgcggcgagcaggatgcagaagagccggagatgcatcatgcagggctgacggtcccggcagccgcctccctgtgaacggctccggctagggctcgagttctggcttgggctccaagctctcctcctggggtttgcagcagaccgctctctcctccttacccacccttccctccctctctcctttcgcccccaagcgctctgtctctcctctctcttttctctctctctctctctggttcctggtcctccgctcttctctctctatcctctcctttccaccctctttcctctcacctccccccttccccagcctctgtctcctggcacgcgccggtttcccggaccccgcgcaagcgcgtgcctcagccctgctgcgaaagggcgggggtagagagcctctcgccaccgggaaaaccccaagtaacccgaggctgcccgggactagggccacaggagtgaggacagggaacctagggccagaagcatcctgaaaatttcaagaaaagggaggtggtttgggggaggggtgcctggaaatggaatgaagggtaagtaaaagaatcttaacattttcggaaggcaaattatgctctaggagtggtgctgggcactgtgaatttagcatttttgccctactccactttgcagatgaaaaacctcaggctcagagaggtcaagaaacttagtcaatatcacacagcaaatgattatattccgaagcccgttctttcttcactgacaaagacagtaaattattttttctttctttcgttcattcttttttctttctttccttcctttttttctttctttctttctttctttcctctttccttcctttcttcttctttttttttttttcgtaaaatccagatcctgcacaagagagtgaagtcttttggaggaggtggaatgggaaagtgaccccgtagaccctaatccccacctccctctcggcccctctccccgcctcttccttcctgtcccgctagtagtttaacttctaccccctgtggctatacctcagaaacctgtgtagccagagatggggacggaggccacagagcaggtgggagtgggggcagggagggggagaagggttacagagagggaggagacagggaaggaatgggattccccacctggcaatgggcctctgccatcctatggcttattcaggattcttggcgctgtctcagactaggggtcctccagataaatgggctggtggtgtgaggctggggttgtgggacagggactagggctgaggggaaaggcgggttgaacctagaggtccagggtcccacctgggccctgaaaacctgagtcccaaccctggagacccccttggcatgagtggttcagtgtgctggtattggaggtacagggaaggtgggtatggaagggaaagaagagaaacagaaacccactccagacggaggttggagtccagggctcaggtctgaggcaaagcctgcatatgggcatccttccaggagagggcgctgcaaagggaactgaagctgtaggatttattaataatacaaactttgggctgggcgtggtagctcaggcctgtaatcccagtactttgggaggccaaggtgggcggatcacctgaggtcaggagttcgagaccatcctggccaacatggtgaaaccccatctctactaaaaatacaaaaattagctgggcgtggtggtgggcgcctgtagtcccagctacttgggaggctgaggcaggagaatctcttgaacccggaggcggaggttgcagtgagccgagatcgtgccactgcactccagcctgggcgacagagcaagactctgtctccaataataataataataaataataataataatacaaactttgtattatggcctttggagaacacaggttctccccatccattattttccatattgccatcttcacagcaaaccttgagaggtgggctggtcaggatttataatctcaacattacaggttaggtaactgaggtctagaaagagcaagtggcttgctcaaggtcacccaggaagctggaagcagaggtaggaggggtgcaag

SEQ ID NO: 7666 - DNA, 6000 bp, Homo sapiens
gccaagacgggtgatcacctgaggtcaggagttcaagaccagcctggccaacatggcaaaaccccatctctactaaaaatacaaaaattagccgggcatggtggcgggtgcttgtaatcccagctactcgggaggctgagataggagaatcacttgaactcaggaggcagaggttgcagtgagccaagatcatgccactgcactccagcctgggcgacggagcaagactccatctcaaaattaaaaaaaaaaaaggtgtggagggtagagatgaaacaagaatggcagaatattgataatcacagaaattgggtggtgagtatgaaaggggcccattatactattctagtttgtgtatcttttaccttccaaaataaagtttttaaaaagcaattcaacacaaagaagaccatgctaccaacataaaaagtccaatcaggatataaaactattaaggtttaactgtaatttttctggaaatggtacatcatcaacaaattagttaccctggaggtaaagctaattaacattagcaaagagccagttcagagacagtgatcatgggctccttctgttaaacagcgagcttaccacttgctttgataggccattaaaatagtaactgctatattccattgctagacactgagggaggtgccaatgacctatgattttagcaacacaaaggtaaagctgtagttgaatctgtttttataggttgtttttgtttgtttgttttgttttgttttgacatggagtctcgctctgtcgcccaggctgaagtgcagtggcgcaatctcggctcactgcaacctccacctcctgggttcaagtgattctcctgcctcagcctcctgagtagctgggattacaggtacacaccaacatgcccagctaatttttgcgtttttagtagagacggggtttcaccatgttggtcaggctggtctcgaactcctgaccttatgatccgcctgcctcagcctcccaaagtgctaggattacaggtgtgagccaccacacctggccttttataggtttttcaagtcccttcccatactcctttctacccccctaatcagcgacccattttgtgctttgggagcacagctgagtgtctcactgtttcactctcaatagtccaatgagaaagccacttcatcaaactaatgaagtataacagaaaaagtctcaatgctttatcaacattaactgcggaagaagcttggggtccagtgatagcttccaccaatctaaatagataactgggggcctgtcccttatctttgacctttatttcctacttgatttgtaaactgagggatttaggttccagaaggtggagggcaacttaggaatatgtattgtaaaccaaaataaaattctaagcccacccccaacacccccccccacccccgcaaccatctgaacggacccctactctaaggcaagggcattccaaagttaacctgaaacactggttcaggccatgatgggaagaggggatcagacatgcctcattatatatcctctcctcctttttggaattcaggaaaagccaaccagcattaacgtcaatacagaccttaagtctgataagaaacacttacaatgtattctctctaaagcctgctacccagaggcttcatttgcataataaaatcttggtctccactaccccttatcataacccagacattcgtttctattgataataactcaaccaattgccaatcagaaaatttttcaatctacttatgacctggaagccccccacgcccttcgaggtgtccctcccttctggattgagccatcataaatcttacatgtattaattcatgtattattctccctaaattgtataaaagcaagctgttccccaaccaccttgggcacaggtcttcagaacctcctgaggctgtgtcatgggtgcattcttaaccttggcaaaataaactttctaaattgactgagacctgtctcagatactttggggttcacagtatcaagggccttaaaaatgtttatacccttgagcccaacagttctatttcactttcaacagtctaatgagaaagccacttagtcaaactgattgagaataacaaaaaaagtataaatgcttcactttcaacagttctaattcctacttctagacagggagcccaaggaaataagagatagaacaaagggactccctttgcaatgataaaacaaaacaaaacatcagaaaaacaaaaaactaataggagaaaaataaattatggtcattcatgtgatgcattattttgcaacataagacaattatgaggccaggtgcggtggctcacacctgtaatcccagcactttgggaggccaaggcgggcagattgcctgagctcaggagttcaagatcagcctaggcaacacggtaaaaccctgtctctactaaaatacaaaaaattagctgggcgtggctgcgtgcgcctgtagtcccagctactccagaggctgaggcaggagagttgcttaagcccaggaggtggaggttgcagtgagccatgatcgcgccattgcactccagcctgggtgacagacagagcaagactccgtctcaaaaaaaaaaaaaagaagaaaagaaagttatgctttcaaagaatgtccaatgacatagagaaatgctgtttatattatatatatatataaaaatatagattaaaataacaaattcattgtaaaaaaatcattaatggctatttccaaattatagagttaaagatgctatttattttcctttttgcaaattttcaatattctctaaattgaatattctctatcaaggggtgtatataactgttaaaattagggattttggggttttttatttttttttgagacggagtttcgctcgtgttgcccaggctggagtgcaatggcacgatctcagctcaccacaacctacacctcccgggttcaagcgattctcctgcctcagtctcccgagtagctgggattacaggcatgtactaccatgcccggctaattttgtatttttagtagagacggggtttctccatgttggtcaggctggtctcgacctcccgacctcaggtgatctgcctgcctcggcctcccaaagtactgggattacaggcgtgagccaccaccgcgtccggcctaaaattaggtttaaaaaagtaaatgctaaattaaataattggcccaaataacctagattccaggtaactcaactttgttcttggaatccattcttctaatatccaggatgtgggcaacttaaacaattataaactatattagaaataacaacataagacacatattccaacaagaacgttatagagctgtaatatgtttttaattattaagcagaaaggtcaagtctatgttcaataacaatacgttccttgggatcaaacaatatgttccttgggatcaaaagttgcatctttcatcatgcagtccttgggattaactgctaaataaatcacccttatcagctattgttttactgcagaagctactgctaaaggaaaagacttcatgatattaactcaagaaagtgcaaaatgccttataaacaagtgcacaatttccctcccaggttcctgtatctggaagggcccccaagatctaggtcttagccccagctggttactaactggctggtggccatggattctgaacctcggtttctccacctgtgaaataagggggtttaccgggatggactgacatgctacaaaaacgttatttcgacttcacttttataggagtccagggaagcctgcaccagccagctagctccaaaaccaggatgggcgggaaatccccgcaacgagatgcagcccagaaaagctaaaggaatattcagagatttggcgtaagtcctcagctctccagcggaccacctggtctccttcccgggccacccttgcaaggaccaagtgtggcgggatgtggctgagccccctcagtaaaggaaaggtctcgctgcccctcccctcatcccgaaaggccaccagcggcaatgcgaagtgattgcctgctctccggaagcccggcctccccgaaggtccctccacgcaccgccgccctcacccgggactcaccaggggtccggtgccatcctgcagactccgcccgccgctcggactcttcctgctcttagcagctgactacggcggcccgcgcggctcactccccgcagttcgtcccgtgcgcgaccggagcctggagtttgcaaagtgagtagctagggcctcagaactataatcagagaaagcaaagcgctcccctgcggacagtacactggagcaatctactcccaccaagagacgcgaactgctaagctcagttaaaattgttaaatagaaacaaagcattttcccaggaaggtgggagcgctgcaagacctctctgtagcagttacttaaaaatttatcctgcttcaaaaacaaaacaataaacaaaacactagattgcggtgagacttgcacgctgcgtaaactcactacaacctactttaagttaactttatgatatgtaaattatacctcaacgctttttaaaaaatctttaaaatttttttcacactgctccaaacaggggcccaaagaagtatcaattatatatattttttatagcagccttcctatcagtcctgtacgcctgattacatattttttaaatgccattcattcggtgcttgattttagagttactaagaagtcacagactctacacaaggggatggaggaattagttctgcgcagttagtgccatcccctaaatttccagagaaatagcacaaaaaaaaagaagaggagtcccaccccatctctcttccagtccccataccccttcatttccaagaatgctaatgaactcgaactcggcaggctgggtttctgcgcgggcgtggagctggagcgcatgcgctcgtccgttaccataacgaccagaagacgctgcagccactagggaggagagcaaagtaatcagaacctcccaaggatggataacaaaatttcgccggaggcccaagtggcggagctggaacttgacgccgtgatcggcttcaatggtgaggcctccagcatctttgggctggctggtttaggaattcggaggacgtgtagtgcaaacaggaatagtgagacaccggggacacctgaaaggcagtgtgggacaacggcaggagccctggccagggacacgcacaggaggacccgcacagcctgacctgccccaaggccttggagagtcacttcctcgatccaagcctcagggagtgagatggtttttaccagctcggacaagcgccagcacctaaaagggaccaaatgcctcttccccaggcgggccggatgagtacgggtggttgtaacccttctcccactaggtcagcccttcctggctctgaaccccacgccgctcgcaaagccctaggctccttcgtaaccacacagaaggatgctgtctgtgtcggcccctgggaccagctaggaaatctgctaaaatcccaactggcgtaccagtgagaaagggctgggagggaacgtgtgtttgagcaaccccctgaggggatgttgttggtcctctaatcctaaggaaggtttctaaatgatgaggatttcagaccaggacagaaggggaaggggacgccagggggagctaaagcggagagaaaaagggactgggccgctccgctgaaatcttatttgtgactgcctattgttttgaagattctgggaagaaaaagctgtggggttttattgttcgttttgaggggttttggttttttgagggatgagaaaacaatgaattagattttaggagaagcaaaacttttcaaaaatgtgtgttgtgatgcctgaaagctttaagaatgtggatgcagaacaatcactgtctaaagttttaagcatactctaggacttagctcttgactcttggtttaactttaacagtctccaatagaaagtgagtgctttata

SEQ ID NO: 7667 - DNA, 6000 bp, Homo sapiens; identical to SEQ ID NO: 1940

SEQ ID NO: 7668 - DNA, 6000 bp, Homo sapiens
tgggattacaggcgtgagccaccgcgactggcctatttatccttttttctatattaccaggtttggtttgctaaaattggttagctgttgcatgtctatgctaacaggaatattggtctatattttcttttcttataatgtccttgtttggttttggtaccaggattatgctggcttcgaaaacaagttgggaaatattcctctattttttctttctttctttttttttctgagacagggtctcactctgttgcccaggctggagtgcagtggcgcaatctcggctcactgcaacctccgcttcccaggttcaagggattcttgtgcctcagcctcctgagtaactggcattacaggtatgtgtcaccacgcctagctactttttgtatttttagtagagatggggtttcgccgtgttggccaggctggtctcgaactcccgacctcaaatgatcccctgcctcagcgtaccaaagtgctgagattacaggtatgagccaccgcgcccagtctgttcctctgttttctgaagagtttgtgtaagatgggtactgtttcttcctccaacgtttaaagagagcagagaacagaggagataaatagaaaatagcactaagaggtcaggcatggtggctcacacctgtaatcccagcactttgggaggccgagatgggatgaaagcttgaggccagcagtttgagaccagcctgggcaacatagtgagatcctgtcaatacaaaaaaataaaatagttagctgggtgtggtggagtaatcccagctactcgtgaggctgctagaggactgcttgagcccaggggttcgaggctgcagtaagccttgattgtgccattgtactctagcctgggcaacagtgtgagtccctgtctcaaaaattaacaaagaaaaaaagaaaatagcactaaaatggtagccctatactccaactgtaaaataattaaaattaaaagcattcagtagagaaaggaagcctatttcaacaagtggagacagaataactggatttccatacaggaaagataccagagactgactcctacacctcacaccataaacaattaattttaagaattaattaatggctcaaggaccttactgtaaaacttacaaccataaaggtcctaaaagaaaatgtaagataatatcttcatgaccctggggttaaaaaaaaaaaaaaagatgtcctaaacaggacaaggcaaatactgaacataaaaaagataaatccactcctcttaagatactgtaaactctgtaaagcaaacaaataggcaagcaacagatcagaagaaaacattcacgacacatggatctgataaaggacttgtatccagaatgtataaagcagtcccacaactgaacaataaaaacaaacaaaaaaccaaaataacaggtaaaagactcgaagagctactttacaaacaaaatacgaatggccaataggcacatgaaaaaatgctgaacatccttagtcaatagagaactgtaaattacaaccacaaggatataccacattagaaagactgacaatacctaatgtccggaaggctgtggcacaaccataataactcccataccttgctagttggagtgtaaaatggtacaaccgctctggaaaactcagagcttctgaaaaagttcaaaatacagctactttttacttccaaactcgcaattcccctcctaagtatttctccaagaaacacgaaaacatatgatcacaaaaagaattgtacaagaatgtttatagcagctttatttcataaccgcaaatgggaaacaactcaaaaggccatcaaaaggacggatatacaatcgatggactatactaaatgaaaaggagcaaaatactgatatatacaacatgaacgaatgtcagacagtacattgaaggacagaagcccgacaaaaatgagcacataatgtatgattccccccttttttttgagacggagtttcgttcttgtcgcccaggctggagtgtagtggcacgatcttggctcactgcaacctctgcctcccgggttcaagcgattctcctgcctcaccctcccgaatagctgggattacaggcacccaccacgcccagctaatttttgtattttttagtagagacggggattcaccacgttggccacgctggtctggaactcctatcctcaagtaatccgcccgcctcggcctcccaaagtgcaggcgtgagccacagcgcccagcctgattccattctatatgaagttctccaacaggcaaaatggttatggagatcaaaataaaggtggggtcgggaatcgactgggaagagacgtgatgaaacgtttctgggacgatgaaaagggtctgtgacttggtaggcatcacggagcggttaggggccaaaactcatcttcctgtgcacttgctgtgtgcactggcgctgtgtgtaaatgccacctcgatttaggaaaaagatgacgtaagtacggcacaaagtggccggtacgcggcaggtgcatgggaagaaactgcggaatgaaacaaccgcgagctaagagatggggcagcgggagaaatgaattcgagttccgcctcctaccaggaagaaccggctcgggccggagggctgcacggaggaccacacggacgcctgcgggcccgccccttccgcttcacgacgttcagcctgcgtctggaactggaatggcctagcccaaagctagataacaggtagattgtttttccgacaaattatcaaacgacccatcattgcactctttcaaaatttgattctcagacgtacccattctttttttttttcctccgggaagatgagatatactcattcttgaaaatacctccgggcttgccttctgcacacttctttccctccctgtctcacgccatggtagcgtccgcctaggttgcaggcgacccgcggggtggggcacaccattcaaagaaggggagggattgaggtttgcatcaaaacaaatacccctgcctttgcaaaggccataactaagtaatccagaaaaagaaatgcaggcggagaatagcagcctccctctgccaagtaagaggaaccggcctaaaggacattttctctctctctcctcccctctcatcgggtgaatagtgagctgctccggcaaaaagaaaccggaaatgctgctgcaagaggcagaaatgtaaatgtggagccaaacaataacagggctgccgggcctctcagattgcgacggtcctcctcggcctggcgggcaaacccctggtttagcacttctcacttccacgactgacagccttcaattggattttctccatctagcggagccgggggctgcctggaaagatcgctccaggaaggacaaaggtccggaagttgtgggaccttagcagcttgggctccccggatcacccccaaatgatcatttcggaatggagccccagttttcactaggatgccatgggctctaaaatatacagctatgagttctcaatgtttcgagatccaaaagtctcagacctcaatgctttgtgcatcttttatttcagggattccctacgcccagcaccgggtggatgtgcaaagaagtacgctttaggccggctcaaggttccccaaagctccactcctctgcctaggcgttcaactttgagttcggatggtcctaacatccccatcatctacacccaggtctcccaacaatgcaactcctatgatgatccctctagccaagcttccatcccactcacccccaaactcgctaagtccccactgccccacccccagccccagcgattttcccgagctgaaaatacacggagccgagagcccgtgactcagagaggactcatcaagttcagtcaggagcttacccaatccagggaagcgtgtcaccgtcgtggaaagcacgctcccagcccgaacgcaaagtgtccccggagcccagcagctacctgctccctggacggtggctctagacttttgagaagctcaaaacttttagcgccagtcttgagcacatgggaggggaaaaccccaatcccatcaacccctgcgaggctcctggcacaaagctggacagtcgccatgacaagtaagggcaagtaatccgcctgccggaggaagcaaaggaaatggagttggggaggagggtgcagagtcaggattctcgccgacctggtgccgtagatactaacattttggggtggaaaattctgcaagccagagctgtgagggcagaattggtggaaatcattttggaggaatcctgcattgtgtcaaatatgaagggtggaaggaagaaagcttttgcgtttgctctcagctggatcctttcttctcatcagttaaaatgtcattttttaggaaggctttccgtaatatcacaccctaacgttttctcccagatactttatatcacaccatcttatttaatctccttcacaacccttatcactctgataagatttatttgttcattgctttcagtacatggaaacgtaagccttatgaggatatagaatttttctactatcttattcattgttgtattcctgagtgcctatatcagtgctgggtagcaagtaagagctcgataataaatattttttgaatgagggagacaggtctgaagcctggagaatgagatgcagaagaggtgcaagacctgctgcgccctctgcaggcggcgggggggcggtgcaggtgctttaagaattaccgcgggactcggtagggggagcgtaggcgcttctcgccaagatagaagcgttcagactacaactcccagcagccacgaggagccctagggcttgatgggaacgggaaaccttctaacctttcacgtcccggctccgcgggttccgtgggtcgcccgcgaaatctgatccgggatgcggcggcccaatcggaaggtggaccgaaatcccgcgacagcaagaggcccgtagcgacccgcggtgctaaggaacacagtgctttcaaaagaattggcgtccgctgttcgcctctcctcccgggagtcttctgcctactcccagaagaggagggaagcacaggtgggtttctttagctctgcgtcggatccctgagaacttcgaagccatcctggctgaggctaatctccgctgtgcttcctctgcagtatgaagactttggagactcaaccgttagctccggactgctgtccttcagaccaggacccagctccagcccatccttctccccacgcttccccgatgaataaaaatgcggactctgaactgatgccaccgcctcccgaaaggggggatccgccccggttgtccccagatcctgtggctggctcagctgtgtcccaggagctacgggagggggacccagtttctctctccactcccctggaaacagagtttggttcccctagtgagttgagtcctcgaatcgaggagcaagaactttctgaaaatacaagccttcctgcagaagaagcaaacgggagcctttctgaagaagaagcgaacgggccagagttggggtctggaaaagccatggaagatacctctggggaacccgctgcagaggacgagggagacacgtaagtggtgatggcagtggagtgtggagtctggggagatgaagtgtgaggtcgatctgtcctctggtcctgagacccacttctccaggcctctgccccctttgcttggcgacccaggtttattgtcccccatcttcctttcagcgcttggaactacagcttctcccagctgcctcgatttctcagtggttcctggtcagagttcagcacccaacctgagaacttcttgaaaggctgtaagtggtaaggataacaacggggcagggagctgaccacccccgagattttcactgtaaaacagtccagttttctaggagagggatgccccagagctgggagaagcggcacgtagcccttttagactgagcttacattttatctagcagtttgtgtcttctacttccctcaaggattcaggg

SEQ ID NO: 7669 - DNA, 6000 bp, Homo sapiens
ttttattcaagtttttaaccagttcttttattctgtttttatatgcaatgtttatataggatttagaataagtatgaaataactatttgatcatttattagatagtctgttaaggaagaaaattgccatagatgaatctaatataatttaatcttttttcagataaaaggcaatagatggaagatgagagtggaaatgagagcatcaggatgattgaaaattctctcatcggttaaaacaactagagcacttgcaaagcttgtcaggattaacactttcagaactctgaaaattgaccaatacttcaaataacccaaggtaaatttattcaggaaaatggctaaattgaagtaagaagagtgaaacttgcagcattttaactagacatattttcccattccaaactcaccagctctgcagtagctttgacaactaacatcctataaaaatgtttaaaagcatcagtctagcaggaaatggagggtgcaaaatggggttggatcttcttcaaagctccattcccgttaccagagatgccatcattattttgacctatctgttggtttcctgacaaactctacttgcaggggtttcttatttgacctaactcagaactcacccacggagaacagtcttttcctcagggacatttgttggaaacaatcagaacaactgcttaacatcatggctgcctaaggcaatggatagaagttggcgaaaaaaaatcagctattcaaaaagcctaaaagaaaaagctcaagaaaatgagatgtccataggaatttattaaaactctaatatattcctgagaatctagaaagccgtacaaacatgcaggactgtgcttatgatcagaaacaacaacaacaacaacaaaaactaagaaggtcttgacttctcacctctggctgacctttgtggctgtgtgtaagcagaaggtaaggccaaggcagagttgcccagtgcctggctaagtgtcaaaggcatgcccatcatggacacagagtctctcagcaatgactaggggagatgttagttcctgacatctaaggaaatctctgtccacttatcagctgaccaataagctatcagagcagagacctcattgatcatacaagacaaagaatacagacattctagaattatttaagaaaaattactgaacaacaacaataacaaacaacaacaacaacaaaccctgggtaagagagaaaatctgattttcagggttgctggattgtgttattcaaaattccccgtttctaacaaaaatgaataaataaaatgcaggcaaataaataagaaaatatagcccatacacattaggaaaaggaagtcagcagaaattattcctggggaagtctagatgttgcacttaatatataaagcctttaaatcagttcaaacatgttcaaaggattagcgaaaactatacgtaaaaattaaaggaaattatgagaacaatttctcatcaaacagaagatatcaaaatataagtgtaaactttaataaccatgggttaggcaatccttttttaaatatgatcccaaaagctcaggcaaccaaaaaaatttgataaatttaacatcatcgtaattaaaaggtttgtggtttcaagaacactatcaataattgaaatggcaaaagtacccagaatatgtaaagagccactacaactcaataatttaaaaaaatccaattaaaaatgagcaaaggatttgaataggcatttctccaaagattattacacaagtaactggtaaggatgtaaaatcatcttcagtatcattaggcattagggaaatgaaaatcaaaagtataatgagagttcacttcatatccttatgatggctaaaataaaaaagatggacaatagcaagtgctagcaagaatgtgaagagatttgaaccctcatacattgctaactggaaatgtcaaatggtgcagccacttcagaaaacagtttggcagttcctcaaaacaagaaacagagttatcatatgattcagcaattccattcctggttgtgtatccaaaagaattgaaatcatctgtcacataagaatttgtccataaatattcctagcagcataattcgtgatagccaaaactggaaataacccaaatgttcctcaactgatgaatacatttaaaaatataatgtatacagccaggtgcagtggttcatgcctgtaatcccagcactttgggaggccgaggcgggcggatcatgaggtcaggagatcgagaccacggtgaaaccccgtctctactaaaaatacaaaaaattagcaaggtgcggtggcgggcacctgtagtcccagctacttgggaggctgaggcaggagaatggcgtgaacccaggaggcggagcttgcagtgagctgagattgcaccactgcactccagcctgggtgacagagcgagactccgtctcaaaaaaaaaaaaaaaaaaaatatatatatatataaatgtatacatacaatggaatattactcagccataaaaacaaatcaaaactgggcacagtggctcatgcctgtaatctcagcacttggagaaaccgagatgggaatatcgtttgagcccaagagtttgagaccagcctggacaacataatgagattcaatctctacaaaattattttttaaaagctagctgggtgtggaggtacatttagttccagctactcaggaggctgaagtaggaggatcacttgaacctagtgagccatgatcatgccactgcactccagcctgggtgacagagcaagatcctgttttaattttttaaaaatcaaattctgattcacattatagtgtaagcaaaccttgaaaatattatgctacatgaaaacagtgagccacaaaaggccacatattgcattatttcaatcatataaaatgtctaaaataggcacattgatagagacagaaagtagattagcagttcctagaggataaggaaagggtaaaatggggagcaactgctaatgggataatgaaaatgttttagaaatagaaagtgatgattatggcacaactctgtgaatatattcccccaaaaatccatttaattactaaagaggtgattttttttggtatgtgaattatatgtcaatttttaaaaagagaaaaaataaggcaagaggaaggtaagattatttccagctcatgatgttcaggaaagcccattccagcattttacaatatacagatgattaggcattcagaaatacaggggaagggagttggaggtgtgagttctgctctgtgcaatcattcaagagacaggctcctttcatgatatggtcctgccacctgtaacatgagatttcaaagacaggagagaaaacttgtgtaaaattatgaaagagctaatgcgatgagccccactgtcaacatgccattagctagaatttagtcataaggtcctacccaattccaaaggtggatggaagacgttaatttatctcaatgctcaggaacaatacttagtattgtctctgtcacaaaaggaaagaggatacattcccaacctaagtaactgagattcagaattaaccctgaaataagcagctacaaactatagagcactaaaaccaaaaataatcatagaagaaaagaatatacaaaattttgtataatctgttgttcagttaatttggaaagtaactttgctgccatctttcaaaccaccttaagcaaaatattcagaaacttcaataactaactagtatcaccagtcttggcttgataagtaaagttactaggtatttgtcggttcaacttacgatacgttaaactctggaggtttaaaaaaaagttgcttaaaaaaaaaaaacagaatgcagcttattattttcctgagttcagtgtaagcatagttacattaatgccgtatgagtttaaaatattgtaaataaaaagcaccttttttcagctataacacaaactcctcaatagagaaatatgggatattagtgcattaaaatcaaccccttttgaacccattcataatttatagctacctacatagttcttccagccataccatgtctatctgtatcattaaatatcctctctgtttttcaggtattttaactgaaccactactggctgggttcttaataaaaacaaaaaattaagaaggtaaataaattcagtatcctagccaaaaagcagagtatctgtttcaggaacataagacagtatactttccatttcattttacacacacacatgatgtcttttacataagaatgaacctggctgcctgaagatagcttgttttgatatcacagaatggcctctagggatcaagttgtttcccttgaaaacttaaaaagggaaattcagtctcttatccggcttgcttctcgacttcagacttcaggagcttctgcatctgaatctgtgtcaccctgcaatttgtgtctctgaaacataatcctgtctcacagactcccattgcattgggattggtcagaaggaagcagaggaggagccaccgtgaacatgttttttttctctccacacatcataaaaatcagcagctggcgcctacagcccctaacactcaaagcaacgctcaggctggaaacagaagcttccgagaggcagccgatgtgagcatgtgcgcacagattcgtctcccaatggcatggcagcttcaaggaaaattattttgaacagacttgaatgcataagattaaagttaaagcagaagtgagaacaagaaagcaaagagcagactctttcaactgagaatgaatattttgaagcccaagattttaaagtgatgatgattagagtcgtacctaaaagagactaaaaactccatgtcaagctctggacttgtgacatttactcacagcaggcatggcaattttagcctcacaactttcagacagataaagacttggaggaaataactgagacgactccctgacccaggaggttaaatcaattcagggggacactggaattctcctgccagcatggtgaactccacccaccgtgggatgcacacttctctgcacctctggaaccgcagcagttacagactgcacagcaatgccagtgagtcccttggaaaaggctactctgatggagggtgctacgagcaactttttgtctctcctgaggtgtttgtgactctgggtgtcatcagcttgttggagaatatcttagtgattgtggcaatagccaagaacaagaatctgcattcacccatgtactttttcatctgcagcttggctgtggctgatatgctggtgagcgtttcaaatggatcagaaaccattgtcatcaccctattaaacagtacagatacggatgcacagagtttcacagtgaatattgataatgtcattgactcggtgatctgtagctccttgcttgcatccatttgcagcctgctttcaattgcagtggacaggtactttactatcttctatgctctccagtaccataacattatgacagttaagcgggttgggatcatcataagttgtatctgggcagcttgcacggtttcaggcattttgttcatcatttactcagatagtagtgctgtcatcatctgcctcatcaccatgttcttcaccatgctggctctcatggcttctctctatgtccacatgttcctgatggccaggcttcacattaagaggattgctgtcctccccggcactggtgccatccgccaaggtgccaatatgaagggagcgattaccttgaccatcctgattggcgtctttgttgtctgctgggccccattcttcctccacttaatattctacatctcttgtcctcagaatccatattgtgtgtgcttcatgtctcactttaacttgtatctcatactgatcatgtgtaattcaatcatcgatcctctgatttatgcactccggagtcaagaactgaggaaaaccttcaaagagatcatctgttgctatcccctgggaggcctttgtgacttgtctagcagatattaaa

SEQ ID NO: 7670 - DNA, 6000 bp, Homo sapiens
cccttgaggcttgaatgccactacccaggcagggtgcagtggctgacccagtaccgcatgcccacatggatcgatgcccgctcactgacccactgcaagtcagctacctaagcctaggtgctctctgagccaaagagcaacagcaaatgttcttgttgtgaaggataggggtactggggatggataggggtactggggatggataggggggcaaggaaaatcacccaggcctactggggtgtgaaaaaaataaaagtcttaaattaaaaaaaaaaaagaaagaaaaagacttctgagacatcctgtatgtcttaaacttcaacaagagtgaggaaacaactgttttacttttgtgcctttcaaattctccacgaggtgaccaggaccttctcttcctggctctggcgcagtcagcctggaccctctgccggtggctcccagggcagccctgggtccccgcaggtgggtgtgttgccggggagcgcaatgctgctgctgcggttgcctagcaacagacgctcacactggcagcgggcgccactctgctcttggtaccctccccaccagccctgctcccactgctccaggtggccagctggtacacctgatgctgatccaatggttctaaacacaaatgagaatcggtttcccagaccaaactagaaaaaggtcaggtgattgggttaaaaatttttttaaggtgtgttgaattcctacctgaaaataggctaagattggctttgcatttttcatgagaaatgtctcgtcactgtgtaaggaaagtgcttttatgttttagagtgttggcaatgtgttgtggcacacaatgcaggtaatagtgcgaatgttgcagccaggctgcaagggtctgtgtcccagatactcttcttactcagcctctcagtctctgtaaaatgatgatgacaatagttcccaccttttagggcaaataccaagtaaattgttccatggaaaggatttaacccagtgccagcaatcactccataactagaagcagttttatagcacacacattatcattatattattaatatattaacttcctgggtatattttggtactttttcatcacatctgtttacctaatccttcttaaatttcaaatatagaatttatctttaacactgattgctaaatctgaacaagtggaaatcttttgctatatttttagggaaactaaatatcagacttccttaaaaatgtgacttctaggttctaacataattctccctttataagttttcaagggatttattttgtcccctgctgtccaacattttatagaaatcttgacattaaaaaaaagttggcaaatccttataaaaatcccactactctatgcttttttcaaaaaaaagcacagacacatacattttctggccaggcgcagtagctcaggtctataatcccagctctttgggaggccgaggcggttggatcacttgaggtcaggagtttgagaccagtctggccaacatggtgaaaccccgtctctactaaaaatacaaaaaattagctgggtgtgatggcgggtgcctataatcccagctactcgggaggctgaggcatgagaagcccctgaagctgggaggcagaggttgcagtgagctgagatcatgccatggcactccagcctgggcaacagagccagactccatctcaaaaaaaaaaaaaaaaaaaaaaaaaacctcaccttctgactgccccactagtcatagcgcatgctgggttgatattgccacgtgtgaatatatgtctttacacactcataagatgtgagctgtggaaactgtgctaaacagtctccttccacagaacttcaacttttagcctagctcagaatggagtctgacagtgtatgtttgcttctgcctgtctagaaaagtaattcattgcattttttaaatgtatttttattttcagtaagaatatttattgaaaagtactatattgaacaaatattttttacgtgtggtcatgaaattcctttgatgagaattcacactttgagctggagttatctttcgctttcatgacgtcattcattcccttgacaaatattcccagcgcatctcctctgggtcaggcactgaaccaggtaccggtgccgcaggtacaaggataggctcagcctccgccctcaaggagtccacagtctagtggagttttgaggacacagttaaaccataacaatgcaaggtgatgggtgagaccagcggagaatctggtgctcccttagggcttgagaaggtgtggcctaacccccaatgtgagggaggcagtgaggcccagcttgaggctggaaggataactaggggggttgacccagaaaagagagtccccaggtattcccaagacacaagcagcacatgcacccgaccagcctgttcaggaactgagagtgttaggagggatggggtaagccctaagaaggggagagtttatactaaccccaccagaaggaccaggcccaggtccttagatgatggggacagtgatgtggctggatttgtattatcgcagtgggagcattgtgcaaggtgcactgaaatgagacagcaggcagtggaaaccgtccggaggcctctgaaatccagctctctgttagtaatctaagaccacagcagtggcagacgccacggaaagaacaggacagatactcaggaaacggacccaacgggatgcggtaactgttggggtttgtaagaaaatggaatctggcataactcccaccgttctggtttggaaaattaggggcccttattccagagaaagaactgagaaaggagcaggtagaaggcgtgagggtggcacggggcatgagctcaatccttggcaaggtgaattccagacacctgcggcaccgtgggggcggtgtgtctggggacggtggtggtcagcaggatgggctgggctagggatccgcggtgggcacggtgagagctgagtgggcagagtatggaggatgcagtcagcccgtcaggaacgtgtgtgggttgagaggctgtgctgtggggacggctcctcggacccctgggtggaggagcccggatgcaccggccagagggacagcctgaaacccaatgcagtctctaggagggatcaaagcaggagccacagagacggaaagaaaataaagaccaaaattcatggatgagacttggcccctggggggccctagatgaccttgatgagagtattttccctatggggtgaatgtggaagccaggctgccaggtactgaggtgggagcagcaggaggggaatacaggcggagtcagacgacctttctaactcttggctgcggtgggcaggaggaaaactggtggaactaacaaggggcgtgagatgaaaggtgttgtgtggttcaggtgggacagagttgaatgtgttcgcttgcttgagggaaaccagccggtagcaggagaggttgaagcaagagtggagaggggaaggtgcgctgggtgaggggcgaaggtccacagggcagcggcgggcctgagggtaggggaagcgccgcctggggagccggggcgggctggggtctgttctcctgaagaaggccagctccgcagtgaagaagaccgtgtaggtttcttggaaggtggaggcactcgacgacagagctgagcaaaggcaagttagacagcgcagcgccaagcccgagacggtcaactgggagccgccacacacaaggaacagtgatttctccacgcccacggctggtgtccacgacttcggcccggccccctcttctgacctccttcccccaagtacaacactgcaaacgccaagctgccggctctggccctattggaggggtctcagtaacggagggcaggtgccagtctcgcgccctagttcgttcctctgctacaacgccaagttcgaggccacagtgccttctggaagagttgttgtgctgcttgggagcactgcacaggagaaacgggggctggaggtaaagacaggaggctcgggaggcggcgacgtgggcgagctggaatagtctagaagctgagcagaacaaaggcggtgtgactggtgagcctcggagggatcctcctccctgctagaatatgcatgatcctccgcgagtcttcgcccgccaggagcagggacgcgtccgagccaacacggggcgcgcgcccagacgcactttcccggctcggggtgcaagagagccaggcggccgcggcgcagcggaggggctgcgggcccggaacccaggccggtcagcgtgtaagcgccccagccggccgggctccgtggggggtcagctccctgacccctacagcgcggtagcgcctctccgagagctccgggaccagcggcccggccgcccccaaagccagcctccctctcccttccccgcaccgggatcccagaccagggagggggcgcacgtccgacggctgaggaatagcagggcgcgagccggcccggcaggtgcccatcgtcgccctctgggaccccggtggcgcgctctgtcctccgcgccacgctcagccaccaccccggctgtttgggacccggcacccagccgagcgcgccgccccctcggggacccgctgggcggggctgagcgaggcttggagtgcgggcgaagggacgtggggcgaacccggggcgctgcgccacctcggctgtctccagcggagaccggcgccctcgccccccgtctccgttcattgtgctgtattcatccagcagattttgaaacaattctcgtgtaaaaaggcattttactccgcgcgtcttccttacagccatttagttgggagtttgcggtgggcagggggagggagaagaaacgcctgctctgaatcggaaaacaccgaagagaccagaccatctctttcagcagcaggaaagagaggagccgtcgcaggagccgcacacgtctccaactctctattgctttttgcgcacattcctaacttcctgacgtccatcccagcgggcaggcatggggtgtttgggcggcaacagcaagacgacggaagaccagggcgtcgatgaaaaagaacgacgcgaggccaacaaaaagatcgagaagcagttgcagaaagagcgcctggcttacaaggctacccaccgcctgctgctcctgggtaaggccgaggggcgcgcggcggctcccggccccagcggagcgcacagccaggagcggcgagcgccaggctgggcgggcagggccgggcgagggtcgcgcgcacctctgggccgcggagcccagacggcggccggggcgagctcctccagccaggaacccgcgtgtaggaaatccccgtgctgggggaggaggattgctcagacccggctagtggtgagagatggcagcgatatccggacacagatcacagcgttctttctgtttgtttgcaggggctggtgagtctgggaaaagcactatcgtcaaacagatgaggatcctgcacgtcaatgggtttaatcccgagtaagaatgttcagtttgcttccaaactgcatgcaaacttcgtctctctcccagacgtcccaaaagtgctttctctaaacaattttaatttatttgataatggagtagacattcaagggggaaaaaattagatatttgctgttggatttggtatatttaggcaaatccttcttctgctagtgtctaatgaaaaaaaaacttgcttaacaaaatatgatttataggtattcttggagtgttgatctgtattactggtattgctctgagcacacttaaccaatatctcgatatatttttttcaatataatattatttgtttgcatctatttcagtttataactgtcaacatattatccatgggatagatctaggtaaaatacatttacaggtgtaactgcatgttatatttatatgcaatatccatagcgattttgcctagtttttctgtaacctgcatagttgtttaaagctatagatttttaaaaaaatgtgtgcattcaagtttgtttagagtacaa

SEQ ID NO: 7671 - DNA, 6000 bp, Homo sapiens
aaagaggttttggaaaactgaatcctttactgcaaggggcactgagtgaaagttaaaagagaatattattcttttgctctgagattctctcaaggcaccaaaattatattagattttcccttttgtaactacccttccctcagcaacaatttcacctttcttccttttatcattaatttaaatccaaacctttccctctaaagtaggtcccactggttgtcactggactagcccatatttttggtagcaagatgagatattccagggtttccctttggggtcattcccaataataggggatcacactggataaatatgaagaaagggtactatccttccatgaagcaacaaaacatttgcatagtcagccccagcttggcaaagtgcagggaacagataatccataccatcaatctctttggaatttttgcatttaggttcaaattaatatatatattaccttgttttggaatattatatgattttgggattctttttttttttttgagatggagtctcactctgtcactcaggctggagtgcagtagtgtgatctcagcttactgcaacctccgcctcccgggttcaaacgattctcctgcctcagcctcccaagtagctgggattacaggtgcatgtcaccacgcctggctaattttgtatttttagtagagacagggtttcaccgtgttagccaggatggtctcaatctcctgaccttgcaatctgcctgccttggcctcacaaagtactgggattacaggcgtgagccaccatgcccgacgtggattttgggattcttaatggtagccctggttgcaaggattactagatgcattattgaaaagaaaaatagaggtgaagtagggaagattgtatgcaaatacttgtttcgttctttatctctttctccctaattccaccaacagatataatcatttacctaatggaatttcacttttagttccccttacctacagttgcaaaacacaaagctgcaggcttgtagactagtcatttgattctttgttacgcccaccttcttaaacaggtactttagttattcatttcaatttccttttaacccacgactttgaaagtgataaatataagtccattgaatacaatgttattttgcatgtcattgcctatgtgagcagtaaactgagtgccatcagttgactttactacgatctaactaatcttcagtttagatcagttaaaaaggtagaaattggctggacatggtggctcacacctgtaattccagcacaacactttgggaggctgaggtgggcagatcaattgaggccaggagtttgagaccagcctggccaacatggtgaaaccctgtctctaccaaaaaatacaaaaattagccaggcgtggtgacacacacttgtaatcccagctactcaggaggctgaggcaggagaattgcttgaacctgggaggcagaggttgcagtgagccgagattgtgccactgcacctcagcctgggtgacagaacaagactgtgtctcaaaaacaaacaaacaaaaaaggtagaagtcttccaaaattctatgtttctctgaagtctgacgtaggggaatgggatgggttgggagaatctcagtttgccccttgcttcctcagagtctttctcctgtgggaaactgcatctttttggcagtgaattttaaactgaaaaagatgtaggttctgaactcaggtatttgcctttaaaaaaatctggttctggtcttgcttttgaagtggatatctaatgaatacatattagttggaattatacagtaaaggagtttctggctcaggttatgattggcacatgagaaataatagtttttttccccccagtgaaattattaagaaagggaaaatgtaattaatatggtttggctatgtccccacccaaatctcatcttgaattgtagtcctcatgtgtcgagggagggaagtaattggatgatgggggcagttcccccatgctgtgtgctcacatgctctctcttgcctgctgccgtgtaagacatgcctgcttccccttccaccatgactgtgttttcctgaggcctcccctgccatgtgaaactgggagtcaattaaacctcttttctttataaattatccagtcttaggtatgtctttatagctgtgtgaaaatggactaatacaacaattaattgctttttatcttcattttaataaatttataagcaaatggcattaataaattatgatagagcagaatgcaaagatttttaaataatttaatcaaccaaatgtggatcacatagaatgaatatatatgaagaagtattttatataatttttgaatgtacaattgcatttataaaataaaaatatgcaaaatcaacttatgtttttaaatgtccagataatgcttacccatgagggctgagtaactggaaaagggtgtgggtggtggttacatggttatgttcagcttgtaaaaattaatcaattatcaatttgtgacttatacatatacttaaacaaaaaagtaacaaaaacaaaatgaaacaaagtgcagtctctgccctttagcaacttatgttctattaggagggccagcaagaaaatctccatttctgttactcttcctttctttgtgtagagtcatttttgcatttggcatcattttccttctgcttgaagaacttcctttaccatttcttgtagagcaagtttgctggtggtgaattatttcagctctcatatatctaaaaaccctttattttgtctttgtttatgaaactttctttttttttactaaatatagaattctaggttgagttttttttcctttcaacatttgagagatattgcagccactgtttttctgcttctgttgcttctgatgagaaacatgctgacactcatacctttcttattttgtatgttatgtgtcccccctcaacccctgctgttcttaagcttttctttttcacactggttttgagcaattttatttgatataccttgtgtagttttctttgtttcttgtgtttggggttcattgagcttcttggtttatatttctcatcacattttgaaacgttttaaccattgattcttcaaatttttttctgtcctttcctttctcctttcctcctgggactcctattagacatatattaagtcacttgaagttgtcttctaccttagtgatacactgttaattaaaaaaaatctcttttatctctgtgtttcattgtaggtggattatatcattacatgtttaagttcactaatcttatcttctgcaatctctgccattaatcctttccaatgtatgtttagtccagaccttctagtttttatttctagatgtttgattaaaaaatcttctatatctttacatatctttttgaaaatatggaatacagctatattccattttcgtttttccatattccatctgactattttaatgttcttgtctgttaattctaatatctgtgtgatttctgagttgacttcaattgattgatgtttttccccttattatagatcacatttgcctgcttcttggcatgtcagataatttttaattggatttaagacattgtagttttacattgttgggtactggatatttttatgttatataaatattcttgagctgtgttcagggttgcaattaagctgcttggaaacagtttgatcctttcaggttttgcttttaagatttgctaggaagaacccaagaaatatttagtatagggctaattattcctgactactgaggcaagacccttctgaatgtactgcccaacgtcccatgaattaggaactttttccatttggctaatgggagcaggcactataaccagccctctgtgagcattgggtactattgcctctaatattttcgagtggttctttttcttgcctaaaaacagttcctccacaagtgctaatcagtactctggtgaatacttgaagggggtcctctgcagatctctggagttctgctcagtgtggctctgcagttcagaatcctctctggtactcctgtactctcaactccatttcctcatcccagggagtctcctgggctctgcctggatttcccctctctgcccatgccctgggaactctcaagatagtaaggtggggcaactgcagacctcatccgttctctcagggatcaccgtccttccttgttaatgacaagtgccttgaaaaccattgtctagttttttggctgtttcagatgggattgtgaaattcagcccctgttactccatcatggccagatgagaatattgaactgaatctacacgagttttaaaaatggcctggtgtggtggctcatgcctataatcccagcattttgggaggccgaggtgggtggatcactttaggtcatgagctcaagaccaacctggtcaacatggtgaaaccccatctctacaagaaataacaaaaattagctgggcatggtgatgagtgcctggaatcccagctacttggaaggctgaggcaggagaatcgcctgaacctgggagacagaggttgcaatgagccgagctcacatcagtggcctccagcctgggcaacagagtaagactccatctccaaacaacaacaacaacaacaacaacaacaacaacaacaacaacaatgaaccttgtgtgagcccaatttatttcctgtataatgattatattttatagatattacatgattttattctaataatggagatggatgcatcacagtaaaatgtttaaggtaaaacatttcactgttttttggaaatactttctcagtgtcagttaaagggaaactgttaccacaagcttactttatcaagaatcaggaagtactatgagatcagcattagattaaaacagtgttgttttgagtggaagactacacattttaggtatgtgattagaaaacatacttgtcagaattgtctggctggattaatttgctaatttgaccttcttcatcatttgatgtgatgccagatactaatagcacaatcaatttatcactaagcactcgtgttactttagcattttttatgtccttagtagcttttgctataatgctaggaaatgctttggtcattttagcttttgtggtggacaaaaaccttagacatcgaagtagttatttttttcttaacttggccatctctgacttctttgtgggtaagttatatgtctttatttaagacagtcttttccgattttaatttatttctaaatccttaaaataagcttttgttatttcaggggactgtatacaactggggaaaaataaacacaaaaagtttaagtattaaattttggagggggctatatggcactgtaagggaatgttatacatatgtaaatcagtgtggtaggggaattttcagctgaaaacagtttattttctttttatagaataaagataagtccagtatagctccaaaattttaatgtaagagttacttgtttctggtgctattttcctcatatgtttaggcttataagtattcctctttaagtaaatatggttttgttggtatcacaatgttggagtaataagaaattatgtatatgctagtaaccagtgcaatcagaaaatagcgtattcagatcaattaaataatatgattaatagtattaatttaatgatatggcatagaattttgtaaaatatacccaactgtaaactgccttgcatataatatgatatcatagcattatatcatcgttaagagaccatagaaatcaaaccaactttctctgaaaacacgcactttataatttttcactgcctgatgcttcttatttttaaacaatgcttatcataataagtagatgtacagaaatgtcagctgatgatactattttacaggagtttctagtataatttaatctggcatattcagattatttttgtctataactacataaagcttacatttatgttaaagtgaaataaacacacaaaatacttagttcattccc

SEQ ID NO: 7672 - DNA, 6000 bp, Homo sapiens
gcagtaacaagtagctcacagccacaaaggctaatttcttgctaaggggacattttaactggggtcaactgaaatcctgtggcacgtattcatggagaacacagcccaaagcagcagcctgcactgggatgcacagtcttcgtacctgagggggatgctcagtgttcgtacccgaggaatgaatcccatggtattgcttagaccttgagctcaggatgacctcacagctgttgcactcacattgtctcagccaaagcctgaaggaaatgggtaagactcatttctgccctgagaggagcacagaaattcacctgggagaggcaggattacagaatcttccaatagggagcgcagtaaatgagtgggaacaacaaagcaatctgcccacaaacacttctagaaaactccgtggcagccttagggccaggtgggagggaaagacctgagaattcactcccccattacctctcttatgtaggttttggggtttgaatttacccttgtgtgtcctgatgcatatcatgctgagaaattaacttaaaaatgtcctgagttgatggtaccattgggccaatggcagagcaaataaaaacacttttataggagtatgcacttaactcaagtctatcaaatcatcacaggtatgttctggcttaacagaaatctaaaggacaaaaacaaaacaaaacaaaactggaaacaagctacgagaataggaacttggtagaagtaataaaagcataattagactccaaggacttcagatattagaattttcagaatataaaatcagcacatttaaaatattcagataaataggagaggtaattagaaacatcagcaatgaggaagaaaatattaaaaaataggcctggcacatttgaaaaaattctgtgagaacttaaggagagtagttaaatcaagggtgtacagctgaagaaataccaataaattggcacagatgaagagatgaaaagtatgaaaaagtgagtcagtgataggaaggagatagtggaaaggcctaagctatgtctctcagaattccaggaggagagagtgccaagaatggggaaagtaaaagagataatggctgaaaatttttccagaactgatgaaaaatatattaatctttagcttcagaagctcaacaagaagggctaaaaaatgaaaatcatcacaaacctatcaaagtgaaattataaaacatcaatgataaagagaagatattagaaatagagaaaaaagtcagattatctctaaaggagtgacagaaagcacatcagctgatttctcaagagcaggagcaaaatccagaaggtggaaaaatatcctcagtgtactgggagaaaagaactgtccatctggccaactcccattcaataataagagccaatgagcaatttttatcattgactatcactaaaggaaaacttaaaatatattctctaaaaacaaggaaaaggcttaagatgaatagaggaaggtgcagaaagccatgggtaagaatgtgggtcaccaaactggatattgcctgtatcacacaacaaatatgccgaattggggggaaattaaaagaactaaacaactgggcaacaaaaccaggtagaatgacaaaaagtgactggagttagaaggcttcctgaaacttgtatggcttgggagaaggggagtgataacaattaattttaaattctatttaatattaatagaattttagtaacttctgaatccatgtctccagctctggtctctctcattaactcaagactaatccacccaactgcagtcttgtcagtcccatgtctagcaagcacctaaaatttaacttgatgctccacacctccaaacctgttccttccactctttgtgtcaactcagtaaatggtgatttcccatccaggctgtcagactaaaaccgtggtagtcaaccttgctctcccttttctcccaccttaaatccatccaccaacgaatctcatttgctacaacattgagatatccagaatccaggtccttcccaccacacctagaacgatctgttgtctgggttcctgcaagcttactggttggtcttctgctcttttctttgctcttctaatctgtactccagaatcatcattctgaatcgcaggtcagagcataacatctctctgcttgaaactccctataggacttcctccgaagtccagaatgaagtcccaggccccttccttgctctccaaggtctgaggtcatccatccccattttcctgaaccaatgttttctgacctcgtggctgacaaatcttcttcccagctgtttccatgacagcaaaactgtactcctcgttcttcacacagcttcctctgctgcactgtttcccgggaatgtgtcatgccacgtgtttaaaaggtttccttctgtacttccttcaggttcctactcaaatgtcagtttttcagatgtttctccctattgccctgtatatagttatactctctaactgctctctatcccttatcctgcattcttctcttttagggttgtattaggccattcttgcattgctataaagaaacacctgaggctgggtactttataaagaaaagaggtttcattggctcacagttctgcaggctgtacaggaagcatggtgctggcatctgctcagcttctggggaggtctcaggaagcttctaatcatggcagaaggtgaagggggagcagatacatcttacatggcaggagcggaagcaagagagggaagggaggaggtgccacacactttcaaacaaccagatcttcagactcactgtcccgaggacagcaccaagccatgagggatccaccccattgatccaaaccctcccactgggctccacctccaacattagggattataattcaataagagatttggcgaggacagatatctaaagtatatcagtagtgtttaccacatgtgacattatcattttatttatttttaaatgtcgtgtccataatgaaatgtaaaatccataaaagaaagtactttgttgtgttaattgctctatctccagaacctacaatagttcctggcacatagtaggcactcaagggtaaccagtaaaacaataaatatacactatatttcttccttttccaagaatgtggagggagggagaaaacactttaaaatgcaattcaaaagatgtcatgaaaagagagagagagagagagagaaaaagcacagaaatagaaaacaaataaaaagtacaaaataaaatgttaaaaataaatccatataggttagtaataacaataaatataaatgacctaaactcaccagttaaaaactagagattttaaaattgtgttttaaaataattcagttatgtgctatattaaagagatacctttaaattgcaggacataacataggaaggctgtaaaagatgtaacaggcaaatacaaagcaaagaatgttgttgtacttatagcaataacagacaaattatactttaaggcaaaaacaaacaaaacatgtaccataataccaaccacataatgttaaagcaaaaaaaaaaaaaaaaaaaaaaaaaatcaccacaatatattaagatcatatgcgtatgccaaaaatgtataaagaaatgactaatagacaacaaatttaggttacttggagatagtgggagaggtggaggttgtgactggaaaatatataaaagtgacttcaactctagtgataatatttaaaaattattctaagctagatggtgggtgcattggtattcaatgtaattttatcatatctgtttcatgtgaaaatagttcataatttaaaaactctcccaaatcatattactactaactttcaatgcaacagagctgtcaaatacaacatgatactttgaaagcctgggtcggagagcgtctcagggaagaaaagcaatacggattggcaagatcacctgaggaagtttcaaggcattctctcaggtcggggcaggtaagagcattcttggctttagcaggatacccaaataggcaagttgcttacactcaattttgtcttccagaaaatgtgtgtgaatagaacaattcccttgcaaggaactccctagcaatgaatgtagataaaatacatagatgttcaatgaactgcatcaagatttatctggaaatgaggcagaacagagctagcaaggtagaaaaacaagatcctacttccttaactcctcaaggcaaagagcccctgccctctttggtctttggattacccatcccctcaggcactgcgtccgcgcataatggacagtcaccagatggtgaatgctggaaacgcatcggtgtttttgaaagtgaaaacagacaaatcaccgcaaataaaggaatcagtgtcagctctctagctgggaaccaccaaggttacaaagctaacgtgactggccctgctataccgaaacggcttaatttctttctggcaaatccacatttacggcagtaagatactaaacactttctttcactttaaaaatatttcgtttgtcactgctgcagtttatgtccctcagatgagtaatacaaggcaaaaatgaagtgaggttgggtggtgtgaacagccttccccttccatgtcagccacgtctatagagaagctcacgcggccctttccctttgcacttctctcctctgtagcaggccgcggggtgagggtgggattaggcggccaattttacaaaactccagggagcgtcgccagcctcgatttcctggggttattcctgggagagaggcgttctcacggacagccaccctggggaggaggaggaggaaaggcactaatggatgaggaggcccgcgcacccctccgcctcccaccccggcgcgccctggaacgccctggagcgcgcccggcttccctcgcccgcctggcccgcggcatccggcagccccgccttcagcccgccgggcaggtccgcactccgcagaggcgagcgcgctccggttccagccgggaggtgggcggcgacccatcccgctagaatccgtccagtctctgctcgcgcaccgtgacttctaaggggcgcggatttcagccgagctgttttcgcctctcagttgcagcagagaagcccctggcacccgactctatccaccaccaggaagcctcccaaaagagctctcgccctgtggacgactcggaatccctggaaaagccgggagggagtcggaggcgccagcccactggggaggtggcgctgggcgcgcgggatgcgcggggagccttctctgcaggagccgcacagtgcactgctgcgcgctgggcagtgcggggaagcgccgcgggaaggagcggctccgagcaacaggtgcagcacgcagcccctccgggagccagggaaaaccgccggcgaagatctggagcggtaaggcggagagaagggtctttccacctgcgcggctgcagccggcggatccctcttcccaggctccgtggtcgcgcagcgggcggaggcgcccgggaaggggaccccagtgctctcgagatcaccgtcccttcccgagaaggtccagctccgggctcccgaacccaccctctctcagaaggtcccggcgcaaagacggtgccaccaggcacggccaccggatccccgctcccgctggctcgcgcctcgggggaagctcagactcctaaactcgcactctccgtgctttgcgccgggacccctggccacccccggcgcctactatcccgccctccctccccgcgcgccccgccgctcgccgggacagccccgcgggccatggagctggcggtcgggaacctcagcgagggcaacgcgagctggccggagccccccgccccggagcccgggccgctgttcggcatcggcgtggagaacttcgtcacgctggtggtgttcggcctgatcttcgcgctgggtgtgctgggcaacagcctagtgatcaccgtgctggcgcgcagcaagccgggcaagccgcggagcaccaccaacctgttcatcctcaac

SEQ ID NO: 7673 - DNA, 6000 bp, Homo sapiens
atggccacctcactgtgccctcacatggcaggaacagtgtaagcaagctctctggtgtctcttcttataagggcacttatcctatcacagggccccacccgcaggacttcacctaaacctaattacctcccaaaggctccatctccacaaaccatcacactgggggctaggacttcaacatatgaatttgaaagagacacattcagtccataataccatggtatatattttcattctttttactactaacctacttgtgtctgtatttaaggtgtgttccttataaacagcactgagttgggtcttttctttttaatgcactctgacattctctggtcctttattttgggggcggcagcagttagtccacttatatttaattatagttgaatttaaatctgccactttgatatttgtttcctattgagttcatttgtttgtttccctctgctcctcctttctttgggtgtaattgaagctttttggtatttcagttttatttccccattggcttttaagacacactactttgcattattttttagtggttgctgtaaggctgcattttaccaaatgatagctactaactaatgtggctatttaaatttaaaatttaagctaattaaaattatacaaaattaaaatttagttccttagtcacaaaacccacattgcaagtgttcaatgaatatgtgtgactagcggctatcttatatatgacaaagcagttatagactatttctaacactgcaaaaagttgtattggtgatttatcacaatctacttacagttaatatactatttaacacaaaatattgggattttgtgagcatataattcctttacccccatcttttgcaatgctttcatatatttcgcatatatttcatctatatacatcataagcccacaatactaatattttttcttgaagagaaatatgattttttaagtttaaaaggaaagaatatggctaggtgcggtggctcaggcctgtaatcccagcactttgggaggccgaggcgggtggatcacaagctcaggagatcgagaccatcctggctaacatggtgaaacccgtctctactaaaaaatacaaaaaattagccgggcgtggtggcgggcgcctgtagtcccagctactcggtaggctgaggcaggagaatggcgtgaacccgggaggcggagcttgcagtgagccaagatctcaccactgcactccagcctggatgacagagcgagattccgtctcaaaaaaaaaaaaaaaaaaaaaggaaagaatacatatagtttttatatttacccacatatttaccatttctgctgatctttatttttcccctaatctgataccatcttttgacatatatcccctaaagagctccatttatcatttttcatagtgtgggtcaactgaagacaaattctctcagatttttatcttattttttacctttattattgaaatataactttgcagcatgtaaaattctaggttaatcgttgtttttcagcagttcaactgtgtcgttctagtgccttttggcctttattgtttccagtaaaaagctaacattattcatatgttgtttatcacacataatgtctcttttttcttcagctgcttttataattttctcttcatatttggagttcagcaatgttactatatgtacataggtctgattttctatgtattggtcctgcctgtggttcattgggtttcttggatttataaattgtcttttaccaagtatcagaaatttgaagccactatttcttccaaaattttctttttcctcacttcctaagactctgcacttatattagacgagattatattgaccaacaggtctctgaagatctgtatgtttttcttccactgcttttcttccatcttttttcagataggatcatttctattgatctattttgtagttcctcaatttattctgtcttcagtctgctgttaggcacctccagtgaatttttccttcagttatagtaattttcaatttcagtatttccatttatttcttgttatgcttcaatttcttgctgagattctccatttgctcatttattatgtgtatctcttcttttaaatatgtgaacatatttataatagctgctttaaaatccttgtctgctgattgttacggttgagtcatctaggcatcaatttacatcaaattttgtgggtcatattttcctgtttctgtgcatgtctagtgtgctttttgtttgacactggacattatgaatgatatgttgtagagacttggagttctgttttatttctctaatgaatgatttttgttttcttattataaaaagttcacttggcttgactcagactccaaactctgtctcccctaaagtgagaagcacctgaaatctttgttcttttagcttttctagtattttgtcaggccactgaggtctcccccatccattgttgttcagtgatctgccaaagatttgagtagatttgatatacaaatgtgagggggtcacacctctgaagtttctttccttctaggatttcactgctaatggtctggtttttctcccagctccaaattgtattctgtgacatttcaagtcagaaagtacagccagcttcatgggcctgtgacctgcaaattcatacaagggccacacacatggtttaatgttctgctatcactgtcttgaaattattattcaatgaggggccacattttaactgacgtacttaagtataaaaatccactctaggcctggtgtggtggctcacgcctataatcccaacactttgggaggccaaggtgggaggatcccttgagcctaggcgtttcagatcagcctagacaacatagtgaaaactcgtctttactcaaaataaaaattaaaaaaattagccaggcctgatggtgcacacctgtaatcctggctattctggaagctgaggcaggaggattacttgagcccaggagttctatattgcagtgagctatgatcatgccactgcattccagcctgggtgacagagagagatcctgtcttaaaaaaaaaaatccataaaatatttgttttcattttcagctgactttagtatacaaaatattatccttcttgtatgatattgataaagtttagctaataagttataatagaaaagcaattgctgtaagtctcttgggtctcagtttcttcaaaagcctttcctgcctcacacactactcttccccatctcgatttaaacaggaccttcctttatactctgagaatcctgttttttcccttcatggcattagcgtaatttacaattaatatatttacctgtgtttttatgattgagtatatttctacctcattagtctataaattccatgaggacccctgtctttgcctcacccagcaccaacaagaatgcctagggtactgtaggcacttaattaaatggatgaatggataaatggatagatggatgagtgaatgaatagcgaaaatgacagtgatatttagtaactttttctattttcccaagttagattttctatagtcctcctttcttttgctcaaatatctaaaagtatgccataattttagcaaaatttggggaacaatgttaggtcaaaagtagtacatgtatgcacatttgttatcagtaggacccccaaaagaaatgtgaatgccggatctccaacttcttgatttaaaaatgtaatccaggcccggcgcgctggctcacgcctgtaatcccagcactttgggaggcaaggtgggtggatccctcgaggtcaggagttcgagaccagcagcctggccaacatggtgaaaccgtctctactaaaaattcaaaaaaaaaaagaaaaaaagaaaaattagctgggagtggtggtgggtgcctgcagtcccagctactcgggaggctgaggcagtagaaccactggaaccggggaggcggaggttgcagtgagccgtgattgcaccactgcactctagcctgggcaacagagccagactgtttcaaaaagaaaaaatgtaatccaatgtagtatttacatctagtgccaacgggtacagtgcacactgtgctgcatgctgtgtttcattaagcagcctaatctggtgtgttaatgagagatgtatttaactatcagctataatattccatgtcattttccaaggaacacatcttacagcaggtttttcacaagctatattgaaatgttcacctgttgcagaagctctataagatgctatgcattcagcgggaaataaccgaagacatagcacctctggcaggcttgtttctcagcgtcatggagagagcgcacccagtctgaaggcgcatctgctcctctctgccctatattgtggattaagaaaatacagtgtataatctcatattctcatttcagcaaatataaatagtacatggcaattatatgtgctcggttttcatttttaagggtggagattgttgaaaatggtgtcgtggaccagactccagaattggagattttgtagagatcaaaggtatagtactattaaagtagggataaagagtgtgcagacgtgggtgtaagataatgaacagaaaagggagtggcaaggtgcagagatctctgcaagaaatggattggggaaattgaaggctttaaagccacggtctctattcctacacccagctttccgtcctcggttactatcgcccaagatcaaagccaccctggttttctgattgccgcaactgcggctccaggtgctgagtgcacagccactgcggcactgtccgcagctgcgcgccgggctcagacggcattatttacggtacagaatactcgcccgcgcgacggtatttacggtaacggggaccagcctgggcggcagtatttacggtaacgaaagccagctgtatttacggtagcgagggctggaccggcggcggcatttacggtaacgggggccgggctcgcggaggcccgtcggttcggtccgctctgggcgttagcaagtgatctccagccaaggcggccgccaccccttgcacacagcagaaaatgcaaaatgaccctctggggcagtgaggggctgtggccctcggccccggcctgccgcacccccttcccgcagctggcggccggcagcgccgaacagggtccgggtgcagccccctcccgcccctccgctgaggcgccggcctgaactgggcgcgggaaccaggccgccctcggcgcccagcctgccctagtcccgcgcgccgcccccgctgtgccgcgcccacatgggtctgtgctacagtctgcggccgctgcttttcgggggcccaggggacgacccctgcgcggcctcggagccgccggtggaggacgcgcagcccgccccggccccggccctggccccagtccgggcggccgcaagggacacggcccggaccctgctccctcggggcggcgaagggagcccggcatgcgctcggcccaaagcagacaagccgaaggagaagcggcagcgcaccgagcagctgagtgccgaggagcgcgaggcggccaaggagcgcgaggcggtcaaggaggcgaggaaagtgagccggggcatcgaccgcatgctgcgcgaccagaagcgcgacctgcagcagacgcaccggctcctgctgctcggtaggtcccggccgcgaggtcggctgacgccccggggacagcgcgccgggcccgcgggggcggcgggcaccggggagcggtggcgggcaccggggagcggcggcgggaggggctcctgaatcccgggactggacccggacgggcggcgggcgcggacgggctacagagcgtttaaactgtgggtggaatggttcccctgacctagccgggaggacactacgggctgattctgcccctcccagtgccttgagcttactgccgctcgctctctctaattaatgagcctctctgggaagtctccccctcgattgatcaccttccacagggtcgaatccccggggatgtctac

SEQ ID NO: 7674 - DNA, 6000 bp, Homo sapiens
cgacagacagaaggataggctccattttattaggggcttggactctggcttggttgctgccacccaggtgaagcagctgaaagagacgcagtgcaaaatacactccccagacatttgtgactggcatggagggcagccctgatttattggttgctggacgagtggcagatcgtattggaagtgaacatcatgaaaccctcttgaactctgaggaaggcactcaggctctggatgaagtcatattttccttggaaacttaggacattacaacagtttgcacttcagtaggtgagtatttaatttccgagtagatttggaagaacacagatagcatggtgatcttctctggacagagatcagatgaacttatgcagggttatgtatattttcatgaggccgaggagagagaggcctctgaaggagctctatttgtttggtgttctcagcgcagatcgaactgcccacgctgcccacagccttgaactgagagtctggtttctgcatcatcgattttcttcctgttacatgtctctgccaccagaaatgagaactccaaagatgaggtggagaaacagctcctgaaagagacatttgaggactccagtctgagaccctgaagagattctctggggaacaaaagaagccttcagggatggaataagaatgcctggtttaaggtgttacaggaatatgttgaacatcaggttgaagacgcaatgacagcaaatgtgggccagaaatttcccttcaatatcctaaagccaaagaagtctgttcatgcccttgaggcttgaatgccactacccaggcagggtgcagtggctgacccagtaccgcatgcccacatggatcgatgcccgctcactgacccactgcaagtcagctacctaagcctaggtgctctctgagccaaagagcaacagcaaatgttcttgttgtgaaggataggggtactggggatggataggggtactggggatggataggggggcaaggaaaatcacccaggcctactggggtgtgaaaaaaataaaagtcttaaattaaaaaaaaaaaagaaagaaaaagacttctgagacatcctgtatgtcttaaacttcaacaagagtgaggaaacaactgttttacttttgtgcctttcaaattctccacgaggtgaccaggaccttctcttcctggctctggcgcagtcagcctggaccctctgccggtggctcccagggcagccctgggtccccgcaggtgggtgtgttgccggggagcgcaatgctgctgctgcggttgcctagcaacagacgctcacactggcagcgggcgccactctgctcttggtaccctccccaccagccctgctcccactgctccaggtggccagctggtacacctgatgctgatccaatggttctaaacacaaatgagaatcggtttcccagaccaaactagaaaaaggtcaggtgattgggttaaaaatttttttaaggtgtgttgaattcctacctgaaaataggctaagattggctttgcatttttcatgagaaatgtctcgtcactgtgtaaggaaagtgcttttatgttttagagtgttggcaatgtgttgtggcacacaatgcaggtaatagtgcgaatgttgcagccaggctgcaagggtctgtgtcccagatactcttcttactcagcctctcagtctctgtaaaatgatgatgacaatagttcccaccttttagggcaaataccaagtaaattgttccatggaaaggatttaacccagtgccagcaatcactccataactagaagcagttttatagcacacacattatcattatattattaatatattaacttcctgggtatattttggtactttttcatcacatctgtttacctaatccttcttaaatttcaaatatagaatttatctttaacactgattgctaaatctgaacaagtggaaatcttttgctatatttttagggaaactaaatatcagacttccttaaaaatgtgacttctaggttctaacataattctccctttataagttttcaagggatttattttgtcccctgctgtccaacattttatagaaatcttgacattaaaaaaaagttggcaaatccttataaaaatcccactactctatgcttttttcaaaaaaaagcacagacacatacattttctggccaggcgcagtagctcaggtctataatcccagctctttgggaggccgaggcggttggatcacttgaggtcaggagtttgagaccagtctggccaacatggtgaaaccccgtctctactaaaaatacaaaaaattagctgggtgtgatggcgggtgcctataatcccagctactcgggaggctgaggcatgagaagcccctgaagctgggaggcagaggttgcagtgagctgagatcatgccatggcactccagcctgggcaacagagccagactccatctcaaaaaaaaaaaaaaaaaaaaaaaaaacctcaccttctgactgccccactagtcatagcgcatgctgggttgatattgccacgtgtgaatatatgtctttacacactcataagatgtgagctgtggaaactgtgctaaacagtctccttccacagaacttcaacttttagcctagctcagaatggagtctgacagtgtatgtttgcttctgcctgtctagaaaagtaattcattgcattttttaaatgtatttttattttcagtaagaatatttattgaaaagtactatattgaacaaatattttttacgtgtggtcatgaaattcctttgatgagaattcacactttgagctggagttatctttcgctttcatgacgtcattcattcccttgacaaatattcccagcgcatctcctctgggtcaggcactgaaccaggtaccggtgccgcaggtacaaggataggctcagcctccgccctcaaggagtccacagtctagtggagttttgaggacacagttaaaccataacaatgcaaggtgatgggtgagaccagcggagaatctggtgctcccttagggcttgagaaggtgtggcctaacccccaatgtgagggaggcagtgaggcccagcttgaggctggaaggataactaggggggttgacccagaaaagagagtccccaggtattcccaagacacaagcagcacatgcacccgaccagcctgttcaggaactgagagtgttaggagggatggggtaagccctaagaaggggagagtttatactaaccccaccagaaggaccaggcccaggtccttagatgatggggacagtgatgtggctggatttgtattatcgcagtgggagcattgtgcaaggtgcactgaaatgagacagcaggcagtggaaaccgtccggaggcctctgaaatccagctctctgttagtaatctaagaccacagcagtggcagacgccacggaaagaacaggacagatactcaggaaacggacccaacgggatgcggtaactgttggggtttgtaagaaaatggaatctggcataactcccaccgttctggtttggaaaattaggggcccttattccagagaaagaactgagaaaggagcaggtagaaggcgtgagggtggcacggggcatgagctcaatccttggcaaggtgaattccagacacctgcggcaccgtgggggcggtgtgtctggggacggtggtggtcagcaggatgggctgggctagggatccgcggtgggcacggtgagagctgagtgggcagagtatggaggatgcagtcagcccgtcaggaacgtgtgtgggttgagaggctgtgctgtggggacggctcctcggacccctgggtggaggagcccggatgcaccggccagagggacagcctgaaacccaatgcagtctctaggagggatcaaagcaggagccacagagacggaaagaaaataaagaccaaaattcatggatgagacttggcccctggggggccctagatgaccttgatgagagtattttccctatggggtgaatgtggaagccaggctgccaggtactgaggtgggagcagcaggaggggaatacaggcggagtcagacgacctttctaactcttggctgcggtgggcaggaggaaaactggtggaactaacaaggggcgtgagatgaaaggtgttgtgtggttcaggtgggacagagttgaatgtgttcgcttgcttgagggaaaccagccggtagcaggagaggttgaagcaagagtggagaggggaaggtgcgctgggtgaggggcgaaggtccacagggcagcggcgggcctgagggtaggggaagcgccgcctggggagccggggcgggctggggtctgttctcctgaagaaggccagctccgcagtgaagaagaccgtgtaggtttcttggaaggtggaggcactcgacgacagagctgagcaaaggcaagttagacagcgcagcgccaagcccgagacggtcaactgggagccgccacacacaaggaacagtgatttctccacgcccacggctggtgtccacgacttcggcccggccccctcttctgacctccttcccccaagtacaacactgcaaacgccaagctgccggctctggccctattggaggggtctcagtaacggagggcaggtgccagtctcgcgccctagttcgttcctctgctacaacgccaagttcgaggccacagtgccttctggaagagttgttgtgctgcttgggagcactgcacaggagaaacgggggctggaggtaaagacaggaggctcgggaggcggcgacgtgggcgagctggaatagtctagaagctgagcagaacaaaggcggtgtgactggtgagcctcggagggatcctcctccctgctagaatatgcatgatcctccgcgagtcttcgcccgccaggagcagggacgcgtccgagccaacacggggcgcgcgcccagacgcactttcccggctcggggtgcaagagagccaggcggccgcggcgcagcggaggggctgcgggcccggaacccaggccggtcagcgtgtaagcgccccagccggccgggctccgtggggggtcagctccctgacccctacagcgcggtagcgcctctccgagagctccgggaccagcggcccggccgcccccaaagccagcctccctctcccttccccgcaccgggatcccagaccagggagggggcgcacgtccgacggctgaggaatagcagggcgcgagccggcccggcaggtgcccatcgtcgccctctgggaccccggtggcgcgctctgtcctccgcgccacgctcagccaccaccccggctgtttgggacccggcacccagccgagcgcgccgccccctcggggacccgctgggcggggctgagcgaggcttggagtgcgggcgaagggacgtggggcgaacccggggcgctgcgccacctcggctgtctccagcggagaccggcgccctcgccccccgtctccgttcattgtgctgtattcatccagcagattttgaaacaattctcgtgtaaaaaggcattttactccgcgcgtcttccttacagccatttagttgggagtttgcggtgggcagggggagggagaagaaacgcctgctctgaatcggaaaacaccgaagagaccagaccatctctttcagcagcaggaaagagaggagccgtcgcaggagccgcacacgtctccaactctctattgctttttgcgcacattcctaacttcctgacgtccatcccagcgggcaggcatggggtgtttgggcggcaacagcaagacgacggaagaccagggcgtcgatgaaaaagaacgacgcgaggccaacaaaaagatcgagaagcagttgcagaaagagcgcctggcttacaaggctacccaccgcctgctgctcctgggtaaggccgaggggcgcgcggcggctcccggccccagcggagcgcacagccaggagcggcgagcgccaggctgggcgggcagggc

SEQ ID NO: 7675 - DNA, 6000 bp, Homo sapiens
ctcctcctttctttgggtgtaattgaagctttttggtatttcagttttatttccccattggcttttaagacacactactttgcattattttttagtggttgctgtaaggctgcattttaccaaatgatagctactaactaatgtggctatttaaatttaaaatttaagctaattaaaattatacaaaattaaaatttagttccttagtcacaaaacccacattgcaagtgttcaatgaatatgtgtgactagcggctatcttatatatgacaaagcagttatagactatttctaacactgcaaaaagttgtattggtgatttatcacaatctacttacagttaatatactatttaacacaaaatattgggattttgtgagcatataattcctttacccccatcttttgcaatgctttcatatatttcgcatatatttcatctatatacatcataagcccacaatactaatattttttcttgaagagaaatatgattttttaagtttaaaaggaaagaatatggctaggtgcggtggctcaggcctgtaatcccagcactttgggaggccgaggcgggtggatcacaagctcaggagatcgagaccatcctggctaacatggtgaaacccgtctctactaaaaaatacaaaaaattagccgggcgtggtggcgggcgcctgtagtcccagctactcggtaggctgaggcaggagaatggcgtgaacccgggaggcggagcttgcagtgagccaagatctcaccactgcactccagcctggatgacagagcgagattccgtctcaaaaaaaaaaaaaaaaaaaaaggaaagaatacatatagtttttatatttacccacatatttaccatttctgctgatctttatttttcccctaatctgataccatcttttgacatatatcccctaaagagctccatttatcatttttcatagtgtgggtcaactgaagacaaattctctcagatttttatcttattttttacctttattattgaaatataactttgcagcatgtaaaattctaggttaatcgttgtttttcagcagttcaactgtgtcgttctagtgccttttggcctttattgtttccagtaaaaagctaacattattcatatgttgtttatcacacataatgtctcttttttcttcagctgcttttataattttctcttcatatttggagttcagcaatgttactatatgtacataggtctgattttctatgtattggtcctgcctgtggttcattgggtttcttggatttataaattgtcttttaccaagtatcagaaatttgaagccactatttcttccaaaattttctttttcctcacttcctaagactctgcacttatattagacgagattatattgaccaacaggtctctgaagatctgtatgtttttcttccactgcttttcttccatcttttttcagataggatcatttctattgatctattttgtagttcctcaatttattctgtcttcagtctgctgttaggcacctccagtgaatttttccttcagttatagtaattttcaatttcagtatttccatttatttcttgttatgcttcaatttcttgctgagattctccatttgctcatttattatgtgtatctcttcttttaaatatgtgaacatatttataatagctgctttaaaatccttgtctgctgattgttacggttgagtcatctaggcatcaatttacatcaaattttgtgggtcatattttcctgtttctgtgcatgtctagtgtgctttttgtttgacactggacattatgaatgatatgttgtagagacttggagttctgttttatttctctaatgaatgatttttgttttcttattataaaaagttcacttggcttgactcagactccaaactctgtctcccctaaagtgagaagcacctgaaatctttgttcttttagcttttctagtattttgtcaggccactgaggtctcccccatccattgttgttcagtgatctgccaaagatttgagtagatttgatatacaaatgtgagggggtcacacctctgaagtttctttccttctaggatttcactgctaatggtctggtttttctcccagctccaaattgtattctgtgacatttcaagtcagaaagtacagccagcttcatgggcctgtgacctgcaaattcatacaagggccacacacatggtttaatgttctgctatcactgtcttgaaattattattcaatgaggggccacattttaactgacgtacttaagtataaaaatccactctaggcctggtgtggtggctcacgcctataatcccaacactttgggaggccaaggtgggaggatcccttgagcctaggcgtttcagatcagcctagacaacatagtgaaaactcgtctttactcaaaataaaaattaaaaaaattagccaggcctgatggtgcacacctgtaatcctggctattctggaagctgaggcaggaggattacttgagcccaggagttctatattgcagtgagctatgatcatgccactgcattccagcctgggtgacagagagagatcctgtcttaaaaaaaaaaatccataaaatatttgttttcattttcagctgactttagtatacaaaatattatccttcttgtatgatattgataaagtttagctaataagttataatagaaaagcaattgctgtaagtctcttgggtctcagtttcttcaaaagcctttcctgcctcacacactactcttccccatctcgatttaaacaggaccttcctttatactctgagaatcctgttttttcccttcatggcattagcgtaatttacaattaatatatttacctgtgtttttatgattgagtatatttctacctcattagtctataaattccatgaggacccctgtctttgcctcacccagcaccaacaagaatgcctagggtactgtaggcacttaattaaatggatgaatggataaatggatagatggatgagtgaatgaatagcgaaaatgacagtgatatttagtaactttttctattttcccaagttagattttctatagtcctcctttcttttgctcaaatatctaaaagtatgccataattttagcaaaatttggggaacaatgttaggtcaaaagtagtacatgtatgcacatttgttatcagtaggacccccaaaagaaatgtgaatgccggatctccaacttcttgatttaaaaatgtaatccaggcccggcgcgctggctcacgcctgtaatcccagcactttgggaggcaaggtgggtggatccctcgaggtcaggagttcgagaccagcagcctggccaacatggtgaaaccgtctctactaaaaattcaaaaaaaaaaagaaaaaaagaaaaattagctgggagtggtggtgggtgcctgcagtcccagctactcgggaggctgaggcagtagaaccactggaaccggggaggcggaggttgcagtgagccgtgattgcaccactgcactctagcctgggcaacagagccagactgtttcaaaaagaaaaaatgtaatccaatgtagtatttacatctagtgccaacgggtacagtgcacactgtgctgcatgctgtgtttcattaagcagcctaatctggtgtgttaatgagagatgtatttaactatcagctataatattccatgtcattttccaaggaacacatcttacagcaggtttttcacaagctatattgaaatgttcacctgttgcagaagctctataagatgctatgcattcagcgggaaataaccgaagacatagcacctctggcaggcttgtttctcagcgtcatggagagagcgcacccagtctgaaggcgcatctgctcctctctgccctatattgtggattaagaaaatacagtgtataatctcatattctcatttcagcaaatataaatagtacatggcaattatatgtgctcggttttcatttttaagggtggagattgttgaaaatggtgtcgtggaccagactccagaattggagattttgtagagatcaaaggtatagtactattaaagtagggataaagagtgtgcagacgtgggtgtaagataatgaacagaaaagggagtggcaaggtgcagagatctctgcaagaaatggattggggaaattgaaggctttaaagccacggtctctattcctacacccagctttccgtcctcggttactatcgcccaagatcaaagccaccctggttttctgattgccgcaactgcggctccaggtgctgagtgcacagccactgcggcactgtccgcagctgcgcgccgggctcagacggcattatttacggtacagaatactcgcccgcgcgacggtatttacggtaacggggaccagcctgggcggcagtatttacggtaacgaaagccagctgtatttacggtagcgagggctggaccggcggcggcatttacggtaacgggggccgggctcgcggaggcccgtcggttcggtccgctctgggcgttagcaagtgatctccagccaaggcggccgccaccccttgcacacagcagaaaatgcaaaatgaccctctggggcagtgaggggctgtggccctcggccccggcctgccgcacccccttcccgcagctggcggccggcagcgccgaacagggtccgggtgcagccccctcccgcccctccgctgaggcgccggcctgaactgggcgcgggaaccaggccgccctcggcgcccagcctgccctagtcccgcgcgccgcccccgctgtgccgcgcccacatgggtctgtgctacagtctgcggccgctgcttttcgggggcccaggggacgacccctgcgcggcctcggagccgccggtggaggacgcgcagcccgccccggccccggccctggccccagtccgggcggccgcaagggacacggcccggaccctgctccctcggggcggcgaagggagcccggcatgcgctcggcccaaagcagacaagccgaaggagaagcggcagcgcaccgagcagctgagtgccgaggagcgcgaggcggccaaggagcgcgaggcggtcaaggaggcgaggaaagtgagccggggcatcgaccgcatgctgcgcgaccagaagcgcgacctgcagcagacgcaccggctcctgctgctcggtaggtcccggccgcgaggtcggctgacgccccggggacagcgcgccgggcccgcgggggcggcgggcaccggggagcggtggcgggcaccggggagcggcggcgggaggggctcctgaatcccgggactggacccggacgggcggcgggcgcggacgggctacagagcgtttaaactgtgggtggaatggttcccctgacctagccgggaggacactacgggctgattctgcccctcccagtgccttgagcttactgccgctcgctctctctaattaatgagcctctctgggaagtctccccctcgattgatcaccttccacagggtcgaatccccggggatgtctaccctagcctctcacttcctgctacacgaggaggctggcagtttgttttaagaacacagatgaaaggagatttataaggccttttagcttgaccgcaaagcttttattccaatcacagtgttgtgggtgggtgtggcctgctgccttttgagaaagaacttgagctgcacttgcattttttttttattatactttaagttttagggtacatgtgcacaatgtgcaggttagttacatatgtatacatgtgccatgctggtgtgctgcacccattaactcgtcatttagcattaggtatatctcctaaagctatccctcccccctccccccaccccacaacagtccccagagtgtgatgttccccttcctgtgtccatgtgttctcattgttcaattcccacctatgagtgagaatatgcggtgtttggttttttgttcttccgatagtttac

SEQ ID NO: 7676 - DNA, 6000 bp, Homo sapiens
actggcaggcccgcaggcagagtgaggacaaaccacactcacggggacacctggagcccttgaggacagggcagcctgggccgtctcacactccttcaacctcagggatactggtgacctgaggacgaggagggtgcccttctccacaggtgcccttctcacattcctcacccgggactggggatgcttcggggggaggcccagtggggacaaggggacctcaggtaaaggaggtgtgagggcttcacagcacctggaaccccacaagacgctgcaaacggcgacttgccttcctccttccaaatctcacacaactttctctgcggccaactggacctggaaccttgcagggaaggaattctgggaagcatgggacccgcacggctcagctgacacagtataaactcaccagagcttgtccttgcttgtaaggcagtgaaaaggactgaaggaagctaatatttattgaaaagtaaataaacatttatttatttaccttttgggccgggtaccttgctcaacacttaacttgctggcaatttataccccagtagacagctgactgaaccatgtgtcagagagaaatggagaattcagaagggaggcctcagaggccacctcaaaccagcagccatcactgcagcctcagagacccagagctcagggaagactcagctaccctgggatgctctgtggggtgcaggggacttgggggccaccttggcaacaggacagatagagctgtggctgtacagactgagatgcgggaggtgtgcgcagggctggggaaactttaggtactgtaatatttgtaagagatctgacagtacatgtatcacagctcaggaaacgcttcatcatttttcagcgatgtaatgtgtagataccacacacaaatatgtctggatggattgtctttgaggtcacacatttctttctttcttgctgtgttttccctttgtcttcactccctggcccctaaggagagagcaggtgctgtggcttttgcccaaggagagagctctgcagccaggctgagagcagaagttgcctgcagaacacttctctttccatcctgtgtgattttcaacctgatcccaaaggaagtgaatgaggttggtgggtcctggagcagcggggtccacaggatcccagggaggggatgggtatgcagatggggacttggccagtgtcacagaagaccccatgaagtagtaactattacttccagtgtacagatagacgctgaggtgtggcgatgctgcgtgttggggcgaaacgcgcaggagaagtcgtccaggctcagggacagagcccttgctccggggctgctcatcgtagattctggtcctgagaatctagagcggggctcccacttctccaggaccagaattacccacatgaagcttctctttctcatttccttctatttctcatttaaattaaagagtacaaggcataggatgaatcatattggataaatttcatttaaatgttatgcatgagatccaagaaacaaaattgtgttctcaaattcacattcaacttgaggtcacttggccctcaaattccctttttctcaacattcgttcatgtttcccttttctatttatgtctccttagatgactgactagcaaacttctatggactaagtatggccagggtataattgacatgagacaggctgcaaggattgacagtgaaaaataatctttttcacctctcactctttgaaaccaatttcagttgatttccacccaattttagtaatatttatctcaatattgtttactcatctatcccaatactaaggtaccattcattccaaaaaaccctttgagccccttgtgtcaggcactattctgtgtactggggtccaagttctccaccaacggagcaaaacaaagtctccgctctgctgcgcttcagtctgggcccttggaatgagcgaatggtcaggatgaagccgatgtagaatcatgttgcattttacagagagcaaacttacatctaagtacctcgaactcttagcattgctatagggagagtgtgtgtgtctggaagggtgtgggagggaatagctgaagtggaaaacaaatacagggaggactgagtaggaaacacagggacaggccgggcacggtggctcacgcctgtaatcccagcactttgggaggccaaggcgggcggatcacgaggtcaggagatcgagaccatcctggctgacacggtgaaaccccgtctctattaaaaatacaaaaaattagttgggcgtggtggcgggcacctgtagtcccagctactcgggaggctgaggcaggagaatggcatgaacctgggaggcggggtttgcagtgagccgagatcacgccattgcactccagcttgggcgacagagcgagactccgcctcaaaaaacaaaacaaaacaaaacaaaaaaaagaaaacacagggacaggttcctcccatattttctagagatagaaatacagagccgcagcagtttctagttataaataagataagaaagggcaacacgagattgagattcatcacaaatggtagaaattgagattatgattttaaaattcagccctcaatttaaggcggttaagttagacacagagaaattatgtgcaagtgaaatagaaggcattgctttgtggttttggaaaaacttttcttcttcattgtccatggggcgtttagatggaaaaagtcatttctttttctacctaaagagggcaagagcacagtttctccaaccccaaagcatgtgagttttgcatttgtggacattaaatataaactaagtatatgcttgtcagattaggataacctgtgtgaagcacttatcagcttattgctcatttaaaaaagtttacccaggcagccaggttcaaagttcccctgctacaagcttctcagttagaccaggacctgggcattcccagctggagcgggctcattgccgggcacagggcagatgctggctggtttgcgggctgagctgaagaactgtcagcgctgctgtaggtaggtggcagtatggcatgctggttcagctcccagctttctatgcagctagttagggatgtaaaaccatctctttgtggtctgaggacaaattactaaatccttctagcctcaacttcgtcatgtgtaaaatggagaagtaatagctcccagttattgtgaggactcaatcagacaatccatgtaaagcgcttagcacagaagcgctccatgaatggtagttattattacatcacatatgagcactgatcaaaggctagcggcaattaccaccatagctgagagctgagggcttaagggaaactgaattcagccaacatttcactaactaaaaagtcactgacaaattagacaaaacgtaggtttcaaaagattcatttctctgacattacggaaatatgaactggacaactttttggggggtgtgtggggacagttgaaaatgttcactcctttaatcagctgcatctatcttaaacccagcctgaaacccctgcttagtgtagtattttgatatgtctgcaggggggttaattttggcagaggcgaactaattttggtgactgcaataaaattgggttaaaatgctcatatgctctggcagtaaccaatcccccatcaaacatggtaggggtggctggaggcaatgcgtgtacttctgaacaaagtctgcactcaggtggaggtcaagtccgaaatggtcttcacaggaggtgtaggtccttcaaggagaaagggtcacagcgcgaagaatccatctgaccttctaggcaggagccatttcctttaaagagggcaggatactaagggggcgaccaggtggggtccgggggcgcctcaagctcctcaaggctcgccgagcactgctccgtcctactaagtgtcctgccgcccgactgcacgtctctaggcggctgcccgaggtcccgcggcccgtggtgcacacgcagcccgcgaggtactctgtgctggaacgcgcccccagcctcccgaaaccgcccccggcctgcgggcagcgagccggctcctccgggcgcccctgcagcgtactctgcgctcggcttggagttccccgtgcggccggcggtgggcgcgcgccacgcgggcccgagccctgggcgggagtgcggccccgggtcccgcggcctcggcgcccgcgcgcctcccccactgcccacccccggcctccgggcccgccccccgcaggggtcggcgcagcctgtgagccggggacccctgagcccccgccacggcggccccggtacccgcggcctggccgcgcgccgggtccccaccgcggagtgggaaggaggaggagagactggaggagttggagacagacacagccgcggcgcgcagtcacggctggagacagacggcggcgacggcggcgggaggcgggacactcccccctccggcgactggaggcgggacacctccccggcggccgcagcgccgcgtcccctctctccccgcgctgaggctgcggaccgggcccggcgggattagcaggcgagtgcgttggccctgcccgctccgcgcgccgccgcggccggccggggatcccctgcaagccactgagccgctgccgccgctgcagccagacaggctgcgggtgcctgggaaagtggaagcagggcggggagcgcgggggaggcccgggggtgaggtcctcagctcttaaagaaccccggcgcgccgcgctccccgccggcccgccgcgcgccccctgccgcgccccgcacagcgcccctccccctggccagcagggccggtggccgcggagccgcactgcgggcagtccccgcctccgctccgggggggcggcccaggtgagtgcggacccgaggtggccgcagtggtcggggcttctggcccaagttcaccgctgcgctccggagggaggggtggcgggggactcgggaaccggacgctttgggaactggacgtccgcgagcctgcgccgtcggctggggccggagggagaagctgggcgccgagcgcgcgaggtctgtgaggcttggtccgggtgggcttgccggtgggcacggcggggatccggggctggcccgcgggcggggttacgccggtggagggacttcgccgacccccaccccgttttctgtttcctggtgccctggggcgcagggtgtcccgcggttgcaagactgaattctgcaccgcccggaggccaggatgggcgcgcggatggcagccccaactgtctccgcgcccctaggcctcggcgagccgtggcgggcagggactggaggtcagcgggaagcgggaagatcctgcaggacctgaccggggagtttgcgggaaggagggggcgggccaagccccgcagcccctcagtcccgcatcctgcaccgcgcgctccccggccccggcccctcgggcccgcttcacccggcgtccccccgggtccccccgcgcgcgttgacgtcggtcgcgggaccgcccggagctcccggcattggctgggaagtcgattgtctggggctgctgctgttgcacttaggctgggtctccgagccccggaggaagcaggcgtgtgttgaatttctctctgcccctcaccttggaataaacaggaagcgacaagcacccagcccggcccggcacttgcctttgtgaaggggtctgccctgcacagcctttaggaagcttcctcgggaccccttcccggtgcgccgccccgggtgggcctgggggcgcgccctgtgagtacaccggtggaagacagtgggttcggtttaggttaaatcgctatcgtggcggagagggcatttgcttgtttaaacttttttttttttttttttaattggaaaaggagaaggtttcccgatgaggcagaggttttcaggacgacagggacgcatggtgggtgggcggcactgggggaaggcgcatccgagagtacagcgttcttgggtcacctacctggagggacacctcgt

SEQ ID NO: 7677 - DNA, 6000 bp, Homo sapiens
tgctgggattacaggcgtcagctgacgcaccggaaatgagctatgattttaagaaacatttgaagtgacaaacttgggaggaaattatcctctttagggtctaatatgtaaaatgccaatgttgcacgtgtatgtgtgtgtgtgtacatgtctgtgtatgtgtgtgtgtctctgtgattgtgagtttgagggtcttatctaggcaaatgtggctactaagtcttttacttgactaactttcagaatcagctgatcaatcacaaatgatctgttgggaacctctgagcaaaatatttgctattaattatacatacttaacatttactaaaactctcaagctaactgcatttaattttagagaaacaaatgtagctaaattcctaccaatgaattgaataatggttgagtgtgtgtctctgtggcccaccccaacgtggagccggctggggacatggccacaccatgccctgaccattttcagcttagaatgcagttcactcacagagtattcacaggttcacaaaacacagtgccagaggccctccaagcatccagaatgttgacctagcagaaaaatgagactttgcataaaacaagaacatagacggtccctgctggagagggacaggcagcgttggaggacacagatgagggtagtaaggaaagcaaggaatcaacattttgcagtgcatactcaagaagccagatcttcaggaagccagacacggagccgagggagattgggaaacgtataagcttacacaaagcatgagggcactaagacaaggaaggggccacttccaaggtagagtttcgtggagccgaggtgccttgggcacacagaagcatgggggaacttaggtgggaccacagaagtgaccccgaagtcccagaaaccttacaacccctccctgagatgtctccacagaagcaggactccaaggaactcagtttgaaatcctctctgaaagttccttctggctgtctgcacaccggtgaaaatttaaatattactctctaactgttcgatatagttcttaagtatcttaaaaggaacaacatctaaatgaatgaatagtatggccctttctatctctcatgcctttccataaaatataaaaacctaggcttgattgactcacctggttgtctgcctaatggctatcaaaacacaagccagatgataaaaaccaaatactgtttagactttgcatcttggaggcagtaaaataaaaatattttgtgtgctcacagattttaaacttattttcatagccttcgtagtattacttccatacgtaatcgttatcaccatggtaaacaactcctacatttggcgtctcccttaatcctccagtggctgtctgaggaaggtcacggcacgtttcccatgtcacagatgctgagtgtgaggcactggagagtggagtcacttgctccagggctgcagctggaaggggctggagttgaacactgaggtcctctgaccctgctgcctgggaccatcttgctgccccatcccactccttgggtcacagtcttatttctcaagttcaaaagtgtttcctgagttcagaaatctttaacctagacaagcaaacattgtttacaacaaatctcttgttgagctgacttccgcccaaaatcatgagagctttaagataagaagaggccatttccaagatagtttgttatggggcctgaggtgtttggggcacacagaaggatggggaaacagatggaaacacagcagtgacactgaagtcccagagacccaacagccctccctgagacgtctccacatgaccaggactcaaaggaacccagtttgaaatgcccccgcttagattctctctgacagttgtttctggctgttactgtattttataagtagtattatctgattattaaatatagttcttaaatacgttaaaatgtaaaaagaaacagcatctaagtgaatgacatggccctttccacctctcatgttttcctgtaaagcgtgtagattaagcttgactgactcacttggttatttgcctaatggtgatcaaaattcaagccagaagattaaaaaccaactattcattagtgttttgcatcttggaagcagtaaaaccaaaagattctatggagtcacggatttctcctagagtcgtatttttcaacaaatgagaaccataaccttccgatgtttggggcccactggataaataaatgatggatcttcaagaacatttacacgatgcctaccacgtaccacatgctgttttagagtctgggtctacaaggatgatttacttccgcccttgaagaatttagctgaggagaccgtggctgaacaggccaggtgatgtcagcacgacatagcaggtgctatggtaaggtgctctgggctcataaaaggaaatgccaagcccacatgatgagaggacgagagggggaaactagtggaaggttttctgaggaggtgacacttgtctggagtataggcaggaataggtcagatacagaaggaaacactagaatgcggcagtgtgggtgagtcgaggaggttctagaccaagggaacgcagtgaacaaaaggacccaggcaggaaacaccgtgcccttttccaggaattatgaatacatggatgttgctggaggttaaaggtttttcaaatgtcatctcaaatgttactttttcagaggagactttccagaccaccaggcaggctaaattaagttctcctcctatttgatctcagcactctggtgcttggcttcatagcagttaccactgttgatgatgatgtgcatattgctgtgtgctgtgtgttggtgtagctccctcccactggactgaaaaacctctgatggcagagacaaggtcctttttgtgtgccactggaggcccgtgcctgcctgccctgacacctgcaaacagcaggcatttgctaaggactgagcagtaccatggctggaaatgcatttgaagaggttggcaggcagaaaatgctttcaggctgtggggttagcatgaacaaaggcacagagactgatgcaatgggagtttgagggagaaaagcaacctaatcagggtgacttgaatgtggggtatgacccagtggggatagactggcagctctattgctgtctgattatagagtcctcaaacactgagctggggaggttggtcttccctgagatgatggaacgtctttgtctgctcagccatttttaaagtagcactaggtgaggtcaaagtaaggtgcagtcttgagtttggcagagtgcccctgcaaccactgcccttgaagagcttatgacccccaagaacaaatcaaaataatgtgccaacatagcaccaacgcattgaatgtcaaagtcccaaactcaagaatctctccatcttgagctgaatgttagcaaaatgagtatctttgtggaaagcaaatctggaacacatgtaactgttcaaaaatgaattcaaacatttaatttgggccaggcatggtggcttacacctgtaatcccagcactttgggagttccaggtgagaggatcatgtgagcccaagagttcaagaccagcctgggcaacgtagtgagaccttgtctctacaaaaaataattagtcagacataggggtgcacgcctgtagtcccagccactcgggatgctgaggtgggaggatggctggagcacagaggttcaaggctgcagtgagctatgattgcaccactgcattacagcctgggcaacaaagtgagactgtgtctcaaaaaaacttaatttgaaggaagaacttataaaatctgccaagtgagtggtggagcacgtagaggaatcctcttatctggagtgagaaactctgaagtcctggttcctcataccctctgtgtgacactgggcaaattctgtcacctgctagcctcattttctcatctgtgaatcaagaaataggttcacctgaactttcaggcccttcctaggtgtaataaagaccgtgcactgacgccagattttctagcattgtgcttttgagcttacagtcttttcattaaacatcataatctgagatcacatcatttggtaatattatgtgaaatttatggttgcaattctgctgaaatacagcatgtgcacagaagcaacactcttgtgttagagctagtttgccttttattaaacactaaattctacatctttacactcttagccatctcatagaatcattggtaaaatgcagttaaaactcagaaatacaagtctgagcttataaaataacccataaaatatggtcctgaaataattccaaaaggaaatacaaaattgcctcctaatgactcagaaaagtaaggcccccaaccctaacctattgaaatatctcatttttcaattacatatttctctccatccacatctgtaaggcctaccatacacgacaggaagatggaaactttcctctatgaccttgaaccggttccttcctgattctgttggaagcatcccaccctctctccctgatgtatcttcttctctgtctgcctaaccatttctttaactcaatctgtaagcatctccaacactcattttctgaatgtgctgtatttcatcaattctaagacatatatttttcatatttagcatctctgagacgagcatgttttttttttacagcgaaggccccttaccattctattgcaagggttttttctctaggtacataacagtagtgtgccttacagctcatggaatattagttttggcacaatgcaatgcaaagtcctctttgtcccctcataccatctgccttgagttaagctctttgagagggttggaaaaggaggataccttttatatatttagttaataatctaatacataatatgagacttcacagacagacaggaaatgctctcagcagctctcaggcaggccaaggagaactggaaggtggcagctccttggtgactagctggagctctgatgatccaacccagctctgatgacccgagagcaagtctggtgccagctcaggctcagctgcccatctctccttctgcaaagtcagcctcacactcaagatcccccaaaggaaagatcaagtttgtttggctggtcacccccgtgccatcagcaagaccctcctgccaggcttagggctctgtagactagactccagcccattcaagatcaaattagctgtggccagagctgggataaacatggccacgtgctggtaaaggcccactaggaagaggctgtggtgtagcaggtcttcataacagaatagatttttctttacatgtccctctagcagacaccttatttttttagcttcccctttccatccaagtttgctggaagagtggtctaaacttgctgtctgcacctgtattattcaacctaactccatgagccttccatccttccaccttggcagacacttctctgacggtactcgcctcggcatgactgcagatgtgatggctccattgaccactttccagtccctatcttagcagtcttagcagcaaatgtcattatcacactgtgatgccacaggaaaccccttcatcagttggtactccatcctccaggtgtttcccgaatgggctgccgaggacccttctccagagaattgcctcagctgatgggaactctctcagtggagcactggagggtggatctgctcaccctggagccgctgcaggcaacgcttagatggtgagggtgccatcagacctgacaccccttcttgtgtgtgtggagactcaataaatgttcactgcatgtgtttattattagtctctcagaaccacttgtatttcttttataactttaattttgaatcattttagatttgaagaaaaattgcaaaaacagtacaaagaattcccttatattcttcataccatttttcctaatgttagcatatttcataatctcagtataattatcaaggttagcaaatttatagtggtacaatattattaactcaactatagacttt

SEQ ID NO: 7678 - DNA, 6000 bp, Homo sapiens
tagtgggtacttagcacatagtgggtagagaatgaatgagtgggaaataaccctacccgacaggaattcaactaaggatgaattcaacccaaaatttgaagtcagtttgacatttccttaaataccagctacctttcctccagttctctttgtatatgaagaccagtacatctgattcatcccaaacactttacatttgtaaaataaatgattcttttttttttttttttttttttttttttttttttttttttgagacggagtctcgctctgtcgcccaggctggagtgcagtggcacgatctcggctcactgcaagctccacctcctgggttcatgccattctcctgcctcagcctcccaagtagctgggactacaggcgcccgccaccatgcccagctaattttttttttattttattttttagtagagacggggtttcaccttgttagccaggatgatcttgatctcctgaccttgtgacccacctgcctcagactcccaaagtgctgggattacaggcgtaagccaccgcacccaaccaaataaatgatttatttaaaaaaatttagtgacaaagaatacacctgtttgtaggaaaaagcatttgctctataatttcaaaaataatccataatgttttcccctctctttatttgccacaaaaaccattttattgactatatatttaaaagagtagattttttggaggggagatacatagctcaaagaatgaattattcattcattcattatacaattgtatgaagcaataacttcctctagttcaacacaagtaatcattggactaaatatttaataacctaggagactgttttgttggtgctttttcttacctataggttgaagctttgcaaatattatacttgattactcagcatcgaggctgagggatgatttgacacacccagccactcccaggaacaaatgaaaggagctttgttctagcatgtgcctctcgctttctctctctctctctctctctgtctcgctctcgctctcactcaatctctctcttttcctaagagaagtttcagccacaaattctcagcattctccccggattcctacaaatcatcaagtgatttttttcttcactaataaaggtgattcccactaattcacatgatgcctctcccatacaatagtggaatcatattagctgtccacgtttccagccattcacagttgactataaaggatcctaactagtcactgtggactattatgtcttttcacttgtggagaaactgagtcagggaagataaagtgactgctttaaagtttctgactgagatggaaaaaaaactattttaaaagccccagatttataattctttttcctaactactctattttgaggatttatttcatactttttgtcttttcaacttctggtgtttgtctagaagaaattttatattaaatgataaactgtactatattacagaaaacaggctgtgtgaaattttctaagaagcaaacttaagagaaaaaaaaaaagaccacagtgaaaaaaaatagagttaaacaggaccccagagttaaaccaaaaccagatagtagaagtggcacaatttgcctctaaaatgcttcgttaaccaggcgcggtggctcacacctgtaattctaacactttggaaggccaacacaggaggatcacttgtgttcagagtctgagaccagcctgggcaacacagcaacacacagtctctattaaaaatatatatgaataaataaaatgcttaatactatgcgtaaaggcatatctgagcaaaaaattgagtgacaaatcccttaggccactgcactccaacgtaggtgacaagagcgaaattccgtctcaaaaaaaaattattttatatattttcttcaagtcctctaaatatctaatttgctaatacaaaattaagcaacccttaagtgctttataacaagaagcagaagctcctaatttctactggcttattgcaacctctgccttccgggttcaagggattctcctgcctcagtctcccaagtagctgggactacaggcatgtgccaccatgcccagctaatttttgtatttttagtagagacggggttttgccatgttagccaggctggtctcaaactcctgacctcaggtgatccgcccggctggggctcccaaagtgctgggattgcaggtgtgagccatcgcgcctggcctaaacaattttaataatagttatttctggctggcaaaattaaagattatttttccatatccttggcatatcttgcaaattttcaacaatcaccatatatcatttcttatgattaaaaagttgcatttcttaagcagtggaaattccagagcatctttgtgaggcataagacctctcagctgcacaacagaagctgacgtcgtcctgagatgagcacgtcatcttggcacaccacccctaccgccacccacaccccaggtgagccgggttgaggagagcccaagcccggggctctggggtgctcaggagcacctccgagagtgtcagcccccgcaggggagagctgctcaaatgggaacacgcctgacttctttctccctcctcctcccttctcctcctctgtaccatcagccagtgtgctgactcagttgcaggccatgatctctgccttgataggtgatgcaactgaaatgtgccaaggagaagcgcagctcttcgctaaagcaagcttgcttccactaagtccaaaccttgtttccaaatggtgaagaacatacacccacagcgccttgtgtgagcattttttaaagtcatacgaggaagaccttttatacatgctttgcagtaacactttatgtaaggtctattttcatcccagtttataaatgaaaaggaaaaacatgcagatgcctagggctattgagtaacttcccccaggtcacaacgttagtgaatggtagaacccgatttaaatccaggtagcattcttaacaaacatactatatccacgtgttaaacgttatattcttgaccctaatctgagattaaataagcctattcctgtatcaaatataaaaaatacagccgtgtacagtggcttatgcctgtaatcccagcactttgggaggccgaggagggtggattgcttgaggtcaagagttcaagaccagcctggccaacatggtgaaaccccgtctctactaaaaatacaaaacttaactgggcgtggtggcgggtgcctgtaatcccagctacttgggaggctgaggcaggagagtcatttgaacctgggaagaggtgagattgcagtccatcaagatagcactactgcactccagcctgggcaacagagtgagactctgtctctaaaaaaataaaaataaaaaataaatatatatatacatacacacacacacacacacacaaaatgtataaatatataaaacatataaacatgttatatatgtatattatataaaatatataaacatgtgatatatgcatattatataaaatatataaacatgtgatatatgcatattatataaaatatatgaatatgtgatatgtgcatattatataaaatatatgaatatgtgatatgtgtatattatataaaatatatgaatatgtgatatgtgtatattatataaaatatatgaatatgtgctatgtgtatattatataaaatatatgaatatgtgctatgtgtatattatataaaatatatgaatatgtgctatgtgtatattatataaaatatatgaatatgtgctatgtgtatattatataaaatatatgaatatgtgatatgtgtatattatataaaatatatgaatatgtgatatgtgtatattatataaaatatatgaatatgtgatatgtgtatattatataaaatatataaatatgtgatatgtgtatattatataaaatatataaatatataaaatttatatatgtatattatataaaatatataaaatttatatatattatatgaaatataaaatatataaaatttatatatgtatattatataaaatttatatatgtatattatataaaatatataaaatttatataagtatattatataaaatatataaatatataaaatttatatatgtatattatataaaatatataaaatttatatatgtatattatataaaatatataactatataaaacatatatttatattatataaaatatataactatatatgtttatatataatagcaattatgaaatatatttataattgttatatagaaatatattgatatgaaatactttttcctctaataagcacttagttctatgtgatgtcaggatccaattcaagaggagagagaatgcaggaatttacaggcctcagaaacacaaagtcagctggctttacttggaaagggaggaattttgttttaattttttagtttttatttttctgggtacattgtaggtgtacatatttatggaatacatgagatattttattacaggcatgcaatgtgtaataatcacatcatggagaatggagtatccatcccctcaaacatttattctttgtgttacaaataatccaattatactcttttagtcatttttaaatgtacaattaaattattattgactatagtcaccctgttgtgctgtcaaatgctaggtcttattcattctttctagttatttcttgtacacattaaccatccccatcacctccccaccccatgggaagggaggacattttcatgaagtcttcgaaggtcatttggcaggggcgggggagatgtatgaatcagcctgtgctaggtatgtaaagcactgagctagactctgcagatgagaactctgtcccggtctctgcctcctaaaatgggatttaagagtgagtccttctatccagcaatttcaatttctcccagacatggaggactctgagattcacttgtagctccaagagtgccccccatagaaacttgagaacagacacttcttcatgagtcccagtctggacttctgtctcttcactcactcccacatatgaggggacttcaaaaattcatggaaaatttgaattataaagagaaaaattaaaaatataaactccgtttctcaacgtaagctgcatcaagttcaagacacttttgtaggtggtaatatcagccatgtagtccatctctgaggaaagcagagtcctgggaatttgtgtcaatgcagtcccttttttattattgctgaagaaaaatggctgccctttaaagatttttgttgttgttgttgttgttgttttacaattaggaaacaaaaagaagtcagaaggagccaaattagaactgtaaggtggatgcctaatgatttcccacggaaactctcgcacacgtcccctcatctgatgagaggaacaaactggagcattgtcatggtagagaagggctctctactgaagctttctctggtgtttaaataacattttggctgattttctcagaatgctctcaaaataaggagatgtaatgttccttggctctccagaaagtcaacaagcaaaatgcattgagtatcccagaaaaccgttgcgataacctttgctcctgaccagtccactttcgctggcccacttctgtctcttggtagccattgctgtgatggtgctttgcattcagggtcatactggtaaagccatgttgcacttcctgtaacagttcttcaaagaatgcttcaggatcttgatcccacttgtttaaaacttcaattgaaagctctcctcttgtctgcagctgatctggctgtaacagttttggcacccatcgagtagaaagtttgctcagctttaatttttcaatcagaattatgtatgctgaagcacctgagatgtctacggtgttagctattgtttgtgctgttaatcattagtcctcttcaattagggcacaaacaaggtgaatttttttcttcacaatcttcaatatcttctcatccctacttaaaatgagttatc

SEQ ID NO: 7679 - DNA, 6000 bp, Homo sapiens
gattgccaaaatcattgagacacatttagttacttgatgtttaatatttcttttgcaatctaatttcttattttaaaatgttagtcagaaaaaaagaagtcattaagtagtaaaggaagtggaaagccttgtaacttagaaggaatgttggaaaactcattgtgccagagaaaatagaatatatcatctgtatttgttgttttaaaagccatttcgaaggatgtggggcagatatttgaaaattctaatgtcacttattgctaggacagattcacataagaggtgtcttatcagatttaaaattctggatctggtctggataatgactgtgaagaactttcaactgagttaatcttgactgccaagcatgggttacaatagcacctagtgcagcatgagtctttccattggcattaaatgctttagcttaaacgaccactgggcttagcaaagaactgaatacaagcagtatcacctccatttaaacatatcttttatcacttatcttatcttgtaaaaaaaaaaattccaggaaataaattttcagtaaaactgagctagctctcttggcaacctccctggctttcctacccacatcatgcaaatgtacataagactgctgccaagaaaaggggggaaaaaagaaacagaggaaattatgaactacaaaagttgaaaatcattgttaccctcttttagaaatggctatttctgggcacaatggctgcagtgagcaatggtcaccactgcactctggcctgggtgccagagtgagaccctgtctcaaaaaaataataaaaaataaaacataaaaagaaatggccatttctgttacatttcgtgatttcccccagcagctcgttggttactaaatgagagtgacttctaaataaaaccagagtgtttattcaatcccatctgagaatgctgagaaagggctgccaaggctggtggaatcagggctctgccaggacaaagaagtcatctctcagtgactcatgtaagatgcattttaaaattgttgcatgtgagacacttccagtgattgccctgacaaggcaccccaaaatttggcatggttctttcagaaaggacaaggtcggtttccaggtgagctaattccttcatcagcaacaccagctgatgcactctgagaacctccttcctaagatgaggaagacttacataggggaagtgttctaggataaggttgtggagttgtgtgggtgtgggtgttttgttttggttttgtttttttttttaattttttttttggagacagtgtcttgccctgtcacccaggcttgagtgcagtggtgcaatcacagctcactgcagccttcacttcctgggctcaaaggatcctcccaccccagcctcctgagtagctgggactacaggtgcgggccaccacacccagctaattttattttgtattttttgtagagatgggatttcaccatgtttcccaggctggtctcgaactcctaggctcgagcaatccactggcctcagcctcgcaaagtgctgggattataggcgtgaggcactgcgcctaggataaggttttaacatgcctccatctggtgggttccatgcaaaatgggttttcaaaggatttgtctcatcaaagatgaaactctaccttcttgcaagtcatttttcaaatgcagcttttcaagaagcctaccctgaccacattatttaaaattgtgactcatcctccaaatcctaatctcttaatcctgctcaattattattagtagtagtattattattcgctctgttgcccaggctggagtgcagtggggcaatctcagctcactgcaacctctgccttcagggttcaagcaattatctgcctcagcctcctcagtagctgggattacagatgcccaccatcacgcctggctaattttttgtatttttagtagagacagggtttcaccatcttggccatgctgatcttgaactcctgacctcatgatccacctgccttgatctcccaaagtgctgggattacaggtgtgagccatcgtgcctggtctattattttttaatgtataaatcttaagcatacaggtcaatgaattcttgcatatgcgtctactcgtataattatcattcagatcaagaaatataacttttacagcactccaaaaggcagctccttcaggggccttctcccagtccagcctgttctattttttcaaagcatttgccaccttttaagatacttgccgagtgcagtggctcacgcctataatcccagcactttgggaggctgaggtgggtggatcatgaggtcacgagttcacgaccagcctgaccaacatggtgaaacctgtctctactaaaaatacaaaaattagcctggcctggtggctgtgcctgtaaccccagctactcgggaggctgcggcaggagaattgctggaacccaggaggtggaggttgcagtgagccgagatcacaccactgcactccagcctgtgcaacagagcgagcctctgtctaaaaaaaaaaaaaaaaaaagatatttgattggctcatagatgtacccaagcaactagaaaactgcctgacacacagtaggcactcacactcaaatctttgttgaatgaaagaatattattttattttgagacagagcctcgctctgttgcccaggctgaagcgcagtggcacagtctcggctcactgcctgccacctcagtctcccaggttcaattgattctcctgcttcagcctcttgagtagctgggaccacaggcgcccgccaccatgcttggctaatttttgtatttttagtacaggtggtggctcatgactgtaatcccagcaccttggggggctgaggcaggtggaccgcttgaactggggagttcaagacaagcctgggcaacatagtgaaacccaaccctgtctctataaataaataaacaagtaaataaatgcagacatcagaatggtattgatcagatctaggtacaggtgtagattggatgcgtccttgtttagtctcttctatgtaacattttcttggacaggttgagcacttggtagtggatctgcaaggagggggtgccccctttagtctggaatcccctcttgattcctaggtttgctggcatttatccagataggggcagagtcttcctaaacggcttccctcctttggagtctgctgctccttgcatgccataacccagtcttgagaacctggctcaccttccattgctcccctctcccagtcagttgcaggttgtggccacttcgtgccctatctctcttctgtggtgtcccttgaatttcctcctttttacttcccctggcaactcctccgtatgtcgctgtcccagcctctcaagtgattctcccatcttcagttttatcctctctagactatctccctattattttccctaaaacacaaccttgatcatgctcatgctcggtcctaaattgtcaacggtttgcaggtgctaccaaaaacaagtctaaatgtcttagatcaaccagtgtcaccaacaggccctatgttctcttgcatcggtacctttgttctgtcgttagcttcagaatataagtgctggaagagaccatctggtccaatctcattttacaaatgaggaaactgaggcctggatagattgagtgactgaccagcacctagtcagagatcaagtttgactcatgaaaaagaagcctagagcagcctcggggttggtatcagacaagattctaccagttggccacccgttgaataccctctctacacaactctgatccttaaagctgtggatctttgagtcccatcaagcacggcctcctgtaggaagcctctgtgatgacccagttgggagtctggactcttgggcatagatgtgagcctctaggtgactgggaatcgtgtgggagtcctggctcccctactgcattttaagcaaactctgatctttgattttcctccattcttatcccaacgactcggtccatagtcggggagcggcaaaagtctactcaagaaggagggtaatgtctatactgccagggaggcacgattcacccgctcagacaccagccagcaacgaggcgctgagtccaaaatttccacctacaccgcgtggttcacgggccgcaccttaactccttttgactccaaacccaaaaaaactcgatagcgtttggactcggcagaaagcctgctggctgcaatcacaggatacgtttctggaagtcttgaggcgcagcctctttcttcaccctccacgcggcgaactttgacgcgcattcggtgaccggtccccaaacatgacttggcatcaagaggacacagctccccttaccgagggagctcaggtcccgggcgcgccgcggccccgccagctttccaggctggctcagtcctcgacccggggtgacggccaagccagccaagggcagcgggaaagtgacgctgggctggagaggtgtggtggcgagtgcggcccccggggagctaagagcagccgcagcaactgggtctcaggctgggcgaggcaagggctcgtaggctgggctcggaagactgaaaggggtgcccacctgactccaggacgcacggagggcgtggggcaggagctggacctgggccgcctcgggccgccccggggcttgcagtccagcccctctccgccctagggagggaaaaagggaggggagaaggccgagcccgcctccagccccagccccagccccagcgaggctcggcggccgcggctgctggagggaaaccagaggcacctccccgagcggagaaaccagtttggccggtccggcggagcggaggcaaaagggcggctgcagaggaagggtgcacggacgcggggcggggaaaggcgggggagccactagcgagccgcgagagccggaggtgccgccgccaactagacacgcttccccgggcccccggccagcccccgtgcgccatgcagcgctagcgcggcggccagggctggggccgggcgggcggcggcagcggccaggtgcgcagcgagcgctccgagcggcgcgcaccaggcggatgccccagccggggcccagcgaacgccaggtaagcaggggtgcggcgccgggggcccccagaccttcccaagccccttggcccggcggtgtcctgcaggttccctggccgctcccgccgcactttggagatccgggatgcggcggcagcagctgtcagcgccctcggactcccgagcccgcacaggtgggatttgggtggaggtgctgggagcccccgaggcctcggggacggcgagacacggccggctgggcaggcagcgctgcggagagttccgtggggttttcacctgcctagaggagggaaatctcggggtgtttgggttcttcgatcggtagcgacacacatgtccgggggttaagccaggtagggcttgcggctccttgggggatgccgctggctcctgtgcggtggctaccgcccctctggaagaccccggtgaccgggtcctgctggggcgctctttgggagcagatgccaacgtgtccgaaaaggacttgcgggccaaacgtatctgaccgcggcccacctgccgggagggatggagggggtgagatcgctctcctccccagctcctgtggcagggccaggtactcccagacatcttccgtgcgctttattgtgggatggggaggggaggtgatggggaagaccgacaccactgtttttccggtgactgtcgggtcgcgtccgccagccccgctgagatggctgcaggcatctccttccctcagcagtttggtgccctgcgctgtcacctcgctgtgtgcacgaggaggggcaacttgttggggggcgcggggagatgttgcagagaatggcccagtgctttaacacccctcgcccccacttctccaactccctccttctccccaaagtgaaagaaaagttctgaagtgtctgcccaacttttccgacggaggcgtgtgcctgtgg

SEQ ID NO: 7680 - DNA, 6000 bp, Homo sapiens
aaatcatgggaggaatggctgaagaagatgaaaccacgtttatgaagaaccttgtatgtcattataaataaataaactttatatggtaaataatggtcattattaaagattttaaagcaccgaagtagcatggtcagagttgcattcttagaagaccactcctgctgcaatgaagagaaggcaaaactgaggaaatggaaagaagataggaagatagtataataacctggagatgagacgatgaaggcctgatggggccatataatagaaatggaaatagacaaagaattcaagacctactcagacagtggaagaagtcaacagcgtttggtgctggattgcaggtgattggtgagtgcagaagtctaagaaaactcacaggtgtctggtgttagtgacttggtggataatagtgccatgaattcatatagtataacaggaaatgaaataaatgtgaatggaggtgaaaggcagatgatggtgaatttaatgcagacccattaagtttgagataactggaaatttcatgatttgtctagtgggcctttggatttacaaatcttaaactgatctgagaggatgtagaagttatcaccattttaatgttactcgaaaccatgagactggataagaacgctctattaatacagaataaatttatgtcgttcacattcaccattcaaaatgccctttgagttctttcttctttcacaactgtgcttcattttaaaatacatgcacacttttgatatcacatttgaaggtatctctctaaaattgacctcattggtttcgttctcagcaaattgacctgggccactcaacatggcttttatcgtgcctgatgttaatgcatgttctccttttacaataaattcatggccatcagatgatatcaatttgacatacatggcaccagggccttcacatccaccacaggttttctcctctctatccattttgttcttacgaaattctatttcgcttccccaggaagtttagtagttgctcgccacccccgcagccattgcagccgggtccccgtgtaccgccgcagcccgtattgcagggctgccccccaccaccctctacgcttcattttcatgggattttacctgtctgacgattttgtggtctaggagtgccgccattttgatgtaactagagaatcggaaactcttgcataggaaccctatctgtccatggtttccaatttcctgttctcaccaacatgtttgctaacttaaccagcttcgagttagcttctccaaaagtaggtatacttttctgcgcttcttctatagtgagggctaccatgccacccactaccaatagggtgcttttgaaagcatgctcccaacgcctgggtaagctgtctgtattagtttcctgtggctgctgatacaaattactacagacttgatggcttaaaacaacacaaattttttaatcttatagctctggaggtcagtctaaaaccagtttaactgggctaaaatcaagatgttagtagaccggtgttccatttggaagactctagaggagaatccttttttcactttttctagtttccagagatcacctatagtcttttattgatgaccaccttcctccatcttcaaagtgcatgatttcaacctctgtttccatcatcccatctttttcttctgcctttgactttcttgactccttcctataagtaccttatgtttacaattgggccaactagggtaacccggaagcccaatcactggtaaggcaccaatcactggttccaaggattagaacttggacatcttttcatggccattattcagtgatgaaatgagcccagatgacaagctctggcttgcagtagtgcttacaggtgctatgagaatacaaataaggtaaccagccataggatatttaaacaacatttaaaaatctcttaactaaaaacaagcatacgaataacaacaacgaaaagaagtgctatcagttttccttacacaatatcattgtttgttttcaagtaactataagaattagaatataaatttcatggccaaagtaccagatgtatatcatttttaaaaaatctcagcatcaaatcctccttattcatcactctctgattttattttgaggaattacctatcttcaattatgtattcttgtggaagtgtcataaatccaggtgcccaccctccatcctgaaagtcgagaaatcaaacgtttcttcttcctgtcctggtatatatagccagggagtcagtgcctccatgaagtttggccaagcaaataaatactcaaccctgtgattttgaatcttgattcagtaatggaaggtgagaaaaatttggtattttctcaagtagactgtgcagcaccaaaccaaactgctgtctttcctgcttcctagcccatcggtattgcctcaaatcctgactgtttccaagactgctttccagtcctctctttaattctggaagctttcaatatttttctaataaattattttcacttaagttagccaactttggtttctgtcacctacagtcagaaaaacctaataatagcaatgttacatcgatattattgttgctgggttaaatctaccataacaattttgtaagaaaattgattttccacttcaagtaattttattcactgaattcatctaatttgagttagggcctgacaatgatactgaccttcttatttatgtgatgtcattggaagaatctatggattaaacgtggttagataccaggattaagctctagtattcaatagtacagcagaggaactatatagtttaatttattgtatatttcaaaatagctagaagagaagaattctaatgttcccaatacgaagaaaagataaatgaggtgagggatatcccaattaccctgatttgatcattatgcattgtatatatataccaaattattgtatctacctgcaaaatatgtgcaactgtgatatatcaatttaaaaattagaaaagaaaatctattaattaaacatatttacaaatctggaaaggcaaattttccaaattatgaaggctattatcacatatcagtattttgccttttcagggaatccgatttgaagtgtccctataataattcttttttttttttttttttgagagtctcgctctgtcaccccggctggagtgcagtggtgtgatctcggctcactgcaatctccacctcccgggttcaagtgattcttatgtctcagcctccagagtagctgggattacaggcgcccaccaccaacccagctaacttttgaatttttagtagagatgggttttcaccatgttggccaggctggtcttgaactcctgacctcaagtgatctgcccatctcggcctcccaaagtgccaggattagaggtgtgagccactgagctgggcccctatagtaattcttgaattgtctgagaatatcttttagatcattgctaaagcgtcggtgctcatgatattacaatgctgagaatttacctccatttagtggtttcagtaattgttattttctttaatggaaaatcactcagtgaaattgcaggaaagaggttatttatctgagtcatatttttatgaaaactgtttttcacttccttgcatttttagaagtgttgtctttaaaaggatattctattaatatttataattagacatcacacaaaacagatgctaaatcttatgctataacttctggataaaattacataaagattatgtactttttggcataatattccctcaggaagctgtagaacaaaggacattctccatgaagatgccatttctttttttaatagaaggaaataataaggcagtgattaaccacgattattttaactactgtaacgtttgcaattaagtgggcagcgcaggagctcaataaatacttaattgatttacttttttctctccttgacccacatcgcaattcacccactcacgccgctatccctattctaactttgaaaccaagtggattctctctgttttcagtttgtggaagcgtggtgctcagcctgtgtggaggggcctggcttccaagtgtacttggggtggaacctggggactttaccgagggcacaggtcaggagatgagattcgtttcgctttttgaattaccttttggcctgtaccaagatgaactggtgggatatatagtgtcatcgaacccgggagagttgttgtggaggtgaggaaacagctctgagggataacggtttgaaagtagtggcgctggggacgaacatgggtccctgcgagtctgagactctctattgcccccatctccttgctgccgattacttcttcaaaaattctcctagggaccctgaggagggacgggagaggtcagcaaaccctctgtccaccaacttgatttcctgtgatacaaagtgtcatgagttctcctgctttcctcccttaaaaaagacaagattaggaacaacggctggcaagagaggaggggaaagcttaattctccacagatgctgcgcaagggaaccaatgggtcacgcccactcacgggtggccgcctctctgttccatcccggggatgttgggctttcccctcggtccggggcgagcgcacttcccacccggagactgagcgggcagcactcgcaggccaggagcgcgttccgggaggcgccggcgcctccccgcggcctgggcgcacgtgcctgggctggggccggagcccgcggtcgcgccgcgccgtagtagctggggcgggtgggagcggctggctccgggccgcggccgccgcccgcccgccggctccggtggttgggcggaggaagcgcgggactcctcctccccaccgtattaacatgcacccaggggcgggtcaccagcccagccttgcagccccagcccgccgcgtcccggcgctcagcctccgctccagaggcgagcgctgcgcttcgggcgccgcaatctccaggacacggcctcgcggacaccttccgcctcggggaatcggcagcataggcggcgcgaacggccgccgccgcctcggctcctctctcgagtccttcccgtcacctcgctgagagccggtcctggtcgcggggacatctctctccttcctccgaggctcgtgggaccaacggacggacgcagccagcgagggccggactgcgggacgcggccaggtaacgccgggctgcgccgcggggctggggcgtgcgcggcggcggcggtcgcggcgcgctgggtggctcctggctgctgcctgccgcgcggtcgccgcttccctcgcccgcggaggggctgcgggctgggctcccccggccgctggctcgagagtccgcgctccttaccctttcagccgcccggggtgcactcccgggccctccgggtaacctgggatctcgggggcgagcgcgtcctctccggccatgcggtcctcgcggctccccacggggacccaggcaggggaaggatttctaattgcgacagggtcccggaagggggaggggaggagaacaccggtcccctgtcccggtcatgtccaccggtcaaattcgcacccccaccccacccccgatgcaccttgcaggggaggagggggctgctccccgcagggctttctcggcaggctcctgggtcgtttgcaaagcaagttgttgcactagctttttgggtgacattttggcattgtggaaaaggaccaactcccccgtgcgtttgtaagagaaagccaaagaaacagagacacaaagacaggcacagagagagagagagagagagaaatggggtccaaggaggaggtcactggagagtcgccccctgcccgcggccaaggccaattcccggagaatcgcggggcgggccgggagacccgacattcagcgaattgaatgagccgggctggaaccaaggccaaacagggacctctcctctgggctgggcgagataacacattgcactttcattgaggggcggctgcagctgggagaggcaccttcgg

SEQ ID NO: 7681 - DNA, 6000 bp, Homo sapiens
tagatgagactctgacaccataaccaattctagtaactgacctcttgcctctatccttgtaaccaagcccctagctttacatccaggccttctgcctggatcccggtgtgatgctcctgtgcctaagtctctgccttgtatctcagtcctttagaactaagaggcagccttgcttgtactaactctccagagaaacggtcctgtcctgtattctgggcaccgtggctggatccctgctatgtgggtgtcaggatacgaggaaaaacacttgccaggccaggcttcttgccaggccagagtgaccacactctgaatgtggctcccccagcctgctcagccaccaatgaccagaacctggattttctacatgcaggagcaggtcagtctagctgtgtttctgaaactttgcttcacattagaattacctggagatcattagaaatatctagatgtccaagctgtaccccataccaattgaatcataatctatcggggtggaaaccagaatcagtattttttaaattcctccactgatttcagtttgcaaacaagatggagaacaagcaagcaagctatgtgctggtcaagatgtgctctgcctatccgcagcatcagcatcatggggagcttgttagaaatgcaggaactcaggcctgcaacccagaactattgaactagaatctggatttcaacaggatcacccaagggatttgaaagctccaatttagctcagcctgtgtgagccctggttttgaaaatggtcataattaagcttttttttttttatgttaaaaaatataatagtattagtgaaattactgaaatacaaattcatattccagcactttgggaggctgaggtgggcagatcacttgagctcaggagttcaagaccagcttggacaacatggcaaaacccatctctgcccccgaaaaagaaaagtaatcaaaataataatacaaagattagctgagtgtggcagtgtgcgcctgtagtcccagctactcaagagctcaagaggctgaggtggtctaccattgagctcaggaggttgaggctgcagtgagccaacatcatgccactgcactccagcctaggtgacagaatgtctcctagacattctgtctaaaaaaaaaaaaaaagaaagaaaaaagaattcattcatctttattatcatttgacatgtgcaaggcagagtgctggtgacttccatacattggctcatttaatgcttacaataagccttctttttttttctttctggagacggagtcttgctccgtcatgcaggctggagcgcagtggcctgatcttggctcactgcaagctccgcctcccgggttcatgccattctcctgcctcagcctcctgagtagctgggactacaggtgcccgccaccacgcccggctacttttttgtatttttagtagagatgggatttcaccgtgttagccaggatggtctcgatctcctgaccttgtgatccacccgcctcagcctcccaaagtgctgggattacaggggtgagccacggcgccctgccatacaataagccgtcttagcaaaactttcccaaactgcccaatcggtacctggtcctcccattctttatctaagtaaccagatatttccttgatggcacttattaaatttatgattattttttcttttttctgccttaaccatcagactgcatgctccacatggtgggaaatgtcatacgtctttctcatttcatggtatatccctagcactggcacttagcagccacttaaaaaatgtttattgaatgaatgaagtaggcaccattgctatctctattttacagaggaggaacttgcccaagatgtcactgctagtaagcgtggggaaagaatgtgaaccatcgctgagcccagcctgagcttttcttcactatctaaaacatccatacctctacccatcttctgaccacctgaacaaaactgtttacttctgtatgttggttttctagttccttgtttgcacatgtgctttttaaaaattattattattattattttgagatggagttttgctcttgttgtccagactggagtgcaatggcatgatctcggctcactgcagcctctgcctcccgggttcaagcaattctcctgcctcagcgtcccaagtagctgggattacaggaatccgccaccacgcccggctaatttttgtatttttggaagagatggggtttcatcatgttgaccaggctggtctcgaactcctaacctcaggtgatctgcccgtcttggcctcccaaagtgctgagattacaggcttgagccaccactcctggccacatgtgcttattttatatacataattgtaatcagaatgtctatgttatttggaatgttgcatttcttaacatatgagttgtttttcattgcagagtttcacaattcaaaagtagctacataatagcctgttacattgatttataaagtacttaaccatttaaactatcgcttgacatttaggcattttcaattgttcattatttataggtgactttgaagcaaggatctttttgtgtccagttgagttgaatttttactttctcacaaaatgtgaacattcttgttatactcattttcaacttgaacaagccagccctgcactttcatagggctctaggtaatttagatattttccaagcatgctaaagattggaaaaatttgtactgcagggtttttagaagatgtgtagaattatgacatttttactgctgcattttatccaagtttgttctgaattcttttcattgaaatcttttctgcttaattttgagcagtgataaatagtgccaatttgtaacttttgatgcttcctattcactccccagaggtgctgaccacttgcctcccttgaaattacacacgtgagatccctgcttgcagttcaaagataaggtcccattgacctcctgcctgaatttctaggaacccaggatatggggagacccagaatatggggacaccccttgtgattcctccagtgtggttttttttttttttttttttgagacggagtcttgctctgtcgcccaggcgggggtgcagtggcgctatcctggctcactgcaagctccgcctcccgggttcacaccattctcctgtctcagcctcccgagtagctgggactacaggcgcctgccaccgccccccggctaattttttgtatttttagtggagacggggtttcaccgcgttagccaggatggtctcgatctcctgacctcaggtgatccacccgcctcggcctcccaaagtgctgggattacaggcgttagccaccacctccaagtttgcttttgatcaacatcctctgtgatttcagcgtggtgttgtaaaggactatggactagaaaccagacatggggtctagctctagaccagacatttgctgacactgagaactcacttccttatctcctggcaagcatctcatagagttgtgaagatcccaaaagataatctatatgaatgctaggtctgtgtgtgcagttatttcagtgcataaatgcttataattctgcattttaatagctatgtgcctaatactataatatttgatcatttattaaatactaagtttacttatttaataattacttagtaacattttaatagttacgaacgtctgcattttaaatttagtactgtatggagtattcactgaactatattgcatccttttaaaacggccaaactatcattttgttccatgatttttaaaaattaatcgatggctaagtactataactaagttctactcactagatgtgtaaggaagtgtcctcagaaaaacaggaattgatagagttgtcaaatagattcacacaagtgagaggaaattatcttcctatcaagaaaaaaaaaccctgcaaaataagatggtgggatgataatgagatattgtccctgtatatttatattgagaaaatgtgaaatctacaaagtgttatgaataccttttttttcttttttgagacagagtctcgctctgtcgcccaggctggagtgcagctggtgtgatctcagctcactgcaacctcccactcccgggttcaagcaattctcctgcctcagcctcccaagtagctgggactgcaagcgcgtgccaccacacccagctaatttttgtatgtttttagtagagacgaggtttcaccatgatggccaggctggtttcgaactcctgacctcaagtgatccacccgcctcggcctcccaaagtgctggaattacaggcgtgagccactgcacccatccaatacttttgatagaaaaaaaaaatcagaggaaattaaaaattctttatcggggaccagacatagttttaaaataataataattataataacagcagttgaagttgcgtgtcaggagcgcgtcctctctctccagcagtaagggtatctaattataataattaagtccaagtgaccttgccttctttaggcaaacaaagtcgggaacaagttgcaactcattttcagaaaaaatcctcaagtcctctgcccacggcggaaagggcggcgggtcggccgagcctgggtggcttcccgaggggtcgcctctcgcccagctcctggcaggggcgcgtgggtcctggcccggggactgcagggccgcggcggggcgggcagggtcagctgggcacatagtttctcggaatccaccctcccggacccccgcagcccagtttctcctcccctcagcccaccttctctgcccacctcctacccggagccggggaggcggccgcggtcagcccggcctccccgacttggggtccgcgtgcgccgggacccagaggccaagctgggcgcccccgggggaggggtctgggtggcggggccaagccggggcgggacggggcggggcggggcgcagccgaggggtgtgtccgagggcggctggagggaggggcggcaggactccaggagcggcggggccagggcagcgcggactcgcgtcccgtggagcgttccaggcgggcgcgcggctttctccccagacccaccgagtggcggcggaggcgagatgcgcgggggcgtgctcctggtcttgctgctgtgtgtcgccgcgcagtgccggcagagaggtgagcccggcccgggtcctagggtccctgtcccccgcaggcgggcgggcgggggcggccgcggacaaagcccgtcgcgttggggctgctggagtccgggcgcgcatcctgatccacctcggagtgggtgtctcggccacgtgggtctcccgcgcttgccggggagggctggatggggacgccgctcctgccggacgctgcccgctctttgcaggcttaggctttaacctcctcgggctttggggttaaagcccagcctcgcctctggcttttgcgggacttcgcgacccaggagcgccatctacgcgagcagtgctgggggtggcgggagcggggcgcccggagcggggcgccgggggttgcttttagtgccccggctgcgcgggcgggggtggcggggctgttggccgggcgcgggggatgaatggagaaagagctctcccgagtcgccctcattgtccggctgcgcaagctgggtcgcggcggccgggaaagggcggattcctcggggcccctggcagccaagcgggctagtggggagagacgcggcgagaagggcgcccctagccagccgtcccgggcagggggacccgcaggcggcgtccagggcactgatgcgccttcccgacccgcgctttttgtgcaataggcgaagtggccaaacccgctcattcactgcgcgggattgaccgtgggcgcgccggggcgagggaccagcggagaagggagcaccttgcatgcgcgttgcaaggattgagaagagaaactcagagcgaattttcattttctgtttttgcgggcgggcggaaagagagagagagagaagaaagaaagagagagagaaagagaaaagaaagagaga

SEQ ID NO: 7682 - DNA, 6000 bp, Homo sapiens
tcacattgcactgaggactgaagtaagtgggaaattcttgatgttgatttactctatcatacaaaccccgtgtcagaaaccaagaaccctgctacgcaccagaatacaaagatgaatagaaagcaaatattcatttctgttttttagtggctcccagactaatgtggcacacagatatgatggaggaaagtgaaaactacatacatcctaaccgtgtgatatgctcctatagattgcgaattaaagaaatacagaaactagaaagatacgagtatgttctgttcatgtttccctaaataatatatttaatagctgcgtaattatatcaatatctaattaaataagtataatgccaacacctcaaaaaagaggaaatgactaatcaaagcggtgccctgagaagtctgactggccttgctggatctacagtgaaagacactgtgacggttagatgctgcttctgttatgaagtcaatagtctgcgagaatgataatgttactattccacataattatgtgcctgcctaccatcaaaactgtgaaatgcgggtctctttcttaattgttatattgctctttcccatatacaggtatatctattcctaaaaggagtaatgttttaaaatttctgtcatctgtgcgtaggtggcaattgtagtcaagtatttcttccaatttgggttctttccctggaataagaatgtggaggtgaacaaagataaaccgtatcaccccccaaacatcataggagtggaaaagaaggaaggttatgttctctatgacctcatccagctcctggctctgttctttcatcgatcaattttgaaggtactgcatgttaacaattaatcagttcaagttggtcatcttcctagataacctggaccgtaatcttcctagataacctggacatcaggattggtgatggggctgaggggccagtgagtggtatctactcatatgttttttttaaaaaaaaaaagagagagaaaagaaaaaggttaagttcatttagctgacattttttccaacacttgtggtgctaaataatggaacttacaataaatctgggagaatgtttccccatgtttccaacctaggttaaatgtgtaatcgtgaatccacttttgtggaacattgcttgaatgatgtgcaatattctaaggccggatacactaaattctgcttctgatttaagccagagcatcagacagccacaatgtgtgtggatcatattgtctcatctccatcccagcttctgcctcccttcttctagtagtactgctttcattgggtagcttcttgtcatgaaaccactagctgttggtgagaaaccacatattctttaaagttgcccagtaaaacccagagctgtgctttctcctgcttattgtggaggaggccactcatgatcctgctggaggaaggcctttatacagcatggccctgcctcagcctcagggactcctgtccttctgagcaacttcatgggtttttccttctcacatgctgtgaattataaactaaacttgtaaatacgccatttaattctaataaatagaaattattgcatagcatagattttatgtatgaatatacctcttgttacaaccttactttctttccctcgtcttaaccttgtcttcttatataaaatattttaaattccttttatccaggagtatctttcttagtccctagaatcctttttagaaccaggcttggcataagttaatacatacacgtacatatacatacatgcacacatagatatgtaacagtgtgtttaacttcttctgccctagctcagtgagctatttcaaactcggtttcatctgagtgtactctggtcagcctcctcactctagcttccatcactttgcaaagtacccaaaccctccatttggagggagccttagctgggtcattgggttgtggcaggtttttgaaagctatgtatctaaggaaatcagttagcaaaaattgaatttgcctaaatcttacagttcttctgttggatatgttaattacttgaatttatttagtatactgatttttgttatgaacatattaataaatgtattaaccttgttttttagtcttagaaattcactttttaaatttcagtatttaatacttgatggtataattttgatcacttcagaattctcttgcaacctttacattcttttgtatcatttaaaattattataactctttaggcacttttactatcttttcatcaatgttcaaatggcttaactgctgcaattttatatttaaaacatataataaaatcttggtgtttcatattgatcttattctttttttgaaaatttcaaatatatgaatgtatatgagatttgaggtaatggcattatgttaaaaattttaattaaatatataaaaatagtttttagaatgataaatcttttcttaagaagacaagctaccccatagcttttgaaaaaataaatctttcatataatgttgccatgaaaaccaaacaattaaaactgcagaaatttcaaaagtgcttgaaaccatcctatttcatacaaattgctgtatatttgataaataattagaagaattggcaaacaagtaaatatactactgagaaagttgtgaaataatctaaatatatgaaggttggccaaagaggaaacaactcttaaaataataggaaagaaatccatataaactgaaaaatcccattacgaaaagctaaaatgtttgttatgtttataagaatacattcattgaatatgtttaagaataacacatttacaaataaacatttaagagtcatctgtcaaatgagtgactggtggattgatcattctcggagttggttttgaccaactgatttctgacaaattggcctggagctcttgtcctccatgtacgagtcagagagaagaccaggcaatgtcttaggaagcaaatgcgtggccaaagagctcaggggagagctccgtccaacagcagcaaggtcatcagggtgactttccatccaataagtcaagtcactgtaatttcttccttagtccatctgccaaaagctatctgtctccatcttaattatcagctaaaatcttattatctatacccacccatctcttccctactgggaccctcataaagctctagacaagctttcttttcttgtgtattagtccgttttcatgctgctgataaagacatacctgagactgggcaatttacgaaagaaagagttttaatggactccccagttccacacggctggggaggcctcacaatcatggcagaaggggagcaggagcaagtcacatcttacttggatggtggcaggcaaagagaggagtgctttgttcagggaaactcccctttttataaccatcggatctcatgagacttattcactaccacgagaacagcatgggaaagacctgccgccatgactcaattacgtcccaccgggtctctcccacaacatgtgggaattcaagatgagatatggggacacagccaaaccatatcatcttgcttttctaatcttgaaggacagtttgttggatgagattttgtaagacagaataccaagggttccacctgaaacagtagcctcatttgtccctgtccctgctttctcagtgccatggcttatgggatgaagatgacatgactgaaagtggcatggccagggaggaatcagatgatgagctctccctcggtcatggcaggagggactcctccgattctctcaagtccatcaacctggccgcgtctgtggagtcagtgcatgtgaccttcccggagcagcagacagctgtccggaggaagcgctccggcagcagctccgagccatcccagagatccagcttttcttcaaacagatcccaaagaggtatctgtcgacacaatatatctaggctgtagttagctcccaggtggccttgtttttctggtgcctgtgggtctggggcaagggagtgtattgggtgctatcaagagacagacattgttatgtgaaaagaaagggctttgaaatcagagaaacccgagttcaaatcctgcctcagctgtgtgaccccattacccaaaacaccttattgtatctcaggacaagggtttcagataattgtgaaaaatggccggcacactgccttgtacctaataaacgccaggctcatgataatttatttgtgttacatgcgaaaaatctgcagggcgtgtccagagtgctatcaatcacaatgtattttttaaacatatttagatgtaattgatgagaacttttagccaaactatggttatttcctagtctagtaattaattttttcccaaacaacgagtacaatcagaaagtagatatgcctcacagctgcccctcttggaatcactaggcttttgtatctgtggggctcctgtctgaagcttttgtaattatggggctcctgtctgaagcttttataattatggggctcctgtctgaagcttttgtacttacggggctcctgtctgaagctttccatgcagtggtgtatagtcatcttcagaacctgcttttgaggcagatactggcagattatgtcatattcattttacaattagagaaactagaataggaaaacagacatggggcatcctatctggaacacctgcatcctagtaccctagttagcacaataaaaactatccttccagtttatttacttctgaaacaaagattgcatagcaatccaggaaagagccaccatggggtgttaaaccccacaggcctgcgatgggagcagagttgaggacaaatcccaaggccgtgcatactcatcctcccaaacagtcctgagctatccctccaccatgtgggctctgggttctgcttcttggatatttaggtgaacaaaccccaggctccaccacccatcttatgatctctttttatttctaggcagcacaagcacccgaaacagcagtcaaaaaggaagcagtgttttgagtattaagcaaaaaggcaaaagggaactttatatggaaaagcttcaagaacatttaatcaaagcaaaagcctttaccataaagaagtgagtccatgagaacatatggcatgtgtgctttattgtagggttttgggctttattatttcctataaaccaggagcagagcagagaagtaacttctcgtgtcacaaatgttatctgcgtaaggcagaatgaaattacccctttttgtcttgtttttaaaaatcatttttctgtaagtgtgattcattttatatccattgcatttatgcacatgctttttctatttgaacagagtaaatgggtcatttcaagggctcatggattgtattcttaggcattatcatggtgaagtccagccagactgagaggaatacagtgtcaatgctggaagggccttagacctgcactcttatcctgagaaggggatggaagtgcatggtggggaaatgctttgtccatggtcatacacctgttacccagcacactacacaggtccctccacctgctggggatggaagtggtgcatgggactgggactgccagctgggagtggagccctggacagaggctctgagagcaggagagccagtggcacctgaacgtggcgttgaactgaaggcaggtcccagagcaaagatagggcaaaggttagacagacaagcaagagccaacaggacaccacactaaggcacagagcaaagcatagataaaaggccaggggagtatgtgggagccagcatggacacaggccctaaaacaggaggagcaggggcgttgcacattcaaacgcgcatggaccaagcactccaagtctgagcgccctcatgcattccctcatttacttcccaccttggccctaggcatcaggtcttctcatcactccagttttacagatgagaaaactaaacacagaggttacatagcatgctcatggttctcgccggtggtgagcaattgaatcaggctacaaacccaacacctcgttcccagg

SEQ ID NO: 7683 - DNA, 6000 bp, Homo sapiens
attacaggcatgagccattgcgcccagccctaaagtaattgaagataagaaggaaggacttctaacatttgctacttgttttttgtatgtctttgtattagtcatggttttctggagaacagaagtaatgtgatgcatatatatgatatatatttataaacatgaatatatgttaaatatataaatatacagaatatgtacaaaaatatgtttatacttataaacatatatgtacaatttatgtttatatttatagactatatatgtaaaatatataaaaatgtatatgcttatataaaattattttatatatccatataaacataatatatgtaaactatatttatatttatttacatataaaattatatataaacctatattttcaataaatacataaaaagaaatatataaatatatttacatctctctatattgtatacaatatatctttatatataggctgggtgctgtggttcatacctgtaattccagtcctttggaaggctgaagcagtaggctgcttgagaccaggagtttgagaccagcctaggcaacatagtgagaccctgactctacaaaaaatttaaaaattagatgagtgtggtggcaaggacctatagtcttagctacttgggaggctcagggaggaggactgcttgagcccaggagtttaaggctgcagtgagctgtgattgtgctgctgtactatagcctgggtaacagagggagaccctgtctctaaaaaaaagtacatatatgaatgtgtgtgtgtgtatatatacatatatatatatgtatatataatttttttttttttttttttttttttttttttttagagatggagtttcactcttattgcttaggctggagtgcaatggtgcaatctcggctcactgcaacctccggctcccgggttcaagtgattctgctgcctcagcctcccaagtagctgggattataggcatgcgccaccatgcccggctaattttgtatttttagtagagatggggtttctccatgttggtcaggctggtcttgaactcccgacctcaggtgatctgccagcttggccccctgaagtgctgggattacaggcgtgcttctactttcttatccctaagtaccatcttacctgtgggttttttggtaaaaattatttatccagttgagtaagttcccctctattcgttagtttacagagagttttaatcatgcatgggtgttggagtttgttaaatgcttttttttgttgcatctattgatcatgcgatttttcttctttagcctattgatttgatggattacattcattgattttctgatgtggaacaagcctttcatatctgggataaatcccactggttgtggtatatagctctttttatacattgtttgatttgatttgctaatattttgttgagaattgttgcaactatattcatggaagatataggcttatagtgttttgttttgtagtttgtttttcagtaatgtctttgtctggttttaatattagggtaatggcctcatagaaagaattgagaagtacttccccatgttaattttctggaagaacttctttagaattggtattatttcttccttaaatgtttggtagaatttcttagttaagccatccaggcctggggtctccttcatggaaaggttttgttttgtttttgtttttttgagatggagttttgctcttgttgcccaggctgagtgcaatggtgctaactccactcaccgcaacctctgcctcctgggttcaaacgattctcctgcctcagcctcccaagtagctgggattacagacgtgtgccaccacggctggctaattttgtatttttagtagagacgggttttctccatgttggtcaggctggtcttgaactcctgacctctggtgatcagcctgccttggcctcccaaagcactgggattacaggcgtgagccaccacgcccaacccatggaaacgtttttaactacaaattcaatttatttaatagatgtaggactttttgtgttgtcttaaaagtgagctttggtaacttgtatttcacaaggaatttgtatagttcattgttcaaattcattggcgtatattctattttcattttaatatatgtagaatgtgaagtcatgtcaactttctcattcttggtattggtaatttgtgtcttttttttttttttttgagatggagtctcgcattccaggctagagtgcagtggcgcgatcttggctcactgcaatctctgactcccaggttcaagttattctcctatctcagcctcccgaatagctgggactacaggtgcttgccaccatgcccggctaatttttgtattttttttttttttagtagagatggggtttctttgttcctttttttttttttttttgagatggaatctcgctctgtcacccaggctggagtgcagtgacacaatcttggctcactgcaacctccgcctcctgggttcaagcgattcttctgcttctgcctcagcctcctgagtacctgggactacaggcgcacgccaccacacccagctaatttttgtatttttagtagagacggggtttcaccatattggccaggctggtattgaactcctgaactcgtgatccgcccacctcagcctcccaaagtgctgggattacaggcgtgagccaccttgcccggcctctctctctcttactttctttctctttctttctctctctctctctcctttctttctctcactctctttccttccttgtttctttttctttctttttttggcctgcttgctggtctcaaactcctgacctcaggtgatctgcctgccttggcctcccaaagtgttgggattacaggcatgagccaccgtgctgggccaatttgtgtcattttcttttttcctgattgctctgactattgatcttctcaaagaacacactttgatttcattcatttctctatgtcttttagtttttaattttattgatttttacttttatcttctttctgttctttggttttacttcattttctgtctagttttttcttttttgaagccgaggtctttgttttgcccaggcttgtctggaactcttgggctcaagtgatcctctcacctcagcctatttctgatactgatttctaatttaatttcattgtggatagaaaatatgttttatatgacttgactcctcttaatatttttatggcctacaatatggtttattttgataagtgctctgtgaaaacttgaaaataatgtgtattctgttgttatgagtagttttctataaatgtctatttgatttagttggttgtgtttaagtcttctatatacttactattttcctgtctaattgttctgtcaattatcaaaagaaggatttgaaatctccaaatataattggaagttgtggttctgtcagtctttgctccatgtattttaagcttctgttaatgggaacaaagatgtttagggttgttatgtcctactgatgaactgacccctttataataataataataataataataataataataataattctcttggccagatgtgggtggctcacatctgtaatcccagcactttgggaggctgagtcaggaggattgcttaaagccaggagtttgagactagcctgggcaacaaagtgagacttcaactctacacaaaataaaaaaagtcgagtgtggtcgagcgtgtgtggtcccagctacttgggaggctgaggcaggaggatcccttgagcccaggagttagaggctgcagtgagctacgattgcaccatggcattccagcctaagtgacagactgagaccctgtctctggaaaagaaacccgatcctcttcatccttagtgatattcttttccctgcaattaattttctttggaatttccttgccctaaaatctatttgtctactcagttttcttttgtgtgagcatggtatgatggtgtatctggtatatctttttgttattgttttactgccactggggtaatcacaggactcacctggttttgtctcctgtctctcaaggattactgtcctttgcctgaggtccagcgtcgccagcctgggcgacagagcgagagcccgtctcagaaaaacccccaagtcccccacctcagttcaaagacctctcctttttcctccgctgtcacggtacaggaaacaatgtgtagtttccactacctggaagactcgacttgctctccgagaaccagttccccgacagggttcctagagcgcaggctgcacggcacagccccaacattccctgctgcttgtgaatcttcgcatcgccctcccaggggtcaggaatgtgtgcttcggtgtctccagagcctagcaccaccccatgactcagctggcgctcggagggtccttccatctgccgccgctggggccttcgctacttccccctcgctcctactggctggcccacccggctgcccaggctcggaagcccaggatcccagtcacgcgtctccccttagtccccgcctccagccacgccccccacacccctccgtcggccccgcctccagctcctgctcgctctcctagtccttcctcggccccacctccagccacgccccccacgtgcgccatcagccccgcccccagctctcgctcgccctcccgagtcctccctcggcccggtccccgcctctagctcccccttgccctccagggtccttctcggccccgcctcctgccgcgcccccaacgctgctccgtcggcccccgcctccggtcccgcccccatgctcctcccatttggtcctgtcttctgcactggcggaggtcgcggcgggcctcggagaggagacgccgacgtcagcgcgccggggcggggctggcggcaggagacgccgcgttgagagcttgggctcctccgtgagccgccggcgcgcttcgctgcctggcggcctttccccgagccgagcccgcttcccgaggccgccagtcgtcgcctgcccgcgcctgcgcagcgtcccgggccgagagggccacggcggcggccatggcgcaccgctgtttgcggctgtggggccggggcggctgctggccccgcggcctacagcagctcctcgtgcctggcggcgtgggcccgggcgagcagccctgcctccggacggtgagtcctacctgggcgcccggcgccctccaccctgcctcgggcccacttccggctcgggagagcggacgtcaaggtcactggcccccgccctccggccgcacgcgggccgtccctgccgagggcctgggcgccctgcgctgtctctcagccggccccgggagcgccgattcgcgctcagccctgcctgtgggattcaagttttgaaaacgcgcagcttcagtagagccgggttttcgcgcttcaccggggcggttgaagcctcgaaggtcatgttggcttggtggccgtccttgtccccgctttcgtgtccccggagcacggaacgaaggcgtctgtaattttgagtcagcagcacgagcacgatgtagtcgcaaggacgggttttggagtcgggctgcctaacctctccgagtctccgtgttcccgtctgttgaatggggccattgcgggcattccaggactggcagtattagctattattattaagaatgtcaccttttcatagcagggactctgtgttcgttgcatatcagggcctgctctcagcaggaggctctttctctgttggtagccatccctctagatacacacacgggacctgatacgtgtttctgacataatgatagagtgttgacagaaccatggccgtgatcagtctcaatgaaaggttcacgtgtcgaatagtcgctctcactgtttaagtgacacggttcctcagccttgcactggtgtacgggtggtggttgaggtccccgggtcggccacgggaacctggcttggcctcctgctatcccagcgcccttgtagtcagctcaacgtcttcactg

SEQ ID NO: 7684 - DNA, 6000 bp, Homo sapiens
cacttacacctatgtggtccttcttcccaactagatactcaactcttctaggtcagaggctgtgtcatacacacctgcatccccagcacctgcatggtgcccggcgcgtggtacatactcatcgaatgagagctgaataagtgaggaaatgaatggataaatcttcattatcctttatgcaatgcatgagattggtgtgaggatgaagaggcaaatgtatttggaaattaacagagggctgacaggaagtcaggaacaggggccaagtgcagtggctcacacctgtgatctcagcactttgagaagtcaaggcggcagatcacttgagttcaggagttcaagaccagcctgggcaacatggcaaaaccctatcactacagaaaatacagtaattagctgggcatggtggcacatccatgtagtcccagctactcgggaggctgaggcaggaggattggtggagcctgagaggtcgacgcagtagtgagccaagtttgcactgctgcattccagcctgggtgacacagtgagactgtgtctcaaaaagcaaaagaagatacttccgtttccggcacctcttctttcttgccgtgccgatagcgctcacgcaagcatggttaacgtccctaaaacccaccagactttctgtaagaagtgtggcaagcaccaaccccacaaagtgacacagtacaagaagggcaaggattctctgtatgcccagggaaagtggcgttataacaggaagcagagtggctatggtgggcagactaagccgattttccagaaaaaggctaaaactacaaagaatactgtgctaaggcttgagtgcgttgagcccaactgcagatccaagagaatgctggctattaaaagatgcaagcattttgaactgggaggagataagaagagaaagggccaagtgatcccgttctaagtgtcatcttttattatgaagacaataaaaatctcaaggagagtcttactgagcaccagctctgtgccaatcgttactgtggggctttttgtgcaagtggaggtgttctacaaatggatttcaaaatatttccttgaagactgaaaagtgggcccaaatgggaaatgtagactggaaatgtgcttcctttggctttatgggtgggaggtacatttgagtccttggctggtcctctttaggctgggtggcatggctttagtgagccctgtcagtcatgctcatatgtcaaatacactctcctaattcactggggtagctcagatattggagcagttacacaattgtttatatatcagactaaaataagattgcctcgtacttccgtgagaaaatatgcaatcaagaggcaggccctcatcttccctccaccaggctatggcctccctacagctgtgcctgctgtctcgccattctggccaaggtcaccctctcctctagtgctcaggatccgccccctgcctgctcaggaatgtgtgtccatctccgctgcactgtgacctgttgaccgagcccacgctttctgctggatactctcatccacaaacaagttacctacccacgaggtcttttccaaaaaggcaggccccactcactccctatccactccccctccacaccttctcacatcaaaatactccctatgcactccccctccacaccttctcacatcaaaacttctgaaagccctcgccatgtcttcatctcacttctatgtagaataattaaaaagtcgaatccttaggaagagaggagaagggtggctgccagggcctggggtggggtcctggggcaatgctggtcaaaggccatgaagtttcagggttacaggaggagtaagttctgcaggcccgaggtacagcatggtgactgtagctaatcatgtgttgtatgcttgaaatgtgcaaagagaagggcaggggatggtggctcacgcctgtaatcccagcactttgggaggccgaggtgggtggattgcctaagctcaggagttcgagatcagcctgggaaacacagtgaaaccccatctctactaaaacataaaaacttagccgggcatggcggcgtgcgcctgtagtcccagctacttgagaggctgaggcaggagaattgcttatacctgggaggcagaggttgcagtgagccaagatggtgccactgcactccagcctgggcaacagagggagagcccatctcaaacacaaaacaaaacaaaacaaaagaaaaagaaaaagaaaaggaaatgtgcaaagagagcagatctgaagtgttctcaccacacacacagaaaggcaactgcaggccgatgggtatgttcagtagattggctgcagtcagcagtccactgtgagtatacacacaaaacatcatatacaccttaaatatatacaatatttatttaaaatttaaatgtaaatgtttcataagagcttgtccatgcttgctgtctcctctcctcacttcccatttcctcctcaagcagctcccaccaggcacccacctctaccactgtcccgtctcccctctggcccctacaacccgtggagaggatcctttaaagcctgaatcaggtcatgtcatcctagtcctgactcctcatcgttcttacaggaaagtcttaagtgctatcatggcctctgtagagccactgaacttctcagatccccatctataaatggggtctgtaaggtgacttcacacatgtgctgagaagattaaatgtcgagatatgtacagcactgagaacattcatcatggctggcacataggaaacccactgtggattcttaccattgcttccactgcagatttcagcaaagacatttgtgagttaccttccaaccccagcattttctatgtcagaatggggcagtcctgcaaacacaaaagacagatccccggccctgtctcttcttcctgtccccttctgtttccccattgcatctcctttccccttgctctgcctcccaagcctcccccaccctctcactctttctctctctctgcctctttagcttttccatgagagggacaagcactggggaggaagttgtatttgtgaaagtgaccgagttgtatacgattgtgtgagaagagaagaaagggtgcatacagaagccctttgaatgctccctaaaattccccttttccatcgtatctcttgggatgagagagagactgggctggtgacggaatggtggcgcagttgtaacatggtcatcagagttcatctaccagcatctccacttacaagtttgctttccaatgatcaccagctgaatgggtttccctacagcaaagatatttcttttaaaataccactatttcaagagtgtttggacagggttataacaaaaaccataggtattggcatatggttttagatttccctgagcactgttacaaacctagtctgaattctcacaacagcccgctttacaccaggcaatggagtcctagaggcctggcactcagaactctgaccgcgtgtcttctggttctaaactctgtcatttctactctgctccttccaagagatttttgcccccttttctctaaaaattggagagagatgagcccccaaaatggaagaactaaaatagcaatagctactctctttgcagggcttagccaaacccctaggcaaccttccccctgctggaagtctctccctgtccctcccaatcagagtggcccaggtcccacccaggggactggccgaggctcgcctcctccagacagtgttcccattgtctgcagcctgcctgatgtcccactccccagggctggccaccggttttcccaatcagctaatcagatccacagatctctgacaaagggcctctgcttctgcaagtacaagggctaaggacgagttgtctctacttttccagataatacagtagctttctggaggcaatgccttgcttttctctgttatctcaactacatgactgaagagggaaagaggcctgtggaacgccgggtttcagctgcagggcatgttgcggaggcacacacctactcagaaacagtcgaagtctgggatgatcctgggtccatgagttcctggggacaacacgctttgcctcagtgacaggccaggaaaagccactttataaaattgtgtttacccgcctggcaaattcaactcaggtctctctctttggtcttttccagaccacccacgtgtgaacactttttagcttggggcggaagctcacatttcagaaacagccactggtttggccccagccccaaaaacccaggaccatctggaaacttggcccaattccacacttcaacattcctgttgctgtgactgacaccaacagtagcccttccctgcaggccccggcaggcagaaaacacacagcattgcaccctaaaatggaagaattttgctttgaatgatggctcttatctatggcggtttctgtgaagtttttggacggagaagcattggcagaacacagggtttttttcttgtctggacccatgcgtcatatgtgcacttgagcacacagttccctcactctcattgtttagtcttgtgaaatagggataatggggctattcccttcttcttaatgaaactaatgagccaaatatttgcaagatatatcaagaagtttgctagaagttttaaaacaaattcttccaaaaccattttctcaaaaacctgatttatttaattccttagttctttttggaaataaatgcaactctaaagtggcatttaaaaagagcaagatgacaattccataatctgctagaaacattgtcataaacattggaagtaaccttgactagctgagctcatggaaattatgtcttcatctgcctgtgtctttccatttctctaacttcacattaccagaaatgcacagttcatgtgggatgacatttattcaaggtaatgataacaatctagctgtatctccggtgatgcatgtgttccggcccttcccggcccaaggtccacttgcttgcttttctctccgagctcattccttctcattcattttgcccagaaagttcctgcttcagagctgaaggtaagtacattttccactaattcctcagcttgctaagtgcttttggaccatgaatagagcagctaggaacaaatctgagaagaggtactattcagaattcctccaaatagctcatctttttaattatgggctttcatccttcctaagggagtttattatttttctaattaaactactacaatgaaggctattacctttttgtctagctaaaacaatcttccctattaatgaatttattggcttctctagtactcttcaaattgtcattgagctctattcaaggactacagccagttttttcctaatagaattaggggtgaaacaaatcatgcttctattatcacttctggagttagccccttcacctgatcagcttgtctaggtgtaagagtgcgggggttttagcgccacaaagacgtgggcatgcggcagcttcctgaacctcaggcattggtgtctaagcaactccaccatccacacgtgtgacgttacagttctgggagatgcacgcacactttctgtgcctttctcaaccactagctcagtcagcctccaccttcctaggcagcaacacggggtgcaggataaacaataactaaaagcatactgattatcacatactcctgcaaagtgtttgcacccagaaagcatgcagtcactgccatcatgaggggctcacaccttcctttggctggctctgtcggggggcacatgttacctagaaaagaggcccaggcattcgattaaacagctcttcttcatatttcagtttgtctaagctgccttcagataactgtccccattcttcacttacacacacacactcatacacacacatatacacacatacacgtgcacacttgtaaacatacatacatacatgcatgcaaaaagtccaaaagggataggaatgggaaaggggtacaaaggggtccagagagtacagccttg

SEQ ID NO: 7685 - DNA, 6000 bp, Homo sapiens
gtttacccatgtaaaatggagggaacagcaatttataggattgtagtgagatttaggagtaatgtctgtaatacacatagtacactagcctggcaaatagtgggcgctcaataatggagatgttataatctcttttcagcttttatacctttaagtttctaaaaatgttgcattcagacattcatacacacacacacacacacacacacgttaaaatatgaacaggaagaaaagcaaaaggaaaatatcaacatattaataatgactagtttcagatgaaccactgtacaaacaaaaaataaaataaactttaaaaaataactgcagggtcataataatttttagcatccaggtaataactaataaatgtattcatctcatgttcccctcttctcctgaccagatgtgagcatggttaggcttttgtttgaagtatttacacctttgatcttgacatttttataattcatatatatgtgcctaaagaagactgtattgctttatgtgtttcctctaaaagtattatctcttatgtgtcattctgtatcttgcttttttcatgtaacacgatgtttttgaaatctcatcatgctgctacaagtgtatctaattaattccttctaattgttatattgtattatatgaatataccataatttgtttattccacttttgatgggcatttaggctattttaattttttcactcttacaagcaatgccacaatgaatagtcttgcatgtctctctccagtgcacatcggtgttttttttcagaaagaactcttagaatctcttggaagattgtgcatgtgttaagctgtaataaacactatcaattgcccttcaaaacgactatccttgttctctagaactttgctcacacttaattgaatcaagctttaaagtgttctccaatctgatggataaagaatcatactgcttgaagttttttattttgaaataattattgattaataggaagttcaaagatagtacagagaggtcccttgccccttttactcagtttctttcaatggctacatctaatataattatagtacaatatcacaccagaaaatcgacattggtatacagtatgtatagttctatgtcattttactatacacgcagatccatggaaacataaccataattaagatatggaactatctcatccccccaaagatctccctcttgctaccccttgataggcagacctgcccgtccccaccaactctaactacttatctgttctccatccctataattgtgtcattttcatatgattatataaacacaatcagacagtgtgtgacctttggagactgttttttttcactcagaataatacccttgagatccagctaaggtgttgcatttaccgatatttttttcccctttattgctgagttaaatcagcaataaatcatggtaggcattactgcagtttgtccaatccttcacctatcatagggcattttggttgtttccagtttggagatatcacaaataaagctgctatgagcaccatgtgcaggtttttgtgggaacacaagtttttgtttctctgggaaatgccaggggtgcagtgagggctaggtcacatcataagcatatgtttagttttttaagaaacgggcacaccattttccagagtggttgtatcattttatattccctccagtgatgtgtgagagatcaatttctccacatttttgccaccatttggtgttgccactaagtcttattttagctgttctaattagtgtgtggtggtattgtttgctggtcttaattcacatttccctaaatgccagtgatgctgaacaacttttcatgagcttatttgccatctgtatgtctactttgtaaagtgtcttttcatatcttttgctcattttataattggattgttcgtgtttcttttacagttgatatttgaatgtcctttataaatctgtgtattctagatatgagtccttacatagcgggtgagagttcaggctccccaagtggtcctgatgaaggacatgaaagtggttcattaccaccaggaggggacaaagtccagaccagactcctcccttggccttctctgacatcacctcaacaaggtgtattagtctgttctgacactgctaataaacatacctgagactgggtaatttataaaggaaagaggattaattgactcacagttcagcattgatggagaggcctcaggaaacttacaatcatggtggaagagaaagcaaacacatccctcttcacatggcagcaggaaggagaagtgctgagcaaagggcaaaagccccttataaaaccatcagatctcatgagaactcactttcacaaaaacagcatgggagtaactgcccccatgatccagtcacctcccactggatccctccattggggactacagtgcaagatgatatttgaatggggacacaaacaatcatatcacgggggaagggttgtggggaagcaaggggtgctcagtagagcttgtccagagtggaagtttaagttaccctcttgcactttgctggtagagatggagtgggccacagtttttttctgtggtgtctgctgggaaagatcagttcatgcctaagagttttctgtcttgctagcctgcccctcttatgggcttttgaccagagagacaggctttccctgctctgtgtctatggcatttactggttgcccacttctttagcatctcgtctttgggacaaaaataaaacccacggaactcaccaccatattgtttcttgggttttgagatctctagctggtctaccttcttctctccactgttcagtcttctcatgttgttttatatctactgtccagggtttttagctgtacttagcaggagaaatggggggaaatacttctacttcatctttccagaagtagaatgcataccctattgttctaatttgcttttttttaattagtgaagttgagtatcattttatctgttcactggacattttatttccctcctctagaattgcctgtctcttcgtacatacttttgtctactgtttctactcaattaactatatttttattaatgatttgtagttcttttgttttttcttttgagacaaagtcttgctctgttgcccaggctggagtgcagtggtgcaatctcagctgactgcaacctccacctcccaggttcaagagattctcctacctcaacctcttgggtagctgggattacaagcgtccaccaccacacctggctcatttttgtaattttagtagagtcggggattcaccatgttggtcaggctggccttgaactcctgacttcaagtgatcctcttgccttggcctcccaaggtgctgggattatagacatgagccaccgcacccagcctagttctttatatattctgaatattattcctttgtcaatttatatgttgcatatattttccaaatctgttacttattttgcttataacggttttgtcacccagaggcctttaaattctaatgcagtcagcttgttgtcttttaataatgaaaatataagaactatacaaatatgcgggcggaagatggcaaagggagctggtgcttgtgcaagttgttgaggtgtgctctgtggaatgatggctgtcacagacactgtcaagcaggaggttgccctggctgtgcacatgctgcaaagcatgcatgtgaacgtgattctgatcacgggggacaactggaagacagtcagagcctttgccacccaggttggcatcaacaaagtctttgcagaggtgttgccttcacacaaggtgaccaaggttcaggagctcctgaatgaagggaagaaagtcgccatggtgggggacggggtcaatgattccctggccttggcccaggcagacttgggcattgccactggcactggcacggatgtggtcatcgaggcagccaacgtcatcctcatcaaaaatgatttgctggatgtggtggctagcattcatatttccaagatgactgtccagaggatatgcatcaaactggtcctggcgctgatttataacctagtgggcatacccattgctgcaggagcaagctttccagatgagttgaagatatgtgcatgggcgggagatgatgacttattgcagggcaaggcgtcatccgtgttgaaggagtgccagtgtttcagaaatggacacagagcaggtaagtttgatggacaggtaagagaatcactctctatgtgccagcactgttctaagagtcctggatcttctggggatgagattagcgtttttcagttgtacatgggacagctgaggctcatgctagggagtggtgagccctttcctggaagaagttaatctaaaaagcataatctgtctcatttgggaggagctaaataaatatctcttcaatgaagcaaaggtcaatcagaaaatttgtattttagctataaaattacctatcagaatttaccatagggcataatcttagtcaagcacccaaattcattatttcagccacagatactgaaacaccaaagggataagggggcaggtatttcagttagctactgctgcataacaaatgaccccaaagcttagtgacttaaaacaatgatttgttattccttatcattctgtcagctgggaggttcttctgcccgccccacctggggtcatgcacaaggctacatttagctagggtgtcagcttgggatgggcatagctgggatgctgggtcacctgagtctttctcaccatgtggtactgttttaaaatataggttttagcgcttcctcaggatgtaaagtgtaacaaaggtaccggggtgggcagtgtgggtctgtgaggcctacgggtgcccgcgtcccctaactccccccgcagccggctccgcagtggtacgctccggttgcccgttagggattcaggttccaaacggaatgctgcgtcttctccagcgtttgttgtggccgaggttactgcagcaaccgccagagcagccttggcgctacggaggagcctagggctaaccctcagccatacctggggctggtcctggagttgctacgcagggttgtggcagcactgactgaaggtatgagacccgattctcatccttatggttttccatgggaattggtgatacgtgcagctgttgctggattttttgctgttctcttcttgtggagaagttttagatcagttacgagtcggctttatgtgagaagagagaaaaagtttgctgtggcactttctggactaattgaagaaaaatgtaaactacttgaaaaatttagccttgttcaaaaagagtatgaaggctatgaagtagagtcatctttaaagaatgccagctttgagaaggaggcaacagaagcacaaagtttggaggcaacctgcgaaaagctgaacaggttcaattctgaacttgtgcatgaaatactctgtctagaaaaagagttaaaagaagagaaatctaaacattctgaacaaaatgaattgatggcggatatttccaaaaggatacagtcgctagaagatgagtcaaaatccctcaaatcacaagtagctgaagccaaaatgaccttcaagagatttcaagcgaatgaagaacggttggagatagaaatacaagatgcttggaaagaaaattctgaacttcaggaaagccagaaacagcttttgcaagaagctgaagtatggaaagaacaagtgagtgaacttattaaacagaaaagaacatttgaagactccaaagtacatgcagaacaagttctaaatgataaagaaaatcacatcaagactctgactgaacgcttgctaaagatgaaagatggggttgctatgcttgaagaagatgtaacggatgatgataacttggaattagaaatgaacagtgaatcggaagatggtgcttacttagataatcctccaaaaggagctttgaagaaactgattcatgctgctaagttaaatgcttccttaaaaacctt

SEQ ID NO: 7686 - DNA, 6000 bp, Homo sapiens
taaatttgcaaaaacacagaacagataatcatctattccatttcagatgatgaaaacagagctcaaagaggtcaagggtctacagccaacagaaggtaaatgatcgagccaagactgccaaatcttacccttctccttccactacacaatggtattatcaacaaaatcattaccatcactttatcatcatcatcatcaacaccaacacagtaagaaatttcacaggacatatattcccataactacagcttatattttaaaagagagataaggtagcatcaaaacaccagtgaatgagtcaatatattacctagttataactgtagagtatcacataggcttccggttgttatgggttttttaagtgactagaaccaagcaagtttgcgaagagcagatttcatgaaggagataaatactgaggagtgtttgaagaagaatcagaaaatcctgtggcagtgagagaagggaaagggattgaggataaaagaatcacctaagttggctccaaggtggggcctgacaaggtgtggtcgcagcatactccctgcagcaaaaatacaggccaaagtgaggcaagagataagaacacccaggaaaggtaaaaccagtaatgccaagacttgacacttctaagtccctgtgaatttcagatgtgctttcctgattgtatgaatgtgaaaaaaaaaaaaaaaaagcacagaggttaaagagaaggatgtatgatcacttaggaaggaaaaaaagaaagcatctgaattattagaaaggtcatcgaaggccattcctaaataacttgactgttgagatcagtcatttctttttgtggtcacagattatggccacttctgcttctttaaaaagtgttctgtttctagcattattctgaaagcattttttttaaccacctagttttttggcctactctgccagtcataccccatgtgtacagaattttaaacaccttttctgtccttgaagctggaaacatctttgtcagtctgctaaaaatatgggtactctgagcccttctgtaatgatcactgtgtagatgacagaggttgctgagtgagagtggtcaccaaaatgttggcttagcttttaatatattcaaatttaatttaaattctaaaacaattactagtacaggctacacttagactgttaaccatttcaaacattttgtccaacccattaaatcccgaagtcctttgcttcccggagaactgattgtctactatggacgtctgagctgtttttttaaatgcccaaccagactctgagctgtcatattagctgggtaagagataaggtgtaagaaaagtatccagtcatccaaccacatttctggttttttgtaccagcttcagatgaaatacagtcactcaataaagtccttctgttttctctttccctccctctcgttctctctccttatttgcctagtgaggggaaccctaaaccctttggagcttttccagcagctccaaaataatctcttgattattttcccagggaattcctgccttaaatgtcagcagagtacaactaccccaccaaagcagtccgcctggatctgaatcaagaaaaatgtgcctgctacaccaaacataaaaacctggatctgtggggcgtggggcacagagagagatttatggtgtttgtgaaaggttcaacaaccattggaaagataggttttctccaatttacctcactaaggagcaggaagctaagttaaacactctgattccttgctgtatttgatcattatttttatttcactctttcggtggtgaactctatttctggaagccatcctgaattataaccataaggtaaagcttccttgaaaaaggaacaaagccccattaagcccttcgtcgtgatggttgtggttgcggctgctgctgctgttgttgttctgtttatttgtttgtttttaatgaacatactgatatataagtgctctgggggaattcatgatgctgagattcatgaaaagcaaagtaagatttatgagttgcgattgaatctgcccctaccagcctggagacacttcccgtctggtactgaggcattgctggcatgtttagtgcttttgtttcagttttcaatctctgaacacatgaagaaatattaaaagttctgagggcaaggatgggagaaggagtccacaaatcccaaagatatacaacagcacccaaggaaaatagtatggcatagtagattaaaaattcagaaacaacaacaaaaaaagcgtgtcaattagctagtgtttgctaagtacttgtcattttcacttacgcttctctctggttcctcatgtgttactgacccacaacttcgcaaggctattgaactaaagattcacaaggtggtctggcataaagaccaattttaaatcaatatgccatgtaactatcctcccccaaaagttcgtaacactatacaatgagaaagtcaagaaaatataataaattgttattcaattttttaatgaattgcgcccttttaaacataccagtggtgtggggggtggggggcagttagattccaactctcacttggatccaggtccacatcaaaacatttcaatgtagaaggtattactcatgttcaccagagcttcccacctcctggtggtccaccaccactacaagcacattatagctgctttccttcattatcgcattctgcatacaaagccacagacaatcgtgtgggaaatttctgcccctagtccaaagaaaagccagataagtagctgattattgcatagagctgacagtatcacaggaagatcagtagtagcagctcaagtacaaaaaggttaattagcaatacttaataagaaaaactacctctggcaggtgaagagttaatccctggtcaattttaagctactctgctgagagtactaataagtgtaggggttggagccaatgagggtgaccccttccttgatgggaacagtcatcccttaggaactgccctggaaagcatcagccagccagaaaacagggaaagaggctgagaaaccgtggtaaccaagttttgctggcactttgtaaaatggtaactgcaactgccgaggctgtgcagagaatgctaataagcctaggacaacctgtaaagagtggacctagaaaatgtccacccaccgaccagaccggtagccctaaagagccccactctgtagattcctgaggatctgcccaccgtactcattcacaaggaagcccctaaacatggctacattgtgccttagcttcacagccctcaaaatacttctgactcaaatgtcttagggtcagagtaatgacatttagcacatctgcctagaaactcacagttttccaatttgtaacaaacattttgcaccttttaaaaatctcattctaaaatccaaatggtaaacagctttaagaatcaatatgaaatgttttaagtgttctctgtggcttcatataaattctccctgcccctctcatcagaatttattctgactttcagggagcatattaaaggtagaaaccactgatgtacaataataagtgtgcaaccatattcttaagaatctaaattcaatcttggttagctgagaatgcttgaaacagtaataaagtgctcctctgaaagtcacactcaaattttgaattcctctttctaatgagagctcttcacccattcccatgtctcaagtacgcaaatgaaaacaaaacaaaaaaactgtaactgggatttaaaagtataacagtctttcttctctcatgtatttctttcttgtcatacttcattctggaaaaaaataatccaatctgaaatataaagtgggaaaagggaggcatccgtaggtaatgtgagttattatcattgttctagatgttgggttgagtggtgggttcatagatgttcattacattatttaaaagccattataattaactattagaaaataagagggccatacatgcacgagtgatgacagagtgtcataaatcaggaattctgattattccaatcccatgcacctaagatctgtttaaagaaaaaataataatgagatggtgatgcaggtagctaatggttagacccttctagagttcaccaaactccttcggcagggacgtcttcataagcatgcagcctgcgcagctgcacaaggtcctgcctttaggagcacccagcctttatttatgctctgctgtcgcaatcttgaaatttaaatagtgttttaccaaggtgtcctgcattcattttgcactgggaccagtaaattataaaatcagtcctgtccctaagtttccagaggttaaatttacctacagttccccataatttcgtccccatccaactttgatattttttaagtttgctacttcttatccccagattattaatgtaacagtcaggtgagcaccctagagcagtcttttttcctgtatttcctatgtttccttatttttattgtccaaatcagtgctgcctgtgctataaatggagctgcagttatatattgttcttataatgcttcttctcagatcaaaaacttcaaacagaattcattggctaaaaactaaatgcactgaagtctctatctaaattcatgttaactgctggattatacaaattcattttctaataattgcccaatttcaactacaacatataaccaaacaagacaaattctgaacaattcttcatggtagaaagaattcaaataaagatttaaggaaatcctcattttcaaaaattactgtctcaaaaaaaaaaaaattaagtaaatgtttttgcattcctgaaatgccctgtgtctacagtgatcaggtacagaaaagctacttcaagttcaaatataacttagcgattgccacatggtgcagaatctttccacccctaacactccaaaaacccaatcagacaagtggccgtaatctgactcccagcacacagggagctgcggggcaggcaatgagagctgcactctggctggggaaggcatgagtgacagacccacagcaaggcggtgggggtaagtccttctttgccttaagggaacaacgcttagggccaaaagatgaaactgtctcttttattatagatgtttgtgccttcttaggcagaatctggaaggcagctatagggcaggtgggtggttcttttagatctgagtactgggcattttcagaagagaggcatagagaaggtagaagaaaagggatgctttttagccaaatcctccatatgtttcagatctgcaaaagcccaggaaaattaccctatggaggtgaatctagctatagtacatttcttcggaaaaattactcacccagacgctcagctgtcctggagtggatgaagctgagtgttcagctagaaagtaatgtgtccgattcagtacatcaacaaacccgctttgttctggggcaaaagaagcaaatctaattgtgttgatcatttccagtgactgtgaacatataagggaacactgacaataaaagcagggtgctatgggtgacgctagggtgagccctcataaggccagagatatgtatatgctgccagcaaacttcacggttcacagccaagtgaggctggtccatctgccttggaagaagatcagatttttgtggatttaaaaaaaaaaaaaagctaaaaacattcttaaagagcatgtttatgttttgtgttggtgttttgcactgttttaaatttctctggttgatgaatatttgaagctgaaagagcaactacctctggagaggtaaacaggtgcatgacaggccaagcagggagagaactccggaaatggcagaagtgagaggtgaagggggtgagcagcggggctggccttttctgggtcccacctcttctggtgtctcctgcggggctgaaaaggacgtttcctgcccacctagcttccttagcctactgttttgtcctcctccttctcccctaaccctgaccacaaacgacagcacctatgatcgcattttgccc

SEQ ID NO: 7687 - DNA, 6000 bp, Homo sapiens
tataatttctttctacagaagcacatttatatttccacattttatctatttccaatttaggttttgctatatataaacattatcttataaaagatttcattgtttaggatttagaggtaactgttaggaaaggttttgttttatattgtttcaaaaggaaatttatacttgcttagtttaagaaattacatgcataacttcccaagcaactttgattttcctaaaataactgcaagcatttcttattcaatcaaccaatcaatatatatttattgacctgctctatttaccaagactattaggtgctgaccattctaagttatttgaccttgaattattgctttactggggcagctgatatataataataatggcaacacatcttgtttcatttttatttacttacaattatctcttagtttttctgttttaccaatattatttttcatacaatttaaaatttataattctttaggagtcatagttcttcctcatttactattaatcctatgctctttccataaggcatttttccttttgcattctgctttttctccccaatattcttctgaacacttaatttgtgctttagttatagatatttggtccttgatttgttcttgatttttaagaaaataattccttccttaaaaaaggttagagacagagtcaaatctttttttaattatgtcttcgtcacacaataattttgatcaaccccaaatcataaaatttgctataccatgcttgctatggcaggaggtaaatcattatgtttccagatctctccttgactggaaaatcttaatgctttctcctttttcctgtttattcctgatgttacaatgatttcttcttaaattttagaaaggaatttctactttgtacaatgccacattctgtatcctatagatcgacttctggtaatcaggcctttgtttctctcttgtattcacatttttttattgtcaatttcttctactgaagaaatcagccttttatttcctgattagaattcactttaaatgtcactacacagataaatcaatatgtgaaggtgaaaatgacttgaagagctttgtcaaggtaagtgttctatatcagacgttatgggatttttgaaaccagaaggatccttagggcttatggagttcaatgacctcatgcactgcagatgaggaaactgagcccaggaagagaagacttgcccaacttaacgtgaacaaatcctgttctccaagactctttctatttcatagcactaatgcaaggaagctttctaaaagtgattttaaatttttaatagttgtttttatttttcttcccagcaatatctggatacggtgggttttatcttctctttcaagagttctattactcttttcttctggttcagtgggccggcttgtgttcacttgaccaggaatcaacataaatcgcattctatcatttttttctagttttactcgtatgctgcaaaataaaagcaagataagataaagggaaactactgtagctactggactatcctctattgacttgtgtaaaaatatctcttcccagataaataaaaccctgctttccctcaaaaaatagttggaggcataaataagaaggttcagaggtatttgcaacacccacatgacctggcatattgtgctaaatgcatttctgctgaattttgactttggccattaattaagccaagtcatcattaacaccggcataattagagaaaagcataaactcaaaaatagcaagaagtatcccttagcagtgtcatgctgataccttaaattagttttgttttgttttgttttgtttttgtttgtttgtttgtttttggtacataaggaaaccaggaaaatatcctttcttactcttttcctacctctctaccccaggtcaccttacacacatttttcatctctatgagcagctcactgaagtcattctttatactactagttatactttcaaagttaagtttaactttattgttgtgcttagcctagcggtatcagcattgtatgccttttccaaataaacctgagaatgatgaagtcttccttctatgaaggcacttttgctattgaatgtaccttgagatttgatgcagaaaccacgtttatggaccataattgttaccaacctattcattaaaggatcaacaatacataagcttcacacttgcccagaaacagtcaatagttaaacattttaagaaattgaaagaactaaacaaaattaatagactggagagtttagaaacatgctgttaatcaatgttttagaaataattcactgtgtaaaattaaattagtttaactacaaaattaaaaggtaatattttcacataacaatataactcccaatcaaatggcatgagaacatgcatcttatactggtgcttggtatacattttaggtaattttttgatcctttattcatcaaccttggatattaacaatattcaattttctataatagtaattcttcaaatttttaaaatcagttttaaacagaggtctaggaatgaaagacagccacagttctaaatatttgatttgctgtgatagataagtgaataaaatagattctaaagactggaaaccccataatggactagcaatgcctagtagctcatcaatcaagcaaattcaataagttgatctgatcatgcccaattcccccgttagctactaaaacttttcaatttatgcccattttaagcatagaactatattcaaatacagttctaatgatattcttgctcaacttctgaaaggcacaggctaaaaaatttgcatgttttgcaacagcctagaagtagagttcatgtattatcaggttggcctgaatttcctcactgctgtgatataatggatagtaccaactccaagaattcatagaacatggatggatacacagggaaccaaaccaagagcgagtaagttaaatggttagttcattcaaggagcgctcatcaattgcctaccaggcatgtgtcagttaaatacagctcagggaacactagcttgtttctttcaactcaggaaacatttattctattggagaatgaggattttccccatatgaaggactgactctgggttaaaagttaataacaaatcagcaagttgtattacaatggtttgcttgtggaatgatttgtttactctttttcaattttccaaattttcaatagtgtgtttatatggcattgataactttaaaactcctttacaattaagctgaaataaaaagaaatctataaaacaaaaaaaccccagcaaatatacaaattttaaaaattaaactcttatgtctattcaagtcctttgcccatttgtatcaggttatttgactttttgttgctgagttataggagctctttatatattctggatattaatcatatcagagatctaacattgtcaaattcatagaagcaaaaggtaggatggtaattaccaagtgctagaggggagaggaaaagggggagctgtttgatggacaaagtttcaggtttgcaagatgaagaaattctgaagatctattttaaagcaatgtgactgtatgttaacactactgaactgtacattaaaaatgataaaaatgtggtgtttaccccaatttttaaaaatgcatgaaaataaaacacttgtgacagaataataaatcagcttctgtttaaaaagaaacctgcatcaggcaaacaagtcctataatggtaattcttcaaagaaccaaagttcactactaccagatgtgttattactaaaccattaataagaataagacctactggaagtgcataaggctaatatttcagtttcagcaaaagcaacaacaaaattctaatgtcgtaataaggtaggtttaactagttaatgcttttaaaaaaatagttgagtttttctttgttaatttatagaaatcatctgaatgcaaaataagcaatcaaggattcatttatttttatttgccctagtttggtcaaattgttgatagaataatgtttagaactaatttttaaacctgaatgaaccatttttattttttcttttctctctctttctttctttcaagacaaggtcttgctctgttgcccaggctggagggcagtggcaggatcagagctcactgcagccttttactcctagcttcaagtgatcctcccgcctgggcctcccaaagcctggtgtttcctttaatgatttaaaaatgttattctagtgttggtctttgcaaagccctttaaaaccgccaacttcagcttgttcgattttgaaatgcgtggcctgagaaatctcctaggtcttgaacattataaatgggtactatgctcattttgagggagccctggtttacacaaacctgctgctgaacttagccgtacttacaacaagcactttattgatctattataattgatgtattaaaataaacaaacgaacatcacctcctgtctgtaaagcaaaacacattttgactttggagttaacgtttgcgacagccttctaacctatggacgtgttcctcagaactgggtttctagaaaagctaggagaagaccccagcgcaggggagaggagagggcgaattgggaaagaactgctagggtaatcacttcctcgactgggcatggggtggcacctgagccctggcacgcggggctgggagggcgagtcgccagcggaggcgaggccagaaagtcagaggaaagaggggaccagagagccacaaaggcagagctggagaaggcagggcgggcagcgggggcgagggagagaaaaagagggaggcggagctgcccgggcgggcgggggcgggggcgcgggcgggagcgggcgcggaggcggcgccgcagccccagccgggccggacgcgggagggtcagggccagggtgagcgcccgactccgagctgtccccgctcccggcgcggcgctccgctctcagccacctcacggctgccaggagtgcgcgggagtttgccccggagcgcggggaagtttcctccgaagctgcgctcctggaacagcagcacctgcaagcgcccggcagcggcccgcgaggtaaccgcgctggggctggggttggggctggggggcactggaggggcagagatgatggcgcgctgctgggtacccgcgccgggagcgggctctggtgggcggggacgtgcgccctcacctttccaggtgcttcgccgctggagatgcgggaggcttcttcctttttctatctcccctacctccagtattccaacccacttcccttcacttcagtggacgcatggcgggaggtggggggcgggagcaggaggggatcctgactttgagggggcgctggagaaggacggccgcctgaacttgtcagctacctgagtttccttcctgcgccccggcggggcaccctggactccaggattccggggtcagacccctcttggggcatgcagaggttggaaagaggacggcaggaacagtctttagtttctgctgccagtctgtcgggtcctccagggtgtgtggcagaaagacgagcatctctgctgcgggggtgcctcctttgcgtcagtctcaaactccgcgacctggctcaggctcaggcgcaggctgcgggagaggtgggagggaagttagggggaccgggaggccaggtgcgatcgtggccagagcagaggggttgggaggggcgatctgaggaggggctccaagtgggttgcggggagaaggaatggtgtgtttgtttctgctgctgttactttcacagggttgcctgctccctcttctgccccgtttgaacatcctgcctatcagcatgtttctgttagaaggtgttatggttgatgtctgtcaggagttatttccaactaagttcacaggtgctaagtctagagctgcaggccttcctcctttctctctctctgcggtccacccccagctccctcccacaaacatactgtgcctgaataatccccagcgttttgaaa

SEQ ID NO: 7688 - DNA, 6000 bp, Homo sapiens
gtgtcacacgtaagattattcagtcagccatagacctgggaagagaaaactggtctcctgaacccaagccaatactttatccattgcctcaattttcactggaggaaagggcacaatcaaatataagttcagatagtaaatatgttttgctatcctctaaatactgacagttgtgtttcagaactttcctgaagacagatcgttgcttttaaaaggacatgaaggcaaaagtttggcaccaagagttaccaaagtcttcagcatgatttgttttattttctcaagatttgtttatcttgtgaaataggctttctgtattttaagtgatccaaagtgctggtattccgctgtaagtatccatgcttctggtgcagaaggtagatttcttggatatcatggaaatcttattttctcaaatatagctgatctttaaacaagactcatgaaatcaactatgcaaacccgactctgggagcacacaggcagaaagcattcaagaaaccataaaagccaggaaaggtcctaagcaaaatggagttttagccctggtctcggtattatcaatttatgagttaattcaaatatgaattcattctcctacaccaaatcaatacattaatactgattatattgtttcctgtgaatactttgtctagacttatttttctgcacattacaaagccaccaaatttttatttcttttaccagtctgtagattatttacttagccattgcttttttacattagaggttttgtgttgttttgtaaaatttgaacctcccaaataaaattttgattaaaagcactttttttaattgcagacagcaactgggagaggtgaaagggtgttccctcagattcttaagtaactgtgctctgaatcctctgtggaaatcagcatacctaatacactatagataaaatgctaaggccctactgtgctctattgtgttcccatcagactttataaagaaatactgcattttcgagataaaagagccttagacatgttaagaaatttactcaaggtcatagagctaggtctacttgaatttatagccatatctgtttattatactatacccctctacattccagagtcagaatgggattctttttctgtttgtttgtttggtggggttccttgtaattcagggcctgcttatgaattactcgcctctgttgagttgctcatctggcaactttataactcacttatgtgaccatacatacttcaagttacttctttggttatattttccatgaaaatgttgattttgattttcaaatactgaaaaacaataggtaaataatatcttcaaacaagagtagatttttttaaaataaccaggtttttcttctaatattggatcagatcactacttctctgagcaccagatgaatggctatcttgtgtttagcagccaggttgtatcaaatatatggatctttaaatgccaaaatcataataaataacacaagataatcacactaagaaaagcatatgaaaactgagagcagtgaagagttatgtcctcaatttcacacatactttgaagaacaaaaaacttgagaaaaatagtagactaatccctagcatcattatattttcttctttaaaaagaaaaatctccctttcatcccatatagttgaatttttcaatgttaaaggaacttcccagaataagatagagagcataggtaagagtgggagtaaggggacctgggtcccattctgcattccctactttccagctggtggccttgtgtacctttttaagtctcagggtgtcccatctgtaaaatgaaggggttgcagagaccatctttaatgtttcatttagaacattctatgactctatgaaagggatattacccagggaaagtcagctttaatgtacactaaagctaattatggagaaaatgtaatttgaggggtactttctaagggagagggacaatcctagtttgctctgaagatggggagaggaggaagagtggagaagggggtcttcattcaacattgggaaggacactgcgctaggtgtcagagacaaagacaagtgtagggcctgtctttgcggtgtgtatctatagggggtagggaaggggaggtgggggagaggaggctctagattagactactactgctgagcatttatgtccaaagcaagaacccttgtacacaaacacccacatggtgaatttgtacatttagcatctcctgcctgacaaaacacaccagaacaaaaattattacgattttcgaaatgaatgcttagaaacaaatcatgatctctacacacatataaaaactacacatatataaaaatgaatgcttagaaatgaatcatcgtgacctctacatatatataaaaacgggccatgtgttcagagcacatcatttaatcaggtttccataacggtttgcagacctcttatagtcaacaggcatcactccataggtcagaaatgaaggattaggttgatttttgatgtgtgaatgcagtcatgttttatattattctatatttttttcttgtctccatccatccaacccctaataacacctggttgtttctctgggtcactgacaatcccctacatccctggagttctacaggctgatggaaaaccagtcttcagacaagtaatgctttgagcaggggctaaaaatctgcgagtttggtcatcagttgcccaggacagtgaatggccccgttagctaatcttaggtatggtattactgaggtaaagctgtgtttggatatcatagtcaacaccagatctactttcattaacatcaaatggatgcacaaagtctccaacagcatgattttagactagactattccttcttgtaatcagaggcctattatttattattagcaagatttggctgaccaggtgatcaacttaaagtgaggcaagatgctaaaacaattcacaaccactgaagagtgagaggcatgcaaattggacttttaaaacatgctgcaagtgcttacttaaaggatcaaaaactgttggaatcagagaattccttgactgacagccattccaaaggagattttgaaatcataagtgcttaatttataaaggacatgtttaaagcttcaagtaaatactactaacaagaaatagagttattcatgttgaaatttgttccacctttaaattaatcagaatggcaataaacatcaatgggtactgctaggagtgatgaggatacagtcgaaaccccacgacgagggtcgaagcttaaatcttagccatggagatgagatctctacatctcactctggaatacaacaaacatatccccatatctcaactgaatttttactattattttgcatgactcccagaaagcataatttataaatactctattgcaaagataacttttaggcggactagcaatagtgtgacaataatatctagcaaaaaaagaagagaaagggtaagaacaagcacttctgattactatattaagtgtttcatctcatcttttaaatttaattaacataacctttcttattcttttgaaaagaaagaaaatccaggaaaaattttgtttcataaaaaacttacaatattatgttttaattaaaattgaataagcctccctatgaatattaaatttttaaaagcctagccagcaacagtacattattaaaagctgtatcagttatgtcaagaaattagtagctggtttttaaaggttcatcatcagattcttaaatgatcggtatcttgaaactcaaataaagttaatatttcagtcacccaaagcagaaaagcaagcaataaaggcagaaaatattcattaactgcaatgaagttcaccgatctcccaagtgttgaaaagcttacataaaacggatatttctatttacttgtaaacctttcttaaaaaaggttccggaaaatttattacctcaccagaattagaaaaaacaaaaactgctccccatcccccgctccattccacaaatgcttgtgactcaaacttgtaaagtctctcactgtgttgcacttgaagttcatgccttaaaggaagccagcagaaatcctttacgtggtgagaattctgtatcagtcattttatcttttatataatcctattttctcaagttccggcttttagtttctctcttttttaaaaattgttgttaggggtggtaggagagggtaaaagtaccctgaaactgttggccccaaatgtgaacagtaccactaacaggtagtaatagaaatagaaaacgggagatttcaaataaaataacaaacatgcactctcaaactcccagaggggacaaaagaaaacaaaacaagaacacaaaaacttgggctgttccagtacatcctcaagggtgggagctgaaggtgcgagctccagagaggagccgcggcctccgccctcccccgcccgcaggtggctcccggcgagcgcctcagacaacaatagctaggatgagcttggcctgcgtccttagtttgctgtgtctgcccctgccaggaaagattacccatctccaaagaatgacaaaataaagaagcgtacgttaggctcccaaggagacaccgcccccccttccccaccattcttcatctccattagattccctaccgcggaccaaagatgaacctgctaccaatcaagttcctgcccaagttattttatttcccgcagcccctccacctgccggggcggtgctcggcgcactctaggcttccctccggcgaccccccgcgggctgcagcaaaatacggggcgcttcggcggggcgggggcgggcggctgccgcggatccggccggctacagccgcagcttggtggcctccgattggccacgacgcgggcggggaggctcggcggaggagggaggcgggggcgagggcggcggcggcggcgggaggaataggagaggggagcgggccgcgcagccaggcagcgcgtggggcgagcgcggggagagcggcggcggctcgcccaggtcgcgcagcggaggccgagcggggtgcgcggtcggcgacggagggcggcgcgcgcgagtgagcggcgcagggcgaggaccggcgggcgggtgccggtgcgcgggcagcaggggcggctgcggcagcagctgcgcgggacggagccgcggcgggagagaccgcgccggcccctcgcctcacccccttgcggccgaggccggagaacagtctccaactcgccgggggaccggaaagaggagccgagaagcgcccctcggcccccacgcagcggaggcgcggagtggcgggactgctgctctttgtgggtgcagcacgcacgacccggagcgccctccccgcggcgctgtccccggcgtcttcgtcgcgccgagcggccctggagcggggacccggaggaagcaaaaccacgagcccgaaacctcgcgtggcggagctcttggggagcgccatccgctccacttccacctccacatcctccaccggccaaggtccccgccgctgcatccctcgcggcttccgctgcgctccgggccggagccgagccgcctgcgctgccacagcagccgcctccacacactcgcagacgctcacacgctctccctccctgttcccccgccccctccccagctccttgatctctgggtctgttttattactcctggtgcgagtcccgcggactccgcggcccgctatttgtcatcagctcgctctccattggcggggagcggagagcagcgaagaagggggtggggaggggaggggaagggaagggggtggaaactgcctggagccgtttctccgcgccgctgttggtgctgccgctgcctcctcctcctccgccgccgccgccgccgccgccgcctcctccggctcttcgctcggcccctctccgcctccatgtgccggatagcgggagcgctgcggaccctgctgccgctgctggcggccctgcttcaggtacgcggcggtccccgcgggccgggccacgggcggggtgg
